United States Patent Application Publication US 2005/0228172 A9 - sequence listing, part 76

SEQ ID NO: 335926 - DNA, 544 bp, Homo sapiens
tttggtgtcctacatgggtataaagattttcacatgttcccaaagtgatggtattgtgccaccagggttaaaaaccactgccctagaaagtcyttctctatagcaagattagataatattcagccacaagtgcttctaaatattccatggttttattcttcacctgtttcttagtttgtcatataatatggatttggattaaacccaggacacatttgaataatatattgtcagttcttctttctgtctgtaattcctattttatcttttccttttagttccagcagataattggtctcaaaattaaatttcagatgacttattactacaatggcagagggtcagaaagtaacattccagaagtaaaaagttctagaggtttctggagtcagagtttttggaagaagtaggaagaaattgagtttactgcttcatttgcaaacaatcactaggaaatttttcctttcactaactaaattggttaatgattaatttattcagtttagattgagtcaacaaccatcttaacagtaatcaccagaga

SEQ ID NO: 335927 - DNA, 544 bp, Homo sapiens
tttggtgtcctacatgggtataaagattttcacatgttcccaaagtgatggtattgtgccaccagggttaaaaaccactgccctagaaagtccttctctatagcaagattagataatattcarccacaagtgcttctaaatattccatggttttattcttcacctgtttcttagtttgtcatataatatggatttggattaaacccaggacacatttgaataatatattgtcagttcttctttctgtctgtaattcctattttatcttttccttttagttccagcagataattggtctcaaaattaaatttcagatgacttattactacaatggcagagggtcagaaagtaacattccagaagtaaaaagttctagaggtttctggagtcagagtttttggaagaagtaggaagaaattgagtttactgcttcatttgcaaacaatcactaggaaatttttcctttcactaactaaattggttaatgattaatttattcagtttagattgagtcaacaaccatcttaacagtaatcaccagaga

SEQ ID NO: 335928 - DNA, 544 bp, Homo sapiens
tttggtgtcctacatgggtataaagattttcacatgttcccaaagtgatggtattgtgccaccagggttaaaaaccactgccctagaaagtccttctctatagcaagattagataatattcagccacaagtgcttctaaatattccatggttttattcttcacctgtttcttagtttgtcatataatatggatttggattaaacccaggacacatttgaataatatattgtcagttcttctttctgtctgtaattcctattttatcttttccttttagttccagcagataattggtctcaaaattaaatttcagatgacttattactacaatggcagagggtcagaaagtaacaytccagaagtaaaaagttctagaggtttctggagtcagagtttttggaagaagtaggaagaaattgagtttactgcttcatttgcaaacaatcactaggaaatttttcctttcactaactaaattggttaatgattaatttattcagtttagattgagtcaacaaccatcttaacagtaatcaccagaga

SEQ ID NO: 335929 - DNA, 544 bp, Homo sapiens
tttggtgtcctacatgggtataaagattttcacatgttcccaaagtgatggtattgtgccaccagggttaaaaaccactgccctagaaagtccttctctatagcaagattagataatattcagccacaagtgcttctaaatattccatggttttattcttcacctgtttcttagtttgtcatataatatggatttggattaaacccaggacacatttgaataatatattgtcagttcttctttctgtctgtaattcctattttatcttttccttttagttccagcagataattggtctcaaaattaaatttcagatgacttattactacaatggcagagggtcagaaagtaacattccagaagtaaaaagttctagagrtttctggagtcagagtttttggaagaagtaggaagaaattgagtttactgcttcatttgcaaacaatcactaggaaatttttcctttcactaactaaattggttaatgattaatttattcagtttagattgagtcaacaaccatcttaacagtaatcaccagaga

SEQ ID NO: 335930 - DNA, 404 bp, Homo sapiens
gacacaaaagagtatatactgaatgatttcattcatatgatgttcaagcacaaacagaactaatctatgatgatcaaatcggaataatggttatctgaagatgggtcctgactagaaagggacataaaaaactttctgagtgatggaaatctatatcttgttgtgggcgacagttacataagtgtacacatttgtcaaaatgtatcccaaacacatttaagacttgtacatttcactgctttatgacatatataaaawtatatgtatactgcatacatatattacatgtatttttcattagtgatgctgcttatgtagcatcactaatttaaaaaggtagtaggagtttaaaggaaggagaaattttagggaaagttgtaaagacttaaaaaaggtgataatat

SEQ ID NO: 335931 - DNA, 404 bp, Homo sapiens
gacacaaaagagtatatactgaatgatttcattcatatgatgttcaagcacaaacagaactaatctatgatgatcaaatcggaataatggttatctgaagatgggtcctgactagaaagggacataaaaaactttctgagtgatggaaatctatatcttgttgtgggcgacagttacataagtgtacacatttgtcaaaatgtatcccaaacacatttaagacttgtacatttcactgctttatgacatatataaaattatatgtatactgcatacatatattacatgtatttttcattagtgatgcygcttatgtagcatcactaatttaaaaaggtagtaggagtttaaaggaaggagaaattttagggaaagttgtaaagacttaaaaaaggtgataatat

SEQ ID NO: 335932 - DNA, 404 bp, Homo sapiens
gacacaaaagagtatatactgaatgatttcattcatatgatgttcaagcacaaacagaactaatctatgatgatcaaatcggaataatggttatctgaagatgggtcctgactagaaagggacataaaaaactttctgagtgatggaaatctatatcttgttgtgggcgacagttacataagtgtacacatttgtcaaaatgtatcccaaacacatttaagacttgtacatttcactgctttatgacatatataaaattatatgtatactgcatacatatattacatgtatttttcattagtgatgctgcwtatgtagcatcactaatttaaaaaggtagtaggagtttaaaggaaggagaaattttagggaaagttgtaaagacttaaaaaaggtgataatat

SEQ ID NO: 335933 - DNA, 504 bp, Homo sapiens
gacagtaggaatgtggagaccttagtgggcatcccacttttattatcatcaaactggatctagagcaatcttttacagtcaatgatttagcttcctctttcataaaaggggatactgatgtcttccttagagagttattttgagtatcaagtaaattaattgatgtcaaaatgcattgcaaactaaattactgagtaaaattgaatagtgggtattctgttttataatgatgcagtccttatatrttatggagcttctactttcatcattggatgcattcccaggacatttcaaagacagattaatctttgcaaagattaatttatgattctggaacttgaccttaccctcccctcaaacactgtgggcctattaaaggaagtgtggaaataaatgaagaagaagtagataattgttgaactcataacccaggaagattttctttctcctggattcttatctggtgtctcaattctcttggatatgccagagagaaattataga

SEQ ID NO: 335934 - DNA, 564 bp, Homo sapiens
tctggaaatttaggaattcttcgtgtctgatggattttttaatagagggttgtgcctggcatctcagrattgcgatccgtcctgaatgacaacaacaaaaacatcatttgttcctttgactcaatggctggcttgacgtgattcattcttttgtaaggaaacatatgatcaagccaccttctaatacacatctttcaggagtttggatgctgtttaaagtgagcatggtggctcatgtctaaagtcccaacactttgtgaggccaacaagggaggatcatttgaccccaggaatttaaggttatagtgagctatgattgtgccactgcactgtagcctgggtgtcagtatgagactttgtctctaaaattaaataagtaaataaaaaataaaggggacatgtcttcaaattttcttcttcctaattgcaacatctccccatgcatttctaccaaccactcttttaaaaaatggggcaaaaatttagaatgcctcaaatcatctggagtattctcatgccatgaccacgaagttaaaggctatttccataataaagagggaagac

SEQ ID NO: 335935 - DNA, 564 bp, Homo sapiens
tctggaaatttaggaattcttcgtgtctgatggattttttaatagagggttgtgcctggcatctcaggattgcgatccgtcctgaatgacaacaacaaaaacatcatttgttcctttgactcaatggctggcttgacgtgattcattcttttgtaaggaaacatatgatcaagccaccttctaatacacatctttcaggagtttggatgctgtttaaagtgagcatggtggctcatgtctaaagtyccaacactttgtgaggccaacaagggaggatcatttgaccccaggaatttaaggttatagtgagctatgattgtgccactgcactgtagcctgggtgtcagtatgagactttgtctctaaaattaaataagtaaataaaaaataaaggggacatgtcttcaaattttcttcttcctaattgcaacatctccccatgcatttctaccaaccactcttttaaaaaatggggcaaaaatttagaatgcctcaaatcatctggagtattctcatgccatgaccacgaagttaaaggctatttccataataaagagggaagac

SEQ ID NO: 335936 - DNA, 653 bp, Homo sapiens
aaataacacggacacgggtttcagtctgccctcatggactctggtttgtccatgctctctttcactttacatccctcttctaaacttcactggctgacttgtgggcttcaagttccagtgtgagacaccgaggcagccttacacatactgtttaaccagttcctgcaaccacctacaggttctgcctcccttactgaaccctrgctaagccttctttgggatttcagctccatccctgcttgaaaatatgtcaattccaccgtattctctatgccacagtgtcacatgcctctcgcctctcctttatggcacttaacacagttgcaattttctatttgtgggattatataaagaacagctgtctcccccatctgaccacagcttcttgaaatgagggccatgtctatttcactcatcattgtagccttcccacatgataatgcatctaactgatatctgtaaaatgtttgaacactgaaagcagatttgttcacagccaaggcagtctgttgcattttgaaagaaaaggcatcacaacatagagacaatatgaagggaaggctcaggagtggagttttgcttgcctttttatcccatgtgcctaccaaagagtgggtgcttaatgcaaaagtttgttgaatgactgaacaaac

SEQ ID NO: 335937 - DNA, 634 bp, Homo sapiens
acttgcgctgttgttttattcataaggctatatcaattctgttcactctgtctcagagttttctgtttcatttatttaccttccgtactgcattttgcttcctttccttgcaggaattctttgtattttcttgtttctttgtttgctaacaatatttttgttgattctgtcgatcttttgctttatggcttctgggttattgttttacttagaaagttcttctgattccaatgcttttccaaatttgtgttatatttatgggatttttctctttacttttagctgttttatctagctgtagtttcccttttctgcaagacatgaagtatgggttgaaatttttctctcttccataatggatatctagcacacccaacattatgcgtgaaaataagaaaaacatcttatcctcatgatttgcwaagacacttttattataaaccaaactttctcatatgcatgagtctgtttctataccatatattctgtcccgttaacctatttatgcctagtgtttcattattggaacgttaagcttgtggcagttatttatatcctactgctcaaggtcattgccaaggtctgatttttcacacacacacaaagaattgcaacctccagcataaatgggtaa

SEQ ID NO: 335938 - DNA, 597 bp, Homo sapiens
gcatgacatatgtacgttagggctggaattttgaatgcatagactaaatcctatctagcagtttgagaacagctatggagggaaatctcttattgataaaataaaccaaacactttcactatttatatgtttactatctaagtaaaaccttattaatctggtagccactgaccccaaattcatgtccattgagactaagtgagacaagtagaatttaacttaactcatgaaaagtgtttcccaggaaaactcgaagggtaaatatgttgggagatagtttttactgtctttacataacataaatatgttaaaaaaaaaaagacttggaaacactatatattcatgttgctgataattatatgttcatattatctgctcattaaagcagctcattagtttactctgcaaaagtaattggttcaagttactctgcagagttgaaagaaatgaaatcctgcttctttaaagataagcaatggatctttcactgaatctaattggtcctctttacaaactaattcaaattcatgcagttttactgaakctgtttccaagaattctttccttggtgcccaaatcactttttctcctctaaaa

SEQ ID NO: 335939 - DNA, 597 bp, Homo sapiens
gcatgacatatgtacgttagggctggaattttgaatgcatagactaaatcctatctagcagtttgagaacagctatggagggaaatctcttattgataaaataaaccaaacactttcactatttatatgtttactatctaagtaaaaccttattaatctggtagccactgaccccaaattcatgtccattgagactaagtgagacaagtagaatttaacttaactcatgaaaagtgtttcccaggaaaactcgaagggtaaatatgttgggagatagtttttactgtctttacataacataaatatgttaaaaaaaaaaagacttggaaacactatatattcatgttgctgataattatatgttcatattatctgctcattaaagcagctcattagtttactctgcaaaagtaattggttcaagttactctgcagagttgaaagaaatgaaatcctgcttctttaaagataagcaatggatctttcactgaatctaattggtcctctttacaaactaattcaaattcatgcagttttactgaagctgtttycaagaattctttccttggtgcccaaatcactttttctcctctaaaa

SEQ ID NO: 335940 - DNA, 631 bp, Homo sapiens
cttgggaatctatttgtcagaagtacccagctatgaatgggatggctatatccagaacttaattctgtctggtgtcacttaattctgtctggtgtcacttgttttatttttccttctttaaaggagtggttgtcaaagtaggtttctaatgttggctggttttactttaaatttaccactcactccaagtgggcttctgatgtcactccatgatcatactatatttctagccctgcatgcttttattctctaggtgatgatttcatccatcatccactgtcccctctcctcaaaagctcaacatctccttccctggccttcatttactccatttatatctcatagaacagaagtttctccaccagcttctaaccccacattcacccacctacccatacctgtgcctgctctgttttttcctcctgctaatgtggaggaaaggctcatcttctgttccacgagctctkcaagtttcacttgtggtctagagctcctctactctgccctgttcaagaatatcgttccagcaatctccaagcccaccctgcagcaacatttgtccctctctactggatatccctatctatatactaatgtgctgttatttctcccagcattgaatttcatttat

SEQ ID NO: 335941 - DNA, 552 bp, Homo sapiens
cctactagaccttgaattagttctctactcttggraataccattctgcatatacgaaacttcttactttatacaatcaatttggtttcagtacttacaaaaatgaacacatttttaaaaaacatattatgatgtgcattttcacttaccttttccgctgattgagcggtgccaaaaaaaattggaatgaaggcaagccatactatacatgtcgtgtacatagtgaatccaatgggcttggcttcgttaaaattctcgggtacaccccgagtcttgatggcatacacagtacatgtgaccatgagaagaatgctatatcccaaggagcaaatgatttggagatctgtaatgtcacacttgagaacccctctggcttgctcagggttcattgtcttgtgttcatcatagtctatgatgatgttgggtggatcaacaccaaaccaaatgaacacccctagaagctgaactgatattaaactggaagtgattgccagttgtgatgttgggcttatgagtctgggagctgttactgatttcttgccctgctcaaata

SEQ ID NO: 335942 - DNA, 552 bp, Homo sapiens
cctactagaccttgaattagttctctactcttggaaataccattctgcatatacgaaacttcttactttatacaatcaatttggtttcagtacttacaawaatgaacacatttttaaaaaacatattatgatgtgcattttcacttaccttttccgctgattgagcggtgccaaaaaaaattggaatgaaggcaagccatactatacatgtcgtgtacatagtgaatccaatgggcttggcttcgttaaaattctcgggtacaccccgagtcttgatggcatacacagtacatgtgaccatgagaagaatgctatatcccaaggagcaaatgatttggagatctgtaatgtcacacttgagaacccctctggcttgctcagggttcattgtcttgtgttcatcatagtctatgatgatgttgggtggatcaacaccaaaccaaatgaacacccctagaagctgaactgatattaaactggaagtgattgccagttgtgatgttgggcttatgagtctgggagctgttactgatttcttgccctgctcaaata

SEQ ID NO: 335943 - DNA, 552 bp, Homo sapiens
cctactagaccttgaattagttctctactcttggaaataccattctgcatatacgaaacttcttactttatacaatcaatttggtttcagtacttacaaaaatgaacacatttttaaaaaacatattatgatgtgcattttcacttaccttttccgctgattgagcggtgccaaaaaaaattggaatgaaggcaagccatactatacatgtcgtgtacatagtgaatccaatgggcttggcttcgttaaaattctcgggtacaccccgagtcttgatggcatacacagtacatgtgaccatgagaagaatgctatatcccaaggagcaaatgatttggagatctgtaatgtcacacttgagaacycctctggcttgctcagggttcattgtcttgtgttcatcatagtctatgatgatgttgggtggatcaacaccaaaccaaatgaacacccctagaagctgaactgatattaaactggaagtgattgccagttgtgatgttgggcttatgagtctgggagctgttactgatttcttgccctgctcaaata

SEQ ID NO: 335944 - DNA, 552 bp, Homo sapiens
cctactagaccttgaattagttctctactcttggaaataccattctgcatatacgaaacttcttactttatacaatcaatttggtttcagtacttacaaaaatgaacacatttttaaaaaacatattatgatgtgcattttcacttaccttttccgctgattgagcggtgccaaaaaaaattggaatgaaggcaagccatactatacatgtcgtgtacatagtgaatccaatgggcttggcttcgttaaaattctcgggtacaccccgagtcttgatggcatacacagtacatgtgaccatgagaagaatgctatatcccaaggagcaaatgatttggagatctgtaatgtcacacttgagaacccctctggcttgctcagggttcattgtcttgtgttcatcrtagtctatgatgatgttgggtggatcaacaccaaaccaaatgaacacccctagaagctgaactgatattaaactggaagtgattgccagttgtgatgttgggcttatgagtctgggagctgttactgatttcttgccctgctcaaata

SEQ ID NO: 335945 - DNA, 573 bp, Homo sapiens
gatccccaacattgccaggaagacaggaatcacagcccagggggagtgccactccagtttgatgatgggaatatcctggcatccggttcgattttcattgggcctctggtcataggggcaatgctggcatgtcatctcatcaaactggtactggtaaccatcgcaaggctcacaggtccaacagcaaggagttcctttctgtgtcttctttctctgtcctggcttacatggtagtgtgcacactgaggcgggtatctctcggactcctttaccccactgcatgtcttctatctgtaacataagaaataagaaggtgaatcaggcagattcttcaagagaatagaaaaagaacaccagcagcaaacagtactcatggcaagtgacatatgaggcatgaggttgaatagtttaccctcagcttgcaagagttacaagtatgatttgagcccataccatargattccagcatcctcactcttcaccattagagtgttctcaacgtgccagatcttaagaattccctgaggcaatacaaattccctcttcccattcctgacattctaaatatgaata

SEQ ID NO: 335946 - DNA, 527 bp, Homo sapiens
agagaagaatgtatttgcttaattgaaacattggttttctggaggggaacatacccagcagtgttctgagaaataatggcattagaaacaacgggaaactttactgttgggtggaaatctccttagagtaggcatctctcctctttgccagcacagcatctgctctttcttttctcttccccggtatcagttcctcagatttcttttctatatgctttctgtgcggttgaacttacactgaagctcttgggttgtgcacatgaccyaggcctaaccaattagtatattgtagtggttctcaaaattgagagtgcatcaccatcatatggacttgttacaatagagtttgcaagattttctgattcattggatctgaggtgtgccctgagaatatgcatttttaacacgatcccaggtgatgctgctgaggattgttcaggaaccatgttagtcaactactgataacattccaacctcctagccacagatattgggtcagagatggcatcattatgtcccaggtcata

SEQ ID NO: 335947 - DNA, 601 bp, Homo sapiens
tcttcattagaagatgcaagtttacatttctccataaagatgcattttccttctggacatccaaggtttatggttttggggtacctggtcttagtaggtagctcctggggaagggctgagatcctagcttttggcaagagaacagaactttacatctccatctcatagcaaaaactgacactctacatggcaaatagactgcatagataaatggatcagtagtttagggaaagagcaaattatgcagttctggtcaaagaaagcaaaaataagcttgttgtagagtcctaggaaagtgtttttcattcttatacaagaggaacaaagaacgaatatgccattgttaacttaaaaaaagaaactcagacagacaggctgtctggaacaaaagatttcatttggsaagagcaaagggttgtaacccggggtgtacagcacacccaaggaaaattaagacaaaggaaagacacccacacaaatcgctttgaaagaaagctcactggtctcagaaactcactgcaggagttgccattagttcactgggggagatagtcattggtaggcaactgtcctgatctgaggttcttatctgaaatactgc

SEQ ID NO: 335948 - DNA, 647 bp, Homo sapiens
tagcgttttgacacgtgactctattttgtacttctcacttccacactgccttcagcctttgaactttgatttgtgcatacatgatggttagagctatagtagccatttttcaacaagaaaaagacaaggcacctgggcacagtggctcacgcctgtaatcccagcactttgggaggctgaggcaggtggatcacgaggtcaggaattcaagaccagcctggccaacatagtgaaaccctgcctctactaacactacaaaaattagccaggcatgggggtgggcacctgtaatcccagctagtcaggaggctgaggcaggagaattgcttgaacccgggaggcggagattgcagtgagccattattgtgcmtctgcactccagcctgggcaacacagcaaaactccatctcaaaaaaaaaaaaaaaagcaagcctaagacacaaagctcacaagctgaggatggcaaaaaaataataaaaataaaataaaaataaagaagacaaaaagacagattaaaaagaatttacatctttgaaggcaaaattatgtcaccaaattaactaacactaataaaactctaccctggaattttgagcgtgaaatgataaactgtctttaatggctaaccaattctccatggccatcta

SEQ ID NO: 335949 - DNA, 508 bp, Homo sapiens
aaaaccaaatatgactctatatttgagagtattttagaggggtaatagtcaattaaaactagtattttttttttctttttaaaaaaatataagggggaaagtgaactattacttcacttgggttttagctttttttcctggcacatcgtgtccatgcctttgttcatgcacctcctgctgactggcatactgtttctccagctcaagttagcaagactgagccaaatacttcctcctggtgaatagctggcaagaaaaactaaaaagtcaacctctgtcttacagggcaatgggttaatgcttcctacaaaaagcctaaatcaaaagcgttgtattcaagcatgtgctatccaatgatgaattggagaatcagttctttaacagataacctgaggaaacaactcaagcagttggartttcaaactcagttgcgagttcaggggatgtggcagtgacatatttgggtaagaggctttctggtatctttcatgtcacttcgatgtaagtc

SEQ ID NO: 335950 - DNA, 542 bp, Homo sapiens
cttgggccacatatcttgttgatgccctcagtgcaaggccccttggtaattactcatttcaatgaaaaaaaaaaaaaaaagcgactgttaatatatgtgtgttgttgaaatgcactctccaatctttcttgccaacctgcatatttctgtaataagccatttattcagagctcaataattttctgatgtttgattaaacaaaatcaasaccaaaataattctattagggttaattgacatcttctcacaggaaaattagccactttgctggttatgcttttaataacaagcttcccagatttcaatggccatatttgaacacaattcttgagaactgctttgaagattgaatataaccttacagattgcttttaacaaaacagttaccatgtcaacagttcaaacaattatttagccttatggatagcactacaatattcacaagacttagcagctaggatttaactattaaggccttataattagtttcttaatctagagcttgaaaatgataagagtttaatgcctagactatgtcaata

SEQ ID NO: 335951 - DNA, 567 bp, Homo sapiens
aataatgaaccattattatttattattttgttcccttccctcacactgggataaatttgctacacttgcagaattctcctacagcctagaagcactacatcaaatctacaggcccgtcttttcttttcctttttgaatactaggttagtgttttacttggaaaacttcttcagaactaaaaacttagccatagcattttatttcaccgtagtatatcaaaaaaggatttgcttttcaataataattattgaacatccactctatgccaggtattaaatatatactatctctaatcctcattaaaaactacataaggtaagaattatycccctgaacttggaatgagcaaacccaggctcaagcattaaatgtaaatttaaaagatgcatccaagtcatacatcttataagatttcaagagatacattgtcatatatcatggaaaattagcttcctttacatccttgcaaacaagttatccaaaagcaaatgcttttaccagttttctatacatgttttaatgcatttatgacaacatcttcactaattgcattgcttatgttaattt

SEQ ID NO: 335952 - DNA, 633 bp, Homo sapiens
ttcttagcttccttacattgggttagaacatgctcctttagctcagaggagtttgttattactcaccttctgaagcctacttctgtcaattcatcaaactcattctccatccagttttgttcccttgctggtgaggagttgtgatcctttggagaagaagaggaattctggttttgggggtttttcagcatttttgtgctggtttttccacatctttgtggatttatctacctttggtttttgatgttggtgacctttggatggggtttttgcatgggtgtcctttttgttgatactgatgtyattgctttctgtttgttagttctccttctaacaggcctctcttctgcaggtctgctggagtttgccggaggtccacttcagaccctgtttgcctagatatcaccagcggaggctacagaacagcaaagattgctgcctgctccttcctctggaagcttcgtccagagagacacccaccagatgccagctggagctctcctgtatgaggtgtctgttgacccctgctgggaggtgtctcccagtcaggaagcatggggaggcagtctgtcccttagcagagctggagtgctgtgctgggagatctgctggtctgttcagagctggcaggca

SEQ ID NO: 335953 - DNA, 633 bp, Homo sapiens
ttcttagcttccttacattgggttagaacatgctcctttagctcagaggagtttgttattactcaccttctgaagcctacttctgtcaattcatcaaactcattctccatccagttttgttcccttgctggtgaggagttgtgatcctttggagaagaagaggaattctggttttgggggtttttcagcatttttgtgctggtttttccacatctttgtggatttatctacctttggtttttgatgttggtgacctttggatggggtttttgcatgggtgtcctttttgttgatactgatgttattgctttctgtttgttagttctccttctaacaggcctctcttctgcaggtctgctggagtttgccggaggtccacttcagaccctgtttgcctagatatcaccagcggaggctacagaacagcaaagattgctgcctgctccttcctctggaagcttcgtccagagagrcacccaccagatgccagctggagctctcctgtatgaggtgtctgttgacccctgctgggaggtgtctcccagtcaggaagcatggggaggcagtctgtcccttagcagagctggagtgctgtgctgggagatctgctggtctgttcagagctggcaggca

SEQ ID NO: 335954 - DNA, 514 bp, Homo sapiens
gaaggttctatgttttcttgtacagttggacgctgtattactttctcctctgacttcagaatggcaaatagagccaggaaaagctggaataaaagttgagaaaatatacccttcataatggcaatccatctggaaggtcatgaattgaaaaatagttcctgagcgtctattctatgcccaccattaggttaggcacaaaaggagatgccagcgaagacacagttctcactctgaaggagactatggtcgttactgtaaatagctgccaaattgtctactgcaatatctgcaaggattgtaagaatttaaaggaaaggaagatctctgaagtttggagggatctaggaagaattcttagaggtgagggtttgaasttggccttaaagaattggcaggatttaacactactagttaattgtaaaaatatatttttatgtatgtaatgtaatgtattcttattagacacaatgtgaatatctatgtagcctattcaatctttcagcaatcctgtaga

SEQ ID NO: 335955 - DNA, 473 bp, Homo sapiens
cttgccccaagcaccaggcactgtgcttgttcttgggatacaaagatgaatgatgtgaggcctgccctccagaagctatgacaatactaatcatgacagtattccatccttagtctcaacagttrtggtttccctcttcactcccactgccatcctcccaggcctgtttccatcatctcatacatgagtcactgaaaaatcttcaggggtcacctttccatcctttacattgaatactgtgctactgttatctcttcccatattggtcacgttattcttcggctcaagaaccaccacagatcttcctactacatactggataaaatctgaatactttagccttgtgttcaagaccctgcttaatagagcgtttcccaacacatccacataaacagcctcaccttctttccataccaacctcctgcttcactgaggggactcttttattgtcctacccgaataatgctgttacc

SEQ ID NO: 335956 - DNA, 662 bp, Homo sapiens
  misc_feature (1)...(662): n = A,T,C or G
gtgttctcacatggtggaagaggctaagtagtcctctagggtatcttttataagggctctaaaatcccattcatgagggctctatcctcatgacctaatcacctcccaaaggttcttatttcctattaccattgtatttatgattaggtttcaacatacgattttaagggggacacaaacatttaggccacagaagttctcactaatgttctcaaaaacaacttttgtcagttattattcccctttcctgattctggacccactntgctagatgctgccatttcctcctggcactgcccacctcccctgaaaactgctgctctaaacaggcattgctgcctaaagttggaacgttgctgcttccttcaggttctcctgctgactctgatcagcattgccctccttttctgggctctaccccccttgccactgtcgttgctctggagatctggatgtgccagagccacaagttgtcttttggcacagacgtagaaaatgcctcagtcacttgccatgttgttatcttctcttaggataataccaaagcaatgtggcttttattccaaagtctttctggttgaactaattgcataaactgccagcmaagtcaaccatacctcaggagtctggatgcagggtaaatttgggtaaataatcacacc

SEQ ID NO: 335957 - DNA, 570 bp, Homo sapiens
gcccttcctcaccccaccaccccacctaccaccacattgaaatcttttcctcctgtccttaagccttcaagatgatcttgccagaacctggtctttgcttgctgagggcataaaggaatagccctgggccaacatttagagaaaggcattatagggatgaagtgccagagcttggaggagatgggtctatgacagtgagagggacttataggaaatcaggacagcaatctggtccagacagctggctaaggtgaaaagcacagccaggatgcagtgtgaaatacatacacattcctcaaggattgctagaaaagcctgargagtggaatcagggaagactggacttactgaattatggaagaacggaggctcagactaagactagttgggcatcaaaggaaaatgagacccctgaggactggagaagtcaggactcctaaattaccataatgttttccagctaagtagaagagaaagaaaatgaaacaagaattggatgagagttcatttgcaaaacgtatctccagagttgccacggaaggcaggtgactctgcacctactggtgctgg

SEQ ID NO: 335958 - DNA, 626 bp, Homo sapiens
gtcctttcccaagctgaggaaggcaatttaattgttcataactttattgacttgacgaggcaaaccagctttgccaaagacaatactttcgtgggccagaggagattagcatcactaggagtgagctctgcctttttaccccagacctttcttttcgcttgggtgacatcctgccccatgtaataaggctctcctgcttctctctgcttggcacatattccatccagcaatatcatcytccctcctgacttgggacttatggtattattttggcagtgtgacatttaaaatcactaaaaataaaaattaataactaaaattatacaactgtctctgggcacagtttattggttcacaccaagatgtattttcttggaaactttaattttaacttttaattctctgaaagggatcttcggaaaaatttggaagtctacagaattatcaaaagatgtatcttatcaaaagatgtatctcttcaaacaaagatcactgaatatactgatagttcttgaccctccatctccattctctcagctccattttcctagctcaggggtccatatggcactaatcaggcactccacttgctttgtaaataaagctttattgcaacacagctattc

SEQ ID NO: 335959 - DNA, 560 bp, Homo sapiens
tggcctgatgctgtccccatgctgtgagcctccctcaaactctggattatagaaaatgggtgtttgaggatttgaaataaatcgaggctgtcttccggaaaccttctattatacaggcttttataatagaatcttctctgggaagtcctgtcaagatttttgtccagaaagtttattaagacttcgtagcaggttttatatcctcacagatatgattttacccacaaataaatacatctccattcatttaggataatctggctcacaagyggccaatggtgaaaattaaatgcctaagaaatgatccgcaatggcaattataactggaaagaaaaccagaccttccagttatccacgcaatgcagtgcctgtgtgatctgactggcaagccagataaaccaccagaagctttttggatgagctgatcttggtgcaggagattaagttgtgggatttgatagtttagtttgctcagaggaggggttgagaagagtgacttgaatgttggccttgagtctctctcaataaggaattaaccaaccagattctagcttgtgaag

SEQ ID NO: 335960 - DNA, 593 bp, Homo sapiens
ttgagtgctaaaattctatgctttaaacatttggctggttttcacttctgggtgtgatgggtgtgatggactaaaaccctatgaaatgattgcttcatgcagaaaacacttacacaacttggtcataaaaagtgcctacatgaagtcactatgtgaagaatgaacagaagcagacagactttcatagggagtgtacactstcttggagaaagagagatggagtcctatacagttgtcccatctccattgcatttagactacagctaagtgtcacatttgtgaggcacaaaactagtaggatacaagtgggaaaatccgccatctttcaagtgtgaagtacaagaaaagcaaagctgtggagatgaatgctgaggagagtgggagcaggaaagagacagcgaagtcattcttacattctatttactcgtgtctttgaccttaaactacacatgtatggaatagactaagaagtttagccaaaaacaagaaaaatctgaactgagaccaaggctgaaactctgaaggtactgaagagagaacggaagcagacaggccctggtggaaattgtaaactgatgtaggggagagaaggt

SEQ ID NO: 335961 - DNA, 504 bp, Homo sapiens
ggcacaaacaaatggaaaaacattccatgctcattgtaggaagaatcagtatcatgaaaatggccatactgcccaaagtaatttataaattcaatgctatttccattgagctaccattgactttcttcacagaactagaaaaaaactactttaaatttcatatggaaccaaaaaagagcccttatagscaatacaatcctaagcaaaaagaacaaagctggaggcatcatgctacctgacttcaaactatattacaatgctacagtaaccaaaacaacatggtactggtaccaaaacagatatatagaccaatgaaacagaacagaggtctcagaaataacaccacacatctacaaccatctgatctttgacaaacctcacaaaaacaagcaatggagtaaagaattccctatttaataaatggtcttaggaaaactggctagccatatgcagaaaacagaaactggaccccttccttacaccttatacaaaaattaactcaag

SEQ ID NO: 335962 - DNA, 480 bp, Homo sapiens
agagaggaccttaaaaatggacacacacagacacacacacacacacacgtatctgtatatccatggatcatgttcacagactgaaagactyaatatattaagatagcaatcctgcccaaatttaccaagatatttaatgcaatcccaagatacttttttaaaacaaataaattgggatactgatttaaaagtttatatgcaaagataaagaactagaatagcttagttttttgaaaaagaacaaaattggagaacttatactattgaatttcaaaattttctataaagctaaagtaatcaaaaactggtattggcatacaaattgatatgtagatcatggagcaatatagagtctgaaaatagatgcatacttatatggcaaattgattttcaacagatgtgccaagctattttgaacacttaaattattatatgtattaagctagagtaggttagaatgcagtaacaaatgaactgcca

SEQ ID NO: 335963 - DNA, 571 bp, Homo sapiens
cgctctgttgttcaggcaatctcagctcactgcaacattcgcctccccggttccagtgattctcatacctcagcctcccgagtagctaggattacaggtgtgggccactacacccggctaattttttgtatttttgttatgtgggctaggctggtctcaaactcctggcctcaagtgatcwgcctgccttggcttcccaaagtgctgggattacaggagtgaaccactgggcctggccctctttttttataattatttttcttttttactatatttgctttaacaaactacacatatagagacagtagatagtagataaattcatattaatgcataatttctgaagattttgctttgtatttttcaactgcagttggcgttcatttagtactgaattttagatatgtatgatcttggtagtgttctagattagatacagtaactataaataaagcttaactgagactataattaagatatttagttaatatttagagttaattatatccacttaagattttcacattcccccagttaatatgttatatatagctaaaaatacaaaacactc

SEQ ID NO: 335964 - DNA, 571 bp, Homo sapiens
cgctctgttgttcaggcaatctcagctcactgcaacattcgcctccccggttccagtgattctcatacctcagcctcccgagtagctaggattacaggtgtgggccactacacccggctaattttttgtatttttgttatgtgggctaggctggtctcaaactcctggcctcaagtgatctgcctgccttggcttcccaaagtgctgggattacaggagtgaaccactgggcctggccctctttttttataattatttttcttttttactatatttgctttaacaaactacacatatagagacagtagatagtagataaattcatattaatgcataatttctgaagattttgctttgtatttttcaactgcagttggcrttcatttagtactgaattttagatatgtatgatcttggtagtgttctagattagatacagtaactataaataaagcttaactgagactataattaagatatttagttaatatttagagttaattatatccacttaagattttcacattcccccagttaatatgttatatatagctaaaaatacaaaacactc

SEQ ID NO: 335965 - DNA, 571 bp, Homo sapiens
cgctctgttgttcaggcaatctcagctcactgcaacattcgcctccccggttccagtgattctcatacctcagcctcccgagtagctaggattacaggtgtgggccactacacccggctaattttttgtatttttgttatgtgggctaggctggtctcaaactcctggcctcaagtgatctgcctgccttggcttcccaaagtgctgggattacaggagtgaaccactgggcctggccctctttttttataattatttttcttttttactatatttgctttaacaaactacacatatagagacagtagatagtagataaattcatattaatgcataatttctgaagattttgctttgtatttttcaactgcagttggcgttcatttagtactgaattttagatatgtatgatcttggtagtgttctagattagatacagtaactataaataaagyttaactgagactataattaagatatttagttaatatttagagttaattatatccacttaagattttcacattcccccagttaatatgttatatatagctaaaaatacaaaacactc

SEQ ID NO: 335966 - DNA, 581 bp, Homo sapiens
tataattaagatatttagttaatatttagagttaattatatccacttaagattttcacattcccccagttaatatgttatatatagctaaaaatacaaaacactcatttgaacttgtacttcactgccagatccagcagcaacaataaaaaataaattatatgagctacctgggaaagggatttggctgaggttgagttgaaaaggtaaagctctaggtattaattttcaccstgagtgaatacttgactgatggttggcatgcaggacatctgtatgagtaaagcttttgaacaaagaatttcatttggttaggttgagatggtcacggttttggtgttgcctcttttttttttttttttttttttttgagccaatggtacccaggagaaaaaagcacagtagttaaaaggaatggaggttttaagtcgtcactttcaagtgtggactattccattctgatccaaggtgtacctctctttcatcttggggtaaatcccagtgaattgaaaagaaagacagccacatcagatctaggccaggctccctcaagaagcagtcattcaaagctcactttcaggt

SEQ ID NO: 335967 - DNA, 569 bp, Homo sapiens
ctttcaggtccaaggttgtgactttcctggcttttgccctgtagtgttgcctttctgtgtcttgcaaaatggcttaccacagagtacatttatcacataagagagacaaattgcagagccagggaagtgaatttcattaagctgaaaagctttctctatattatgactttgactactggtttacagtaactcatccacctaaaataatttgagactcagaattcacccatggaacggctttacttatttccttatatactcccccaactcaatttcttaccctactttctgacacattttgaatcacctctgtcaactgtatcaccaaatttcttagcgagtagatatttaaataattctattttagtagctctcagaatacacctgaagtggatgatraggtagaacctcgtggccatacagggcaccaaatgcatgagaaatgtgaggaaagttgtcccagggtcaaatcctggccagaggtgaaaatgtgcttagcttatacaaagaatagtaccaatttatcatcctttgatgggtgtcatgggaataaacatgagtgagtttgt

SEQ ID NO: 335968 - DNA, 595 bp, Homo sapiens
aagtaatataaattgatccacagtttataaagttttccattgaaaaggtgaaggtaataaaaactaacttcgactttttgatgatttttttttctgatgagttttaagtgcttggaaggaatagtatgcagccacttcaagaaatcatattttaaaaagtggatccctctccagtaaggagggactctgaagtttaggaatatctgtagcccatggttcatggtaaatagttcaaaarcacttggagacaaggaaaggagaagagacttggagctccaaatctgagggatcctagcctagccagtagaaactgtagatgtctggggacagttaatgcttaaagtacataacaaggtgtggcaactgtattagtccattttcacactgctgtgaagaaatacctgagactgggtaattcacgaagaaaagaggtttaattgactcacagttctgcatggctggggagacctcaggaaacttaacaatcatagcagaagatacttcttcacagggcagcaggagagagaatgagtgcaaacaggggaaacgccagacacatataaaaccatcagatctcatgagaacacactatcac

SEQ ID NO: 335969 - DNA, 595 bp, Homo sapiens
aagtaatataaattgatccacagtttataaagttttccattgaaaaggtgaaggtaataaaaactaacttcgactttttgatgatttttttttctgatgagttttaagtgcttggaaggaatagtatgcagccacttcaagaaatcatattttaaaaagtggatccctctccagtaaggagggactctgaagtttaggaatatctgtagcccatggttcatggtaaatagttcaaaagcacttggagacaaggaaaggagaagagacttggagctccaaatctgagggatcctagcctagccagtagaaactgtagatgtctggggacagttaatgcttaaagtacataacaaggtgtggcaactgtattagtccattttcacactgctgtgaagaaatacctgagactgkgtaattcacgaagaaaagaggtttaattgactcacagttctgcatggctggggagacctcaggaaacttaacaatcatagcagaagatacttcttcacagggcagcaggagagagaatgagtgcaaacaggggaaacgccagacacatataaaaccatcagatctcatgagaacacactatcac

SEQ ID NO: 335970 - DNA, 481 bp, Homo sapiens
cctggcagaatatttagggttttcaaagtttagaatcagtaaagagagatattttgacttcctctttttctatttggatgacttgtatttctttctcttgcctgattgcaatggctaggacttctagtactaggttgaatgggagtggtaagagtggacatccttgtcttgttccatttcttagggggagtgcttccaacttttgcctgttcagtataatgttggctgtggatttgtcatagatggcttttactattttgaggtattgtccctcaatatctagtttgttgtagttttttattataaagggatattagattttatcaaacgcattttctgcatctattgagataattatatggttttgtttttmattctgtttatgtggtgaattgcacttatttatttgcgtatgttaaaccatctttccatctgatgactaaagcctactcaatagtggtgaattgacttttttatgggc

SEQ ID NO: 335971 - DNA, 602 bp, Homo sapiens
cacagagcataaacaaattcacattctagttctcaactttttctgcatgggggaagcttatgtgggggatatgtgtgtgtttgtgtgtgtacttttgggtgggaaggactgattaacatgtaaatatccatgcaaatcagagtagtccctcttgagtatttatctacttataaaattgtcccaacttgtttgaagttgtagtgttctctgcagtgtatgtatagctaaacagtctagcaaatggcctgctgacttcagaaccattgtgttgcacaattctagtggcakgtttacattacattctgtatgaattgtgtttcttgcaattgtgtggtggctctgcccatcttgattcctctagaagatttaatcctcatttttcaaaggcagggcttctttgtcttactagaagtgcctccaatgtctctcttgctcactaggtttttagttacaaccgtgctctagcagtgattaactctttcctaatgtctactcttgtgttttgctgtgtcctaaaacagggtgttggtccattcactctgtttcctgttagcatctatgtagatgttatatttgagctggggtttcactcttgttgccca

SEQ ID NO: 335972 - DNA, 440 bp, Homo sapiens
gacttcctgctgatggccattttaaggctacayggcatataggtaatgttgaagttactaaagaaagcaaatgaaatacacacattttcttctttttcaacacctcgcaatcatgactgatccacttgctgtaatactcagcaaatgtttaatggaggaaggaagttagggcaggtgtgattctgacatctaacaaaggagacagagcacccactcctctgggatatgttgcgagcttgtgaggagcaggctaaccatactgaccaggttttctatttccctgttattaatcccttccacaaggaacattttgaccaagtaggaaagtctaaataggggtctggctctctttgctgatatggtctttaagcagaaaggccatctctctggcataagctggtttgtgatcttgggctcttcagaattgttatctctctacg

SEQ ID NO: 335973 - DNA, 529 bp, Homo sapiens
agagagagagagagagagaatgaatgaatgggttcataatcataacctgaagaaaaagtcaacctcacattagaaactgaagggactactgatatggtcagggctaaaacaastgattccttgattgccaataactattatccaaagcataataagcacaacacatatttataaggatggatatacttttgcaatatttatgtctcgatgtaattaaaaatcagagatcctttattggaagagacctcaggagagcatctggtctagttccagccctgaagcaggtaagggtagagctgtgtattagtccattttcatgctgctgatgaagacatactcgagaatgggtagtttataaagaaaaagaggtttaatggactcacagttccacgtggctgggaggccttacaatcatgacagaaggtgaaaagcatgtcttacatggcagcaggcaagaaagaatgagaaacaagcgaaagggatttccccttataaaaccgtaagatcttgtgagacttattcactacca

SEQ ID NO: 335974 - DNA, 561 bp, Homo sapiens
tcctcaccccaccaccccacctaccaccacattgaaatcttttcctcctgtccttaagccttcaagatgatcttgccagaacctggtctttgcttgctgagggcataaaggaatagccctgggccaacatttagagaaaggcattatagggatgaagtgccagagcttggaggagatgggtctatgacagtgagagggacttataggaaatcaggacagcaatctggtccagacagctggctaaggtgaaaagcacagccaggatgcagtgtgaaatacatacacattcctcaaggattgctagaaaagcctgaggagtggaatcagggaagactggacttactgaattatggaagaacggaggctcagactaagactagttgggcattaaaggaaaatgagacscctgaggactggagaagtcaggactcctaaattaccataatgttttccaactaagtagaaaagaaagaaaatgaaacaagaattggatgagagtccatttgcaaaacgtatctccagagttgccacggaaggcaggtgactctgcacctactggtg

SEQ ID NO: 335975 - DNA, 499 bp, Homo sapiens
gaactcaatcaaaagttgaagtatttctcattaggctgctttctttatatttccaattgggtctagaaacaaaacacttgaagagcctattctcagaattctccaaaaacacttttgagtagctgggatatagaactaaaacaagacaaaaatcctggctgtttacaacccacttgctgtgcatactactagccatacatgaaataaatgtttcccatattgcactagaacaaaaaatttcagcatatcacatctaaatcgacatactggaaatatgtaaaagatgcctaaaacctttttttctctaatggtggagaaattgaggaagccttgaaaattccattatgattaccatatgatattggcatttcacgtgactcaacctaacacgagtacactatgcatatgttttgaaatatgcatttatrattacaaatactatcaaattaattgtggcattgaaaccacactagtgtcatcactttccacgaaagtagat

SEQ ID NO: 335976 - DNA, 570 bp, Homo sapiens
acagggtggggaatatcatacaccggggcctgttgggggatagcattaggagaaatacctaatgtaaatgatgagttgatgggggcagcaaaccaacgtggcacatgcatacctatgtatcaaacctgtacattgtacccatttaccctagcacttaaagtataataaaaaaaattaaaaaatatatatatttttaaataatcgaaagaacaaacaaacaaatacagaagatgattgcttgggccaggcaccgtggctcatgcctgtaatcccagcattttgggaggctgaggtgggtgggtaccttgaggtcaggagttcgagaccagcctggccaacatggtgaaaccccatygctactaaaaatacaaaaattacccgggcatggtgggcgcacacctgcaatcccagctatttgggaggctgaggcgggataattgcttgaacccaggaggtggaggtagcagtgagccgagatcacagcactgcactccagcctgggcaacagagtgaaaaatgaaaaaaaaaagatgattgctgaaatgaatttatttaatcaatgtaaagtta

SEQ ID NO: 335977 - DNA, 604 bp, Homo sapiens
agactaagtacacttggaagtgcagcaaatacacagttccactgacaagcatggggttatattttccactgccctatgcctgtatagacctcaatattgcctaaaaccaaaatgcagtcctgaagacaggagaaagaacacatggcagacaagtcaagtaggctcttgcctgacccatggaccactttatccaggctctcttgaactcatctcactgggtttagccagtgaaaggcaccagtgggaggacagagaagttgaggcatttatttcccgctcccttcctgttccatgctgtggttttggtgatgtttctrttcttcagttaatatagatattagtcccacccccacagatctatctctcactgggcttcagtaacactgtttctttcctttttcccttcacgtatagaaaaagtaatgactttccattattgctaatctctgggtgcctcagcttcccttgttggtcaccttaacttgctgactgttaatgcaaatagccctccattaaaatttctttagctgaagctctataattctgcttcttgctgataccctgactgaagcacaagtaattctttttctcaaaaaactaccca

SEQ ID NO: 335978 - DNA, 604 bp, Homo sapiens
agactaagtacacttggaagtgcagcaaatacacagttccactgacaagcatggggttatattttccactgccctatgcctgtatagacctcaatattgcctaaaaccaaaatgcagtcctgaagacaggagaaagaacacatggcagacaagtcaagtaggctcttgcctgacccatggaccactttatccaggctctcttgaactcatctcactgggtttagccagtgaaaggcaccagtgggaggacagagaagttgaggcatttatttcccgctcccttcctgttccatgctgtggttttggtgatgtttctgttcttcagttaatatagatattagtcccacccccacagatctatctctcactgggcttcagtaacactgtttctttcctttttcccttcacgtatagaaaaagtaatgactttccatkattgctaatctctgggtgcctcagcttcccttgttggtcaccttaacttgctgactgttaatgcaaatagccctccattaaaatttctttagctgaagctctataattctgcttcttgctgataccctgactgaagcacaagtaattctttttctcaaaaaactaccca

SEQ ID NO: 335979 - DNA, 526 bp, Homo sapiens
actaggctgatccaaggagcagggaacatcttatctacagacttgaataagtcrgaggcctttcttaaacccaactggcgacttttctgcctctttcttctctgaagctgagtaaagttctgctctagtcagaattccagaatctcaaataaaaatatacaatggaagaaacgcctggaagagaatgagattggataccctatgttaaatcctgccaaaagagaaatactgggttaaattggaccacagcccataaactccttctcctctcttgtacaagatcagacagccctatgatgccctgttcataccatggcatggccaaggctcagacaggtttataggactgatacaggaaattctctctattcttgaaggagcgctttagaagcacagaattattagaacactctcaggcactatccttgtgaagatgtggtccacttaattgcaggagaacacagtctaattacagacctatcagtttttaaagaaacactcacttggaaagattctattttacata

SEQ ID NO: 335980 - DNA, 635 bp, Homo sapiens
attgcaaaccagtggaaaattaccaccaacttgactgcaaagctacaggaaaatcttgaaagacataaagagcagtgggaaattcctaagcacaggagaaacgaggaggactaggctgatccaaggagcagggaacatcttatctacagacttgaataagtcagaggcctttcttaaacccaactggcracttttctgcctctttcttctctgaagctgagtaaagttctgctctagtcagaattccagaatctcaaataaaaatatacaatggaagaaacgcctggaagagaatgagattggataccctatgttaaatcctgccaaaagagaaatactgggttaaattggaccacagcccataaactccttctcctctcttgtacaagatcagacagccctatgatgccctgttcataccatggcatggccaaggctcagacaggtttataggactgatacaggaaattctctctattcttgaaggagcgctttagaagcacagaattattagaacactctcaggcactatccttgtgaagatgtggtccacttaattgcaggagaacacagtctaattacagacctatcagtttttaaagaaacactcacttggaaagattctattttacata

SEQ ID NO: 335981 - DNA, 635 bp, Homo sapiens
attgcaaaccagtggaaaattaccaccaacttgactgcaaagctacaggaaaatcttgaaagacataaagagcagtgggaaattcctaagcacaggagaaacgaggaggactaggctgatccaaggagcagggaacatcttatctacagacttgaataagtcagaggcctttcttaaacccaactggcgacttttctgcctctttcttctctgaagctgagtaaagttctgctctagtcagaattccagaatctcaaataaaaatatacaatggaagaaacgcctggaagagaatgagattggataccctatgttaaatcctgccaaaagagaaatactgggttaaattggaccacagcccataaactccttctcctctcttgtacaagatcagacagccctatgatgccctgttcataccatggcatggccaaggctcagacaggtttataggactgatacaggaaattctctctattcttgaaggarcgctttagaagcacagaattattagaacactctcaggcactatccttgtgaagatgtggtccacttaattgcaggagaacacagtctaattacagacctatcagtttttaaagaaacactcacttggaaagattctattttacata

SEQ ID NO: 335982 - DNA, 519 bp, Homo sapiens
aacctcaactcttgccttgggactttcaccctctgtgaagccacagcccaagctgtaccttggccccttttagccatggctagagctagaacagctgggactcagggtaccatgtcctgaggctgcacagagcagcagggccctgggcctggccaacaaaaccacttttttctcctaggcctctgggcctgtgatgggagaggttgccttgaagatctctgacgtaccctggagacattttccccattgtcttgacaattaacatttagctcctccttacttstgcaaatttctgctgctggcttgaatttctccccagaaaatggatttttcttttctactgcatgatcaggctacaaattttctaaacttttatgctctgcttcccttctaaatgtaagttccactttcagaccatctctttcttcatgcatataagtgtacacttttagaaaaagccaggtcacatcttgaatgctttgctgttcagaaatttcttctgccagataccctaaatca

SEQ ID NO: 335983 - DNA, 552 bp, Homo sapiens
aataaacctgggtttaaatcccagctctgtggcttggataaattatttaacatctccaagcctcagtcttcttatctgtaaaatggagatagtgtctacaggattgctgaaagattgaataggctacatagatattcacattgtgtctaataagaatacattacattacatacataaaaatatatttttacaattaactagtagtgttaaatcctgccaattctttaaggccaasttcaaaccctcacctctaagaattcttcctagatccctccaaacttcagagatcttcctttcctttaaattcttacaatccttgcagatattgcagtagacaatttggcagctatttacagtaacgaccatagtctccttcagagtgagaactgtgtcttcgctggcatctccttttgtgcctaacctaatggtgggcatagaatagacgctcaggaactatttttcaattcatgaccttccagatggattgccattatgaagggtatattttctcaacttttattccagcttttcctggctctatttgccattctg

SEQ ID NO: 335984 - DNA, 570 bp, Homo sapiens
cagctctgttgtaaaatgtgaccctttctttactgccccagctcagtgttcaccatgcaaataagaaccaacgtgggtgctgcttgtacagtaaattaagacaatgtgcaaccccagcctagtaagcagggagtcaccagtgyatcttctcgggacaggaggggacgccccccagggactccaggctggtggcgtctggtgcaggcttttctgctctggcatctgatgcatccagatagagacagattctctgggacctgttgctgtcactttttcttcttggccaggggagatattttcttaggccaattccaccctaagacagatcaccatctgctccattagggcaggaagaagtcagggataggaagcagaaggaaaagtcatgaggctgagcacaagttagaagaggcttctgcagaatttcccagagtgcttcttttgttggtttggtgatgccggcccccactaaagtctattgtaggggtatagaatacatgatttctggcttacacacgaagaaacaacaataacaacaagaagattggagatccacctcaaggcaggtag

SEQ ID NO: 335985 - DNA, 627 bp, Homo sapiens
ctcagttatctgaccgttctctccaccttgcgtgtggtgaaacattaggacatttttactycctgacttttctcttccccaacttgaatgatgcctttgaacatttttactgatgtccctccatcttaacacccaggttttcctgagagagtttggtacatttattctaagctattattagaatttatctttcagtacgtaggtgtcttttatttaagatccttatttcttggattacttgttttcaggtgctgattttcaatatatacgtacttacaggcatatataaaatatctctgaatgcatataggtacatacgtatttggatttgtgtatatttgttgctcaccacttccttttctccgtcatcttttatttgtgtttggattttttttgagagtaaagtatttcttagataggttcataggtgctataatctctggaccatgcatttctacaagtatcatttctggcttctggtgtcagcagcatggcagcagcaggtggtttttaaccctctttcaaggcattaaggtgagaggagtctcagctgacttgctcagcgcttcttcagctccctggaggtcagagagaacaggcacagtcctgtgggctattattgtcttc

SEQ ID NO: 335986 - DNA, 627 bp, Homo sapiens
ctcagttatctgaccgttctctccaccttgcgtgtggtgaaacattaggacatttttacttcctgacttttctcttccccaacttgaatgatgcctttgaacatttttactgatgtccctccatcttaacacccaggttttcctgagagagtttggtacatttattctaagctattattakaatttatctttcagtacgtaggtgtcttttatttaagatccttatttcttggattacttgttttcaggtgctgattttcaatatatacgtacttacaggcatatataaaatatctctgaatgcatataggtacatacgtatttggatttgtgtatatttgttgctcaccacttccttttctccgtcatcttttatttgtgtttggattttttttgagagtaaagtatttcttagataggttcataggtgctataatctctggaccatgcatttctacaagtatcatttctggcttctggtgtcagcagcatggcagcagcaggtggtttttaaccctctttcaaggcattaaggtgagaggagtctcagctgacttgctcagcgcttcttcagctccctggaggtcagagagaacaggcacagtcctgtgggctattattgtcttc

SEQ ID NO: 335987 - DNA, 529 bp, Homo sapiens
gagggagggctagagagtggatattgagagactgaggatacctggcacaagtgtgatctgcttacagaatgtatgacaggttgatgctcaaataacatgttctgtcacataatataagaacccaaaaaatgcatgttggactggcagtttagagcccactggcaactttttgaaaacaagtgtagtagaataatcaggagaggaagccaaattgcaatggactgactcacaaggaagacagtgaatgataaagaccctctcaagaagcctgagatgatagggagaaatctaggatgagctagatctaggagactgcaggatgtagcatattgcaaagatgccctcagttctttaccccttcccgtattcaaagtccttgccatacagctttctagtgtcccccctctctactctgggcttgatcaggcttgatcagtggggtgtcagcagatgytatacaagcaaaggcttgaaataaggccatgctttggagcttgccctgttgcgcttgtgccattgccatgagaac

SEQ ID NO: 335988 - DNA, 494 bp, Homo sapiens
attttcactgttttgttgtttgagtcctttgtattttctggatattagtcccctgtcagatgaagagtttgcaaatgttttctcccattctacaggttgtctcttcactttgttgattgttttcattgaaaaaagagggtaaaattgtgagtattagaagctgggaatggtaggagggagaggagagtggagagaagttggttaacagttacgaaattacrcctagatataagaaatgagttctggtgttttacagcactctagagtgaatatggttaaagtataattccttgtatatattcaaaaagatagaagattttgaatgttgacagtacaaaaaatggtaaatatttgaggtgatggatatgctaattaccctgatttgatcattacatatggtatacatgtatgaaaatagtattctgtagcccacaaatacgtataattattatgtgtcaactaaaaagggaaaacataaatacatttttaaaaag

SEQ ID NO: 335989 - DNA, 578 bp, Homo sapiens
gcctgggcaacacagtgaaacctcatctctacaaaaaaaaaaaaaaaattcgtcaggtgtggaggcttatacctgtagtcccagctactgcagaggctgaggtgggaggatctcttgagcccaggaggttgaggctgcaatgagttgtgattgcaccagtgtactctagcctagacaacagaggaataacctgtctctcaagataaagaaataaattaattaataataataataattctataagtgtaatgaaagaggaaagggaaatcagtaataaggaaggacgtgtatttcaggaccattttaggaatcaggtggcatattgaaggttgatgatggattgagatttagacgttcactagggaaatatataggttaaagcatatgattaaaatatctaaacttgtcaaagtgaggttttccaagcattcagagaaattgtttggctagtttaaatgactrtattatccttaaccaaaggattagctaaataaacattttgaatgggtgcttatcatttatcgagtatttactatgtctcaggcactgttctaagtgctttatatgaattaatagca

SEQ ID NO: 335990 - DNA, 576 bp, Homo sapiens
ttaaaagactttgtttataacagacatcatgagtaaatggcttacataactaactctcaatttgcccaagactgcgggcattcatggatgtaggactttttaatattgaactggccactctggcctgattaattatctgaaataaaacttcctgtgaattttaggagctatttscagtctactgagtattgctttaaagagtactgtccctcacttgctcttttaccataatctgttgctctggtaatatgaattgtctttaaagagaatcatttaaaaataccattgagagattaatgaattaagaatggttggtatttcttcccttatgggaagaaagaaaatatttgacacttatggttcaattcttttttttacaggtatgttgagtcgatgggatgatagccagagatttttgtctgaccatccataccttgtatgtgaagaaactgctaaatatcttattttatggtgttttcacctggaagctgagaaggtattattatgtgaaccttgagtttctgggaaccttagtggaaatctgatttcatactttattgatgttttgttttgttt

SEQ ID NO: 335991 - DNA, 576 bp, Homo sapiens
ttaaaagactttgtttataacagacatcatgagtaaatggcttacataactaactctcaatttgcccaagactgcgggcattcatggatgtaggactttttaatattgaactggccactctggcctgattaattatctgaaataaaacttcctgtgaattttaggagctatttccagtctastgagtattgctttaaagagtactgtccctcacttgctcttttaccataatctgttgctctggtaatatgaattgtctttaaagagaatcatttaaaaataccattgagagattaatgaattaagaatggttggtatttcttcccttatgggaagaaagaaaatatttgacacttatggttcaattcttttttttacaggtatgttgagtcgatgggatgatagccagagatttttgtctgaccatccataccttgtatgtgaagaaactgctaaatatcttattttatggtgttttcacctggaagctgagaaggtattattatgtgaaccttgagtttctgggaaccttagtggaaatctgatttcatactttattgatgttttgttttgttt

SEQ ID NO: 335992 - DNA, 576 bp, Homo sapiens
ttaaaagactttgtttataacagacatcatgagtaaatggcttacataactaactctcaatttgcccaagactgcgggcattcatggatgtaggactttttaatattgaactggccactctggcctgattaattatctgaaataaaacttcctgtgaattttaggagctatttccagtctactgagtattgctttaaagagtaytgtccctcacttgctcttttaccataatctgttgctctggtaatatgaattgtctttaaagagaatcatttaaaaataccattgagagattaatgaattaagaatggttggtatttcttcccttatgggaagaaagaaaatatttgacacttatggttcaattcttttttttacaggtatgttgagtcgatgggatgatagccagagatttttgtctgaccatccataccttgtatgtgaagaaactgctaaatatcttattttatggtgttttcacctggaagctgagaaggtattattatgtgaaccttgagtttctgggaaccttagtggaaatctgatttcatactttattgatgttttgttttgttt

SEQ ID NO: 335993 - DNA, 400 bp, Homo sapiens
ggaagtgatgtcctcagataatcttaatgactattttggcatttataaatagaaatgattatggactttgatctgccatacggaggttcggaacctggagaayggctgtgataagtaggttttgattgagtgaaagcatgagcttgttcagagtgaggggcatagtgaaaaaggaacagccatgcctcaaaatcaaatcatttgcattcccacagcatcctgaataccgactacctcttcacttgctaaagcagctaaactgtgaagctctaagtggtttgggtttgttgtttaaccttagcgagatcctttaactgcagcaatattcaagccagatatttggaagcaaatgatatttcctcttgcagtgtccacaaatctgaatattaggggcatgaaa

SEQ ID NO: 335994 - DNA, 570 bp, Homo sapiens
aatctgataccattcaaaattttaatagagtcacagggtacaaaatctctcactctttgccaggctatcccagggatttttgaagatatgaaggttttactctcagttstatcactggctcagctgtagggccagatgaacaccacctgtcagctccgtgccaagccttctcttctccaaagtagtcaccatcatctttcatcttttgacatcttttttttaattgagacagagtctctctctgttgccaggctgaagtgcagtggcatgatctcggctcactgcaacctccacctcctgtgttcaagcgactctcttgcctcagcctcccaagtagctgggactacaggcatgcgccaccatgcccagctaattttgtattttttgtagagacaggattttaccatgttggccaggatggtcttgatctcttgaccttgtgatctgcctgcctcagcctctcaaagtgctgggattacaggtgtgaaccaccacgccctgcccatctttgacatcttaaccagcgctcctaaccagttcctgacctccaattaagaataggactctacc

SEQ ID NO: 335995 - DNA, 570 bp, Homo sapiens
aatctgataccattcaaaattttaatagagtcacagggtacaaaatctctcactctttgccaggctatcccagggatttttgaagatatgaaggttttactctcagttctatcactggctcagctgtagggccagatgaacaccacctgtcagctccgtgccaagccttctcttctccaaagtagtcaccatcatctttcatcttttgacatcttttttttaattgagacagagtctctctctgttgccaggctgaagtgcagtggcatgatctcggctcactgcaacctccacctcctgtgttcaagcgaytctcttgcctcagcctcccaagtagctgggactacaggcatgcgccaccatgcccagctaattttgtattttttgtagagacaggattttaccatgttggccaggatggtcttgatctcttgaccttgtgatctgcctgcctcagcctctcaaagtgctgggattacaggtgtgaaccaccacgccctgcccatctttgacatcttaaccagcgctcctaaccagttcctgacctccaattaagaataggactctacc

SEQ ID NO: 335996 - DNA, 570 bp, Homo sapiens
aatctgataccattcaaaattttaatagagtcacagggtacaaaatctctcactctttgccaggctatcccagggatttttgaagatatgaaggttttactctcagttctatcactggctcagctgtagggccagatgaacaccacctgtcagctccgtgccaagccttctcttctccaaagtagtcaccatcatctttcatcttttgacatcttttttttaattgagacagagtctctctctgttgccaggctgaagtgcagtggcatgatctcggctcactgcaacctccacctcctgtgttcaagcgactctcttgcctcagcctcccaagtagctgggactacaggcrtgcgccaccatgcccagctaattttgtattttttgtagagacaggattttaccatgttggccaggatggtcttgatctcttgaccttgtgatctgcctgcctcagcctctcaaagtgctgggattacaggtgtgaaccaccacgccctgcccatctttgacatcttaaccagcgctcctaaccagttcctgacctccaattaagaataggactctacc

SEQ ID NO: 335997 - DNA, 570 bp, Homo sapiens
aatctgataccattcaaaattttaatagagtcacagggtacaaaatctctcactctttgccaggctatcccagggatttttgaagatatgaaggttttactctcagttctatcactggctcagctgtagggccagatgaacaccacctgtcagctccgtgccaagccttctcttctccaaagtagtcaccatcatctttcatcttttgacatcttttttttaattgagacagagtctctctctgttgccaggctgaagtgcagtggcatgatctcggctcactgcaacctccacctcctgtgttcaagcgactctcttgcctcagcctcccaagtagctgggactacaggcatgcgccaccatgcccagctaattttgtattttttgtagagacaggattttaccatgttggccaggatggtcttgatctcttgaccttgtgatctgcctgcctcagcctctcaaagtgctgggattacagstgtgaaccaccacgccctgcccatctttgacatcttaaccagcgctcctaaccagttcctgacctccaattaagaataggactctacc

SEQ ID NO: 335998 - DNA, 513 bp, Homo sapiens
gaaggagaaagaaatgtttttccctgacaaacaaaagttgagagagttcattaataccacaaccattctacaagaaatgccaaagggagtacttcaatcaaatagaaaaggatagtaatgagtaatagataatcacctgaaggtataaaacttactggtaatagtaagtacaaagaaaaatacagaatattataactctgtaattgtggcatgtaaactatacttgtcccaagtagaaagactaaacaatgaaccaatcaaaaataacaactcaacaactttttaagacacagtcagtwtaagaagatataaatagaaacaataaaaagttaaaacatgggaggacaaagttaatgcaagttttattagttttctttttcttgtttgtttatgcaaatactattaagttgttatcaggttaaaagtggattataaaatagtatttgcaaacctcatggtagcctcaaaccaaaaaacatacaacaaatacacaaagaataaaaggcaaggaac

SEQ ID NO: 335999 - DNA, 513 bp, Homo sapiens
gaaggagaaagaaatgtttttccctgacaaacaaaagttgagagagttcattaataccacaaccattctacaagaaatgccaaagggagtacttcaatcaaatagaaaaggatagtaatgagtaatagataatcacctgaaggtataaaacttactggtaatagtaagtacaaagaaaaatacagaatattataactctgtaattgtggcatgtaaactatacttgtcccaagtagaaagactaaacaatgaaccaatcaaaaataacaactcaacaactttttaagacacagtcagtttaagaagatataaatagaaacaataaaaagttaaaacatgggaggacaaagttaawgcaagttttattagttttctttttcttgtttgtttatgcaaatactattaagttgttatcaggttaaaagtggattataaaatagtatttgcaaacctcatggtagcctcaaaccaaaaaacatacaacaaatacacaaagaataaaaggcaaggaac

SEQ ID NO: 336000 - DNA, 513 bp, Homo sapiens
gaaggagaaagaaatgtttttccctgacaaacaaaagttgagagagttcattaataccacaaccattctacaagaaatgccaaagggagtacttcaatcaaatagaaaaggatagtaatgagtaatagataatcacctgaaggtataaaacttactggtaatagtaagtacaaagaaaaatacagaatattataactctgtaattgtggcatgtaaactatacttgtcccaagtagaaagactaaacaatgaaccaatcaaaaataacaactcaacaactttttaagacacagtcagtttaagaagatataaatagaaacaataaaaagttaaaacatgggaggacaaagttaatgcaagttttattagttttctttttcttgtttgtttatgcaaatactattaagttgttatcaggttaaaagtggattataaaatagtatttgcaaacctcatggtagcctcaaaycaaaaaacatacaacaaatacacaaagaataaaaggcaaggaac

SEQ ID NO: 336001 - DNA, 509 bp, Homo sapiens
ttatcagagaccttagaacagaacttaaaatttaaaacattcaaaccagcaatccaattactggctacatatccaaaagaaaataaattgttctaccaaaaagacacatgcatttatatgttcatcacagccctagtcacaatagtaaagacatggactcaacctaggttcccatcaacagtggatcagataaagcaatggtccccaacctttttgacaccagggactggttttgcagaagacaatttttccccatatggaggtggggaggggaggtggggaaatggtttcaggatgaaactgttttacctcagatcatcaggcattagattctcataaggaacatgcagcctaggtccttctcacgtgcagttcacaatagggtttgcactactatgagaatctaatgccatggctgatctgacaggaggcagagctcaggtggtaatgctcacctgcccaccactcacctcatgctgtgcrgcccagttcctaacagcccatggact

SEQ ID NO: 336002 - DNA, 587 bp, Homo sapiens
cctgggtgatgggatcattcagacctcaaacctcagcatcacatagtaaacccacgtaacaaatctaaaaccatttttctggaaaaatggaattaaaagataaaaataaaaaatataaactttatttctctataccatcaccatcaaattcatgacatttttttaagtgatgatactagccatttagccatccctaaaggactgagggtcctggtaagttaaccatgtctatacagtctttctacttgttaataaaataaaatgagtgtcttttaaaggtttcttaagattagaaaacaaaaagaagtcagaagaagtcaaatcaggacggtaaggtggatacctaatgagttcccatcaaaactcytgcaaaattgccctagtttgttgagaagcatgagcaggagcattgttgtggtggagaaggtctctctggtgatgttttccaaggtggtggtgtgctaaagctttggctaactttctcaaaacactcctaagaagaagatgttatcattctttggtcctccagaaagtcaacaagcaaaatgccttgaacatccaaagaaactactgccatgacctatgct

SEQ ID NO: 336003 - DNA, 631 bp, Homo sapiens
ctcatcttcctgctttattgctcccatttcttatgattacttctaaaataaaccacctgcacccaaccccttttctcaggctctgcttttggggaaatccaaactaaaatatcagtattaggaagtcttatagttctgagtctcagctctgcaagttaggttatgatataggccaaattgcttcctttctctcggccttagagatgtcatttgtaaaatgaggaggttgaattagctgcttacttggttccttctagctctgactttcatgtaacactgtatattgtttcagaaactgaacacttacaacataaaactaaaatgatgagrctggttgatctgaatagtcaggcccttgaaacttccctgttttctagccatctttttccataagtgtccagatgatctgccttatcctccaccttcactgctggttgtagatacagacacagaaaaacaccaaaaatacccagcccaagcaaactatacacagctattttgacagggaagaagctctcaaaaaccactgacatttagagcctcatgtttatgcaggacagaaagattgagagtgaaaacaagtataggctgaatatgatcaactatctggatgactaaatgcatcataata

SEQ ID NO: 336004 - DNA, 570 bp, Homo sapiens
agagtgaaaacaagtataggctgaatatgatcaactatctggatgactaaatgcatcataatagccttagtactttagagytggagccaaaaatacttactgcaaaatgcttccatttcatattgattttaaaaaatgaaacgttacacctggggatctagctatagatttcaatctacttttccttgtaatttgagacaaattgaaatctatggtaatgaacataatcaggaagggaaagtctattattttcttcttttagtaactagaaatgatcaatttgaaattttattgttttttatttctatttttaacacagtggtagctttccgtggggccttaacacaatgattgcattgattcctgtggggaagaagaacagagagacgcaatgcttgctgttttaaaaggaaaaaggtctggaagggaggatattctgcatactactgtctggagagaggtgctcaccatgctcaccagtggcttcttcagcaggactggtcttaagaagagagtaggcagccaccaacaaatatggtttaaggggttcatgcagggctcctgtttttc

SEQ ID NO: 336005 - DNA, 570 bp, Homo sapiens
agagtgaaaacaagtataggctgaatatgatcaactatctggatgactaaatgcatcataatagccttagtactttagagttggagccaaaaatacttactgcaaaatgcttccatttcatattgattttaaaaaatgaaacgttacacctggggatctagctatagatttcaatctacttttccttgtaatttgagacaaattgaaatctatggtaatgaacataatcaggaagggaaagtctattattttcttcttttagtaactagaaatgatcaatttgaaattttattgttttttatttctatttttaacacagtggtagctttccrtggggccttaacacaatgattgcattgattcctgtggggaagaagaacagagagacgcaatgcttgctgttttaaaaggaaaaaggtctggaagggaggatattctgcatactactgtctggagagaggtgctcaccatgctcaccagtggcttcttcagcaggactggtcttaagaagagagtaggcagccaccaacaaatatggtttaaggggttcatgcagggctcctgtttttc

SEQ ID NO: 336006 - DNA, 570 bp, Homo sapiens
agagtgaaaacaagtataggctgaatatgatcaactatctggatgactaaatgcatcataatagccttagtactttagagttggagccaaaaatacttactgcaaaatgcttccatttcatattgattttaaaaaatgaaacgttacacctggggatctagctatagatttcaatctacttttccttgtaatttgagacaaattgaaatctatggtaatgaacataatcaggaagggaaagtctattattttcttcttttagtaactagaaatgatcaatttgaaattttattgttttttatttctatttttaacacagtggtagctttccgtggggccttaacacaatgattgcattgattcctgtggggragaagaacagagagacgcaatgcttgctgttttaaaaggaaaaaggtctggaagggaggatattctgcatactactgtctggagagaggtgctcaccatgctcaccagtggcttcttcagcaggactggtcttaagaagagagtaggcagccaccaacaaatatggtttaaggggttcatgcagggctcctgtttttc

SEQ ID NO: 336007 - DNA, 570 bp, Homo sapiens
agagtgaaaacaagtataggctgaatatgatcaactatctggatgactaaatgcatcataatagccttagtactttagagttggagccaaaaatacttactgcaaaatgcttccatttcatattgattttaaaaaatgaaacgttacacctggggatctagctatagatttcaatctacttttccttgtaatttgagacaaattgaaatctatggtaatgaacataatcaggaagggaaagtctattattttcttcttttagtaactagaaatgatcaatttgaaattttattgttttttatttctatttttaacacagtggtagctttccgtggggccttaacacaatgattgcattgattcctgtggggaagaagaacagagagacgcaatgcttgctgttttaaaaggaaaaaggtctggaagggaggatattctgcatactactgtctggagagaggtgctcacyatgctcaccagtggcttcttcagcaggactggtcttaagaagagagtaggcagccaccaacaaatatggtttaaggggttcatgcagggctcctgtttttc

SEQ ID NO: 336008 - DNA, 475 bp, Homo sapiens
tcaatgggcagaaaagtacactccttctgtaagacacttcactgcctatggtaatgtgcacaaatgaagaaatagtgagcacttgaaaacaataatgcaatctatccccccgcccctgcaaccaccacatatacacacctttttttttgttgggtgatatagaccatgtttacatgctgttggaaatcatgcagtagatccattaattgtagaaaaaagcctstgaggaggtgaggttgctttcttagggataagaatactatattattaacaggaggaaaggtatagagagagtacggatactgaaaggttggtatgcttgccatattttttatatgatgactttttgattctaaattttggttctgtttttgcttcccaataacgtctaagatcaaggtacctggggagtatattttctgaaatttgaatatttagacatcttttgttgcctgttgccttcaacaaaacaatt

SEQ ID NO: 336009 - DNA, 563 bp, Homo sapiens
ttttcaaactgatgtcttatccttcttattatctcaaagtagtttctgttcagacatgttataattagtacaaatttattttgatgcaaaaaaaaattttaatctatgcatagttttttcataacacacattttctatgaacttgtgaagagccctcatacacctctcacttactttgtataatttactttmaagctgcaaccacactcaaggtgtgggtcacagctatcctggccacgtgcaaggaacaaaacaaaaaacgactttaagatggaagatatattaaaaattagggctgacttagaagtgtagagcagctgtgtttaataaaaaatcatgaaactaggaaataaaagacctaggttcaagttctacctctgctactcagttgtggtaggaccttggtcaagctatttaagatttctaagcctagtttccatatgtataatttaagaaccattcactcattctcatggtttttatggtatagagggagagttaagtattaaataatcatacaacaaatgaatgaggatttgaagacaactaatatggtcctttca

SEQ ID NO: 336010 - DNA, 649 bp, Homo sapiens
gcatgaactccatacattacattttttcagacaactctttaatggctcattctttaatatttttaattagatcatcttttttagctctgggagagtaaagtgcaattccctttgatgaatactaagtatgaaaggaaaaaataagtgttataagcatgtattttgagaatgaagtcctgtaaaatgtagatagatcaggcacaattaaaaactctaacatgtagtttgtagtttcttttcttgcctgagacggtatgaagaaaatcatgtatctattaaggtggtaaagcagcaaggctttcagggtgaaaactggatcttccttacagtctatatattaagatcatcaatcttagtaataacttctatgggatgaacaaatataagggatttcacctacstagagcttagaaatgaactcatttccttctcataaaatatccttttcttcatagcaatggtaaaaggtggtaactcaagtaattatcattgaagaatgagaacacctacttaaagtgtccttgcatggatggcttccttgctctcttcactgagcaaagccattgggattggagagatgggtatgaatgctcaagtgtgtggcacatcaatatgcagtggcatttttcagtaagttttgagctattga

SEQ ID NO: 336011 - DNA, 649 bp, Homo sapiens
gcatgaactccatacattacattttttcagacaactctttaatggctcattctttaatatttttaattagatcatcttttttagctctgggagagtaaagtgcaattccctttgatgaatactaagtatgaaaggaaaaaataagtgttataagcatgtattttgagaatgaagtcctgtaaaatgtagatagatcaggcacaattaaaaactctaacatgtagtttgtagtttcttttcttgcctgagacggtatgaagaaaatcatgtatctattaaggtggtaaagcagcaaggctttcagggtgaaaactggatcttccttacagtctatatattaagatcatcaatcttagtaataacttctatgggatgaacaaatataagggatttcacctacgtagagcttagaaatgaactcatttccttctcataaaatatccttttcttcatagcaatggtaaaaggtggtaactcaagtaattatcattgaagaatgagaacacctacttaaagtgtccttgcatggatggcttccttgctctcttcactgagcaaagccattgggattggagagatgggtatgaatgctcaagtgtgtggcacwtcaatatgcagtggcatttttcagtaagttttgagctattga

SEQ ID NO: 336012 - DNA, 512 bp, Homo sapiens
ttataacagggggaattatttagtccaagggcataatgaagagctcatagttagtttgtggaaatgccttgggctctgcaatcaagcagacctgggtttaaattctggttctgccactttgagccataagactctgctcaaggcattttacttttcaaaacagatatgaatgtatttttctcagggtagttgtaagactaacataagcttttgactgtggcagtgcctgcataccgtatatgctattaaatgtttgttactgagtctccttcccctatgtgattgattctatatgaccaatgcagagratgctgatggcgagtatgggtctttctgggggttagagaaagttttgtgaaaaaaagtagcatttgagcccagacttgaagaatggaaaaggtttgaataaaaataattgtaatcatatggtgagatgataattataggaaatggaatattacttagtagctaagatcataggcttctgaatgaaacagaccctaatcaaagga

SEQ ID NO: 336013 - DNA, 462 bp, Homo sapiens
aaaacaaacaagcaaacaagcaaacaaaaaaaaactttagtgactccattttgatttggacaattgtcacgttataaagatcasgtgacataatagatgtacctcattaatttgtatttatgttgaattttataatttctaaatctttctcatgtctcttacctcatttgcttctcaatactagtctttagagtagtcaagataggttttattattcccattttatagggaagatgactgagttgcagaaattaagtggtttcctaaaagttaccaggttaagagatctgttgactcaaacttgactgtaattttctcctagtatactttgaatgctatttaattcagcattgtaggtgattttgagggactattatcatctttgtaaagcataaaagttccagatgaggagcctgagacagtacctttcatgtggtctggaagaacagcacccgggattca

SEQ ID NO: 336014 - DNA, 504 bp, Homo sapiens
gaccctgtaggtagacactattaacaggcggagcttacagacaaggaaactgagacactgataagcaaacttgttggaatttcactcttggcagcctgatgccaaaccactacactctgtgatcactgtaatcttctcttatcagatgaaaatatttgtatcttttttttcctgctcttagtaatttccatactttgcctttaactgagctatctgataccagacatcttggcattcaggctgctctcctatgtccatctggatgctatgataatagagcctccatacctctaggccaggcaaaggagaaaataattttaaaacaaggagtttgcagactatcasctggtggctctgtgatttggtttctctgtgtccctacccaaatctcatcttgaattgtagctcccataatccccacatgttgtgggagggacctggtgggaggtaattgaatcatggggggtgagttcccccacactggtcttgtggtagtgaataaga

SEQ ID NO: 336015 - DNA, 571 bp, Homo sapiens
atgtgcgtcatagcctataatttgtgcaataacatcaaggttgctttgatgtaaaggcgggatttatagcaagtacatgttctcacattgaggacagtaaatagagtgggaatcagaaagcattcctgggactgaggttaataagtcaacatagctattaacatttaatatggagtcactttgtctgcacacagtccatgccacttggactggccctatttcagtgctcaatagctgtgtgagacctgtggtaacttcgttggtcagtgtagcatcagagccaacatgaagatcccagccaataaagatcccagggcttgctggcattctccaggactgacctctggaaacaactggttctcttaatacaattaggaagaacaaatactaactaagcaaaaaccagaataattgttttgaggtagattttactgagtactcagtgtatttatccattcagctctctgggagttgcacaggaggttaacatattmttatagatctgttggggggcgggaggccagtcttttctgccccaaataacattttcttctggaacccctctttggta

SEQ ID NO: 336016 - DNA, 601 bp, Homo sapiens
agttgcacaggaggttaacatattattatagatctgttggggggcgggaggccagtcttttctgccccaaataacattttcttctggaacccctctttggtagcagacaactgcctgtgtagacaggagtacaaaggggcactgtattattctcttgtgtatggccatggctgtttttcaggatatgttgtgatatagacatatccacttctctaaatgcttgaaatttaactagaggagagttgtacactttttttcctttccattatcaaataatcaaaagttatttctaagggcgaagctgttccttgtggtcactctttaaaactaggcaggaggaagtgatcttgtcactccaaaaattgtctaatgctattgtctacaggccaagggaaaaggaaaaggcttcccttttctgcatgaaggctagttttgtcagtgattacaattttattgttgacactgtacctctgtattagtgttggtgcaaggctcataaactttagcaacttcattactcaccaattagtttcraatgaattttactatcttgaatctaatggtgctcttcatggagtaggctccatgttcataaaggatt

SEQ ID NO: 336017 - DNA, 609 bp, Homo sapiens
tatgttcatgattttgtaaccaacttggaaggcatcgtattattaaaagtgtatcagattagctccctcaacttactatgtctagtaaccattctgaagaaataggcactggctttgaatatggcctgttccagtttgtgaacagtcgtaggcaagtaaagttgttgggcaaagaggtgagctataggatgactgagggtaaattgtcactactgtatataaagaagacaaatgagatataggaagagatctgttataataacatatatgacatatatctaagtttttcatatatttcagaattatagaaaaaaaagtaygtaatcttttctaagatgtatggatgacttacttttaataatatttcttgatttataatgtaaataagattaagcgaatatgggttactcttgaatttaaaaattggcacatgtaaatgagcattttaatacaaataattagaatatatttatactgtatacacagctacacaacggaagatactactaaaattttgctctatagcacattaccctagaaaacatagaattctagaattctctttaaaaagatcactgagaattattagatgatgactgtgaaataggt

SEQ ID NO: 336018 - DNA, 609 bp, Homo sapiens
tatgttcatgattttgtaaccaacttggaaggcatcgtattattaaaagtgtatcagattagctccctcaacttactatgtctagtaaccattctgaagaaataggcactggctttgaatatggcctgttccagtttgtgaacagtcgtaggcaagtaaagttgttgggcaaagaggtgagctataggatgactgagggtaaattgtcactactgtatataaagaagacaaatgagatataggaagagatctgttataataacatatatgacatatatctaagtttttcatatatttcagaattatagaaaaaaaagtatgtaatcttttctaagatgtatggatgacttacttttaataatatttcttgatttataatgtaaataagattaagcgaatatgggttactcttgaatttaaaaattggcacatgtaaatgagcattttaatacaaataattagaatatatttatactgtatacacagctacacaacggaagatactactaaaattttgctctatagcacattaycctagaaaacatagaattctagaattctctttaaaaagatcactgagaattattagatgatgactgtgaaataggt

SEQ ID NO: 336019 - DNA, 609 bp, Homo sapiens
tatgttcatgattttgtaaccaacttggaaggcatcgtattattaaaagtgtatcagattagctccctcaacttactatgtctagtaaccattctgaagaaataggcactggctttgaatatggcctgttccagtttgtgaacagtcgtaggcaagtaaagttgttgggcaaagaggtgagctataggatgactgagggtaaattgtcactactgtatataaagaagacaaatgagatataggaagagatctgttataataacatatatgacatatatctaagtttttcatatatttcagaattatagaaaaaaaagtatgtaatcttttctaagatgtatggatgacttacttttaataatatttcttgatttataatgtaaataagattaagcgaatatgggttactcttgaatttaaaaattggcacatgtaaatgagcattttaatacaaataattagaatatatttatactgtatacacagctacacaacggaagatactactaaaattttgctctatagcacattacsctagaaaacatagaattctagaattctctttaaaaagatcactgagaattattagatgatgactgtgaaataggt

SEQ ID NO: 336020 - DNA, 574 bp, Homo sapiens
catagtaggtgcctagtaagtgtctactgaatsaatagtgagtaatagcaatcaatacttttgaggatctaaaatgtgttggaaatcctccagagacattcctttactcttcacagtgacaggttatattgctcccattttgtagatgagaaaactgagtggcagtgtgcttaagagatttacccaaggtcattcagtggcaagatacatggatttaaaattggctagtattgctccaaagctcgtgcattttgtgctatatttccacatcttttaatactggcctcccaatcttaatataagtagttcttttttagaaaatgaaacttttaaaaaagggaaaatggtactagaacaggggccagaggctatagaaaattcatatttaagaaagagaaagagtctgacaaggagatacttctcttctttaaatcccattctactgttacgtttctctttaattttcacaaaacaactgacatttaatgaatatttatgtgccgggtgctgtgattagtgctttacttgcatttacttttcagacaactccatgaagcagatagttatttttcta

SEQ ID NO: 336021 - DNA, 482 bp, Homo sapiens
tttggggtgtttctaattttcttgtttgaactttctattttatacttttcaagtttcctgcaatagtaatgttttacttttataatcaaaaaactattgaaataatactttaaattatgcatgtgaaaagattacctggtccaggtggtcattgtatccagctgaaggtgttaaatctagctagactctggcctgggtcttgagaggttagtatctataccccaccttcccttctaaacaggttagcaagctggcaagctggtaaaggagcctagcctcttcctccctacaggacactgcaacatcaaaacaaagcctctaaatactcccctaaagacaaggaagactaatatctgtgacgtarctattctcttctgggacatagaggaaaaaaataggtctctctcataacaagacaccattcatttctcaggttaagctgccattaccttcgaacacacagaagctgagggctgtttctg

SEQ ID NO: 336022 - DNA, 565 bp, Homo sapiens
acacaaacattcagaccatagcaggctaccttaaaaaccacaaaccggtggcttaaacaatagaaatttattttttcatacttttgctagctgaaagtccaagacgaaggtgtcatcagggttagtatgtagcaaggcctctcttcctggcttgcaggtcactgccttcttgttgaatgctcacatgactttttctctgtgcactcacagagaaagaatgaaatgagctctctggtgtctcttcctgtttgtataaggtatcagattatggccccacccttctaagctcatttaaccttaattatctccttaaaggtcctaactccaaatactatcaccttggggttaaggcttcaaaatatgaatttgatgagagacacagttcagtccataacagacagactgatggatggatgtgaatggatggacagatggatgsatgcatggatacatggatggatgcatggatggatgcatggatggatgcatggatgggagggacggagggagggagggagagagggaagaagagaaggaaggaaggagggaaggaagagagagaagg

SEQ ID NO: 336023 - DNA, 579 bp, Homo sapiens
gatcaactttccgaaggtataggaaagagaaatgaaaagagccaaaggctgtttccattttgaaaacataggctttgggtataaaaaacaaaagtaatacttggcttagattggtacctatgttaacttaattacaaactgatcttttattgtttttaattaaatgctactgttttcaattttttactaaaacatgtattattaaataagggagactcccaaagatacctactctaaaatgctctaagaatgaaaataattggtctttatttataaatgaatcttttaaaataaaataataagtgactattaggagatctgtgatcttttctcatctctatcactatgcacatttatagatgatgaaactggcraaaaaaggtaaatgacacaccttaagcaaatcatttacctttttttggtcagtttcatcatctataaaatgtaagaattggataagttctcattcggccttagcattctatgtataaagcaaatgtatatgaagctaaactttgtaagatagtagattatcctagctaatattaactcttgcgtaaaatacacagaagcattctg

SEQ ID NO: 336024 - DNA, 609 bp, Homo sapiens
tctagttagaatatttatgttaatgtattgggctgtgctcccccaaggatatggagaacaatattagataattaagcaagaacgaaatgctaaagaaacwgaaataatatgactacccacacttttcagctcaaaatatttctggtgttaagattagaatgacctacaaaagattcccatagaataaaaaatttataactgaaaatatctgtggcaaatatccagataaggaaagtgccttgctcaaggtcaaagctacttagtaacaggaatagaacctgttactaacaggcactgcttagtagttttgacctccaagtagtcagtgggcaatagacaaatagacaaaagagatacatctagttttcaggtactcaagagactttcttcatattattatatatgggttagcaaggtcccatcacaaaccttcataataaacaagggattaacatatatgaatgtgtgtgtatatttgtatatatacatatatatgttaacatatatgtatatatattccattacacacagtaacatgtttcccaattcactccctgtctgtgcccttcctccaactgtaatcttagcaaaccacaatccataaaaagc

SEQ ID NO: 336025 - DNA, 564 bp, Homo sapiens
gcaggtctgctgatggatcttcgcagagctggctccttcccatagcttcagaagagccttctggggtcacctcctttaaaattgccccttccactcccattaccctatttaacattctccatgacacttactactctctgaaattaccttattttcttatctcccttattagaatgtaagtrctagagaaatcagaccaatgagactatttctttctcattcacagccggcctagagcagcacaaacaatacaaaaacaaaccaaaaaatgaataagcgtgtgtatgtagatctcttagtaccatgcttggcccataacaagtgcttactagctactagttactaattttttagtagtagagatttaataggaaagattataggaaaagaaactcaaaacaagggaatagtgtgaattaaagactagcttttcttaaactatgttgccaaggtagttttacccacaagtctgtgtcctgggcaaaaatagtggaaattggcttcagcgcaatcacaagacttctggaggagtctttcactccgtatggatcaaaaatggtgtgt

SEQ ID NO: 336026 - DNA, 564 bp, Homo sapiens
gcaggtctgctgatggatcttcgcagagctggctccttcccatagcttcagaagagccttctggggtcacctcctttaaaattgccccttccactcccattaccctatttaacattctccatgacacttactactctctgaaattaccttattttcttatctcccttattagaatgtaagtgctagagaaatcagaccaatgagactatttctttctcattcacagcckgcctagagcagcacaaacaatacaaaaacaaaccaaaaaatgaataagcgtgtgtatgtagatctcttagtaccatgcttggcccataacaagtgcttactagctactagttactaattttttagtagtagagatttaataggaaagattataggaaaagaaactcaaaacaagggaatagtgtgaattaaagactagcttttcttaaactatgttgccaaggtagttttacccacaagtctgtgtcctgggcaaaaatagtggaaattggcttcagcgcaatcacaagacttctggaggagtctttcactccgtatggatcaaaaatggtgtgt

SEQ ID NO: 336027 - DNA, 514 bp, Homo sapiens
gtgccccccactaaacctcttttctaatcagattgctacacttaacctgctcgtggggaccgtcacagcttggtcaaatagacctgggcttgactccycaattcacctattgacaaagaatatttatttagtttttcccagtttcaacactcactactattttggggattatactatttatctcaacaagctgctctggaagtcaaatgagatactgttgcaaagtacctagttatatccctgaccatcataaaatggtagatattataggcataggagagaagttcaagagcattggcattacagagggatatggtcttccagtgattggaaatgattttttctagagatgaaagctggttctaatccggtcaacctccttttcactgtgggaacccaaacaatcagtatctcaccctcaccatatgcacaatgatgttggattagatgtgatagatcatctctaaggtatgcttcccctctataaaattctgtggctatacaagtattgtaa

SEQ ID NO: 336028 - DNA, 564 bp, Homo sapiens
gcaggtctgctgatggatcttcgcagagctggctccttcccatagcttcagaagagccttctggggtcacctcctttaaaattgccccttccactcccattaccctatttaacattctccatgacacttactactctctgaaattaccttattttcttatctcccttattagaatgtaagtgctagagaaatcagaccaatgagactatttctttctcattcacagccggcctagagcagcacaaacaatrcaaaaacaaaccaaaaaatgaataagcgtgtgtatgtagatctcttagtaccatgcttggcccataacaagtgcttactagctactagttactaattttttagtagtagagatttaataggaaagattataggaaaagaaactcaaaacaagggaatagtgtgaattaaagactagcttttcttaaactatgttgccaaggtagttttacccacaagtctgtgtcctgggcaaaaatagtggaaattggcttcagcgcaatcacaagacttctggaggagtctttcactccgtatggatcaaaaatggtgtgt

SEQ ID NO: 336029 - DNA, 534 bp, Homo sapiens
atcagattgctacacttaacctgctcgtggggaccgtcacagcttggtcaaatagacctgggcttgactccccaattcacctattgacaaagaatatttatttagtttttcccagtttcaacactcactactattttggggattatactatttatctcaacaagctgctctggaagtcaaatgagatactgttgcaaagtacctagttatatccctgaccatcataaaatggtagatattataggcataggagagaagttyaagagcattggcattacagagggatatggtcttccagtgattggaaatgattttttctagagatgaaagctggttctaatccggtcaacctccttttcactgtgggaacccaaacaatcagtatctcaccctcaccatatgcacaatgatgttggattagatgtgatagatcatctctaaggtatgcttcccctctataaaattctgtggctatacaagtattgtaaattagaaattttccagttaatttcccttggggcttactagtcttac

SEQ ID NO: 336030 - DNA, 514 bp, Homo sapiens
gtgccccccactaaacctcttttctaatcagattgctacacttaacctgctcgtggggaccgtcacagcttggtcaaatagacctgggcttgactccccaattcacctattgacaaagaatatttatttagtttttcccagtttcaacactcactactattttggggattatactatttatctcaacaagctgctctggaagtcaaatgagatactgttgcaaagtacctagttatatccctgaccatcataaaatggtagatattataggcataggagagaagttcaagagcattggcattacagagggatatggtcttccagtgattggaaatgattttttctagagatgaaagctggttctaatccggtcaacctccttttcactgtgggaacccaaacaatcagtatctcaccctcaccatatgcacaatgakgttggattagatgtgatagatcatctctaaggtatgcttcccctctataaaattctgtggctatacaagtattgtaa

SEQ ID NO: 336031 - DNA, 564 bp, Homo sapiens
gcaggtctgctgatggatcttcgcagagctggctccttcccatagcttcagaagagccttctggggtcacctcctttaaaattgccccttccactcccattaccctatttaacattctccatgacacttactactctctgaaattaccttattttcttatctcccttattagaatgtaagtgctagagaaatcagaccaatgagactatttctttctcattcacagccggcctagagcagcacaaacaatacaaaaacaaaccaaaaaatgaataagcgtgtgtatgtagrtctcttagtaccatgcttggcccataacaagtgcttactagctactagttactaattttttagtagtagagatttaataggaaagattataggaaaagaaactcaaaacaagggaatagtgtgaattaaagactagcttttcttaaactatgttgccaaggtagttttacccacaagtctgtgtcctgggcaaaaatagtggaaattggcttcagcgcaatcacaagacttctggaggagtctttcactccgtatggatcaaaaatggtgtgt

SEQ ID NO: 336032 - DNA, 524 bp, Homo sapiens
atatccctgaccatcataaaatggtagatattataggcataggagagaagttcaagagcattggcattacagagggatatggtcttccagtgattggaaatgattttttctagagatgaaagctggttctaatccggtcaacctccttttcactgtgggaacccaaacaatcagtatctcaccctcaccatatgcacaatgatgttggattagatgtgatagatcatctctaaggtatgcttcccctctataaaattctgtggctatacaagtattgtaaattagaaattttccagttaatttcccttggggcttactagtcttacattgaactcccttcttttgtcctctagttttcatcattaatatttcaaatcatcakgaagaacaggtaagatgacaccaaccctaaaaaatagtatttagtattgtggatgatcaaaaccttttgaaacaaggcagaccttacattaaatcctgactctccaatattggttatacgaccttgaaaaagttttttcagc

SEQ ID NO: 336033 - DNA, 556 bp, Homo sapiens
tgtgttaaacctgttataaattcagttaaattgccctcaaagtaaagattataaaagaaggatgttaagggagatactgttggatttgttgcagtgcatttaaaaatagataacttcaaggccatggaatatgggactgttttttagcacaaaattataaaagtggagaactaatatatgttaacctatcgggaaactcatctgagtatgagctgggcagacgttttgattgtctatggagggctggacttcccacttttctcccactcatctgacaggatcagtttttcaggtgatgaattaggaacaaggtgagaaggaggtggctctagacaccctggatatagcactgttttctgttaatgagattcagatggcctgataattaaagctgtctccaaaacagaatggctttcctcatctagcatccttggcacagggtaattcaactgaagactgggttcatttatccattcaactccmtaataaatacttatggagtattaggcaatgtcctggatattggaggaatacaaagaatagtgccagtcatatc

SEQ ID NO: 336034 - DNA, 504 bp, Homo sapiens
tctatttataatgctgccctttcaaaatgtaacgcttttacaaaagaaacaaaacttttcctggaattgacttcaaaaataaggttccaatatggactcttaactgggggtttagtagtataattgatgaacaactaatgatgagttttatagcaaaacgaacacagtttaagtttgatcaacacccaatattcctgggcagggagttgaggagtcatgtgttagattcctatgagtggaagtatgagaattccactttttgccttgcttttctttgtgttgcatttcctgcctgtgataaatgtgtcccaatatttgtcttttggttgttgttgttgagaatcatttctcatgttgggaaatgtgaagtcaaatagtgtgacwggacttgctgaatgattgagtcaaccacaaatggtattgtcaaccatggctgttgaattaatgagaacaattaaaactcatttttcagaggtcaaaagatgctcacttttgtgatttcat

SEQ ID NO: 336035 - DNA, 520 bp, Homo sapiens
ttaatgcctgaataattctttttgaacaccattctgggatgatgtacatttattccaaattatccaatatatatagtctgcactgatcacagaaatgaagtcaaggtggaggcagtgtgacatagtggctaggaatatagcctctctgggtaccattctggctctgggacttgaaacaagtttcttatctcatagggggcttgatttcttgatctgtaaaatgggaatrataataatagtacctcacaaaaaaattcttttcttaggatcaagtaaattaaattttctacatagtaagagctcaaaaactgttggtaataattatttaggagtgattgaaatatagaaatgaataagaattgttcccaaggaaggaaaagtctggctttgaatagctaatcaaaaagaactggtggcttctacatgtttaggttttatgtgcttggtcatcattgacttttcaagactgatgtgctgactggtagggtaaaaaacttgcgaccttcagttgctgagtttc

SEQ ID NO: 336036 - DNA, 577 bp, Homo sapiens
ttgtcacccaccttcccgtcaaggttgacagtgatgattagcatacccctacatcctgccactcattccccgcctaccctagcgtcatactgtgtaaaggggtctgcatttgcacaagagcaactccaagactccttgaaaggggccctgaaatgaaatgcaaaataaatatcgttggtacacttcagaggtgctgtagaagagatccttgctttgggtaagaaaggggactaatgactgataagttctcattcyctgcaaggactccatgaatattatgggagatttatcataattcactatgatcttattttatgattcttttttggctccctgtggcaagtttcttaatttttcttcctcactaacaagaatgataatttggggtatgtgaatgagataaaaattcacaaatagctccaagaacactgagaaattagtttgatgagtattttttattttgccttttccttctctccttcatcttttatcattgtactagttatttaaagctgttggagttcattgattctaaggtgctttttctcccccacatttttacttctctgcaatagag

SEQ ID NO: 336037 - DNA, 585 bp, Homo sapiens
taccctacattgtgtcaaattattataattaacattggtgaagtactctaccatttacaatggctttcacaaacatctaatttattcctagcctaaaacaagacaatgcaattccttttatatattttacttttaaatatataaaacactgttaaaaacattcttaaaaaccttcttaaaatggtattagcaaaccaaagaaactttaaggaaaactgaaaatctgggactgtttcactttattaggacaaagtagagaaaagctgaatcagagttcatgctaaatagtatccaaaggataattatctactttattatagaaaatcargctattgcaccatatgagcctttgctctgagatctaagtttgaatttccaactaactaaggaaaataccacccaaatcaactggattattaaaacgacgggtaataataatttgtaaaatggatcactggagttagtaaatatgataaatgaacttaggccaatgagtcttctgtatagcttcaactttacagggaatgacttgaaaattcacactattaatgtatttgggttaaatctattgtcttgttattctag

SEQ ID NO: 336038 - DNA, 649 bp, Homo sapiens
tatagtacagtaacacactggactatcatccagccaataagcagactaagttagatactaacaagattctaacaataaacacagtaagttagtactaacaagaaactatgtccatctgttgcccatgtgtccattaaatattgctaagaaaaagaagtaggacgcaaatagtatgtrtaatatgaactaatttttaactttgtatgtatgtttgagaaagagaaaagcgtaaaaatggtgaatcaaattaacagtgattttcatggaagactgggattgtagtgaatccttcattttctccctatgcacttctgaatggcttggattttgttacaatgagtatgtactgtttttataattagaaaaatgatattcctattagaaaaggaagataaagagactaattcttcactatgttttccaaattttaatattacttatatcagagattattttaagatattttaaactactcagtgtagtagaaacaatactggacctacaagccagtcttcagttgtgagttccagctctctgtttttcctatctgagcctcagctgtcttcatacacaaaatgagtggctgtatttactgactcacaaagtccctactagtactcacatttcataattctaactggaaataaat

SEQ ID NO: 336039 - DNA, 584 bp, Homo sapiens
ttcttcaaaggacaaaggattcctttgttggttctatgggactcttcctatgttctcaaaccatgttaagtttcatgcctgacccagcaccataaatatagttggtgatcaagagatggttggttattcattcaaatattcattgtgctagaccctcagctcagctaatgaaagagacaatctctgccctcaaagaactcctgatgtaatggcagtggcactgggcactgaatgctgtagcaggagtggcagagaggtctagctatctgctacaaattagtgctcccattcataaggtagttgctgggaagcagttgcccactacatttctagcctcttttgcatrtaggtgagctcatactcaccatcccccaatcctccctgcaaaagagtgagagaaagaggcagaagtggtccataaggaccataacactttctgagcaattcaccatcctctctctcttcccacctctgttgactggatgtcaatgtctttgggagccactaatgaaggtggcaagactccttgtcagcctgagtccctgagtggctctatggagcaaagagtaagccctcataccctg

SEQ ID NO: 336040 - DNA, 584 bp, Homo sapiens
ttcttcaaaggacaaaggattcctttgttggttctatgggactcttcctatgttctcaaaccatgttaagtttcatgcctgacccagcaccataaatatagttggtgatcaagagatggttggttattcattcaaatattcattgtgctagaccctcagctcagctaatgaaagagacaatctctgccctcaaagaactcctgatgtaatggcagtggcactgggcactgaatgctgtagcaggagtggcagagaggtctagctatctgctacaaattagtgctcccattcataaggtagttgctgggaagcagttgcccactacatttctagcctcttttgcatataggtgagstcatactcaccatcccccaatcctccctgcaaaagagtgagagaaagaggcagaagtggtccataaggaccataacactttctgagcaattcaccatcctctctctcttcccacctctgttgactggatgtcaatgtctttgggagccactaatgaaggtggcaagactccttgtcagcctgagtccctgagtggctctatggagcaaagagtaagccctcataccctg

SEQ ID NO: 336041 - DNA, 636 bp, Homo sapiens
aaatgggaaaactgaaatgcaaactgacattattagggttatgagagaaagcccagacggatagaataaagagaataagagaacagaagcccagagagaagcagagtttccatgatagaaggactggccgcagggctttctcaggacccaccactttccagttttagccttgaccatactatggtaaatttatttctcatgaactaactcaaatggactcctgtgttctgcaacaagagtggtattgccttaagtaatgtctgcaaggttagagatgttaagaactacagatatcatctagcctttgttttccagttgaggaaacttagtctaaaacaaataaaattacctggtcaagctcccagaacacgttggtcctttaaatagacagaatagataattgcctgcaagtgatttgaagagcactagaaagaccttctcctttcctctctcccctcccctctagctcctcaggctgtttgttgcaaaggttaaattagtttgcatgtgtttaatccttaccacagtgcttggtgcrtagtaagagctgagtacatggtaccatcacaaatgtgttataaagccacagttctgagtcatttatgctgggttccagagccaggggaacaggtggtg

SEQ ID NO: 336042 - DNA, 626 bp, Homo sapiens
ttgatcaaagtacttttattcacatgtgaaattcacttaagagacatctactactagtctgaacctttgcacataaccccactgaagaacataagaacttaattgtaacataaactttggtagctgtttcatgtgtcaagtacccaatatctgtttatacttattgccatttttaaaaataaaaaataaagtttcatctaaatatttcatctaaagaatatatattttatatttataatacacagtaaatatagtttggaatttatacmaaatgcatctgtgtagaatcgtaaagtcaatctggatattaaatggttttcttcatatcttttggactatgaagacagttgagtaacactgaagcatcctaagtaatgaggtattgttaagaagaaagaaggtctgagatttttttttttcctggaaaaagttagttgaaaaatgtcaactacctttgcctgttagggttaatttcctcatgtttttactgatgctgttgtccacaaacaaagcagtttactgcttgggtgtgtgtgtatgtttatatatatcttttcaaatgtgtaatattttccataaatgtagacagatacctacttgagtattttttttttccaaggcagaag

SEQ ID NO: 336043 - DNA, 652 bp, Homo sapiens
ctgggcaatggacaaaagttgctgttaattggctaaagccacactctacattttaaaccacggtggtcctaagaaacaaaataaataaacaaaggcctctggaatcctttacattctatgtattcattttgattggattacatctgcataaagtgcaaatagttgcttgaaaaataaaatatttattccactagttaactctataaatacaggtatctgaatactcaggattatacccaaatcacagaatattaaaatgtgacaaccagaaaggaccttaagtcttttcttataccatgtatctgacaaagaacatgtatctgtaatgtaaagaacttgtacaaccgaataagaagaagcaaaatatcccagtaaaagtgggctaaatatytgagcagacatttcagaaagaaatataccaatgggcaataaggacatgaaaagatgggcagaataattattccttagggaaatgcaaatgaaaaacatagggcatagggtgatgatactacagaaccattaaaatagctaacattaaaaagattgacgacaccaagtgttgatgaggatggcaggaatcagagctctcacacactgctggtgggaatataaaatgtacagccactttagcaaaagcttgacagtgtttttt

SEQ ID NO: 336044 - DNA, 652 bp, Homo sapiens
ctgggcaatggacaaaagttgctgttaattggctaaagccacactctacattttaaaccacggtggtcctaagaaacaaaataaataaacaaaggcctctggaatcctttacattctatgtattcattttgattggattacatctgcataaagtgcaaatagttgcttgaaaaataaaatatttattccactagttaactctataaatacaggtatctgaatactcaggattatacccaaatcacagaatattaaaatgtgacaaccagaaaggaccttaagtcttttcttataccatgtatctgacaaagaacatgtatctgtaatgtaaagaacttgtacaaccgaataagaagaagcaaaatatcccagtaaaagtgggctaaatatttgagcagacatttcagaaagaaatataccaatgggcaataaggacatgaaaagatgggcagaataattattccttagggaaatgcaaatgaaaaacatagggcatagggtgatgatactacagaaccattaaaatagctaacattaaaaagattgacsacaccaagtgttgatgaggatggcaggaatcagagctctcacacactgctggtgggaatataaaatgtacagccactttagcaaaagcttgacagtgtttttt

SEQ ID NO: 336045 - DNA, 608 bp, Homo sapiens
tgtagatgttagttacagtgtgtctcttctgggaagagtaatctcccactcagttcatatccaataatgtagccagatgtaattaatcaaatggtcctagcaggctcaggaggccagacccaaagctgtgcatttgtgatcaggagaaggaggagtggtatattagtcagggatctccacagaaatagaaccaatagtatatgtagacatagagagaaaaagagaggaaattatattaaagaattggctcacatgattgtggaagctggaaagtctgaaatctgcaaggcaggctgcaggctggagatccagggagaactgatgttgtagccctcgtctaaagacagacttaaaggtctttagagaaaagactgagattccccaaggaatgtggaattctgcctttcacaccaccttaaattggatgaggcctacctacattattgagggtaatctactttgctgaaagtctaccaatttaaatggaaatctcayaaaaaaattgctttatagcaacagctagactgatgtttaaaattaaaatttacaattacaagtgggaatttacaagtctgcagcatttgagagatagaggtcagaatgtccta

SEQ ID NO: 336046 - DNA, 475 bp, Homo sapiens
ttgcaggaacctagactagcaatagtggagctgtctggatatctaggcacaaatggacaaaggagagagtaggtcccagaacacagaaggagagatagttgtgtggagagagctacctcggaaggaccggggctctgtgtcacaagtgaccacacagggagggaaggaaccaaaggacctctctctcctcccttccctaacccatcttctgctggggctccccactgggtgaagccaaccagaagccacaggcctgggacccccttgatgtgcttctcataggtcaccccccagggccaggagaagagagaagatgggaggcatgtgatataatgkagctataaaacccatgaaaaatgtgcagcctcactgggattgtggggtttggaggggatttttaaggtagtatttttcacaacaaattgagaagtgtttttaaaggcgaatttgatgaaacagatatactcattacagc

SEQ ID NO: 336047 - DNA, 513 bp, Homo sapiens
tcatatggatagaaaatcccacaatcacaaaaaatcatatcgttgaagagtatttaaagatataataacatgttcacgatataaaatttatggcaaaactttgactactcaaatatatactgcgaaacccaatggcaacatattgtrcatgtgtacctgggaatacatgtgaattaaataagcaataggtacaccaaaatactagcagtgactgcttctgggtagcaggattgttaactctgttaactgagggaacagggaagagaggaaaggaaaataaatgccaggggttagcacacctcaaatcaacagggaaatcaaggttttaaatttcagatgaaaattgtgtgcaatttcctaaggcccttaagtcatatcagagaacccctaacagagaagggaataggaaatggtaccatagccctcttctctggatgggaaacaggttcaaaaactaataaaaattacaatcaaggatctattatttcttaatgtggtgatttaaagtctcac

SEQ ID NO: 336048 - DNA, 513 bp, Homo sapiens
tcatatggatagaaaatcccacaatcacaaaaaatcatatcgttgaagagtatttaaagatataataacatgttcacgatataaaatttatggcaaaactttgactactcaaatatatactgcgaaacccaatggcaacatattgtgcatgtgtacctgggaatacatgtgaattaaataagcaataggtacaccaaaatactagcagtgactgcttctgggtagcaggattgttaactctgttaactgagggaacagggaagagaggaaaggaaaataaatgccaggggttagyacacctcaaatcaacagggaaatcaaggttttaaatttcagatgaaaattgtgtgcaatttcctaaggcccttaagtcatatcagagaacccctaacagagaagggaataggaaatggtaccatagccctcttctctggatgggaaacaggttcaaaaactaataaaaattacaatcaaggatctattatttcttaatgtggtgatttaaagtctcac

SEQ ID NO: 336049 - DNA, 514 bp, Homo sapiens
ggcagagtgttccaaaggattagagatgatgatctcccaggggcaatyggggccagttctttctttggaatgtgtagagtttgggtacctcaaacctgctgagtttactgcacaggccaaggtcataagctctaagagggaagggatctttgcctctttttctccttaataaatcccaagggtttagggtgatcccagacacaaactagttgcttgtattgaagttctccaccagagagacagaactaatacatgagtacgtatgtgcatgtatgtgcatatgtatgtatgtatgtatgtatgtatgtatgtatgtatgcatgtgtcttagtctgttttgagttgctatagcagaataccaaccacagactgggtaatatataaagaacacagatttatttattacggttctggtggctgagaagttcaagactgagagccacacagatggcaattactttcttgctgcatcatcccatggcggaaggcgggaaggcaaaagaggccatgtgca

SEQ ID NO: 336050 - DNA, 514 bp, Homo sapiens
ggcagagtgttccaaaggattagagatgatgatctcccaggggcaattggggccagytctttctttggaatgtgtagagtttgggtacctcaaacctgctgagtttactgcacaggccaaggtcataagctctaagagggaagggatctttgcctctttttctccttaataaatcccaagggtttagggtgatcccagacacaaactagttgcttgtattgaagttctccaccagagagacagaactaatacatgagtacgtatgtgcatgtatgtgcatatgtatgtatgtatgtatgtatgtatgtatgtatgtatgcatgtgtcttagtctgttttgagttgctatagcagaataccaaccacagactgggtaatatataaagaacacagatttatttattacggttctggtggctgagaagttcaagactgagagccacacagatggcaattactttcttgctgcatcatcccatggcggaaggcgggaaggcaaaagaggccatgtgca

SEQ ID NO: 336051 - DNA, 549 bp, Homo sapiens
gggcaatgtgctttactcaaattctattaatttaaatgttmatctcatccaaaaaaactttcacagaaatgtctagaatagtgtttgaccacatatctggggagcatggcctagccaaattgacatataaaattaaccattacaatgctatataaacatggttgacaaagtatggaccaagcttgttcaacccgcagccagcaggttgcatgtggcccaggacagctttgaatgcagccaacacaaattcgtaaactttcttaaagcattatgaaattttcttttgatttttgttttttagctcatcacctgtagttactattagtgtattttatgtgtggcccaaggcagttcttccagtgtggtccagggcagacacaggagggacacccctcccacagaccattaagactggcagagaccaaaccaaattcgtgttactgataaagcaactgagacccacagtgataattacctacttagtttcacttgggaatggaatcagccccagaatccagtttcctgactccatttacctctctcactctc

SEQ ID NO: 336052 - DNA, 555 bp, Homo sapiens
acattgctggttattttcccatatccatttttccttctcctacagtaatggaacttccaattttagtgaaggatctaactcttataataaaggcattttccagcctcctttgcagctgggtgtggccacgttgctaagatctagccaataggcaggatacaagtaaaagtggtatacacaactcaagcaaatgtctttaagggggaagaacacattttttttcctttgtcttttttccttcctgctggctagaatagggataaaatggccaagactccagtagtcatcttggacctcacagaagtggccacattccagaaacaatgcagcagaaggctggaaggtgacagagtcccttartatctgcagagccacatattggccctagacactcatgtctagaaattttatgggagagaataaaactttctcagttctaagcccctcttaatttgggtttgaggtcacttgggtcacatgcagcaaaacctaattataacaaatacatctggattttatggagccatggaggtctgagaaaattgagaaccaata

SEQ ID NO: 336053 - DNA, 546 bp, Homo sapiens
ggggacacatttaacaaatcaagctctctttgagctaggtcatgtgttgaccaatataaaattataattgtttcttggactatttctagctcaaacaccctcagtatctgaactgtaatcatatgttgccttttcgctactcttctaaaattatcctagcactactctgtatgagaaaattcatgcacagaagctgacatctgctttgtgttttccattccagtcccaagtcacagattcacaatgaggacttcagcaatctcctgtacacttactttaacatccatgctaatgctcatggcaagcaatggatagagtggattttattcagggcagacyttcttagttatgggtgtgaatcccaaggaaaactctccaaaactgttggctgatattcatgcggcaaggagaccggatccaagatattaggttgtgaaagtcaagccccagcctcttatgggaaatttttattaacgttttaaggatcttttgcaaattgaagatggccataaatttattttaacacttgttccttcaagagagatt

SEQ ID NO: 336054 - DNA, 385 bp, Homo sapiens
caacgggatgtatcacagtgtttgttttcagacagtagtatgcctttaggatagtctgaagaactggttaaaatatagattcctgagtcccaccaccagagaatcttgctcagccagcttggaatggaacccaggaaacttcaggtgatataaggcaaggggtgtatgcatcacacstagaataatggtccctgctcctgatgaacacaccaagtacccaagaagggcaccagagtgtgaaacaagcatggttaggtgatgagatggcctgggtacagtcacctgttaaagtgcagattctcattcagcaggtctggggaaggaggctgatattctgcatttctaatgagctgtgagaaggcagttgttgctggcccctgcctca

SEQ ID NO: 336055 - DNA, 431 bp, Homo sapiens
agttcggtgggttcgtagtatttttttttaaattttagttcatattcgaacaacagaggagacaaggggacacaggtaaagtttgcctgtaaggttaaggagtatttgtttttcattcatacagttaactacagaatattaagacgtggtcaagagtgactgtatattgggagaaaaacgggagggtctggacaagaatgttgagtggccaccttgagggcacaggctaggcagggtaaatatgaatttatgaatgattttattttcttttgtttttctattttgtcaagttttctgctttgtgtatatattacarttgtgatcactaacaaagctcttactaaaatagatgcagttttgttgaactactttgaagacagaggtcaaagaaagaattttttggtgaatctaagttgttttatttaaaaaaa

SEQ ID NO: 336056 - DNA, 462 bp, Homo sapiens
tggtcaagagtgactgtatattgggagaaaaacgggagggtctggacaagaatgttgagtggccaccttgagggcacaggctaggcagggtaaatatgaatttatgaatgattttattttcttttgtttttctattttgtcaagttttctgctttgtgtatatattacaattgtgatcactaacaaagctcttactaaaatagatgcagttttgttgaactactttgaagacagaggtcaaagaaagaattttttggtgaatctaagttgttttatttaaaaaaaagaaagttctcccagtatgcatttacttagtgcctgcyttttgcactgcaagaagcagtcatttttttcttgaaatcatcattatttaatacttttcctggtggataaaaagatgcagaaccaaagagcacacccagtttaaggctcatacttgtatagccctctaggagtgtgtta

SEQ ID NO: 336057 - DNA, 627 bp, Homo sapiens
tgtttttatcttttttaagaattatcaccaattgtcccttgtagaattcctgtggctccctgggtggacawgttcttaatgacatctcagtctgattgtgtaatttgctggtcactttcagctattaaaaccatctcaggttggtccttcaggctcagctgtgttgctgtcaaagcgtcaattgcgtattaaattccaggctgccttcttttcctaccctcctgaatacaggctaaaatgacgaccccagacgctggagacagagaggtgggcagcacctgcagtttcctggcgaaacgaggtgacatgaagaagaaagagagaaaagtggacatctccttttgtgatcccatcccccacgccatggctgggctgagccttctccttggctaattataaccacctatctatttctttttctctgggatggaggaatttgagccaggactctggcaggtgcttctgatagggcttcactccactccttgcccaacaagtaaagcctcaactccagaatatgaaatttaagcctctttacaatctgattcaaaactccctttcacctcaactccttccccactctactccactccagggaccctatattccaagtctatggcaccttcc

SEQ ID NO: 336058 - DNA, 510 bp, Homo sapiens
gtcctctgcacatctaggtatattttcccctctgctttcaatactttctacaatgttgccataattcttctataactaaaagacaatttaaaaataacaataagccatayaaaaagccatcaggaaaacatttacaatttcttccacaagccctgttattaattctcacataaatgatgctgctttcttaaaacaaatgaattataaaaacaatgcagcaaaataaaactgttttactgaatgctactttcttgagaaaatacacaaattctagatacacactacatacatgcatgcacaaactgcatatacactgcagacatacgcacaaaatggaattccatcaagagagctttaatatatggtcttctaagtgaataatgcaatgtgatgcttcacaccaaaaacaacaaaatgcattaattagattatgtaaaaataccatattttgtaccagagaataaagcagtagaaaatattctaaatttacacatataaaacaatgtgatt

SEQ ID NO: 336059 - DNA, 510 bp, Homo sapiens
gtcctctgcacatctaggtatattttcccctctgctttcaatactttctacaatgttgccataattcttctataactaaaagacaatttaaaaataacaataagccatataaaaagccatcaggaaaacatttacaatttcttccacaagccctgttattaattctcacataaatgatgctgctttcttaaaacaaatgaattataaaaacaatgcagcaaaataaaactgttttactgaatgctactttcttgagaaaatacacaaattctasatacacactacatacatgcatgcacaaactgcatatacactgcagacatacgcacaaaatggaattccatcaagagagctttaatatatggtcttctaagtgaataatgcaatgtgatgcttcacaccaaaaacaacaaaatgcattaattagattatgtaaaaataccatattttgtaccagagaataaagcagtagaaaatattctaaatttacacatataaaacaatgtgatt

SEQ ID NO: 336060 - DNA, 607 bp, Homo sapiens
tacaaagagaaaaccagtggtgtaatggggtcatgtagtcaattaaaagcaaataaaataaccagtttggttatttgaaatcaaatcagtgaaaacaccaagatataaaaccaaaataaaatattagcaatatcaacagcctgggagatcaaacctcttaataaagcaagtaatatttatatttcaacttgggatttactactgcatgcggaaggttcttattcatcactcaaatgtgaaaagcacaggctttggccactggttaattattggattgtcataaaccacttcatgcctggctgtcttttttctaataagctgactttgttagtacttttattttgtaactgcagccacctgacaaatgtcctctcatacctgctgtttcacaacagtctactgagagagggaaaaaattcctctatggatagagacttcaaataccttaccatctgctcccaagacatagagctttaaarcagtaggggaggaatactgaactgccattctgataccatattaggttagtaagagcccttaaggaaatatataacttttaaaaaacatatataacttcctttaaacatatatgcagagttaacaacct

SEQ ID NO: 336061 - DNA, 585 bp, Homo sapiens
gtatttttctgacccctctgggttctcacagcacttctgtcatccagccatatctgtgagtactcactgtatgtcatggtgttggctgatcatggtgtcagtgactcacctctctgtgtggccactcttcaagactaggaatcccttgagagctgagacaagagcttgtttattgataagtctcttatccctgacataacatctggcacattttwggttctattcaggaagtgtttgttgagttagcttacccatggctctgctggtatggggaagcccatgcaagttgagggcaatgctaccaaactgtgaaatcctgaaggatgcaagccatatttctcttctgtgtatcaccaatgcctagcacatagtagctgctaaatgaatgtttgtggaaagaaggaaagacttccactagggagtgaaaagtccatttgataatataaaaatccaacttcaaccaaatatgttgtggatctaaattaagagccaacaagctttttctgtcaagggccagttagaaagtattttaaggactgctggcaagaaggccgaataagaacagctccagtatgcggctcccag

SEQ ID NO: 336062 - DNA, 535 bp, Homo sapiens
gtgttgggaagaaaataatttcaagttggtaagtaaaaatactagaaggtgggcacagtggctcacacctgtaatcccagcattctgggaggccaacgcaggaggattgtttgagctcaggagttccagaccagcctaggtaacatagggaaaactgtctctacaaaaaattaaaaattacccaggtgtggtggcacatgcctgggtcccagctacttgggggttaggtaggaggattgcttgagccctggatgtcgaggctgcagtgagccgtgatcatgccackgcactccagcttgggtaacagagcaagatcctgttttaaaaacaaaaaaactagaaggagcccagaaagtggagtcacaggttagagaagaaccttccaggaaacctgcctagttacataggactttgtgtgagggagaacaaaacttttattttgtttttaaattttgggagtgtgtgttttagtagccagtattaattgcccccaacaaatccaacaactttaaacatttaactcattcattcattt

SEQ ID NO: 336063 - DNA, 647 bp, Homo sapiens
ctgttttaaaaacaaaaaaactagaaggagcccagaaagtggagtcacaggttagagaagaaccttccaggaaacctgcctagttacataggactttgtgtgagggagaacaaaacttttattttgtttttaaattttgggagtgtgtgttttagtagccagtattaattgcccccaacaaatccaacaactttaaacatttaactcattcattcattttcctatgattggctggaaggtcatatgagagaagtggctatagaggacatcattaagaaatgactttaacataattctattttgtctttaaaccccgaatggggtagatttccagactgtcatgtagcttttagcatctaaatctaaagtttaggcctacagtttttcttcccaatagatattatttccatgttgactacacagtccctggtgttctatcatgcatttctctggtcactcctatacacatattcaaacatttgtttatttcttccagagactgatagttgtttgcatttgtcagcacacagactaagttrctgtaacaaagagacattccttctccatcaaaaaaacaaaaacaaaaaaactcaaagttaacaagtcaaactcatacaagataggagtttgtttctctctcaacagtc

SEQ ID NO: 336064 - DNA, 594 bp, Homo sapiens
ggataataatacctactcatgggagtcgcataaagatgaaatgaaagtctgtatgaaatgtagacagttctttattactttacaggtggaaaacataaaatgaaatggtgcccctttctttgaactattctaaaacaaaaagtgttaatataaatgtactagaaactaaaacaatacagacgtcgcctagaatttttaggaagcagtcataagcttgttgtttttattagcaatgtataaaaataggacatttcatttttcaaagtccaaactggtttatgtaactgacctagactattctctatattctcattggaataactttaaattggggatctggctggaaaagttttgcagagtgaccctstgagcatcttcccaaaaaaaatttgacataagattaagacctgtaaaggcaggtctggcctgatcaaatttatctccacagagttccaagagtgatattgccttgcaaatgaccatgttccatcactgctcaaaaatccaccaatagttcttcatctcctagacaataaaaatcccaactctttgtttagacacctaaaaacccttatttctctactcttccatttg

SEQ ID NO: 336065 - DNA, 447 bp, Homo sapiens
gtctaatatttgtgatcaatcacaaaatatctcaatgttaatataaaaactaaattaacagggccaactaaacagtgatgtaacaaaaactgtaagttcttttggttggaatgcagkccaaatttgatgctgactggcagcacagagaagagaaaattcacaaagagaaagtgaaatggtggtgattcttgcccctaaaataatagatagtgtaggttacctgaagatacctttaaagtgtggaggccaaacactaacagcctccacagagcagtatcagactttagagatgaaccactgttcttccatttctcatccttcctctggtggtctgtatgcatacaaatgtgggcatgtatgtggtataaagtgaagagtggggaagcaggaaggaagaaaccttatttttaatttatgagatgtaattttgtcaggtaagcttattct

SEQ ID NO: 336066 - DNA, 407 bp, Homo sapiens
gcaccaagaaagccatctaaaatttttgaatcaatttttaagaattgtagaaattaaccaaggacttacagcaactgggggagctggaatctaggtaagaacagcaagagttttgtgatgttttaatttggcctattctcatctcccccatctccagctttgtagcagccttaaacaatatcccaaaatctcagtgaaaactagcagactagcagccaccagaggagacagagyagaacagaactctttcaaagtctcagtttcagagaacagtaattatttaaactgtctggtggttctcccaaagacctcacctgcaaggctgtctttatttgataagactcagaacttccactgtgtgaaaagtacccactcccagggcatttgttgaaaacaattagaggcaa

SEQ ID NO: 336067 - DNA, 523 bp, Homo sapiens
ggcatttaaagaaatcattgtccaatcattagttgataactaatctaattgagcaaaaattttagtggtcacatacaacaaagaatgcaaattgtacacaatcagttcagaataataacaacaacaaacagcaatgacaacaaactcttgggaggaggtagaatctgatttaagagttgacattatttaaaactactaactttcaacaaaaaaaagttatgagatatgcaaaggaacaaaaatgtatgcccatacaaagggataaaaaaactatcaaaaataactatttctgagaaggtctataaattagactgactaacaaagactttatgtcagctattttaagtattttcaaataactaaaaaaagcaaaagaatgccatctcagcaaagacaatatcagtagccagataaatactatttttaaaagagcaaacaaattctgaagttgaaaggtgyaatgactgaaatgaaaattttactagaggctcaacagcagattgagcaggcagatgaaagaatc

SEQ ID NO: 336068 - DNA, 548 bp, Homo sapiens
ggtcaagaaccaaagacaggttgggtgcagtggctcatgcctataatcctagcactttggaaggtggaggcaggtagatcacttgatgtcaggagttgagaccagccttgtcaacacgatgaaatcccatctctactaaaaatacaaaaatgagccaggtgtggtggtacacacctgtaatcccagctactcaggaagctgaggcacaaaaatcacttgaacctgggaggtggtcattgcagtgagccaagatcacaccactgcactccagcctgggcaacagagtgagactctatcaaaaaaaaagaaagaaagaaagaaagaaagaaagaaagaaagaaagaragaaagaaagaaagaaagaaaagaaacaaacacaaagagaaaatcttgaaagcatcaaaagagaaataactaactcactatatgcaagggatactcaataagattaacagctgatttctcaataaaagacatgaagctcagaaggcagtgttatgacattcaaagaaaaaatattgttagccaaaaattctataacaagcaag

SEQ ID NO: 336069 - DNA, 570 bp, Homo sapiens
tgcaaattataatcaaaagagacatggagtaactgtattaatattagatggaattgatttttttttctttgagatggagtctcactctgttgcccaggctggagtgcagtggcacgatctcggctcactgcaagctctgcctccctggttcacaccaatctcctgcctcagcctcctgagtagctgggactacaggcacctgccaccatgcctggttaatttttttttttttgtatttttagtagagatggggttttactgtgttagccaggatgktcttgatctcctgacctcatgatccacccacctcagccttccaaagtgctgggattacaggcatgagccatcacacccagcctagatggaatagattttaagaaaaaaatgtactggcaacaaagaaatatattttctaatgataaaataatcaattataaacatatacgtacctaaaaacagagccccaaaatacatgaagactgacaaaattgaagcaaataggcaattcaacaataatggttgaatgaatatactgcttataataatggacagaaaaactagacagactat

SEQ ID NO: 336070 - DNA, 513 bp, Homo sapiens
cagaaaaaaacttacgataatcatgatatcatattattaagtattatatattgtactacataaaattatgacaccaaaaatattatttttacaattkgtaagtttatgttactaatttatcttgtctatacctattacattttgaaattcactgaatatttttaaaggaaaaagctttatattttagtatatttaatgtactttttgtttttttttaacaaagagccccatatttttcttttgcactgagccctgcaaattttgtaccaaatcctgattccttccataagggaaggagagagcagggtggtaagaagtctgggccatccacatccctttctccctcaattcctttaaccatagcatctctctgtcaaatgtaacccctgaatgtgccatgccatgtatcatatataactcttgaatgcattatgccatcatgtatgatatataacccctgaacacaccatgccatgtatgatatataacctctgaacacactaagtcatgtat

SEQ ID NO: 336071 - DNA, 538 bp, Homo sapiens
tgagtgtgaactgcaggtgggcatatagtgaagatgatgtgagagctctaaaagtctcacgttgggggttgtctggtgcacatatctagaaagttataacttaaaaatacttcaagtttagaggctttgagtcacagcccytcatttaggtatgatgcaagaatactcacaaaggtaattcgttcatatagtttttttaaaaatccacatctaaataaactcatgttagacaaaagagaaaataaaatcagtgggtattccagtggtgactcttatccaggaatccaaagaagtttaaaaacaacaacagcaacagcgttagcagcagctacagttcattaatccttataacttcattgccactgatagtgacaacttttgagaaacaaaagtggtgtggtgtggtgtggtgtgtaaatatgtcaggtaataggaacaaaggagagtcaagggagaaaacaaggctctgtggtgcattatctcgagaaaggcagacccacggtcaagtgtaggaaaagctcaagtgttatattttaaa

SEQ ID NO: 336072 - DNA, 433 bp, Homo sapiens
catggagggcaatttacactctaatcaggagaaacaaatagcaaacaattatcatgaaaggaaaaaccccaatttacggaaaacactaaaygtgctttgagaaggagaaaagttagcaaagcattgggagatttggattacagaggtttgggtctcttcacaatataaaaatctttgtctaggaaagaaggtaagggagtgggccaggaagatatctgaatatatgctccaggccatgggagcaaatggatccaaggcctatgtgtctgtattttccaggaatagcaaggaggccagcatgtgggaacccagagaatgaggtctgtggtggtaggaaatgaggttaaagcaaccatgggagaaaaataatcatcagggacttgtgtgtcaccataaggattttggcttttgctttgatggaaatagggagcca

SEQ ID NO: 336073 - DNA, 592 bp, Homo sapiens
acaatggtgcttaaagataaggatgcatatggcccaagaggcagagctgcttgcacagcagcctggacctttcagaaccttctttttgttcaagaccccactagaaactagcagctttgtaggtcagttgggaagtacactagagtaacacactaaaatgggaaatatgttgcttccaaagtcctagcaggcccactaagcatcgtgcctctttttttattgtagatgaggctgrgtacaacaatttatccatcttagaagagatatcttgacatgcctcataccactcaatccctagaaatttaacagaggtaaaggctgctgaattttagtcaggtttatttcctatcctctgacaatgcaaatgccttaccaataagtctagagtagttgctgcctcccacgcactaggtccaatcagcagaatgtcatcaatatagtggaccagagtgatatgttgtggaaaggaaagacaatcaagatccctgcaaactatattatgacatagggctggagagttgatatacccccaatctcccaaggtagaaaagagaaggtgggttactgacttgccagctgaaaccaaactact

SEQ ID NO: 336074 - DNA, 651 bp, Homo sapiens
gccagtagtgatgctggaagtgctactaggatacagaaaaaagtcataacattacaagaaaaatktaattacttgatatgtaccatagattgagttctgcagctgtggttgttcatcatttcaagataaatgaatcaagtgtaagaaccattgtaaagagagagagagagaagaaaagagaaagaattcataaagcccttgctgcagctacttcagcttgcataaaacccttgcacatttttcggctgggtgcagtggctcatgcctgtaatgccagcactttgggaggccgaggcggatggataacctgaggtcggcagtttgagacaagtctaaccaacatggagaaaccccatctctactaaaaatacaaaattagccggggttggtggtgcgtgcctgtaatcccagctactcaggaggctgaggcaggagaatcacttgaacacgggaggtggaggttgcaatgagccaagatcgtgccattgcactccagcctgcgcaacaagagcaaaactccatctcaaaaaaagaaaaaaacccttttatcttgtattgaaaatgtagtttttatgtggatgcaggattgctacaagaaaggcatatctatgaactctaatatgatttcagaaaaagcaaagtcattacatg

SEQ ID NO: 336075 - DNA, 641 bp, Homo sapiens
aattcagccaatcacaaaataagtcttgtgcctccatctgagaaggttaacagagtacccagttccttacttcttatgagtggttgaataggagtatccaaggcagatattttgcatatctctataaccagatcatgccatagactgtcagtgccttttttttttcactactggaaagagagtcattagcattttaaaatctaattagtgtagagagccaatccygggaaccccaaaatcaattcagaaaaacagaaaagaaattctgtttctttaagaaccaccatcagtaccaaagtctgtatcagtcagtgttctctagagaacagaatcaataggatatgtgtacatacacacaccacacacacacacacacacacacacacacattatggaagtttgctcacaagattatggaggctgagaaatcccatgatatgccatctacaagctggtgaacgaggaaagccaatggtgtaatgtactccaagtctgaaggcctgagagccaggggaattgatagtttacctcccagttcaaggctgaaggaccgagaaccaggagggttagggaaaggcctgaaaatcaagaaaggaggtaccagtgtaaatcttggagtccaaaggcccaagaaccagggg

SEQ ID NO: 336076 - DNA, 577 bp, Homo sapiens
tcaagaaaggaggtaccagtgtaaatsttggagtccaaaggcccaagaaccaggggcactgatgtctgagggcaagagaagttggatgtcccagctcaaggaagggaggggcggggtagagagaaaattagctctttctctacctttctgttatattcagactcttaatggattagatgatgcctgacacatccatccaaagaggatggatcttctttattcagtctacttattaaaatgctaaagtcttccagaaacaacctcacagacatacccagaaataatgttttgccagcgatgtgggcaccccttgatctagttaagttggcacataaaattaatcattagagtctgtcaagtaccttccaggcgcatgtgtgtgtgtgtgtctgtgtgtgtgtgtgtgtgtgtgtgtgtgtgtgtgtgtgtatgtgtgagagagagagagaaagagagagaaagagaaagggagagagagaaatatatgctaatctcaagggaaatcagatgactcctcaatgttggttggcatatgcatgattctactagaaatcattctgccatgaggaatgagatg

SEQ ID NO: 336077 - DNA, 577 bp, Homo sapiens
tcaagaaaggaggtaccagtgtaaatcttggagtccaaaggcccaagaaccaggggcactgatgtctgagggcaagagaagttggatgtcccagctcaaggaagggaggggcggggtagagagaaaattagctctttctctacctttctgttatattcagactcttaatggattagatgatgcctgmcacatccatccaaagaggatggatcttctttattcagtctacttattaaaatgctaaagtcttccagaaacaacctcacagacatacccagaaataatgttttgccagcgatgtgggcaccccttgatctagttaagttggcacataaaattaatcattagagtctgtcaagtaccttccaggcgcatgtgtgtgtgtgtgtctgtgtgtgtgtgtgtgtgtgtgtgtgtgtgtgtgtgtgtatgtgtgagagagagagagaaagagagagaaagagaaagggagagagagaaatatatgctaatctcaagggaaatcagatgactcctcaatgttggttggcatatgcatgattctactagaaatcattctgccatgaggaatgagatg

SEQ ID NO: 336078 - DNA, 577 bp, Homo sapiens
tcaagaaaggaggtaccagtgtaaatcttggagtccaaaggcccaagaaccaggggcactgatgtctgagggcaagagaagttggatgtcccagctcaaggaagggaggggcggggtagagagaaaattagctctttctctacctttctgttatattcagactcttaatggattagatgatgcctgacacatccatccaaagaggatggatcttctttattcagtctacttattaaaatgctaaagtcttccagaaacamcctcacagacatacccagaaataatgttttgccagcgatgtgggcaccccttgatctagttaagttggcacataaaattaatcattagagtctgtcaagtaccttccaggcgcatgtgtgtgtgtgtgtctgtgtgtgtgtgtgtgtgtgtgtgtgtgtgtgtgtgtgtatgtgtgagagagagagagaaagagagagaaagagaaagggagagagagaaatatatgctaatctcaagggaaatcagatgactcctcaatgttggttggcatatgcatgattctactagaaatcattctgccatgaggaatgagatg

SEQ ID NO: 336079 - DNA, 625 bp, Homo sapiens
gtgtcatggttccttctttttagcattcactctcatctataccctttcctaagggagagaaatatgctaatgttaagggaactcacataactccttaatgttggttggcataggcatgattctactagaaatcattctgccatgaaggctgagatgagtagtatcagtgcacccaatgaagggctctgacacatttgacaaaagcaaatgttctctccaaatcatacatgtgaatatgtttttccaaaaaaggagtactaataccattgttttattcatgccattttttcttaaaagtgctaagtttttccagacataygatactatggagaagatttttcaactcttgtctattctttcttctttaaaaagttgagattcctggtgtgaaattctcttgagcttcatttttgaggtaatttctgtaaatcaactaaaatgtattatgttttgcagataatttcgttttctaaggaaaccaacaatgcatttaatcaaaagcaaatatttcttctgctgctttttgttggacccatgcagcataatttgaaaagaatgactagctgtgttaaagaaaaagaaaaattatattaataaaatgctctttttctacattggccccaca

SEQ ID NO: 336080 - DNA, 625 bp, Homo sapiens
gtgtcatggttccttctttttagcattcactctcatctataccctttcctaagggagagaaatatgctaatgttaagggaactcacataactccttaatgttggttggcataggcatgattctactagaaatcattctgccatgaaggctgagatgagtagtatcagtgcacccaatgaagggctctgacacatttgacaaaagcaaatgttctctccaaatcatacatgtgaatatgtttttccaaaaaaggagtactaataccattgttttattcatgccattttttcttaaaagtgctaagtttttccagacatacgatactatggagaagatttttcaactcttgtctattctttcttctttaaaaagttgagattcctggtgtgaaattctcttgagcttcatttttgaggtaatttcygtaaatcaactaaaatgtattatgttttgcagataatttcgttttctaaggaaaccaacaatgcatttaatcaaaagcaaatatttcttctgctgctttttgttggacccatgcagcataatttgaaaagaatgactagctgtgttaaagaaaaagaaaaattatattaataaaatgctctttttctacattggccccaca

SEQ ID NO: 336081 - DNA, 620 bp, Homo sapiens
accttataccataattaaactcccaaggatgtcaaagaggattaaaaaaaaaatccaaaggacagcaacttcaaagattgaaggaacatcagcccacaaagatgagaaaaaaatagcacaagaactttggcaactcaaaaagctagagtgtcttcttacctctaaacaactgcactagttccctagcaatggttcttaaccaggctgaaatggctgacgtgacagaaatataattcagaatatggatagaaatgaagatcatcaaaattcagaagaaagtcaaaacccaatccaagaattctaaggaatacagtgaaatgatacaggagatgaaagatgaaatggtcatttaaagaaagaccaaaactaatccgatagagctgaaaaactcactttaaggattttagaatgcagctgcaaatattaacagcagactcaaacaagctaaagaaagaatctcagagcttgaagactagctctctgaaataactcagtcagacaaaaataaagawcaaacaataaagaagagagaacaaaacctctgagaaatatgggattatgtaaggagacctgagatacgactaattggcgtccctgaaagggaggaagaaaaagcaagc

SEQ ID NO: 336082 - DNA, 547 bp, Homo sapiens
cccttttgctgtgtaaactaacaaattcataggttgtagagattagaatgtggacatcttcagggagtcactattctctctactacactaccctccaaaggtgaacatgtcacctaaatagtaaaattaaagacttccctgggagtgttattagggtgggaagagaagttattttttcctgggagtggctgagcttgaagaaaatgatgttaggctgctggcaactatctttccagttacatagaggaagctyctgtcatgcaggagggaatgaagccagctgattgacaactatagccaagagaatggaaatgaagggctgtgatggcaatgtttaaacacctatatccagccacacttgaaatcagacctaaccctaatttcccagacttaggaaccaagaagtttcctttttgcttgagctattttgagctaaatttctgtactaatgactacccatacatttttcttaaacactaaggaggggaggagttaagggccaactcaattatttttacgctgcttttaaaaggtatgatagagtctg

SEQ ID NO: 336083 - DNA, 520 bp, Homo sapiens
gcactttgcaagggtgagatggatacattgcaggtgaggaaatattttattgcttagagccctgaacagaagaatcctgcctttttatggacccaggaggccagagagagggaaaagggttagaggtagaaaagcattaagtcagagtgtagaatagtactttagccaaggtctctgacaaggagagctcaatgcagatgtctgggaagtgcctcagccaaggcctctgataaggaggcctctgaatggaggtgccagggctaggaatgcaratatccatattagtatggctggcttcggagaggatgtttcagtccttgactgcaactccttccagaaaattgtagtgcactcactgtgtaccaagtctggtatagggaggaaagcttccctccatgaagcctgccacataaagcctggaaactgtctgtgtttgggtctgaatggtcacttgtaggattttggtttagagatagactcctcaataagtaccacctcttctctttcttccttcattaag

SEQ ID NO: 336084 - DNA, 520 bp, Homo sapiens
gcactttgcaagggtgagatggatacattgcaggtgaggaaatattttattgcttagagccctgaacagaagaatcctgcctttttatggacccaggaggccagagagagggaaaagggttagaggtagaaaagcattaagtcagagtgtagaatagtactttagccaaggtctctgacaaggagagctcaatgcagatgtctgggaagtgcctcagccaaggcctctgataaggaggcctctgaatggaggtgccagggctaggaatgcaaatatccatattagtatggctggcttcggagaggatgtttcagtccttgactgcaactccttccagaaaattgyagtgcactcactgtgtaccaagtctggtatagggaggaaagcttccctccatgaagcctgccacataaagcctggaaactgtctgtgtttgggtctgaatggtcacttgtaggattttggtttagagatagactcctcaataagtaccacctcttctctttcttccttcattaag

SEQ ID NO: 336085 - DNA, 520 bp, Homo sapiens
gcactttgcaagggtgagatggatacattgcaggtgaggaaatattttattgcttagagccctgaacagaagaatcctgcctttttatggacccaggaggccagagagagggaaaagggttagaggtagaaaagcattaagtcagagtgtagaatagtactttagccaaggtctctgacaaggagagctcaatgcagatgtctgggaagtgcctcagccaaggcctctgataaggaggcctctgaatggaggtgccagggctaggaatgcaaatatccatattagtatggctggcttcggagaggatgtttcagtccttgactgcaactccttccagaaaattgtagtgcactcactgtgtaccaagtctggtatagggaggaaagcttcccyccatgaagcctgccacataaagcctggaaactgtctgtgtttgggtctgaatggtcacttgtaggattttggtttagagatagactcctcaataagtaccacctcttctctttcttccttcattaag

SEQ ID NO: 336086 - DNA, 520 bp, Homo sapiens
gcactttgcaagggtgagatggatacattgcaggtgaggaaatattttattgcttagagccctgaacagaagaatcctgcctttttatggacccaggaggccagagagagggaaaagggttagaggtagaaaagcattaagtcagagtgtagaatagtactttagccaaggtctctgacaaggagagctcaatgcagatgtctgggaagtgcctcagccaaggcctctgataaggaggcctctgaatggaggtgccagggctaggaatgcaaatatccatattagtatggctggcttcggagaggatgtttcagtccttgactgcaactccttccagaaaattgtagtgcactcactgtgtaccaagtctggtatagggaggaaagcttccctccatgaagcctgccacayaaagcctggaaactgtctgtgtttgggtctgaatggtcacttgtaggattttggtttagagatagactcctcaataagtaccacctcttctctttcttccttcattaag

SEQ ID NO: 336087 - DNA, 546 bp, Homo sapiens
tctacatatgcctagtagcttccagattggacatcacagatatagaacattatgatcattgcagaaatgattattggacagtgctgcaatagacaattatatggcttcatatctggactgcatttaaaaaacattaattgaattatgttttgacatgctgacattggcctggattgaggcctattctaataataatagctaatgtgtattaaatattcttacgtggcagacattgttcttacatgtcagagtctccttttggaagcagggcccatcatcctcttgacacgttgatytatccaccaaccatgaagcttacctgagccttggcatccagagtttttattggagtttcattacaaaggcatgattaattaaattattggtcacatgattgaactcagtcttcagccttcctggaggttggcctaactcaaagccccaaccctttaatctcctggttggtctttctttgacccatcctgagttacctcattagcataaaacatgtattatgcaaggaacctatcaagagtaacaaagaca

SEQ ID NO: 336088 - DNA, 404 bp, Homo sapiens
taaatattcttacgtggcagacattgttcttacatgtcagagtctccttttggaagcagggcccatcatcctcttgacacgttgatctatccaccaaccatgaagcttacctgagccttggcatccagagtttttattggagtttcattacaaaggcatgattaattaaattattggtcacatgaytgaactcagtcttcagccttcctggaggttggcctaactcaaagccccaaccctttaatctcctggttggtctttctttgacccatcctgagttacctcattagcataaaacatgtattatgcaaggaacctatcaagagtaacaaagacacttctatctcaggaaattccaaggatttagaagttcctaggaaccaggaacaaaaccagacaaattc

SEQ ID NO: 336089 - DNA, 371 bp, Homo sapiens
acagtaaatcagcactaaaagatgagccaaaatatgaccctgagtagtttgtctcccagctgcactcttagacactaggctacactgccttatatagtcccaggccatgtctattgccacctcattaaactcatgttttgtggaaaacgtagtgcccagagttctgccctggatgaggttatctggagagagagaacatgtgtatgaaaaygtttcatcatggattggggtaagttagggctgaataggtggaacacagaggatttttaggacagtgaaaatattctgtatgatgctataatgttggatacatgccattatattagacatttttccaaacccatagaatgtataatgccaagagtgaaccc

SEQ ID NO: 336090 - DNA, 559 bp, Homo sapiens
gactgaacaactattgtgggggaataattactggagggttctattcagccatcttgctccacctctcccccattcttttttttttwaattttgtttattctaggtactctgcatttccacttaaatttaggaactagttgtcaatttctatgaaaagcctgctggaattttgataatgattatgttgaatctataaatcaatttgaagagaattgccattttaactaaactaagtcttctaatccacaaacatagtatatctttccacctacttacgtctcattaatttctcttagcaatgttttatagtttttattatatagttcttgtactttaaaaaatttattcccatatattttattctttttactttcatagtaaatgatattatcttaattttatttttagattgttgattgctaataaacagaaatacaattgatttttgtatatttatcttttaccttatgaccttgttaaacttgcttattaaggcagattccttaagatttcctacatacaaatcatatcgtccatgaataaagacaattttacttct

SEQ ID NO: 336091 - DNA, 413 bp, Homo sapiens
tttatcttttaccttatgaccttgttaaacttgcttattaaggcagattccttaagatttcctacatacaaatcatatcgtccatgaataaagacaattttacttcttacctttcaatatgcatatctttaatttcttawtcttacctcattgcactgcctcgaatgtccagtgcaatgttaaataaaagtgatgagaagagacatttttgtatcctttcaaatcttagggtgagaaagcattcaggcttttaatattaaccatgaaattacctgcagctcaggttgaagaaatgtttatttctagtttgttgaaaatttttaccatgaatgtatgttggatattttcaaacgtttttatatttctattgagatcattatatggactttgtcctttattctattaagatgatg

SEQ ID NO: 336092 - DNA, 583 bp, Homo sapiens
gtccagggacacagtctcataaaaagactgaaacctactcataggactaatgttttccctccctataaaacttaccgctactttactaaaggcctatttactgcagttccagttacccagtatatcatgtcaacctttctacagaaaatttataggtcattctagaaggcaaaaaaaaaaaaaaactgtgaggagacaaaacaagcatcataacgacagatagatatggtagaaatgttaaaattatcagactaggatttttttaactgcaattaatatgctaaggttaatggcagaaaagatgagtaacaagcggagagacgaamattctaagaaagaaccaaaagacatgccagacatcaaaaacactgtagtagaaatgaagaacgtctttaatgggctcattagtagactggacgtgactaaggaaaaaaaccccaagcttgagtatgtgacaatagaaactttccaaactgaaaagaaaaaagactaacataaaatccaagaactgctggacaacaaccaaagaggaaaccaaagaggtaacatatgcacaatgggaatatcagaaagagaagaaaga

SEQ ID NO: 336093 - DNA, 610 bp, Homo sapiens
tgttgctagactcagattaatattttgttaaggatttttgcatctgtgtccatgaaggatattggtctatagttttcttgtgatgtctttgtcagctttgtctggcttcattaaaatgagttgggwagaagttctctcctatctgttttctgaaaaagtttgtgtagaatcagtatgatttcttccttaaatacttcacaagattctccagttaaaacatctagacctggccactttatgggatattatccttttaatgattcaattcaataaaattttattgggtacctattatatacgtgctgctgcagttgactttaaggacctacaatttccaatatgtataaattttacactctactataaagatttttaaaatcctacatacaaaaatcaaccatgccataatacaaggtactgtttaattatgtgcaaacatcatggagaacaaaacactaactgaaactttattcaaattcagtttctgtcattacctggtagttgaaccttaatcacttaaacatcctaagttgcagtctcctcattgtaaaataataaagttcgatgagaatacttctaagatccttccagtatttaaattatttaatct

SEQ ID NO: 336094 - DNA, 610 bp, Homo sapiens
tgttgctagactcagattaatattttgttaaggatttttgcatctgtgtccatgaaggatattggtctatagttttcttgtgatgtctttgtcagctttgtctggcttcattaaaatgagttgggtagaagttctctcctatctgttttctgaaaargtttgtgtagaatcagtatgatttcttccttaaatacttcacaagattctccagttaaaacatctagacctggccactttatgggatattatccttttaatgattcaattcaataaaattttattgggtacctattatatacgtgctgctgcagttgactttaaggacctacaatttccaatatgtataaattttacactctactataaagatttttaaaatcctacatacaaaaatcaaccatgccataatacaaggtactgtttaattatgtgcaaacatcatggagaacaaaacactaactgaaactttattcaaattcagtttctgtcattacctggtagttgaaccttaatcacttaaacatcctaagttgcagtctcctcattgtaaaataataaagttcgatgagaatacttctaagatccttccagtatttaaattatttaatct

SEQ ID NO: 336095 - DNA, 610 bp, Homo sapiens
tgttgctagactcagattaatattttgttaaggatttttgcatctgtgtccatgaaggatattggtctatagttttcttgtgatgtctttgtcagctttgtctggcttcattaaaatgagttgggtagaagttctctcctatctgttttctgaaaaagtttgtgtagaatcagtatgatttcttccttaaatacttcacaagattctccagttaaaacatctagacctggccactttatgggatattatccttttaatgattcaattcaataaaattttattgggtacctattatatacgygctgctgcagttgactttaaggacctacaatttccaatatgtataaattttacactctactataaagatttttaaaatcctacatacaaaaatcaaccatgccataatacaaggtactgtttaattatgtgcaaacatcatggagaacaaaacactaactgaaactttattcaaattcagtttctgtcattacctggtagttgaaccttaatcacttaaacatcctaagttgcagtctcctcattgtaaaataataaagttcgatgagaatacttctaagatccttccagtatttaaattatttaatct

SEQ ID NO: 336096 - DNA, 540 bp, Homo sapiens
tagtaggcagctcaacagcagatctccaagctacccaaatccactgggtaatcaaaaacattccgtaagctgctgtatgacttttttctttcctcccgcaaacagcagtagcaggattaatgtcaacacacactcccccataccacccccacacaggcttagcctgtttaactgcaattactctcctgaacaagattcttgttgccacttggcaaagatgaaaagaagagagggtaaagagcacagactattcatataaataaatacaaagtaccttatgttattcgacactttccacatttcaaacrttttcacatatttgatccttacaaatcaatgaagaggcagaggaggtattgctgatcccattttacagatgaggaaagctgaggctcagggaagtgaagtggctaaccaaaaagttatatagctcataagtggatggaacccacactcatatcttctgactctattgcagagttctttctgctgtgccagatgtttgcacactcaactcaaaaaaactggtgacataacttt

SEQ ID NO: 336097 - DNA, 540 bp, Homo sapiens
tagtaggcagctcaacagcagatctccaagctacccaaatccactgggtaatcaaaaacattccgtaagctgctgtatgacttttttctttcctcccgcaaacagcagtagcaggattaatgtcaacacacactcccccataccacccccacacaggcttagcctgtttaactgcaattactctcctgaacaagattcttgttgccacttggcaaagatgaaaagaagagagggtaaagagcacagactattcatataaataaatacaaagtaccttatgttattcgacactttccacatttcaaacgttttcacatatttgatccttacaaatcaatgaagaggcagaggaggtattgctgatcccattttacagatgaggaaagctgaggctcagggaagtsaagtggctaaccaaaaagttatatagctcataagtggatggaacccacactcatatcttctgactctattgcagagttctttctgctgtgccagatgtttgcacactcaactcaaaaaaactggtgacataacttt

SEQ ID NO: 336098 - DNA, 395 bp, Homo sapiens
aagtggctaaccaaaaagttatatagctcataagtggwtggaacccacactcatatcttctgactctattgcagagttctttctgctgtgccagatgtttgcacactcaactcaaaaaaactggtgacataacttttcaaattcccttatatctacctgtaagttgcaaagtctcccacagtcatggttgtctaatgtattcaattcctctagatgttttggacccaaaatctctctttcctcaccctctggcctgccatggatctgtatttccaccatttgagtttacttctccacctaacaagctggaatttaccatgcaggccagtttttctcaatattgtttctgaggtacctccataagaaatacactgggaatatgttaaaaatataaa

SEQ ID NO: 336099 - DNA, 604 bp, Homo sapiens
ggaacccacactcatatcttctgactctattgcagagttctttctgctgtgccagatgtttgcacactcaactcaaaaaaactggtgacataacttttcaaattcccttatatctacctgtaagttgcaaagtctcccacagtcatggttgtctaatgtattcaattcctctagatgttttggacccaaaatmtctctttcctcaccctctggcctgccatggatctgtatttccaccatttgagtttacttctccacctaacaagctggaatttaccatgcaggccagtttttctcaatattgtttctgaggtacctccataagaaatacactgggaatatgttaaaaatataaattcctgggcatcatcccaaatccatggaatcagaatcttttgggggtgtgtttaggaatttgcatttttaacaagctctcccaagctgaatccagccttaaagttaagaagcacagctttcagcaatgaaaatcctgggatgttttaagccagagactagaatcaccaaagggttattttaaggtgataaacttggaagtaatgtttcacatgagctggagtagaaagactggcgtctaggagaactg

SEQ ID NO: 336100 - DNA, 604 bp, Homo sapiens
ggaacccacactcatatcttctgactctattgcagagttctttctgctgtgccagatgtttgcacactcaactcaaaaaaactggtgacataacttttcaaattcccttatatctacctgtaagttgcaaagtctcccacagtcatggttgtctaatgtattcaattcctctagatgttttggacccaaaatctctctttcctcaccctctggcctgccatgratctgtatttccaccatttgagtttacttctccacctaacaagctggaatttaccatgcaggccagtttttctcaatattgtttctgaggtacctccataagaaatacactgggaatatgttaaaaatataaattcctgggcatcatcccaaatccatggaatcagaatcttttgggggtgtgtttaggaatttgcatttttaacaagctctcccaagctgaatccagccttaaagttaagaagcacagctttcagcaatgaaaatcctgggatgttttaagccagagactagaatcaccaaagggttattttaaggtgataaacttggaagtaatgtttcacatgagctggagtagaaagactggcgtctaggagaactg

SEQ ID NO: 336101 - DNA, 564 bp, Homo sapiens
cataacttatctcatacatgagcttcaatacaaataacttacttctataaatcaaactgtctacacttggctagaccaatgcttcatgcagcccaaggctgtcctgaggctagtaacaaccattaattcagcccaccttctgcacccaaccccacctctcaaacaaaaccccagacacttaactccaaaagcgctattgagtaatatcattgttactgatggactcatggatagacagaagaaaacattttcagaataccttatacatccctagtctstctccctggcagagatatttggtatctggtcagcttgcagtctccacccaacacaataaaagctagttgtttggcataagctaagcaaaaagcctggtcctaaaccaagccctattcttctgagaactgcaagcgagctctcagaaccctgcaaagttacagctacaatcacttctgatcctcaaaaagtttaatggatacatatatcaaaacatcatgttgtacaccgtaaatacatacaataaaatttttaaaaaattgagcagaaacatatatttgatcaatt

SEQ ID NO: 336102 - DNA, 572 bp, Homo sapiens
tgaatagttcatacaccacaattacagtgtaataatattctgtgtttctctgtgtacttactattaccagtaaggtttgtaccttcagatgacttactccygtcatgttgttatccgtttgctggttgttttgcagtctcctcttccttctttcttttcttcctgtcttccttttagtgaaggtgattttctctggtggtatttttttttttattttttgtgcatccattgcatgttttttttatttgaggttaccatgaagcttgcaaataatatcttataatccattattttaaactgaggacaacttaacactgattgcataaacaaactaacaaaccagcaaaaaaaccataatacaaactctacattttaacttcattttgcccagttttaaaccttttgttttttctatttatatcttactgtactatgtctcaaaaagttgtagtttttttttgatcagttcatcttttcatctttctacttagatatgaatagttcatacaccacaattacagtgtaatactattctgtggttctgtgtgtacttactactaccagtaaggttt

SEQ ID NO: 336103 - DNA, 598 bp, Homo sapiens
atgttttaggtttttatctttctcatagcagatgctaaaatcatatcaccctagaatttagaatgcctgagttctagttccagttttaccacagacttgctataggaccttgagtaattccactcttccttctggggctcagtttcttcatctgtaaaacgagaagactgaactagcttgtatccaaggtcactccaatccaaatattcttaatttctaagttgacttctctggatcccttcyagcaacatgaaagtttaaaatctccaggtccgaattattacttggttcatttgagttcagagtatataaaatgtctctaagagtgtgcaccagagtctcatgctacagcagtggaactataaattggcttagctacttaactgtctgcccacacatatttctcactatgacttctttaatcaggtccagtgcaactaggtaagggagagacatgttaaaataataagtagtcaccttagcatctggtcacatcagagaagtgtcgcatgccttttattcaccacagggcctctctataaataattttccacctctttcatcctcctaccattacactcaccaagaaacatgtgct

SEQ ID NO: 336104 - DNA, 547 bp, Homo sapiens
tcctgcttccacctggaatcccagggaaatgcaatcattcagtgtataatctagcaacatggggtggctattgaagaaaaagagaactatagacagaaggaaacaagtataggaaaagaaagtgttgatgagagcaacatgttcctagagcctgcatgtggtatggaggaaaaccggacattcccacctacccacactgtggcctgcagacttgctgagaggatcagctgactcaaagagccctgacatgggatcaagaacacaaacagaccaccagtggccgtggcagttcatgtgcatgtgcatctgcatgatctttcgtccccttctccttcacttctcactgagtggccttgctggtgtgsctggagccacttggcccatgaggcacatggggtcacctgctcctaactcagaaggtatcttcttaatgcattggcttcaaaatcagtagagaaaataagttctgtgttctctagcagagtgggtataatttggcattcagcaaatcaaatatcaaaggaattttagtctgctatgaactatg

SEQ ID NO: 336105 - DNA, 598 bp, Homo sapiens
atgttttaggtttttatctttctcatagcagatgctaaaatcatatcaccctagaatttagaatgcctgagttctagttccagttttaccacagacttgctataggaccttgagtaattccactcttccttctggggctcagtttcttcatctgtaaaacgagaagactgaactagcttgtatccaaggtcactccaatccaaatattcttaatttctaagttgacttctctggatcccttccagcaacatgaaagtttaaaatctccaggtccgaattattacttggttcatttgagttcagagtatataaaatgtctctaagagtgtgcaccagagtctcatgctacagcagtggaactataaattggcttagctacttaactgtctgcccacacatatttctcactatgacttctttaatcaggtccagtgcaactrggtaagggagagacatgttaaaataataagtagtcaccttagcatctggtcacatcagagaagtgtcgcatgccttttattcaccacagggcctctctataaataattttccacctctttcatcctcctaccattacactcaccaagaaacatgtgct

SEQ ID NO: 336106 - DNA, 662 bp, Homo sapiens
gaaattagccttctaggagttaaaaaaatattttttaatgatccaggttttcttaggattctagtatgtgagcagaaacaggccaatatgattattttctgctactgttctaaagctcgtgcttctgctagttctgacgcttgtaccatagttgcttggctaagtgacatttactgacttcagcaatagtgtccttatgtagagaacattgtagrttacctactcaactaactttttgcttttgtcttcttcccgagagaattctgattttgtccaaacatccatctcttctccccagagctaagtactttgggagaagttggcctcatccccagttacagcagataggtcctgaatagactaagctggtgttgactattccaaagggatcaccagtgattggtttaggagtgacatgtgtcttgttctgacaaataagatgtgagggaaggtctgctgggatggaggtggggagttctgggaaaggttttcttggtcttatgaagaatgcaccagaagagaccatccctcttctgcctcttgacattgccctgttgaatgttatatctggaagtagtccattttactgccatcctaaggatgaagccaacacagaggagagaacccatatcacagagggaagtggtgccccaatcatgcca

SEQ ID NO: 336107 - DNA, 662 bp, Homo sapiens
gaaattagccttctaggagttaaaaaaatattttttaatgatccaggttttcttaggattctagtatgtgagcagaaacaggccaatatgattattttctgctactgttctaaagctcgtgcttctgctagttctgacgcttgtaccatagttgcttggctaagtgacatttactgacttcagcaatagtgtccttatgtagagaacattgtaggttacctactcaactaactttttgcttttgtcttcttccygagagaattctgattttgtccaaacatccatctcttctccccagagctaagtactttgggagaagttggcctcatccccagttacagcagataggtcctgaatagactaagctggtgttgactattccaaagggatcaccagtgattggtttaggagtgacatgtgtcttgttctgacaaataagatgtgagggaaggtctgctgggatggaggtggggagttctgggaaaggttttcttggtcttatgaagaatgcaccagaagagaccatccctcttctgcctcttgacattgccctgttgaatgttatatctggaagtagtccattttactgccatcctaaggatgaagccaacacagaggagagaacccatatcacagagggaagtggtgccccaatcatgcca

SEQ ID NO: 336108 - DNA, 630 bp, Homo sapiens
gggtaatggtgcacatggcagggtttgttataaaaataagagatggggaaaatatgctagggagccaaaaacttgccaccaaaatatgccttgaacactgtgtagctgaattcaataaaaaacagttactcattacacaccttgtcacggagcatcccagctaggccatctgttgacactttgaaggataagttgttgcctttttctcccctttccaggtcttttcctaartaatgcgaaactaacctaccttgcttttctgatagaaactttatctgcaccaatctgctgtcatgaggcccactgggctctgctcataggaatcatgactgatttttctgctaatgacagacatgaggtccttgcactgttcccctcaattgggttttgtccatcttcatcacactccacccccggcccctggttcttttgcctgcccttgattctttttccctcctgttccttcttgcttactcttatccttaatgctgttgtctattggactgtttctgtcagaagagatagctagggggattatgaggcttatttaacagatgaagaaatgaaggctcagagagtttaaagtgatttgttccaggtcgcacagttggtatttggcagatgagcaat

SEQ ID NO: 336109 - DNA, 630 bp, Homo sapiens
gggtaatggtgcacatggcagggtttgttataaaaataagagatggggaaaatatgctagggagccaaaaacttgccaccaaaatatgccttgaacactgtgtagctgaattcaataaaaaacagttactcattacacaccttgtcacggagcatcccagctaggccatctgttgacactttgaaggataagttgttgcctttttctcccctttccaggtcttttcctaagtaatgcgaaactaacctaccttgcttttctgatagaaactttatctgcaccaatctgctgtcatgaggcccactgggctctgctcataggaatcatgactgatttttctgctaatgacagacatgaggtccttgcactgttcccctcaattgggttttgtccatcttcatcacactccacccccggcccctggttcttttgcctgcccttgattctttttcmctcctgttccttcttgcttactcttatccttaatgctgttgtctattggactgtttctgtcagaagagatagctagggggattatgaggcttatttaacagatgaagaaatgaaggctcagagagtttaaagtgatttgttccaggtcgcacagttggtatttggcagatgagcaat

SEQ ID NO: 336110 - DNA, 575 bp, Homo sapiens
agaaaacacttaagtctgaatacttacatgtctcacaaacgtttgttaatggtagtattagaaataactgaaacgcaaaggataaaaactaagtcctagaatacatcaaactcaaagtcactgaaagtgctatagtcagtctgatcgattgtgctaatacccaccaccaatcacatttcatcaggatctcaacagtgattttctttatgaggaaaagtttttaactcctgaaaaactagaaataaccaaagtcctaaaatacaagaaaaggagcaaggtataataaaaaggcatttgaccaaatttcagacttgtttctccttggtgttcttgggccaaccactccatgtcttatgcaccatatatttttacctaccaaataaggaggtcaagccagataaactctggagtctaacattctctgatttcatgaggtatccttgactgaatgtttaaaaatctactctattcaaatgttttatactatctatagatagatagatagatagatagatagatagatagatagatagatagatagrtacagagaggatctcaacattgcccaggctgga

SEQ ID NO: 336111 - DNA, 634 bp, Homo sapiens
ttgttagggcttcagtaaaaaggtacgcaaactggttaaaacaaaagagattcaccccatagttctggaggctagaagtctgaaatataggtgtctgcaagggcatgcttcttctaaaggctctagtggatccttttttcctctctgggattctggtgttgttggcaatccttggtgttctttgtcttgtagatgcctcrttccagtcacatggccccttttctctgtgtcttcacattgtcttttctctttgtgtccaaatttcccctttttataaagatactagtcatattggatgaggagccactctaatgacctcatcttaatttgatcattgttaactcctatttctgtaaagtcagattcatagatactggggattaggacttcaacattttattgaggaacacaattcaacctataatagtgattaaggtggaagctgaagtttaatagcagctgttgtagatagaatcttcacatgtgaatttgccagcattatctgttccatctgttatacaatgcaatatttacctctgggaaagctgcatagagacatctttgccttacttcaggaaaagagacaacaattacagttttctatctactttttcccgagagagaaaaatattat

SEQ ID NO: 336112 - DNA, 575 bp, Homo sapiens
tagaggggaagaatgtttgcctcgggagtttattgcaggcaaattatccctggaaaatactgctgggaaaggtgctgaacaaacaacatctacatttacacagttagatattcattaaaacagaaaatgcccattaaatttagagagatgctaagtgccagattcaagaacagaccagtgcagaaaagttggtgcaaatttctccccattgtgtaccagggataagtcaggttgcatagcagtaacttttcccaggtaaccctcactacaagactgtcaagtgtaccttgcaagaagtgagttttcttttttcctaaggaacataatgagaaggtcagayagtaggatttcaagcaagaacagtagcaattacatctgaacaaggagttcactcttgatattccaatgggcccgaatgaaagtcatcatttattttgacattattattattttgacataaaacataatcaaacgatattcatgagccctctctgtgaactaaaaacccattttctgtgtatgtagactagttgaatcttggatttgagaatgtacagagaaagggggaatttatt

SEQ ID NO: 336113 - DNA, 541 bp, Homo sapiens
caagaggagcccctccatcctttgtctcataaacctacaattttttccaaattgcgaatacagaaattgaagctcaaaaaggtgaattattgtaactaagggtggctagaaggtaaaggtaagaaatgagagtcaaacccaaatgccaaagtgtgtgccaataaccacagtgttatgtgaccttcattatcaagaaactgtgctgagtgakgtacgaagcaatttagatgaaaacggcaactagcctccaggaatataaactccaagtgaaataaaacaaggacatacatacagataagtaaaatgttgaacaaataaacacactctgtgtggccaatctctcactggctggtctaaacttaggactcaagagaagcatccttccctggttgtcacaagaatccactgcccacccggacaatcatcctccttcatatgctagcaactaggtgtgtatgttccattcctgtgaaatcctctggtgagcctttgataatccacctttcttataaatgtccacagccccaaaagccaagaagag

SEQ ID NO: 336114 - DNA, 541 bp, Homo sapiens
caagaggagcccctccatcctttgtctcataaacctacaattttttccaaattgcgaatacagaaattgaagctcaaaaaggtgaattattgtaactaagggtggctagaaggtaaaggtaagaaatgagagtcaaacccaaatgccaaagtgtgtgccaataaccacagtgttatgtgaccttcattatcaagaaactgtgctgagtgatgtaygaagcaatttagatgaaaacggcaactagcctccaggaatataaactccaagtgaaataaaacaaggacatacatacagataagtaaaatgttgaacaaataaacacactctgtgtggccaatctctcactggctggtctaaacttaggactcaagagaagcatccttccctggttgtcacaagaatccactgcccacccggacaatcatcctccttcatatgctagcaactaggtgtgtatgttccattcctgtgaaatcctctggtgagcctttgataatccacctttcttataaatgtccacagccccaaaagccaagaagag

SEQ ID NO: 336115 - DNA, 541 bp, Homo sapiens
caagaggagcccctccatcctttgtctcataaacctacaattttttccaaattgcgaatacagaaattgaagctcaaaaaggtgaattattgtaactaagggtggctagaaggtaaaggtaagaaatgagagtcaaacccaaatgccaaagtgtgtgccaataaccacagtgttatgtgaccttcattatcaagaaactgtgctgagtgatgtacgaagcaatttagatgaaaacrgcaactagcctccaggaatataaactccaagtgaaataaaacaaggacatacatacagataagtaaaatgttgaacaaataaacacactctgtgtggccaatctctcactggctggtctaaacttaggactcaagagaagcatccttccctggttgtcacaagaatccactgcccacccggacaatcatcctccttcatatgctagcaactaggtgtgtatgttccattcctgtgaaatcctctggtgagcctttgataatccacctttcttataaatgtccacagccccaaaagccaagaagag

SEQ ID NO: 336116 - DNA, 599 bp, Homo sapiens
agaaccagttaaaatatctttttcttggattttttgaaaacatcacacacctttaccttgaattgttttggaatcatgctcgtggatttagaacgagacaatttcatgaagcagaaatcatttggaaggcagttcatgatgccatttgtcttattaggtcatcttcagaaggagtgacttttaaaactgaccacatgagattayacacatggagaggcattaaaaaggataacctaatattacagattggagattttcttattctgcaggaaacccttgacctttacatgatcatatctccatttatttagaactaagcattgcttttctttttctttaccccatgccctacacccccatttaaaaaataaagacaatataataacattacagaaagtttggaaacagaggagaaaacacacatgaattgccccctctcatagagctagtgccatcattctggccctaggttagggcatagttgtgctttggttgtttctgccagcccagcattaatttccttttcttctttacgtagcactttgattttccttagacaaacaaactactcttggaccatgtggttggggtggacctcg

SEQ ID NO: 336117 - DNA, 574 bp, Homo sapiens
aatacatttggttaactctgggggttagtgaatcaagtagctrgagtaaaaatgtatcttatgtaattgctatccatatcagaaatggataatcacaggaatttctttccacatagaggatagtggaagaaaagactagtgtgccatcaagggtgtctcccattgtgcttcctcatgatggtggttctctgacttatgtttggtaaagggaacattttttaattcatgttttccttcgctctgttgtcagttacagcttttgctcaggggagccttcacctcctcacgtctacctccttcctcattcctggtttgtacaacacccggatgaaccctctgccagctcagtgattatggttcgaagcttaaatcactggccaccctagggagcattcttatttaaaagactgcttgaaaaacattctgaagctgaagaagcaatagaaaaatatatcttcttggggatttcagtctacgtaaagaggctggacagagagaaaaggatgaaagaagatctgagctctaatcttcttagctctgccattggcttggggtttgaccttgggctagtcac

SEQ ID NO: 336118 - DNA, 574 bp, Homo sapiens
aatacatttggttaactctgggggttagtgaatcaagtagctggagtaaaaatgtatcttatgtaattgctatccatatcagaaatggataatcacaggaatttctttccacatagaggatagtggaagaaaagactagtgtgccatcaagggtgtctcccattgtgcttcctcatgatggtggttctctgacttatgtttggtaaagggaacattttttaattcatgttttccttcgctctgttgtcagttacagcttttgctcaggggagccttcacctcctcacgtctacctccttcctcattcctrgtttgtacaacacccggatgaaccctctgccagctcagtgattatggttcgaagcttaaatcactggccaccctagggagcattcttatttaaaagactgcttgaaaaacattctgaagctgaagaagcaatagaaaaatatatcttcttggggatttcagtctacgtaaagaggctggacagagagaaaaggatgaaagaagatctgagctctaatcttcttagctctgccattggcttggggtttgaccttgggctagtcac

SEQ ID NO: 336119 - DNA, 574 bp, Homo sapiens
tgtccctggggttttctttcacctcttccagttctgccatcaggtgctcagatcgcctggtgcaggggagagagatgaagccataggaaatctacttaatcagtaagagcacttgtgaaataatcactcccctaattaagcaaagcggcagatagacattttcatccatgatcatcctgaacagttcttaaaggctgcttggaacgtgttcttaggggcttggaacagttcttacaggctgcttagaggctgcttgatatgggaaacgttgatcaatcagtggtttgtctctgaatctggtayatgcagaaggccctgtacttggctcaaacccctacacattaaaaataataataataatagcaacgataacaactgctaatacccatttggtgcttaccactttatatgcacagtttcatttaattttcagaacaactctaggcactaggaactattactatccccattttctatgtgaggaaatggggctcaaaggggttcatttgggaacgctgatcaatcagtggtgtcttctgtatatggatgtggaagggaggggcagagatgcagt

SEQ ID NO: 336120 - DNA, 574 bp, Homo sapiens
tgtccctggggttttctttcacctcttccagttctgccatcaggtgctcagatcgcctggtgcaggggagagagatgaagccataggaaatctacttaatcagtaagagcacttgtgaaataatcactcccctaattaagcaaagcggcagatagacattttcatccatgatcatcctgaacagttcttaaaggctgcttggaacgtgttcttaggggcttggaacagttcttacaggctgcttagaggctgcttgatatgggaaacgttgatcaatcagtggtttgtctctgaatctggtacatgcagaaggccctgtacttggctcaaacccctacacattaaaaataataataataatagcaacgataacaactgctaatacccatttggtgcttaccactttatatgcacagtttcatttaattttcagaacaactctaggcactaggaactattactatccccattttctatgtgaggaaatggggctcaaaggggttcatttgggaacgctgatcaatcartggtgtcttctgtatatggatgtggaagggaggggcagagatgcagt

SEQ ID NO: 336121 - DNA, 551 bp, Homo sapiens
tttattttaggcaagcatccttctcataaaatatttacacgttctaatagcaaacattcacattagtatgtgttaaagatctgaaatttacttaaccaaaattgtttgcttttctgcgtccaaccggcaggatttccagaaatccaaaagagataaagagattttcttacaaagccagttaaagcatcagatagaaatttggaaagggcaattctaaaataagkctcttttagaataagaacttgctgaagatcttgacttgaggagtccacactagctcaaacacctgcaaaatgagcaaataaggcataatttccccaagacgttatgccggaatcttgctaaattcttttcactgccaaggactcagttaatgtttcaaaggataaagcgcagcaggttttagcagtttttctgggtatcgagaagagagaatagatttaggaactgcctgtttttatcaaaagagaacagataaggagtcgtcttctgcctccattagagttgcttctggagatgtcaaaatatttctaatgttggcagcaggctct

SEQ ID NO: 336122 - DNA, 531 bp, Homo sapiens
gatagtttcaaggtaaaaaaaaaaaaagtcttgatttaagatcaagcaagtgtttaaaagcatttctgaaccccttggagaaaggcactttctaaataaaagtttcattcgatctttttaaaatgtttattttaggcaagcatccttctcataaaatatttacacgttctaatagcaaacattcacattagtatgtgttaaagatctgaaatttacttaaccaaaattgtttgcttttctgcgtccaaccggcaggatttccagaaatccaaaagagataaagagattttcttacaaagccagttaaagcatcagatagaaatttggaaagggcaattctaaaataaggctcttttagaataagawcttgctgaagatcttgacttgaggagtccacactagctcaaacacctgcaaaatgagcaaataaggcataatttccccaagacgttatgccggaatcttgctaaattcttttcactgccaaggactcagttaatgtttcaaaggataaagcgcagcaggttttag

SEQ ID NO: 336123 - DNA, 579 bp, Homo sapiens
tcttctgcctccattagagttgcttctggagatgtcaaaatatttctaatgttggcagcaggctctgtggtaggtatattttgggtagaaaacaactccacctgtttcttggaacttattttgaataaatctcctgggaaatcatgaggcacaagctctttatgaaaagaggaaatctcactgctggaagccccgccatatgcagaaagagcatcaggacaagataacctggagttctagttcttcctccaactttgctgcctgtcagatacgtggccgtaggtaaatcgcttacccggcctggacttcagtttctgtctctgtaaaaggaaaacattggacagtttctaagtcttcactagcgttctgttatcactgtcctttcctggcatgttggctgtggctattaccagcctccttctcccagargcactatatccttacgagacacgacttctatctacccttgtaaatgatatttataaggcaaaaggcacatatataaatttctcattttttaatgacttttaaatacttctagtaaatacaatttactagcaaattgtatctagtaaaact

SEQ ID NO: 336124 - DNA, 628 bp, Homo sapiens
gtatatcataataatggctagtattagtttgtgaacatttattttatgtatatagggagaatatatatatatacacacacacatatgtgtgcctggtcacaattrtaaattttatttctcactctaggtctggtaaagagaaggtcagtttccctgggaaaggttctgagatggagatctgtgtgcagtgaacttattgaaaagtacagtgtggaaacaatacctgtgcaaaagatgagggcagcaggactggtcagcggaggaaattgaacagagatgtcattgcaacagaagtctaagctgatccccatgggtaactgtagagcttggatggccctgcagatttgtcctgaattgaggccagagggtggcaggacctttgtatcctcacagccagatggatattgggcagcccctggggatagttggggaaagggtgtcaccttaagtgaggtagctttcttcactgaccaaaggtaattacagagggggtttctgttgccagctgggcagcagggctgctcatcactggaggaccccagcaatgagggagcctgtctgggaggcagcctcaacatccacacagccaccacctagatacagcgtgagtcagactagccttcttcct

SEQ ID NO: 336125 - DNA, 588 bp, Homo sapiens
ccaatactattttatacaggcagattattaccatctctcttcaaatagccataaaatcaaaaatagggaagaatgataacttataaaattagggaaggcttcttgtaagaagtagtgattaagctctacattgaataatagggaatattttcaaagataaaagttgacattgagggccagtcacggtggctcactcctgtaatcccagcactttaggaggcggaggtcagtggatcacttgagcctaggagtttgrgaccagcctgacagcctgagcaacgtactgaaaccccatggctcgtacttgtattcccagctgctcaggatgctgaggtgggaggatcacctgaggcccaggaggttcagttgcagtgagccgagatcacaccgctgcattccaggctgggtgacagagtgacaccctgtcttaaaaaaatagaaaaaaaggcattggtaagatgataacttattgtttatacttagacaacaggagagagaccagagataaaaaaggcagtattcccaattatgtggatgtgatatgaataaactgggatgtcctgggaaaattgggatatgtggtcaccc

SEQ ID NO: 336126 - DNA, 588 bp, Homo sapiens
ccaatactattttatacaggcagattattaccatctctcttcaaatagccataaaatcaaaaatagggaagaatgataacttataaaattagggaaggcttcttgtaagaagtagtgattaagctctacattgaataatagggaatattttcaaagataaaagttgacattgagggccagtcacggtggctcactcctgtaatcccagcactttaggaggcggaggtcagtggatcacttgagcctaggagtttgggaccagcctgacagcctgagcaacgtaytgaaaccccatggctcgtacttgtattcccagctgctcaggatgctgaggtgggaggatcacctgaggcccaggaggttcagttgcagtgagccgagatcacaccgctgcattccaggctgggtgacagagtgacaccctgtcttaaaaaaatagaaaaaaaggcattggtaagatgataacttattgtttatacttagacaacaggagagagaccagagataaaaaaggcagtattcccaattatgtggatgtgatatgaataaactgggatgtcctgggaaaattgggatatgtggtcaccc

SEQ ID NO: 336127 - DNA, 582 bp, Homo sapiens
tgataaagtattacgtggttttttagcagatatctgtaaaggcattcatagacttgagtaacattgcccttaaaaagaaaaaaacaaacaaacagaaaaatgacagagaattgatgctgcatcatctctcattccaacaataagtaatctttattaatacatgagctaattaaaaaggaaaccagcctcaatcatctaattaagagattcgaatataaagatttccaatataattattttatatttagtatttattgaaatgtgtattaggtgttattttgaccagttgtcaactaattgaaacaaacaacttaatccagaagaaagttttttaacatttggaccttacggccttaaaaaaacttygatccttttaaaatttcaatttatatgcatacttttatggtagcgaagtagacagaatactaaaaaactttcaacacacgtgccatgttggtgtgctgcacccattaactcgtcatttaacattaggtatatgtaactaacccgcacgttgtgcacatgtaccctaaaacttaaagtataataaaaaaaaaaaaagaaaaaaaactttcaacacaa

SEQ ID NO: 336128 - DNA, 585 bp, Homo sapiens
gcccagcatacacaggcccagcatctacactttctcacatcaaaataactttcacatttgcctccattttgctttattcattcacagagagctttgagtgctgccaagttcaaaatgtgttgctaagagacaaacttgccctgtggataaggaaaaggaatcaaaagcaacttgccaatggtttcgttactgactcatttatcaatcttggaagacatagggctgctctgcctcttggtttccccaaatggtaatcagaaaaaaattatctgatggatgctctgtgcagagacgtgatcctattaatttccatcaccccctcctgttttgcttctgttgaatccatgctgcaccccagtgccaggtggactttcgcacagcacacctctgctcgcctctctgccctcacacgcatgctgaagcccttcagtgatcctccagtgcattagagacccattcaagctgttcagtgagagccttttargatctggcctcacctttctgctgtggctccctgcgttttccctgcatgttccttgctctgcagccacctgcctcaccagctaacccatgccttcccatccc

SEQ ID NO: 336129 - DNA, 585 bp, Homo sapiens
gcccagcatacacaggcccagcatctacactttctcacatcaaaataactttcacatttgcctccattttgctttattcattcacagagagctttgagtgctgccaagttcaaaatgtgttgctaagagacaaacttgccctgtggataaggaaaaggaatcaaaagcaacttgccaatggtttcgttactgactcatttatcaatcttggaagacatagggctgctctgcctcttggtttccccaaatggtaatcagaaaaaaattatctgatggatgctctgtgcagagacgtgatcctattaatttccatcaccccctcctgttttgcttctgttgaatccatgctgcaccccagtgccaggtggactttcgcacagcacacctctgctcgcctctctgccctcacacgcatgctgaagcccttcagtgatcctccagtgcattagagacccattcaagctgttcagtgagagccttttaggatctggcctcacctttctgctgtggctccctgcgttttccctgcatgttcctygctctgcagccacctgcctcaccagctaacccatgccttcccatccc

SEQ ID NO: 336130 - DNA, 550 bp, Homo sapiens
cttcacttctggcatcattttctgcttttcctgagttgccatcacctaatctttgtgtatccaaatccttcctatccttccagacccaacccctccctccatgcagctgtccatggctatcccagcctgaattactttattcctgtgctgctgaaatgcctygacatttcatatcccccacgtggccttcttcatatacgtcctgatgtcatgtcatttaaaaatctcaaccaattccggaagggagagcacaatttatattttttgatggaagaattatacagcctattctagtccatgaatttgttctcactgaaccaaagtggggcgtatgtgggggggcaagtaatttctttaggaagggctccaaagggagactggtgtgcatgacagggaatgaaggaatgggaggaagtcacgcaaaggtgaagtctcgtgcagaacctttcggaggctgtgttcagcctgatcccatgggagctctgcagcataagctgtgcgcagagttctcctaactgggcagcactcctgagttgttggctggaggcca

SEQ ID NO: 336131 - DNA, 550 bp, Homo sapiens
cttcacttctggcatcattttctgcttttcctgagttgccatcacctaatctttgtgtatccaaatccttcctatccttccagacccaacccctccctccatgcagctgtccatggctatcccagcctgaattactttattcctgtgctgctgaaatgcctcgacatttcatatcccccamgtggccttcttcatatacgtcctgatgtcatgtcatttaaaaatctcaaccaattccggaagggagagcacaatttatattttttgatggaagaattatacagcctattctagtccatgaatttgttctcactgaaccaaagtggggcgtatgtgggggggcaagtaatttctttaggaagggctccaaagggagactggtgtgcatgacagggaatgaaggaatgggaggaagtcacgcaaaggtgaagtctcgtgcagaacctttcggaggctgtgttcagcctgatcccatgggagctctgcagcataagctgtgcgcagagttctcctaactgggcagcactcctgagttgttggctggaggcca

SEQ ID NO: 336132 - DNA, 550 bp, Homo sapiens
cttcacttctggcatcattttctgcttttcctgagttgccatcacctaatctttgtgtatccaaatccttcctatccttccagacccaacccctccctccatgcagctgtccatggctatcccagcctgaattactttattcctgtgctgctgaaatgcctcgacatttcatatcccccacgtggccttcttcatatacgtcctgatgtcatgtcatttaaaaatctcaaccaattccggaagggagagcacaatttatattttttgatggaagaattatacagcctattctagtccatgaatttgttctcactgaaccaaagtggggcgtatgtgggggggcaagtaatttctttaggaagggctccaaagggagactggtgtgcatgacagggaaygaaggaatgggaggaagtcacgcaaaggtgaagtctcgtgcagaacctttcggaggctgtgttcagcctgatcccatgggagctctgcagcataagctgtgcgcagagttctcctaactgggcagcactcctgagttgttggctggaggcca

SEQ ID NO: 336133 - DNA, 569 bp, Homo sapiens
ccaatagtttcagagcacaagcccttcctccagtcaaatttctccctgcaaggactatatttgtttctatgccacgaatccatttacataagttctgtcttggggaaatgcaaatacaaatgacttggaaaaagaggactctgtctgcagtaagagataatgtacctttttattttgtggaaattaagctattactgagtccacataatataaatatttaagcattaagtgrcattttatgcaaatcaataaatgagaaggaaacagcacttgcagaaagataaaatccactttgtagaagtagcaaggccacttccagtcagttcttatgtgcagcataatcaataggatggccatgtgctgtaaagctcaaaaactaaactgacaattaggtatactttattcctaatcattcctaatgttggtgtagtacttttacagcttgcaagatgcttttgtagccatttgttatgggttgaattgtgagcccctccaaatttcatattctgaagtcctaacccccagtatcctagaatatgaccttatttgtaaataggctcatttcagat

SEQ ID NO: 336134 - DNA, 572 bp, Homo sapiens
taatataaatatttaagcattaagtgacattttatgcaaatcaataaatgagaaggaaacagcacttgcagaaagataaaatccactttgtagaagtagcaaggccacttccagtcagttcttatgtgcagcataatcaataggatggccatgtgctgtaaagctcaaaaactaaactgacaattaggtatactttattcctaatcattcctaatgttggtgtagtacttttacagcttgcaagatgcttttgtagccatttgttatgggttgaattgtgagcccctccaaatttcatattctgaagtcctaacccccagtatcctagaatatgaccttatwtgtaaataggctcatttcagatgtaattagataagatgaggtgatgctgaaatagggtggtcccctaatccaatatgactggtgtccttataaaaagggaaaatttggagagagacacacatggaggaaagatgatataaaataaaacagggagaaaaatgcctgaggcttccagaagctgggagagagttctggaacagatgtttccttcacagccctcagaaggaacc

SEQ ID NO: 336135 - DNA, 405 bp, Homo sapiens
tcaagggatggtcaagcctatcatatgcattttttttttttaagaatgcatggacagagcttttattctggatgccttttttccgtatgccctggggaactggccaggacaacttaaaaagaaaactttaggatcyttagagtccagacccctgcctccactcttctacatccaacttcgagctttcctcactccccagaatggatgttgcctacagagaagaagataatccaaatgagagaggtgttacaagtaattgtagaaattctgaacagctttgcttagagaaagtgaaaaagaagagggaaaaggagagactgtttcctaagaggccagtttaaaaggctcttctttcagcaaactttgagttataatttgtccactcccaccaggatctcatgttac

SEQ ID NO: 336136 - DNA, 405 bp, Homo sapiens
tcaagggatggtcaagcctatcatatgcattttttttttttaagaatgcatggacagagcttttattctggatgccttttttccgtatgccctggggaactggccaggacaacttaaaaagaaaactttaggatccttagagtccagacccctgcctccactcttctacatccaacttcgagctttcctcactccccagaatggatgttgcytacagagaagaagataatccaaatgagagaggtgttacaagtaattgtagaaattctgaacagctttgcttagagaaagtgaaaaagaagagggaaaaggagagactgtttcctaagaggccagtttaaaaggctcttctttcagcaaactttgagttataatttgtccactcccaccaggatctcatgttac

SEQ ID NO: 336137 - DNA, 405 bp, Homo sapiens
tcaagggatggtcaagcctatcatatgcattttttttttttaagaatgcatggacagagcttttattctggatgccttttttccgtatgccctggggaactggccaggacaacttaaaaagaaaactttaggatccttagagtccagacccctgcctccactcttctacatccaacttcgagctttcctcactccccagaatggatgttgcctacagagaagaagataatccaaatgagagaggtgttacaagtaattgtagaaattctgaacagctttgcttagagaaagtgaaaaagaagagggaaaaggagagactgtttcytaagaggccagtttaaaaggctcttctttcagcaaactttgagttataatttgtccactcccaccaggatctcatgttac

SEQ ID NO: 336138 - DNA, 578 bp, Homo sapiens
ttttggtatcataattattaatgtacactttggagatgatacaaacctctcattcatttattagacatttaaagaccaccaaccatatgccaagctcagtgatggagaggagggataaaaatatgggcaagagttcctgttctttagaattctagaatgatctatcacatattccccaaagacagaagaatcccctgtccaactattttgttccattggctgagcacttgtgacgtgcccaggtactgtgctaagtgttttctgcattatgtcatgtgccctgacagatgcacatctgcctgcgctggaatatgacaaggcactttctaacccaagrccatgctcttcacttgtgaacagatgctgtaaccaaaatctgcatccctataacttctgcctaatccccatggagccacacagtattgggctaattctttttctgcatgtcagctgttcaattgctgtcagctagcaagggcctctattatcatctccagattaatcatccctttttccagaaactcttgttcaccaatacatccccaatacctaggacaatagctaggatataagagaaa

SEQ ID NO: 336139 - DNA, 480 bp, Homo sapiens
ttttacttttactttgaacagatccttggaaagacctacccagatctgcgtatttttgtagggatgmcaggtaggagagcgagggtgagaacttctactcccaaattggtatgggagctctcctttgtttgcatcttgctcaaagcattgataaggaaatgctataatccaaggctggggaatggctgctttagtggaacaagcacaaggaaaacaactacaggggtgccagccacattctaaagctaaatcatcattctcggaaagaaagtcttatctgtctcccacatccccaggtctattttgtgcccacctctgtcatttctttgtgcttttccctttctgagcagcaggcttttgcctgccctattggtatctatctatgatcaaataccttgtgacatttaagcttaagcagcaagatactcctgagaacaactatggttcgatattttccatagaactaataataattctgct

SEQ ID NO: 336140 - DNA, 551 bp, Homo sapiens
ctcggaaagaaagtcttatctgtctcccacatccccaggtctattttgtgcccacctctgtcatttctttgtgcttttccctttctgagcagcaggcttttgcctgccytattggtatctatctatgatcaaataccttgtgacatttaagcttaagcagcaagatactcctgagaacaactatggttcgatattttccatagaactaataataattctgctgccttagaaactataaagagcaactgatgcctcatggaaaatgtagaggagattgaattttttcagtagagtcacggggctagaagagacctttctatgttcctatgaatccatcctgggtattttcttccccctcactccactcccactttcatgagaaagttacaggaggcataataaaaggttctagattctggcctatacatttgttatatctcctccccccccacttctgtcctatttctcctcttctgacctaatactcatgtgcacccttcccgtttaaataggttagaggtgatgcccacactctgaagcagcaagtcagc

SEQ ID NO: 336141 - DNA, 644 bp, Homo sapiens
ggttaacattcgtaagattaatctctgtttcacagatgaagaaactgaggctcagaagagtttggaaattgttccagatcgtacactagtaaggatcaaagacagacttgaaatcccgctatgaggaagtgcaaaactattattcctcattctaaggaactttgtactgcgaaaacaatgcattgcaaaarttgtaaaaagtggccctttacttgttaaagggtcacgtgaattaatcagaggggcctatgggataaatgtcacgctgctctatggtgcaatgccagtaagcttttggccatttcagcacctgtgggttttgccgtcctaatttcaaggttaggcataaaagtaagtctcacactgttttataagagtaccttttctgctggtttttcctttttaaccatattttactgctgccaaataaccataccttctcctcatctccttctcatcataagtacatgataccattgttgaaattccacgatgtttatgctctcatttttgaaaaatttaaccttggtcttagacattagttatttccatgaaaaatgtgacatgcattttaggaatacctagatagatttagggatgatgtattgcacattcaccctcatttactattcagctttacttgc

SEQ ID NO: 336142 - DNA, 644 bp, Homo sapiens
ggttaacattcgtaagattaatctctgtttcacagatgaagaaactgaggctcagaagagtttggaaattgttccagatcgtacactagtaaggatcaaagacagacttgaaatcccgctatgaggaagtgcaaaactattattcctcattctaaggaactttgtactgcgaaaacaatgcattgcaaaagttgtaaaaagtggccctttacttgttaaagggtcacgtgaattaatcagaggggcctatgggataaatgtcacgctgctctayggtgcaatgccagtaagcttttggccatttcagcacctgtgggttttgccgtcctaatttcaaggttaggcataaaagtaagtctcacactgttttataagagtaccttttctgctggtttttcctttttaaccatattttactgctgccaaataaccataccttctcctcatctccttctcatcataagtacatgataccattgttgaaattccacgatgtttatgctctcatttttgaaaaatttaaccttggtcttagacattagttatttccatgaaaaatgtgacatgcattttaggaatacctagatagatttagggatgatgtattgcacattcaccctcatttactattcagctttacttgc

SEQ ID NO: 336143 - DNA, 597 bp, Homo sapiens
atattttcacacagctctcttggtcattactagtcaagttaatttcctgtattcagactgcttttgtattatcttacaatttacttctcaatcatatatatcaaggctactggtagggaaaatgatctctcaggtcagcttactgaatgatcataagacacaaggcagggagtgagaactgtggaatttacagtggcagcaagctatagctttcgtatctccatgtagtattcccattcatcttgcaaaaatatcagacttttctctcccaaaactgagaaatgatgacatcctgcctatyttcctggccccagggatgaggtacgtggccaggtcaaatgaagcaggtgattggttcctttgtaatcgtttgacctcatccaggccaattagaatcttccccaagatgtttctctcagagataaatgggaacactatctcctctctctggaatttttaagctagggagatgtgattctggggctcccagtggccatccaacacaaggagagactttctgtagcatatagtcaagtagatgtgagtagggctgagtggtgggagagaggggagccctgctgatattctggaactcct

SEQ ID NO: 336144 - DNA, 597 bp, Homo sapiens
atattttcacacagctctcttggtcattactagtcaagttaatttcctgtattcagactgcttttgtattatcttacaatttacttctcaatcatatatatcaaggctactggtagggaaaatgatctctcaggtcagcttactgaatgatcataagacacaaggcagggagtgagaactgtggaatttacagtggcagcaagctatagctttcgtatctccatgtagtattcccattcatcttgcaaaaatatcagacttttctctcccaaaactgagaaatgatgacatcctgcctatcttcctggccccagggatgaggtacgtggccaggtcaaatgaagcaggtgattggttcctttgtaatcrtttgacctcatccaggccaattagaatcttccccaagatgtttctctcagagataaatgggaacactatctcctctctctggaatttttaagctagggagatgtgattctggggctcccagtggccatccaacacaaggagagactttctgtagcatatagtcaagtagatgtgagtagggctgagtggtgggagagaggggagccctgctgatattctggaactcct

SEQ ID NO: 336145 - DNA, 564 bp, Homo sapiens
gaacttcaattggaatttcaataattttctacatacaaagcaaaatacttacaacttttgtttttgataatgtgctggatatgtctatattcttgacacttagaaaccctctttgatataagttcataggtttgggacacttgaatttcactaacaattatattcccagtgccaaaagtaatatctggcacatagaaagtgttgaattaatatttgttaggtttcttyatttcttctttgcatattcatttatccactcttgctagtgagttcaagagagttctgttttattcatttatgcctagaaaaatcagtctttagcaaaatgcttaggtgatagcacttagttaacttttgggatgagtgcataaataaaaggaatagtaagctatcattagttttaactaattatgaagtctacaagggaaatctgaattactagacaggctgaactataatacatttttcaaagaaatctgattttgtttaagttcatataaatgataagaaagctagcaatgtcagtcaaaagattcttcttgaaatgtttacctcacgtgaaat

SEQ ID NO: 336146 - DNA, 569 bp, Homo sapiens
aaaaaaaaaaaaaaaaacaatgatcaatttaagaaaaaaaaaaaagcaattttgggagcttggacatgaaacattctattcctctaataccagaatatgagaaaacaatttgctttctttgctctcagataatgaaaaaatatatttggggagaaaaaagtaaaatgggttgtttggtaccatgatgatagaactgttgatttgctaaatatttgattctttaaaatacgccttagtgctctcaaaaaggtggagtctggtttattagggacatgttatgcatttcacaagaaaacagaactcttccaataaaacgtctcctgagatcagatgtcattgttcttattaaatgtactggcccaatgtatcagccgtgagctttaaaaaattagaaaatgaaggccaggagcagtggctcacgcctgtaatcccagcactttgggaggccgagacagcggatcacttgaggtcaagagttcaagatcagcctggcmaacatggtgaaacccagcctctactgaaaatacaaaaattagccaggtgtggtggtggacgcctgaagtcccagc

SEQ ID NO: 336147 - DNA, 495 bp, Homo sapiens
taccacattttctttatctactcatcagttaatgggcacttasgttgattccatatcttcgcaattgtgaattatgctgtgataaacatatgcatgccaatgtctttttggtataatgagttcttttcctttgggtaaatacccattagtggtattgctgaattgaatgatagatctacttttagttctttgagaaatctccatactgttttccaaagaggttgtactaatttacatgactaggagcagcatataagcactcccttttcacatctggactaacatctattgtgttttgactttttaataatggccattctgggtcgggtaaagtagtatctcatctctcactatatacaaaaattaagtcaagatggattaagatttaagtccaaggctgcaaaccatagaaattctagaagaaaacttaggaaaaactcttctggacattggcctagacaaagaatttatgaataagaccccaaaagcaaatgg

SEQ ID NO: 336148 - DNA, 495 bp, Homo sapiens
taccacattttctttatctactcatcagttaatgggcacttacgttgattccatatcttcgcaattgtgaattatgctgtgataaacatatgcatgccaatgtctttttggtataatgagttcttttcctttgggtaaatacccattagtggtattgctgaattgaatgatagatctacttttagttctttgaraaatctccatactgttttccaaagaggttgtactaatttacatgactaggagcagcatataagcactcccttttcacatctggactaacatctattgtgttttgactttttaataatggccattctgggtcgggtaaagtagtatctcatctctcactatatacaaaaattaagtcaagatggattaagatttaagtccaaggctgcaaaccatagaaattctagaagaaaacttaggaaaaactcttctggacattggcctagacaaagaatttatgaataagaccccaaaagcaaatgg

SEQ ID NO: 336149 - DNA, 605 bp, Homo sapiens
ggagactgaggcaggaggatcgcttgaggccaggaagtcgaggtcacagtgaagagctatgatcattacactgcactcagctaggtgatacgaagaccctgtctcaaaaaattaggttttacaccttatatatatatacaatttatatttgtcaataatagctggagaaaaaatagcctcaataaaactggagaataaaatagacggggcayggtggctcacgtctgtaatcccagcactttggaaggccaaggcaggcagatcacctgaggtcaagagtttgaaaccagcctggccaacatggtaaaacccatctctactaaaaatagaaaaattagccaggcatgtggtggtcacctgtaatcccagctacttgggaagctgaaaagaaaaagaaaaaaagaactttaatggcatggccagcaaagcagaacttcatcacatatgaatttatgcttttaattagtagtaaggaaactgactttctcaagtctcagcccttccattatttaatacatttcggcagcaaaaaacccattttggagcagatagttgtttcgtgaagaagcatttcagtggcctctctaaaattatttaggttaagg

SEQ ID NO: 336150 - DNA, 516 bp, Homo sapiens
ttactatatgccatgtgatttttggcctatgccaatctactttctccacagtcttatctgctaactcctttatttaaaaaaatggttaacaaaagtatattttactttgacaggaaatatctttgtaggaataggagcaacttyctgggcacgtgacctgcgcgatcacgtggggctttgtggctcagaaggtcctatacttggtttaatattttgcagttgccatcttaaaattcttaataataattttttaacaagggggcctgcattttcatttttcactgggccccacacataacgtagtcaatactgttaggaagaagaaaaaaatgagctttgcatccttctcttgtgttttctagttttgatgtttctgccaaacttctgcttttaagtcttcccattttcacagaggagtgttcataggattcctctcttgctgccatgtctaagttgggtctctcgaatttctgagggttcctagactccttggcctatggtggaaatagtccttcc

SEQ ID NO: 336151 - DNA, 588 bp, Homo sapiens
ttgtctttggtattctgcagtttgagtaggttatgggtaggtaggggtgtgtgtgtgtgtgtgtrtgtgtgtgtgtgtgtgtgtgtgtgtattttgtctgtcttttttttaaatcctgcttggtgttctctaagcttactcaatccatgatttggtgtataacattaattttgggaaacacttgagcatggtttttgcaagtatttcttctgctccattctttctttctggtattccaactataggcattacaccttttgatattgtcacatagtttggattttctcatctgtttggttcattctttattctctttgcatttcagtttagaaaatttctattatctatgttcaagttcactgatcctgttctcagctatgtccacgctactaatgagcccatcagaggcattcattatttctgttgctttttgatttctagcatttacatttgattctttcttagaatatctctctgcttacattactcatctgttctcgtctgctatcttatttttccattagtgcctttagcacattaattatagttattttaaatcatttgcctgataattctatatctgtgtca

SEQ ID NO: 336152 - DNA, 588 bp, Homo sapiens
ttgtctttggtattctgcagtttgagtaggttatgggtaggtaggggtgtgtgtgtgtgtgtgtgtgtgtgtgtgtgtgtgtgtgtgtgtattttgtctgtcttttttttwaatcctgcttggtgttctctaagcttactcaatccatgatttggtgtataacattaattttgggaaacacttgagcatggtttttgcaagtatttcttctgctccattctttctttctggtattccaactataggcattacaccttttgatattgtcacatagtttggattttctcatctgtttggttcattctttattctctttgcatttcagtttagaaaatttctattatctatgttcaagttcactgatcctgttctcagctatgtccacgctactaatgagcccatcagaggcattcattatttctgttgctttttgatttctagcatttacatttgattctttcttagaatatctctctgcttacattactcatctgttctcgtctgctatcttatttttccattagtgcctttagcacattaattatagttattttaaatcatttgcctgataattctatatctgtgtca

SEQ ID NO: 336153 - DNA, 588 bp, Homo sapiens
ttgtctttggtattctgcagtttgagtaggttatgggtaggtaggggtgtgtgtgtgtgtgtgtgtgtgtgtgtgtgtgtgtgtgtgtgtattttgtctgtcttttttttaaatcctgcttggtgttctctaagcttactcaatccatgatttggtgtataacattaattttgggaaacacttgagcatggtttttgcaartatttcttctgctccattctttctttctggtattccaactataggcattacaccttttgatattgtcacatagtttggattttctcatctgtttggttcattctttattctctttgcatttcagtttagaaaatttctattatctatgttcaagttcactgatcctgttctcagctatgtccacgctactaatgagcccatcagaggcattcattatttctgttgctttttgatttctagcatttacatttgattctttcttagaatatctctctgcttacattactcatctgttctcgtctgctatcttatttttccattagtgcctttagcacattaattatagttattttaaatcatttgcctgataattctatatctgtgtca

SEQ ID NO: 336154 - DNA, 581 bp, Homo sapiens
gccaagttctagtttgccggtttttaggttctgctgaagtagttggtttggcccccaaatggcatgattgtttagaaaagttaagaagatggacatctatttttgatgtagtcttgaaaagtgaacactttctgatgtcatcatcacaaaatgatttcagcataaacagaagaaggctgtggtagacatcactaagttgcaggtagaagaaaagttgagttatgtaaagttgggtagttcaagcatttgattggcatggggctcagaggatgaattaatgggatgggccccttctagaaggatgcttggaaagcagagtggaattatgaaaggattacaagcttcatagtaagagagatctgatcccacttcctgtttgattttggttgcacygcttaacccataaccttatctctaaaattggaataattataccagcagatttcccagattctcttgatttttacatcttactacacatggaaaagtctaatatttgctttgcacattgacgcaagttgataaggttcagagaaaactagtttggggcccccaactatactaaattgcctagcctcttg

SEQ ID NO: 336155 - DNA, 536 bp, Homo sapiens
aatgaaatcaacagaactaaaactttgttccaaagacttattttaacctctagtttctaaacacattaaccacagtaactattcatattagttctttcttggtgctttccttgacatttaaaaaatattctgattttaaattttagttatgttgaaagagtgaataacagtaagtaaaacagaacaatggcattgtttctgttatagtttttaatctccatcattaaatgtttcagctaaaaacaacattcattctctatttttcaatcaacttatttgctgacaatgcattctatgaaagctacaattgtatgccatcatttgaaatcagaggaatagatttttttaatgggcaaaagcaggatttttaatggtgcaaaagcacgtgttttggttttagaagggtgcatggyagtcctgtacaccagctgcttttgtccagagacaggcactgcaaatcaaaacctcatacgcatgtatattccttctagatagttccatttggcagatacatgtttacatgccaatgtaataag

SEQ ID NO: 336156 - DNA, 571 bp, Homo sapiens
taatcattgttatcattacgtctccaccaactataaaaaygagtcagggtaattaacttgtttcacatcatagtaattagtgcagacagaattcaaacttagagcatgtgccatataaaatgaattttttggtcaaatcctttaacatttaccgaatgctttcccttacgctattcccttcacgcattgtccaaaagtaagccctaaagtgcttaattttcattcagtctcaagggcatagagttagaagatcaccagtgttaggagatcaatcacagccttcctgaagtccagataaactgaccttgacttttctttgtgctaagactagcttttgtccaaagctactgagttgaaaatttatcagatcacaactgatttgactagagaattctactggtgtatgcatcttcctaaaaaacaaaagaatacacttggtccagcaagtttatttttgcattatgcaatgcagccaatcccatactactgggcctgctttctgtatgcagaaccatgagtgacacagtgggtttccatttatggaaattcattaaaagaagcccacacaaag

SEQ ID NO: 336157 - DNA, 571 bp, Homo sapiens
taatcattgttatcattacgtctccaccaactataaaaacgagtcagggtaattaacttgtttcacatyatagtaattagtgcagacagaattcaaacttagagcatgtgccatataaaatgaattttttggtcaaatcctttaacatttaccgaatgctttcccttacgctattcccttcacgcattgtccaaaagtaagccctaaagtgcttaattttcattcagtctcaagggcatagagttagaagatcaccagtgttaggagatcaatcacagccttcctgaagtccagataaactgaccttgacttttctttgtgctaagactagcttttgtccaaagctactgagttgaaaatttatcagatcacaactgatttgactagagaattctactggtgtatgcatcttcctaaaaaacaaaagaatacacttggtccagcaagtttatttttgcattatgcaatgcagccaatcccatactactgggcctgctttctgtatgcagaaccatgagtgacacagtgggtttccatttatggaaattcattaaaagaagcccacacaaag

SEQ ID NO: 336158 - DNA, 571 bp, Homo sapiens
taatcattgttatcattacgtctccaccaactataaaaacgagtcagggtaattaacttgtttcacatcatagtaattagtgcagacagaattcaaacttagagcatgtgccatataaaatgaattttttggtcaaatcctttaacatttaccgaatgcyttcccttacgctattcccttcacgcattgtccaaaagtaagccctaaagtgcttaattttcattcagtctcaagggcatagagttagaagatcaccagtgttaggagatcaatcacagccttcctgaagtccagataaactgaccttgacttttctttgtgctaagactagcttttgtccaaagctactgagttgaaaatttatcagatcacaactgatttgactagagaattctactggtgtatgcatcttcctaaaaaacaaaagaatacacttggtccagcaagtttatttttgcattatgcaatgcagccaatcccatactactgggcctgctttctgtatgcagaaccatgagtgacacagtgggtttccatttatggaaattcattaaaagaagcccacacaaag

SEQ ID NO: 336159 - DNA, 549 bp, Homo sapiens
attagcatcaggtttgaaagccaattcaacagcagggatggccgaatttttcattgtaattatctcattcaggcccacctgacaagcacaagggtagcaccgctacctcagggtcttccagctacaatccctggcattctggcccagaactggaargatgtttttgtatgttgatatttttgaacatcaatttttgaattatactttaagttctagggtacatgtgcacaacatgcaggtttgttgcatatgtataaatgtgccatgttggtgtgctgccctcgttaacttgtcatttacattaggtatatctcctaatgctatcccttccccctccccccaccccatgacaggcccctgtgtgtgatgttcctcaccctgtgtccaagtttgaacatcaatatttaaattccattttatttctacagttgcttttctttgaagataatgcattgctcacattaccttatgaatccttttggttattaatgacctgtattgaagcccaatcaatatatgacaatggacagctagtgcaaattagatacg

SEQ ID NO: 336160 - DNA, 631 bp, Homo sapiens
taataatagcactaacagtgcacacaataaatactcatactttgggggcttagaacaaatcagaacatggatccttaacatgaagttgcccgtaggcaacatttgctgcatgtctctccttcctctcttcttacatatgagctttattttcctacaggtgtttctaggttttcattcctcatgatctgggatggctttctatccaaggatactggcgtttgatgtcctactttgtaatttttattaagcttttctgcctttaaagtgtcatgtactatcatctcaaaagagtttaactagtaacctgataaatgtcaaacatataacaaattcctattattaagctgaattgaatatggtattaatgggatatcttgactttsatgtcatcatatcctaatgacattctatttggttagaaccttctgaaccttcctccagaagtaagaaatgaaatgatcacaactttagctagaagacttttgacctcaaatctttaattttaattaatttttaacccacttaaaatttgggttaaaaattaattagttgccaacatattaaaatatgagcttatgttacaaagtcccagctttctgacttctcttgaaatatcagcacatttagcaag

SEQ ID NO: 336161 - DNA, 567 bp, Homo sapiens
tgataaatgtcaaacatataacaaattcctattattaagctgaattgaatatggtattaatgggatatcttgactttgatgtcatcatatcctaatgacattctatttggttagaaccttctgaaccttcctccagaagtaagaaatgaaatgatcacaactttagctagaagacttttgacctcaaatctttaattttaattaatttttaacccacttaaaatttgggttaaaaattaattagttgccaacatattaaaatatgagcttatgttacaaagtcccagctttctgacttctcttgaaatatcagcacatttagcaagattgggtcctccctagcaccagcagcagccactgaggagcagctggctcctttggaagggcaagctgtgctcagtgcactagggtccccacstgttccacttcatttaggtaagtcatctgcctggcccctgtaggatctgagtttatggcccttgttgaacccacagaaataacctaattaagtcctatctcataaccagttagtcacgggtgaaatcatgaacagatggtttaaggtga

SEQ ID NO: 336162 - DNA, 658 bp, Homo sapiens
tcttagggagtattatatttgtgtatgtatgacatcatttagagaaggaaggaataaattagagaaaagtattaatactaagctattaatgatgtctacgggggagaagagggttcagagagggaagggtgatrgtaaaaagagatatcattagctttttctttacatcttcattttatacatccttacataggttacatgttacaacaagcacagaaccctcttgcaacataaaacataaataataaatgatgtaaatggaactatggctctttatctctttataaatcctacccacaagtcctgtctcaagttaaattctaatttctctgaatttattgatggagttatatccttgataattcaccatctggttccttgttactattttctaattgttgccttggagtattatttaaataatgcaatattatttaactgtttgtattaatgtcaaatatttaattaaagtgtaagttccttgtgataagaacagatattctacactttgctcttgactgttgtccaaaaactcacaattttcttacttgtttgttcgttggccaatttttactgcatttctactagctaccaagctgtgttgtgtcctagcgatacaggattaccttggacaagatatgatctatgcccagaagtt

SEQ ID NO: 336163 - DNA, 572 bp, Homo sapiens
acaaaatgaatagttttcattttcaatattaacatgctaaacaaatgcaaggaaacacaatatgtaaggaaattaatttatctaataaaaatatcaatgtcaatatggataatcactaacatttatggggtgcttactagagtccaagccaggtcattgatgggtgtgattattatctcaactcaccccttaattgtgccctatcaattccagggacccatgaacttcatttccccttcagctagttcctctgcaacctagcaaagaaaacaactgrggatttcaagtatcctacagtctctcctatctgaattacaaagtatctttttttgtcgttttcaagcttatttggcttaaaaagaacgatcacttggagcctgcaattattttgcagtcattgcatgtctgagtaagtgggtgggggtgggagggtgggaactaacactgtacttaatgaaaaatgcaacattaagttttgttaggcaggtttccttcagccttcacatatcattcattattaaaatgcattctcagtcaggcccatagaaacaaaaacaaagagaaatcccatc

SEQ ID NO: 336164 - DNA, 455 bp, Homo sapiens
tatcctttgtgttacaatgtaattatactcttttagttatttacaaatgtacaattaatttattactggctatagttcccctgttgtcctatcaaatattaggtcttattcattctttctattatttttgtacccattaattgtctctakgtccccccactccccttcctagcctctgttaatcatctttctattctctatctccatgagttcagtgttttggccattttatggatgaagacatttaagcttaagatcgtatagctaggtaagtggcagagctcagattcaaaactatatatatacacgtatatatatgtgtgtatatatatacgtgtatatatatgtgtatatatgtgtgtatatatgtgtatatatgtacgttttatatatacacatatatacatatataaaagtctatgatatatacatataaaagcccatgatcttcacat

SEQ ID NO: 336165 - DNA, 455 bp, Homo sapiens
tatcctttgtgttacaatgtaattatactcttttagttatttacaaatgtacaattaatttattactggctatagttcccctgttgtcctatcaaatattaggtcttattcattctttctattatttttgtacccattaattgtctctatgtccccccactccccttcctagcctctgttaatcatctttctattctctatctccatgagttcagtgttttggccattttatggatgaagacatttaagcttaagatcgtatagctaggtaagtggcagagctcagattcaaaactatatayatacacgtatatatatgtgtgtatatatatacgtgtatatatatgtgtatatatgtgtgtatatatgtgtatatatgtacgttttatatatacacatatatacatatataaaagtctatgatatatacatataaaagcccatgatcttcacat

SEQ ID NO: 336166 - DNA, 601 bp, Homo sapiens
cttagtaataagcctgtgaaaataaaacaccatgggaactatgacaaagagtacaggggtaggtaggcatggccttgctgcacagatggcatttgagctaagacctccatgaggagaaggaactatccttgggaagatctgggtaagtgtgggccaggcagaggagccatcaagagccaasgtcctgagtcaggaaggagagccaagaccagcatgcccattgaaaagcaaaagtgaaaagagcagtttgaaatgatatgggagaagctgagagaagccagttggaaacaagaccttgtaggtcacacacacaaaaatgtcattgaaaaggccctactaaaaagctagcaaacatcaaaataagcaatagggtaaaataacattatttccaaacaaattaatgaagtaatgaagttgattatcaaagaggagatatgccatcattttcagcatattttagtacccaagacaatgccgggctgtgaggtttcgtgatgtcatgttctttgactttgccctgtacatttttttaatcaccaaaatgtgactgggggactgtattttctaacctgatatataactagtataaactagtggatgt

SEQ ID NO: 336167 - DNA, 457 bp, Homo sapiens
aatatgctgtggtcctaaagggagtctgggttgactgtcacaccttgggatgaatgcttgatatccttggaaaaattatttaatcttcctgtgcttcactttccactgctataaaacaggaataacaatagtatatatatatcacatggtttgttgtgattgcttaaaacaatgtctatcatatagtaagtgcccaatcagttgtgttattccttagtcactcaagacacctgggaaaataaratggtgcatggagataaattcaacagatttaacctatatcaaaagatataaccttggacttctcctagactgatgcccacatttaattcatacattttattaagtttttcttttatatatatttcatattcatgacccctctctagtctcaatgatatttccctagttcagatccttgtatgctgtcatctggattatgtctttatttatttat

SEQ ID NO: 336168 - DNA, 617 bp, Homo sapiens
atgattctatccataacacattttagcagctcagacatcagaggattgcaaatgcagtctgtagctcacattcttctttccacattgacagagaaaaatatttcccaaatgctgaaatgagggtgtggacttggtttgttggggatgacaacatcagttggttagtgacctgccaattatttctgtggaataaaatgccctttgtaaaaagaaatcattgatctaaaactctcayaaacctttgaagtgatcagaggacaccattaactgattatttagataatttgctacagtgcgtgtaataaatacagaaacccactctatccaacttgcataaatgaaggaatttattataaggagctgaatttaaaaaaaaaaaaaaagaaagaaagaaacaagccaattatccagcatctggaaggaatggaaagagtacagctctgggtattgggtgtaccacaattagaattcaccagctccaaacatctcacttatgggggactctccattccagattctaattcccagggtcctgaaggaaagattcagaaaaaggcgtagtatagatcagatgtttactgctaacagtgcctggcagatgttagcaactgaataaa

SEQ ID NO: 336169 - DNA, 358 bp, Homo sapiens
accacaagcttttcccccttattttgtaaaagacttgctgaaaacaccattttaataaaattgtcatgtcatacactctcatatattttaccgtaatttgcccactgttaacacgttgttaggcaattgaaggcctttcgcctttctgccacatcccttcaaatgaagctttgcccacatttcagaatatttcsttgagatagtgtaccagaaaggctaaaagctataaactaggccaaaggtaataaacattttaatattcctaatacttatcaccaagttgcttcacagaaaagctggttgttctttccttttgaatttaatcacaagagaataatcttggtagcaagagtaagaa

SEQ ID NO: 336170 - DNA, 561 bp, Homo sapiens
tcttggtagcaagagtaagaaggtcatggagggcattggaagcattagtgttcaacaggcacaagcaggtaataaatatcaccttatgaaaagctcaaagccatgcacggtgtttgcataacatgttgctaactgaagacctctctggttcacaacctttctgaaactcagcgtttaaatgcaatatagcctattaaattgtcasctcaagtactcagcagaaggcatctctatcttctttgctcttggggatgtttctactgacatgcacactggagttcagagataattttcaataaactgttgtcacttgaaaataaacagtctggacaatgtatggtccatttggagcactgagaaaataaacaacctagggtatgcttccttcctgtctctgtagccctttttggaatgtgtgttccaaatacttccccttcttccccaaagcaggaggttttatttaaaataaagctgtttatttggcatttctgggagacccttttctgaggaaccacagcaatgaatggctttgcatccttgcttcgaagaaaccaatttatc

SEQ ID NO: 336171 - DNA, 502 bp, Homo sapiens
gctttaagcaaccagtagattttaaaaaatctatttttctggttttagctttcacccttttgttctgaaagtggtcactgcactgcagattggtgctcccttattagtaattcatgctgtttctccaggctatagggtagaagaattgcagctgcctaaaattttaagtagaaaaaagtgtttttccaaaaaacaaaattcagaaatacattgccccatgcctgtcagttatttaaatgtgtattgcttaaagtgcatttttcttaatcactgaattaattttcctctaagattgcaatccaagttttaacctttgatacgataaaataaatgctgtgaggaacaatgagagcttagagcttccaaataatttcttgggtgaataaatgaataatrcgagggcaaatgttcagaaagaaagttttgattagaaataaagtatttgcttaaaaccgttactgaagtttccttagagtataggaaactttagattattcctggg

SEQ ID NO: 336172 - DNA, 519 bp, Homo sapiens
tgtatatttacctctacaaaattaaaaagaatagtatgatggttaagtaagtgttttaaaggtctgcgttattactgttttttcaatatttttcccctaagatcaagctagtcttaatacttttctycatggctaatcatctcattactgtatttactagcactgcagcacagtgctcagaagtttctagatactctgggaaacagtgaaatgaattttccctaaattcatctgggagagtgaaaactaaatgaattatttagaattgcagaatgccatttgtgaaaacccagtaatgctaaccagtcatagaatatattgaccaatatacagatattatttttaaagtcttatttcccagacatggtttagtggaaagaaaggcactggagtcaatctgattatcttcagcatgttgttacatctgttacacttcagtgtcttcatttgcaaaatgagccttcatcacagacctcttttaagaattatgataaccaatgtgaactttaagctgtacag

SEQ ID NO: 336173 - DNA, 519 bp, Homo sapiens
tgtatatttacctctacaaaattaaaaagaatagtatgatggttaagtaagtgttttaaaggtctgcgttattactgttttttcaatatttttcccctaagatcaagctagtcttaatacttttctccatggctaatcatctcattactgtatttactagcactgcagcacagtgctcagaagtttctagatactctgggaaacagtgaaatgaattttccctaaattcatctgggagagtgaaaactaaatgaattatttagaattgcagaatgscatttgtgaaaacccagtaatgctaaccagtcatagaatatattgaccaatatacagatattatttttaaagtcttatttcccagacatggtttagtggaaagaaaggcactggagtcaatctgattatcttcagcatgttgttacatctgttacacttcagtgtcttcatttgcaaaatgagccttcatcacagacctcttttaagaattatgataaccaatgtgaactttaagctgtacag

SEQ ID NO: 336174 - DNA, 527 bp, Homo sapiens
aacgtctagtgtattcatcaccaaggctttaatgaaaacattccctttacctgaaaggtcatttatccaacaaatgcattattttttacagctttattgaggtataattgatattcaatgaacaataaatatgtaagctgttcaatttgatgactttggacatatgtgaacacctgtgataccatcaccacaatcaaggtaataggcatattcaatacctcccaaccattccttgcatttctttgtttttgtttttgtggcaagaacacttaacatgagatctactctcttaaaaaattttgagcttatttgaatttatagtattgttaattataaatactgtgttatacagtaaatttctagaattyattaatctagcataatgggaacttaagaccaattgaacaacaccttcccattttccacacccctcagccctcagcaaacactattgtattctctgcttttatgattttgactattatagatatctcataagagtggaatcttcaatatttgttttcctg

SEQ ID NO: 336175 - DNA, 610 bp, Homo sapiens
tctacacataaaaacaacagagcatgcttgaactgatagctctaaaattcctcaaatatgtagtattttatttatgttatattgcttttttttctgtctttccacagagtataagctccaagaggttagggcttttgtctgcctttttcacctttgtattccctgtcacttggaatgttgttgaacaaattaataactggatagatacagagtgcctactatgtgttgtaagctttgtgaggtgctggacatggagggarcaacgaaatggatatgagccttgccctccttggggggatgcttgttgaacaaacagaaagacaaatgaatgcatacaccaatgtgcaatttaatgtggggagatggaaaaaatgaaaatgttaaaagtgctatggagcaaataaatggggactgaggtgttttccaaatttctattaaaaagtcagggaggacctctttaaggaaatgacatcaaagctgacaccagggggataaaagtagtaagtctaggaagccagactattttgttgcctggcacacctaatagccaatcttgaccatcctaatccaaaatattttctcccttcttgccacaatgtctgacacttgt

SEQ ID NO: 336176 - DNA, 610 bp, Homo sapiens
tctacacataaaaacaacagagcatgcttgaactgatagctctaaaattcctcaaatatgtagtattttatttatgttatattgcttttttttctgtctttccacagagtataagctccaagaggttagggcttttgtctgcctttttcacctttgtattccctgtcacttggaatgttgttgaacaaattaataactggatagatacagagtgcctactatgtgttgtaagctttgtgaggtgctggacatggagggaacaacgaaatggatatgagccttgccctccttggggggatgcttgttgaacaaacagaaagacaaatgaatgcatacaccaatgtgcaatttaatgtggggagatggaaaaartgaaaatgttaaaagtgctatggagcaaataaatggggactgaggtgttttccaaatttctattaaaaagtcagggaggacctctttaaggaaatgacatcaaagctgacaccagggggataaaagtagtaagtctaggaagccagactattttgttgcctggcacacctaatagccaatcttgaccatcctaatccaaaatattttctcccttcttgccacaatgtctgacacttgt

SEQ ID NO: 336177 - DNA, 580 bp, Homo sapiens
tacatactattaatatacccaattaagaaatttcctgacctccattcccttttgctatcacttttcttttctttaaatattcatctccctctcacatctttattgtgcttcttttcctgcttagactccatgttcagatgtataatcactcccttgcaagcactcttaactttacttctctcccctctcactctgccattattgcctggtgacactcaagcctgattaagytcctctgtgcacttgctctgtgcctgtatctgagaggctccaggatggtaggagaaaagcacacaactgtgctgatgggcacttcatttcaaagtcatgactacaagtctcaaattggcactccacaatgccatataatcctatcacacttctctaggaaactcatttccccattctcctctgtaccacctttttctgatgtccgacttttcttcccctctcactctcagctgaaaacattgcaagatagttcccagaaaaataatcaggaaagaatgacctcatcttctatgctggctcctccttttatctgaatctgcaccctctgcctttctccctgttataatgg

SEQ ID NO: 336178 - DNA, 600 bp, Homo sapiens
acttctattcatgcgctatctcagcaaaatgcctaagtgatcatgctttttatttggtcaaggtgatggtttcatggctctaccatacatgtcccaaataactccatttcctcaactttagataggaatagagccaattgaagaaaagcttagaatgaatgtttcctattaaattcatacatagagtttaagtttatccacattgggaawaattgaaatatttactgtctctgggaaatatgtcatgggtaaaaggcaaatttaacttctttcttctaaattcacacaattttagaggaatataaaatctttatattttttctcatttcatttttaagtcaaccttgcgagttagcagaaagaatataatttttattttatagatgaaaatactgaggttaatttgctgttcaaaatcacatcactttaatttgataaacttgtgcctgaaacccaggtcttgattcatcatatgttgaacattccagtgctatttttcaatgctgccaccttaatggagtacaagatgaatttattttatcatatgaaatagaacaggttgtttccacttgttaacactaatacctttattttactgct

SEQ ID NO: 336179 - DNA, 600 bp, Homo sapiens
acttctattcatgcgctatctcagcaaaatgcctaagtgatcatgctttttatttggtcaaggtgatggtttcatggctctaccatacatgtcccaaataactccatttcctcaactttagataggaatagagccaattgaagaaaagcttagaatgaatgtttcctattaaattcatacatagagtttaagtttatccacattgggaaaaattgaaatatttactgtctctgggaaatatgtcatgggtaaaaggcaaatttaacttctttcttctaaattcacacaattttagaggaatataaaatctttatattttttctcatttcatttttaagtcaaccttgcgagttagcagaaagaatataatttttattttatagatgaaaatactgaggttaatttgctgttcaaaatcacatcactttaatttgataaacttgtgcctgaaacccaggtcttgattsatcatatgttgaacattccagtgctatttttcaatgctgccaccttaatggagtacaagatgaatttattttatcatatgaaatagaacaggttgtttccacttgttaacactaatacctttattttactgct

SEQ ID NO: 336180 - DNA, 574 bp, Homo sapiens
gatgccacccctgtggtaatgagtgagttctcactctgatagttcacgtgagagctgattgttttagagtgtggtacctcccccaatccttactctttctcttgctctgctcttgtcatgacacgcctgctcccactttacctactaccatgaaccaaagctccctgaagcctcactagaagctgagcagatgctggtgccatgttttctgtacagcctggagaaccatgagccgattaaacctcttttctcataaattacccagttccaggtatttcactgtggtaacacaaatagactagcacagaaagcatacagatagatggccaacaggtatatgaaaagatgcccaacgtcactaataatcaaataaatgtaaaccggaaccacaatgagatatcacctcacaccttttagaatagctcttattttttaaaaaaagacaagtgttggcaaagatgcagagaaagtaaaactcttatatactgtkggtgagaatgtaaaatgatgtagccactgtaaaaagcagaacgagcgttcctcaaaaaattaaaaatagaactatcatatgatc

SEQ ID NO: 336181 - DNA, 657 bp, Homo sapiens
ttatatgcattttcttagcaatagggcaaagcaccctgctcaaattccagggaaagacctacacctttgctgcaattcaatagtgaaagaaatatactttrtcaaataaagacaatacacactgaatactggctgggtagtatttatgttaggcttctaagtttgctgattggtaaggttttcaagtgacctaattattagataagacttgtagcttaaggagggacttaaataataaagcagcattatttaactcctttttttccccttttgcccacattgaattgaattaacacatccttaataagtattaatagttaccttgtgaagggtccctttgtcagtgctgtgagataaagtgaactcatgtatattaaatttggaaaacaacttttcaaactaaagtcagatcagtgggtctttctagtgtatgtgcataattaaaataaatacataacttttatttcatccccgatgttactgtcacatcaaaactactgaaatttgagtgagttcagctctactagagatggataactctgagaccctctgtgtgtgtgttgaggaggcagcaaaaagtagcatcaacaagtaaggactccagagacaaagactcgaatcccagttctgcctcctcatggctctcactggctctac

SEQ ID NO: 336182 - DNA, 657 bp, Homo sapiens
ttatatgcattttcttagcaatagggcaaagcaccctgctcaaattccagggaaagacctacacctttgctgcaattcaatagtgaaagaaatatactttgtcaaataaagacaatacacactgaatactggctgggtagtatttatgttaggcttctaagtttgctgattggtaaggttttcaagtgacctaattattagataagacttgtagcttaaggagggacttaaataataaagcagcattatttaactcctttttttccccttttgcccacattgaattgaattaacacatccttaataagtattaatagttaccttgtgaagggtccctttgtcagtgctrtgagataaagtgaactcatgtatattaaatttggaaaacaacttttcaaactaaagtcagatcagtgggtctttctagtgtatgtgcataattaaaataaatacataacttttatttcatccccgatgttactgtcacatcaaaactactgaaatttgagtgagttcagctctactagagatggataactctgagaccctctgtgtgtgtgttgaggaggcagcaaaaagtagcatcaacaagtaaggactccagagacaaagactcgaatcccagttctgcctcctcatggctctcactggctctac

SEQ ID NO: 336183 - DNA, 448 bp, Homo sapiens
cctcattggcagaggccatcggtgacattaagcagaatgttccgtaactttaaccttctgtttctaggcaccagatatatgtgacgctaactttctaggggacacctcatcagatattcctcatctcttctttcctaaactcttctgaattaggtcccacattgaatagattttggattgacccccagtgactgtctactgccccaaaaccccatttcagccacttctaaagcttagagaaatggtgcctgaatattaggagttcctacagggaagacactttatctctttagcacagtagcacagcctctgatccagatggtcatttrtaatcatcatcataatggaaatacctgagactcaggaaagcaattgacttaggtgatttgggagacaaggcatgcagctctaagttaactgaaaagtgtctaaaacatcttgtgcctac

SEQ ID NO: 336184 - DNA, 631 bp, Homo sapiens
atgttgctgactttgaagatgaagaaacggacatgcaagccttctagaaaccagacaaggcaaggaaatggaatgtcccccagaaccttcagaacagagactcattgacaccatgattttagcctagtgatacccatctttggattttttatctcctaaattgtaattgttgccattatatggtaatttgttacagtagcaaaaagaaactaataccattccacaccaaatgtccttatgtcttcagagtttcaatccataattatctattgagcatcttctatgagccacgcactatgcccaacactggcacagtgttgtcaacaagaaatcagacagatgtagttcctcccctcttaggwcttacagtctggtggaggaagacagagttaaataagcattaactttaaagtaggggaagtgcattaagctatgggtcacctagcaggctgagtgaacaggacggactgggaacggtttctggaggagcagctatttcatattgaaaactgcagggtaagtagtgaatcaaccctgggtttgtgggtgggattgggaattgaagcatgagggactaaagcggaagaaagagcatgttccagaataaaaaggaaagctctagagcaccccc

SEQ ID NO: 336185 - DNA, 582 bp, Homo sapiens
tttgccccttcagctctgctcttcacactttttaaccatcctctttgccttgggaagctgaccaatacgaaactcatcaaaaggcatgtgctctggcttctgcttggttttagccaacgggaagccccaacaacattgatgtctgagccctctacctacagctactgctyctctccaggtgaccttctcacatggctccttttgaggttcagtatttgctccctcctctctccattatagcttgaggtggtaacagttcagttactattttctagctccaggttattcctctattccttgggtttcccctgtgtctgcctgcatctttttaaatagtccctttgtaaatgactcttccttaaatggtcttaatttgagtgtatcttctgtttcctgtttggaccctgactaaaataacccctttgttgtatcccaagtttctatccttaatttacttattctgctaacattgataaataccataccctcaaccagctgtaaaggaaggtacacagatagatgtaatataatattaatacatgcctaataaacactgtcacatactcttagaacttatatctg

SEQ ID NO: 336186 - DNA, 615 bp, Homo sapiens
tttggtgaagcttaaatgaaattatgcctgtgaagagcttagtgcaatgcttgctacacaaaaagtaccaaattaattttagttactatttttattaaggcactattttccaaattaaggtctcattctttaagatgtgacattaagttacatttatttctacaaattttcattgcaagttgaattaaggtcaagtaaaacttaatagaaatctataaataattattccttccatttatcctcctttgaactaattattaaatttaacacaatcaaaaaagaattatggataaccaggatrgaggtttgcactaagatataggggaatgggaaagtattctggaaatggtcttgtctttcaccctacttactatgctctttcagctgcatgttccttgccaatcatcagcatcacaattcactaactgatttacttaagtcagaaacacaattctgttttcatgacactatcttatttggtaattaacttctacttgttcttcaagactcagcccaggttctaccacctgccaggtggcttcctctgtgtccaacaccaccctattctcatttcccttatctcattaccttgaattctacatacttctatgatca

SEQ ID NO: 336187 - DNA, 527 bp, Homo sapiens
taacatgtttttaaaaatgtttgcaacaaaattattgtttttaaacaaaagtgttcctcaatgttgtataaattgtgacatgcccttccttataagcttttgaatcctttcacataaaaagtaattrtgtgtataaaagactgcaatatctatgaatgttatgaagtagaaattttagtcatttataggaacatagaaaatgaaggctattttcttgatgattaagtttagatcttctcgaaagtaatttatgaaaatacattttgagaattttatatgatgtaagcgacccaaatctgtgatgtgaattatctaaaacataaacaaaccattaaaaaagaaacagattatttattaggcacatgcttttcagtagagttgaaataaatatttatctccataaaagcagaaaacattttcccaggaatggattgtattctgttttatcagttcagcaaatgcctgatagcctttcttaacttctctgtgttgagtatcaaacaaatacaataggtcaaccactcact

SEQ ID NO: 336188 - DNA, 604 bp, Homo sapiens
ctgtgacttttctgtttactttcttaatggtattttttgaagcacaaatgctttaaattttgatgcagtataattcatcaatcttttatgaattgttcttttggtgtactatctaagaaacttctacataacccaaggttgcagaggtcttctcttatgtttttttcaagaagttttatagttttatsttttatatgtaagcctttgatacatttcagtaaatttttgtgtatactgtgagataggttccaatttcatttctttgcatgttgtagctacctaatttttccagcatcatttgttgaaaagacccccgaacatttagttgtcttggtacctctgttaacaatcaatgaaccattaatgtgagaatgtatttctgggcttactagttgattacattaatcagtactttgtttgcatatctccctccatattgagcctatctctgtgaaagcaaagttggtggattttcttgctgtccctgtgctgataaaactgcaattcttaccaactgccatgaggagagaggtggagttttttccatacgtgaaggcctcatacttttactgttgttgcacaaagctggggtatcttttcaaga

SEQ ID NO: 336189 - DNA, 397 bp, Homo sapiens
actttgtttgcatatctccctccatattgagcctatctctgtgaaagcaaagttggtggattttcttgctgtccctgtgctgataaaactgcaattctyaccaactgccatgaggagagaggtggagttttttccatacgtgaaggcctcatacttttactgttgttgcacaaagctggggtatcttttcaagaacaaatgcttagttagtgggtacagtgtatgttatttgggtgatggataccgtgaaagtcctaacatgaccactactcaatccattcatgtattaaaattgcaaatgtaccccataattttgaacaaatcaaaagaaaaaagccctgaaatgattattttgataactttatctagtttcatagatgtttgtagaaagggtgtt

SEQ ID NO: 336190 - DNA, 397 bp, Homo sapiens
actttgtttgcatatctccctccatattgagcctatctctgtgaaagcaaagttggtggattttcttgctgtccctgtgctgataaaactgcaattcttaccaactgccatgaggagagaggtggagttttttccatacgtgaaggcctcatacttttactgttgttgcacaaagctggggtatcttttcaagaacaaatgcttagttagtgggtacagtgtatgttatttgggtgatggataccgtgaaagtcctaacatgaccactactcaatccattcatgtatyaaaattgcaaatgtaccccataattttgaacaaatcaaaagaaaaaagccctgaaatgattattttgataactttatctagtttcatagatgtttgtagaaagggtgtt

SEQ ID NO: 336191 - DNA, 442 bp, Homo sapiens
atttttgaagtaatttttggaacacctgggtccatatggaagattaaatctacatgtttattctctgctccctccacaatgtcaccaaaatagcagtaataaaatttttaaaaacccacaatgactgtaagaaaataagaggagcamccaaaaagtgttttggaagctagcaaaagtattagacaaatggtcactgtcttaacagaacagagaattgtgaaaactatctatcattggaaacaacagaaagatgtaagttgataatacaccagaaattcagaagataccatatactatgtgttttgaatggaggcaaaatgaggctgaaaaggaatactgggaaagtctttcaaatgagcaattacggctattgatttccaaacctattatgtgttgctagaggactatacctggtatatctgagtacaagactgagatttta

SEQ ID NO: 336192 - DNA, 575 bp, Homo sapiens
ttgaaattaaaatgtgaataaaaccaggtatatayaaggaaaagaaagcatgggttgatatactaatatcacataagatcaaattcaatagagaattgtttttttaaagttatataacctaacaaggctgtatagctatgtatagcttgatgggaatatttaatgttaatgaagtcactgttagaaatatgcaaataattacaacaaatcatattaaatatgtaaactaaagagtaaaggcagtatgtgggaaatcagtagaactttaataatactaaaatattagttcttttttcttagcccatggccaatcaggaaggaaaaatataaggttataaaagagatgaataataaaatttttaacagctgacaaaacatatatcaactagaatgaagcttgaccgaatacattatagaaacccaaattaagattgtccttatctagctagcataatagcacataatagaattccatacataagcatgtctcttaaggtagtgtcacattaatcggaaactggaaattcttccagttctctgaaccatcccaaggtagtggccttcatgttatccca

SEQ ID NO: 336193 - DNA, 538 bp, Homo sapiens
tggatggagctagaggccattattctaagtgaagtaactcaggaatgaaaaaccaaacacggtatgttctcacttataagtgggagctaagctgtgactacgcaaagacatgcagaatgatgtagtgaactctggagacttagaagggggagggtgggagagcagcrggggacaaaaagctacatattggtaaaatctcagagctaccactatataattaatccatgtaacctagaaccactggtaccccaaaagctactgaaatttaaaaaatattaaataagaattctccttcacttgcagactgaatatggaaatatgtttgttttgtaccatgttcttacataaactggtagaaaacttgtagtgcccattgttgaggcagattaaatggaagtaattcataatattattttggtttgtttttattcaggtggtagatttcagaataccttttatgagttttgatcaattcaagcttctaattcatgaaattacatttcccaagaaatttatgcatttttctagtcatttgcat

SEQ ID NO: 336194 - DNA, 538 bp, Homo sapiens
tggatggagctagaggccattattctaagtgaagtaactcaggaatgaaaaaccaaacacggtatgttctcacttataagtgggagctaagctgtgactacgcaaagacatgcagaatgatgtagtgaactctggagacttagaagggggagggtgggagagcagcgggggacaaaaagctacatattggtaaaatctcagagctaccactatataattaatccatgtaacctaraaccactggtaccccaaaagctactgaaatttaaaaaatattaaataagaattctccttcacttgcagactgaatatggaaatatgtttgttttgtaccatgttcttacataaactggtagaaaacttgtagtgcccattgttgaggcagattaaatggaagtaattcataatattattttggtttgtttttattcaggtggtagatttcagaataccttttatgagttttgatcaattcaagcttctaattcatgaaattacatttcccaagaaatttatgcatttttctagtcatttgcat

SEQ ID NO: 336195 - DNA, 611 bp, Homo sapiens
cccaagatccttctaggtattaaattaagtttagttgaaagctaacttcttacatattttaagtgcagccgaagatctctgtgtacatagaaagtataacctaactggatgtgtaaacagactgtaaccttctcttgtgccaatcaccaagcttcggccagtcagtggcagtcaactgttcaaaccatgttaaataaggcaaatrctgtgctagaactaatctggttatttctgtacctcacttccattttctgtgccttcctttcctttttctgtctgtaaatcttctttgacaacatggcagtgctagtctacctcatcccattttggtttggaggctgcccgattttccaatcattctttgctcagttaaactctgttaactttaatttgtcaaaaattttcctttaacataagagttttatagttttgcattttacctttaggtctacaattcattttcagttcattttttgtgaaaagtataaaatctgtcacttttttacatatggatgtccagttgttccagcgtcattgactgcaaagactatctcttctgcattcaattgcccttgctccattgtaaaagaccagttaactatatttgtgtg

SEQ ID NO: 336196 - DNA, 604 bp, Homo sapiens
ttgggggcattcctcaatgttcaggtgttcctgctgctaagtacaactttgtatgagtggaatcatcctcrattctacctcacagtctccttggcatatgtcctcctcctctgatgtctatgtcagaagcattccagagcagggtttttttaagaccctgagtggttactgtttttccgtattttacttggctcttctctatcaaggtgctcccaaggaaggctgagttcatttgaaacaacagtgcccaattttacttaaaagtactacttctctcagaccctcaggctctgtcattgagtccagcttgtaaactacacccctttcactgaaatggagtccctccctggaaagccacattcccttcttgcagtataacttctttggggcattaaccttgctcctctgtccatcctgtactaatcctggcatatttgccattctgtgagttacttaattctcaccattatattttgagttttattctagaaaactcacaagcctccaagtccatcaatagacacaaattttaagtgtaaggtgaaagatttcttcttagttctcctaagagacatgcctaaaattcagttctgacatagctgag

SEQ ID NO: 336197 - DNA, 584 bp, Homo sapiens
ggcttaacactcactctcaggctgctgctcacatggtgatgtccctgttctgtcctgaccatgacagccgctgcttttgggggcattcctcaatgttcaggtgttcctgctgctaagtacaactttgtatgagtggaatcatcctcaattctacctcacagtctccttggcatatgtcctcctcctctgatgtctatgtcagaagcattccagagcagggtttttttaagaccctgagtggttactgtttttccgtattttacttggctcttctctatcaaggtgctcccaaggaaggctgagttcatttgaaacaacagtgcccaattttacttaaaagtactacttctctcagaccctcaggctctgtcattgagtccagcttgtaaactacacccctttcactgaaatggagtccctccctggaaagccacattcccttcttgcagtatamcttctttggggcattaaccttgctcctctgtccatcctgtactaatcctggcatatttgccattctgtgagttacttaattctcaccattatattttgagttttattctagaaaactcacaagcctccaa

SEQ ID NO: 336198 - DNA, 514 bp, Homo sapiens
atgaagatgaagtagttggtgagaacttaaggtaacgtgcttagctggttgcttccgtgtgctaatcactcaatatatctgtgataggtagaaaaatggttccccaaagatggtcatgccctgatccctgtaatctgcatatattactttacatagcaaaagggatttggcagatgtgattaagtatttgagactggaagattatcctgaattttcttgtggcccaatgtaatcacaagggtcatgataaaagggaggcaggagggtcagagtcagataaagagattaagtcacagaagtaaaggtcagaatgactrggccatgaaccaaggaatgcagacaacctctagaaactaaaaaaagcaaggatagcattctatagcacctccagaaggaatgcagccctgattacaccttgattttagtccagtgagacttctgacttctggaaatagatgatattaatttgcatgggttaaatcattgtgtgtggtaagttgttacagcagcaata

SEQ ID NO: 336199 - DNA, 582 bp, Homo sapiens
gaatgatggattgcctctatgtactgtcagcacctggtgcatttttagcgcttttaagttgagttgcttaaaggtatcggacattcaaaaactgtcttagagtagataaagttcaagttactttttcttctagcattttatatagaacaaatcaaatacacatcccttatttgtatgtacaatagtgaaacagtaactttcctaaatggtgaccctggkcataaacataagaaatgactagtcttttgaattgaatttcagcaatgttaatactattctaccattattaaatatactgtttgtattagtccattctcagctgctaataaagagatacttgagactgtgtaatgtataaaagaaagaggtttaatggactcacagtcccacatggctgaagaggcctcacaatcatggcagaaggagaatgaaaagcaaagtcacatcttacatggtggcaggcaagagagcttgtgcagaggaactcccatttataaaaccatcagatcttgtgagactcattcattaccacgagaatagtatgggggaaaaccacctcatgattcatttattgccacctgg

SEQ ID NO: 336200 - DNA, 570 bp, Homo sapiens
atatatgcttagcatttttatttctagagctgtgtcatgtctgaaaatgagggtaaggaaaccttcagaagaaatacatttaattaaaataatacctatcaaaaatgttccttacatctttcatgatagatatttgtggactgatttactgaacgtttagagagaaagaacaactaaagggacaaatacacaaatatgaaagcaaagttcaatctagcagtggcctcagcattggcttttcataatgtatctaaactatgtttctgcatcaggtggcagaatgacaacaaaggggctgggaatctgaagccctgtgtcttgctctgagttccaattttgtaaagcatgatctgaaaaataaaatcaagtcccagccctggcaccagcgtctcactttacccacctcatatgctgcaccccactttctgcgtttttggcttctscagttttttagactggctctccatctatctgggaagcagtcagtgaagtatttcttgtctactcacctaccttgacatacaaggctcctgactactctcttccaatatcttactgcccacctaatac

SEQ ID NO: 336201 - DNA, 435 bp, Homo sapiens
taaaaggattcattttagaaaggttattttaaaatctataacctatagattaaagatctattcttcccaatgttaccatttaaatcaattccaacattgggtaacatcatagtttgaatgaagattaagtcacttacatttatcattaccaaatgtctattttttcaatataaaaaaatgcctaactccactggattactagtactccttatcattcagtggattttgatagttattctgcagacccagaaaccattcaacagcactgaaaagttcaacaatctaacctgggtgtttttttaaatctatttaaaatcaatcatgaaaaaatgatagccatgcytaaatctaatatatatttaaataatatataatttatataaattcataagcaaatgatcagagcagttccaggatattgacatttagcacaca

SEQ ID NO: 336202 - DNA, 569 bp, Homo sapiens
gtgggtaatatatggaatataagaataagaggcaaagtcaatatagagaaaacaaagaagtcaagccattagatataatgcctaaaaatttctgatggctcatactcattacccatattttaacctaatatgtcatttgtgaaacttaaaataaaaaayactatttaatttagatgtttttgtacttaatataaacatctttccaccagcagtttgcaactaaacacattcatctgtgtaaaatcaatataattatcaaaaaatggcagttaaaaaaaacccagtccaagtaagacagttagacatttacaaggtatgactaacaatttctccactagaaatgctacataaaatcagttttgtcttacagtcaatcagaatataagaattacaagcaaaggactgaatcacaaaatactgtattataaaccatgtcactagaaaaatttagattaaaatatgcttcaagatactaaaatatgatctttacttaaaagatgtcttaattccagagggaaatattactaataaatagcttagagatgtcattcatatctatttttgttaag

SEQ ID NO: 336203 - DNA, 571 bp, Homo sapiens
ttatttaaattttcctgaaggaaaaactagatatttgggagtggaagcgttgttactggagggcaaatggcaaggartactgatattaataaacttgtttctcaatttaatttttatttgctattatttttcaattttgttacattttaatagcatgaaaactgtctgggtagttattcatattatggctttaccaaatatgattgtcactttaagaatttctaaaacttaaagtataataataataaaaaaagaatttctgctggtttaatttatgcatcacaaactttaattttctttctaaagttgtgttctgaaggttatcaaaagtattcaaaggacttcaaaagtcgtatttaccattactcagaatattctattatgttgttgcatacagtccttcagttgttattatattccccacattgctccattataggagatttccttaaaagtcatgtaaaaagatataactatgtagcatatttaccttcctagcttggattatttctcagtttcattaataaaatgaacagtcaataagactgttttcttagtgcattggtcagca

SEQ ID NO: 336204 - DNA, 479 bp, Homo sapiens
agtaaattagagggcaaatccagaagtccaatttctgaataaaagtacaggatacattccactgagataacagaaggcaacaaattataaactaaataatcataattgaagtatatcagttcccaaatttaaaagggctacctagaacmcagcacaacagattgaaaactctaagacaaaatattgtaattagaacaaagaaaaaatctaactgtctttcagcaagcaaataagcttatttgcaaaggaaagaaatcaaatggcctgggctttctcaacagcaacactggaaggaagatgtcaatggaccaatggcttctaaaggaaaattatttccaatttagagttttttaccctgccaaaatctagaatatactttattgacacattaattaagtatgtgagaagagtaaagcatttttagacatgaaaagtctccaaacttttgtgtttaacagactcttcttcaggggactgct

SEQ ID NO: 336205 - DNA, 479 bp, Homo sapiens
agtaaattagagggcaaatccagaagtccaatttctgaataaaagtacaggatacattccactgagataacagaaggcaacaaattataaactaaataatcataattgaagtatatcagttcccaaatttaaaagggctacctagaacacagcacaacagattgaaaactctaagacaaaatattgtaattagaacaaagaaaaaatctaactgtctttcagcaagcaaataagcttatttgcaaaggaaagaaatcaaatggcctgggctttctcaacagcaacactggaaggaagatgtcaatggaccaatggcttctaaaggaaaattatttccaatttagagttttttaccctgccaaaatctagaatatactttattgacacatyaattaagtatgtgagaagagtaaagcatttttagacatgaaaagtctccaaacttttgtgtttaacagactcttcttcaggggactgct

SEQ ID NO: 336206 - DNA, 612 bp, Homo sapiens
gttgattacgtatgatagtaagttgtgaatcctagaatttaattaaagaaaataattcctttttccattttacataatttgataataggaagaagtcaaattctcttcagccaagaaaaggagggggtggtggcacaactgtagaaattaaaaattaggcacagtaacacttaaaaaacagcttctgaagatgttaaacttytaatccaaacaacagatactgtaagaacttttttttttttttttttgagacaggatctcactgtgccatccaggctgcagtgcagtggtgtgatcacggctcactgcagcctctacctcctggatcaagcaatcctcccacctcagcctcttgaatagctgggacaataggcatgtgccaccacacacagctaatttttttttttttttcatttttgctgagatgaggtctggcttttttgctcaggctggtctcaaactcctggccacaagtcatcctcccaccttggcctctggaagttctggaattaacaggcgtgagccatcccacccagcctagtatttcttttaacagctatttctgaccacataagatattcagacctgcactttgatatcaaaaaaggtcag

SEQ ID NO: 336207 - DNA, 504 bp, Homo sapiens
tcgatttcactgagcaagtcactttctctgtcccagccccaccaccttatctttcagatgagggtaatggttttaaactattattcagatctcttgtacatctaaagcttccaattttaggatgaattccactcagacaagacaaatctaaagatacctgagtgatgttgtagactgtctcaaatacacaatttgagcaaagayagaggccaggcctaaagaggcattcagaaatcaaacatgaaagtgacgactgaagaacaaaaaaaatgaattatttgaataagtatcagaagtatcaggaaaaaaaggaagggaagaggaaagagagatgatccacagaggggaagagctcctggtgcagaagatcgtccctccatggagaggtctgggggtcaccagagcgcaggggagaaacataacaaggcgttttaagagtgaactactgggccgggcgcggtggcgcacgcctgtaatccagcacttcaggaggccaaggcgggc

SEQ ID NO: 336208 - DNA, 504 bp, Homo sapiens
tcgatttcactgagcaagtcactttctctgtcccagccccaccaccttatctttcagatgagggtaatggttttaaactattattcagatctcttgtacatctaaagcttccaattttaggatgaattccactcagacaagacaaatctaaagatacctgagtgatgttgtagactgtctcaaatacacaatttgagcaaagacagaggccaggcctaaagaggcattcagaaatcaaacatgaaagtgacgactgaagaacaaaaaaaatgaattatttgaataagtatcagaagtatcaggaaaaaaaggaagggaagaggaaagagagatgatccacagaggggaagagctcctggtgcagaagatygtccctccatggagaggtctgggggtcaccagagcgcaggggagaaacataacaaggcgttttaagagtgaactactgggccgggcgcggtggcgcacgcctgtaatccagcacttcaggaggccaaggcgggc

SEQ ID NO: 336209 - DNA, 506 bp, Homo sapiens
tggcttccactggaatgtctgctcacactttgcccaccttgcccagccctggtctcccttcgctcccagctcagacgtcaccacctctatggagcttcccccggctgtccccctccagcctctccaagacccgtctaactcttccaatgtggtatggacttacttccctgcctccctggggggcaacaagctgtactggaaagatcaacatgcaccggggcagggatccagcagaacctaccatcagcactggcacgctgggaaagggacgtggagacgggaacgccttcctcccggggttattgggaaaatccaggccctgatgaatcagtgtcctaaycacacagaatgcactcaacaagtgccacctactgcattccttgagtagacaattcctggagtgctgttggctggactataaagccttctctgaggatacggtagtggcctagaaggctcgatcagaggacacgggcagtaattcgcatggcttctggtcaagagaa

SEQ ID NO: 336210 - DNA, 616 bp, Homo sapiens
aaatcccagctaagaagagcaaatgatgagctgggtttgacttgcagaatttagtgggcttactactcaccaagagrcaagagatacagttgtagttatgatgatagactttggagtcagatggacctatgttgggatcccagccctgccacttattggctctgtgacctgagacaagtcactgaacatttctcaaactgcattatctccatggtcctccatttgttcatacataaaatgggctttatattcctcatagagcagtgatgaggattacatgagatgccactgatacaatgtctgcaagtagtgagtgctcaataaaacatagctagagtcgttgttttttctgattcttcttgctcctcatcctatttcctttgtcttaatttccccacaaagacaccctctccagagcccagcaattgtgagggactgatggagaagtatgtggctgctatggtgctgagtgcagctggagatgccctggggtactacaatgggaagtgggagttcctccaggatggggagaagatacaccggcagttggcccagctgggcggcttggatgccctagacgtgggaaggtggagagttagtgacgacacagtgatgc

SEQ ID NO: 336211 - DNA, 616 bp, Homo sapiens
aaatcccagctaagaagagcaaatgatgagctgggtttgacttgcagaatttagtgggcttactactcaccaagaggcaagagatacagttgtagttatgatgatagactttggagtcagatggacctatgttgggatcccagccctgccacttattggctctgtgacctgagacaagtcactgaacatttctcaaactgcattatctccatggtcctccatttgttcatacataaaatgggctttatattcctcatagagcagtgatgaggattacatgagatgccactgatacaatgtctgcaagtagtgagtgctcaataaaacatagctagagtcgttgttttttctgattcttcttgctcctcatcctatttcctttgtcttaatttccccacaaagacaccctctccagagcccagcaattgtgagggactgatggagaagtatgtggctgctatggtgctgagtgcagctggagatgccctggggtactacaatgggaagtgggagttcctccaggatggggagaagatacaccggcagttggcccagctgggyggcttggatgccctagacgtgggaaggtggagagttagtgacgacacagtgatgc

SEQ ID NO: 336212 - DNA, 537 bp, Homo sapiens
aggactttattacacagtacttggagcatagggaggacacaattccaaagttgccagcccttccgccagcacatatgcagtctttgtgtaaattataaaactttgccttttgttccaggcagatgcagcctcatgctagggttcagaacttagcttggatktcagcctcatcagccttttgtcaggcacctttgcacaaggcataaaccacataaactgtatacattgcattgctccatttgtgttatttgtggaaaagaaatatgccctagagttatgccctagagttaagatttgcgatcttaattctcattctaaaatataggctctttctttgtggacattttctttttctttctttctttctttctttctttctttctttctttctttctttctttctttctctctttctttctctctctctctttctttctttcttttctttcctttcttcctttctctttctttttccttccttctccctttctttctctcattcacccactgatttattcagcaagcatttattgagta

SEQ ID NO: 336213 - DNA, 537 bp, Homo sapiens
aggactttattacacagtacttggagcatagggaggacacaattccaaagttgccagcccttccgccagcacatatgcagtctttgtgtaaattataaaactttgccttttgttccaggcagatgcagcctcatgctagggttcagaacttagcttggatttcagcctcatcagccttttgtcaggcacctttgcacaaggcataaaccacataaactgtatacattgcattgctccatttgtgttatttgtggaaaagaaatatgccctagagttatgccctagagttaagatttgcgatcttaattctcattctaaaatataggctctttctttgtggacattttctttttctttctttctttctttctttctttctttctttctttctttctttctttctttctctctttctttctctctctytctttctttctttcttttctttcctttcttcctttctctttctttttccttccttctccctttctttctctcattcacccactgatttattcagcaagcatttattgagta

SEQ ID NO: 336214 - DNA, 557 bp, Homo sapiens
  misc_feature (1)...(557): n = A,T,C or G
atgaagcacctactgtgtgccaggtgggccataaaagttgaggctaggattcctgcactcaaagaggtctgcatatgttagttgsggaaatgcaaagctaacccatgtagaacaagcaaagagcaatgaaatactttgccctgattgtaggagcccaagatctgggaaagtgggtaacagactgggctgcaggaaggagggcaggctttacagaggcagatggatgatggagagagaattctggtcagggcaacagctgggacaaaggcacaaaggtaaggatgaggctggcacaggtgttcatccttttgtttaatcatttattaattcaacaaacatgagcatctcctaaaaccaagagacttttcttggtcctggggacatggctcttgcatttgtgaaatttactatcattggaacgaggaaaagtaatccaatagccactcaaatgaatgtgttaaagtgtggccaacaaacanagccacgtgctttgaaggcagggcacaggcactgcctgaggaagtgctgtcttcctctgccagcaagaaggggcagtg

SEQ ID NO: 336215 - DNA, 621 bp, Homo sapiens
actagtttgatcaacagggatgctgaagaagacactacagaggtcaataacagtgaaaattcactatcagtaggtatagaagtcagcagtatgtggatttgggaacagaagtatgtatattttggaccatgaggtgacagggtataacaatatttattttatggcgatggagatcctgaacaactctccatcctcaacaattaggttttcttactgggagggtggaagtattaggggctgatacagggaattattaggccttgagttttgtattcttcaatattgggtctaagggcagtttggttaaggaatattgtttaatactaggccaaggctgggttgaatcaatttggattttgattgagggtrcattatgaattctaccaacatctgttgttgatgtggctgataaagagacagttttctgttccaatagggaactctgagactcagtggagagttctttagtacatgggacaacataacaaatgagtgggagattattggtagagttcaacaggctattgggcttatcagactccaaaattatttccccctttagggataaagagatgccaacatgacatatattttttttaaatctcatcccaataagttagc

SEQ ID NO: 336216 - DNA, 550 bp, Homo sapiens
tatactgtgttacccacttgacatggcttgtatcattaacctttacaataatactggagggagtttcttttattagagtcattttacagacacatgaggctcaaggtcatcaagttagtggattaagattcaaaccttgactgtggatcccagactcttaatcatgctgtcataccattcaaggttcaacagcacttactgttaccactggaacaatttgttcagactagtctttcaatcctacccgtattatttacaaagtactgaggattaataaaagcactgagctcctacactcttattatcccattatascactaatgatttctttcttatatctactatctgggaagacaaaaggggccagaggaagagatgcacattcacgttatctgaggacgtcctctaatgagatttgctccacaagagaggctatataaaatgagaacaaatcttttgtggattgacaatctagatgaactattcttaatactttgtcccctgcgtcgtagactgattgattttcaacttttggttgtcttaaaagggt

SEQ ID NO: 336217 - DNA, 579 bp, Homo sapiens
tactatggaatttgccaagttattatacttattgtctattagtggtcagtccacattagaatgtacttttgaacaaagcagggatttttaaaatccattttgttcactctactgcctaaaatagtacctgtcacacacaaagagccagtacccaaaactggctctttgaaaagaataatgagctagatgtacttttgataagacagagtaacagaacaaagggaagttaaaagtaaacaatatcaggaataaaaaaggkatataaatacagacagtagatttccttacaccataaaaaagtttatatccaccccaaaactgaaaatactgatattttgctagaaaatggatcatttcctagaaaaacgtaacttaccaaaacttagtcaagaaaggaaaaacagaaaatcaaatgtaaaactatagcataaaggaattgaaacactagtttcaaaactatccctcagaaaagtctaagaggcctgagagtttcacagaggaattctattgatccctagcttacacatgctgttccaggaatagaaaatgggagacaggattccagttcattctatgaga

SEQ ID NO: 336218 - DNA, 558 bp, Homo sapiens
tttcagtgaataacaataccatttagttacccaaataagagtgtggtattttctttgtgctcacttcccagtaggctcccatgtattttctgttctatattcagaatatctctggaacttactgctttttcccaaatctcttgcagcaactgccttagctgagatttttctcatctcccacctagtagcctgcaaaccggtctctttgcctcaggtttcctaggctctaataactcctgcacattgctgtcacagtaatcattctgaaacacctatttaatcatagtgtacctaccacttaaagacaggakagttggtttttcttttttctctaaaacaccagattgaatggagacatcaagtgattaccagagttgacctctacagattagaatgacacaaaaaataacaagccattgctgttatcctgggagtctagaagtttcacaggcttcagctcattcctggcttccactccacacccatccacaagcctcattcaacctagagagagtatgtgtgtgagggaaagagggaggcctcagtagcagcaagcca

SEQ ID NO: 336219 - DNA, 617 bp, Homo sapiens
  misc_feature (1)...(617): n = A,T,C or G
tttttctcttagttataagccttttttttttcttttagattttgcaatctttcctgcttccctaatctctgtgatcaaagggcagtcacctacaatatgtattttcaagtggtatacacaggagttaggatgcaaggcattcagtttcatacaaggaagtggaacactggacaacagtccaacaagaagatgaggcccttcttcagcctttcaagtgctcctttttggcaggatcatgatttgtatttttgtgtaggagctctaaggatgagtaagatgctggataacaatgatatgcctatgggcctatccttttcctttgcttaggagacacattccactcccatgaagaaaggttcccagcatgaaggtcagagcctgagagagaaggwtggatagatagtcagaagcaatatgtcctgacagaggtagacccatgttaccatcaaataggtcttctgctgacgctagaaaggaatcttcttatatggaaggtacatcaacagctaagatgccacaattaggaagaagacagaaaatgcattttcctttctttttcccttctccttttcctctcctttcttctctccttccctttccatcnccttccttctaag

SEQ ID NO: 336220 - DNA, 484 bp, Homo sapiens
tctattggggggtcccagtcttgctacaacctcaacaaatatttttggaagtgatggctcaatatgccatctcgaaaaagcatgtgtgttatcaaagaaccattgctctcagctgcaagggacaagaaaccattttgttccagtwctttattttgcagtgggcagagtacagtgaaaggagcagagattttgaaattagatgtatctagaattctgtataaccttgaatatgttttacaaactctcccaggcttgttttcttcataatacaacgtgtataactctcagaactgttaagagaccttattaatgcattcactcaaaaaatatgaattaagcatttacagtgtgtgagaaactgttccaggatctgaggatcagcagtgaacaaaataaatgagcgatccctgccctcatctagctgacatagacaagaaaaggtaggtgtattatttccctagggctctgcaacaaattactacta

SEQ ID NO: 336221 - DNA, 381 bp, Homo sapiens
tgctctcagctgcaagggacaagaaaccattttgttccagttctttattttgcagtgggcagagtacagtgaaaggagcagagattttgaaattagatgtatctagaattctgtataacyttgaatatgttttacaaactctcccaggcttgttttcttcataatacaacgtgtataactctcagaactgttaagagaccttattaatgcattcactcaaaaaatatgaattaagcatttacagtgtgtgagaaactgttccaggatctgaggatcagcagtgaacaaaataaatgagcgatccctgccctcatctagctgacatagacaagaaaaggtaggtgtattatttccctagggctctgcaacaaattactacta

SEQ ID NO: 336222 - DNA, 585 bp, Homo sapiens
gagattttgaaattagatgtatctagaattctgtataaccttgaatatgttttacaaactctcccaggcttgttttcttcataatacaacgtgtataactctcagaactgttaagagaccttattaatgcattcactcaaaaaatatgaattaagcatttacagtgtgtgagaaactgttccaggatctgaggatcagcagtgaacaaaataaatgagmgatccctgccctcatctagctgacatagacaagaaaaggtaggtgtattatttccctagggctctgcaacaaattactactaactgggtggcttaaaacaacagagatttatcttctggtggctagaagtctgaaatcaatgtgtccacagagccacactccctctaaaggctctggggaaggatccttcattgcctctcctagcttcaggtggttgccagcaatcctgagtattcattggtttatagacacctcactcaatctattcctccattgtcatgtggcactctcccagggcgtctgtgtgtccaaatcttcctcatcttataaagacactagtggttggatttagggcacaccctaatc

SEQ ID NO: 336223 - DNA, 585 bp, Homo sapiens
gagattttgaaattagatgtatctagaattctgtataaccttgaatatgttttacaaactctcccaggcttgttttcttcataatacaacgtgtataactctcagaactgttaagagaccttattaatgcattcactcaaaaaatatgaattaagcatttacagtgtgtgagaaactgttccaggatctgaggatcagcagtgaacaaaataaatgagcgatccctgccctcatctagctgacatagacaagaaaaggtaggtgtattatttccctagggctctgcaacaaattactactaactgggtggcttaaaacaacagagatttatcttctggtggctagaagtctgaaatcaatgtgkccacagagccacactccctctaaaggctctggggaaggatccttcattgcctctcctagcttcaggtggttgccagcaatcctgagtattcattggtttatagacacctcactcaatctattcctccattgtcatgtggcactctcccagggcgtctgtgtgtccaaatcttcctcatcttataaagacactagtggttggatttagggcacaccctaatc

SEQ ID NO: 336224 - DNA, 585 bp, Homo sapiens
gagattttgaaattagatgtatctagaattctgtataaccttgaatatgttttacaaactctcccaggcttgttttcttcataatacaacgtgtataactctcagaactgttaagagaccttattaatgcattcactcaaaaaatatgaattaagcatttacagtgtgtgagaaactgttccaggatctgaggatcagcagtgaacaaaataaatgagcgatccctgccctcatctagctgacatagacaagaaaaggtaggtgtattatttccctagggctctgcaacaaattactactaactgggtggcttaaaacaacagagatttatcttctggtggctagaagtctgaaatcaatgtgtccacagagccamactccctctaaaggctctggggaaggatccttcattgcctctcctagcttcaggtggttgccagcaatcctgagtattcattggtttatagacacctcactcaatctattcctccattgtcatgtggcactctcccagggcgtctgtgtgtccaaatcttcctcatcttataaagacactagtggttggatttagggcacaccctaatc

SEQ ID NO: 336225 - DNA, 615 bp, Homo sapiens
  misc_feature (1)...(615): n = A,T,C or G
cttaaaacaacagagatttatcttctggtggctagaagtctgaaatcaatgtgtccacagagccacactccctctaaaggctctggggaaggatccttcattgcctctcctagcttcaggtggttgccagcaatcctgagtattcattggtttatagacacctcactcaatctattcctccattgtcatgtggcactctcccagggcgtctgtgtgtccaaatcttcctcatcttataaagacactagtggttggatttagggcacaccctaatcaagtatcatcttaaattgactacatcggagaagactacttccaaataaggtcacatttacagataccaagggtcaggattttaaaayatgttttgaaggagaactantccacccacaacaggaggtaatgaacaacccgattaggtaatgtctgataggaagatcctggctttcagaaggccctcagtaatgataggtaacacaggtaacatatcttgctcactgtttacatataaggccatagatatgtcttgctcaccaaagatcacaaacccattatattggaaactaaaattctggtcaaataactttccacagaaggaaggctctttccaaacac

SEQ ID NO: 336226 - DNA, 615 bp, Homo sapiens
  misc_feature (1)...(615): n = A,T,C or G
cttaaaacaacagagatttatcttctggtggctagaagtctgaaatcaatgtgtccacagagccacactccctctaaaggctctggggaaggatccttcattgcctctcctagcttcaggtggttgccagcaatcctgagtattcattggtttatagacacctcactcaatctattcctccattgtcatgtggcactctcccagggcgtctgtgtgtccaaatcttcctcatcttataaagacactagtggttggatttagggcacaccctaatcaagtatcatcttaaattgactacatcggagaagactacttccaaataaggtcacatttacagataccaagggtcaggattttaaaacrtgttttgaaggagaactantccacccacaacaggaggtaatgaacaacccgattaggtaatgtctgataggaagatcctggctttcagaaggccctcagtaatgataggtaacacaggtaacatatcttgctcactgtttacatataaggccatagatatgtcttgctcaccaaagatcacaaacccattatattggaaactaaaattctggtcaaataactttccacagaaggaaggctctttccaaacac

SEQ ID NO: 336227 - DNA, 633 bp, Homo sapiens
acacatccattcatctagaatatctccctgcaccgtggccttcaagtaattgtgaaataacaaaactggcaaaagaccatgaacatccttaaatccaatccctcttcaacatgctggctcyaatttccccatactaagcctaaacaccttgagtgagaggaactgattattcatcagaattcattcaaaatctctcaagcaaatgaactcaagcaaaatctatcttcttgtgaattccaaatactgacctcggacactaagtcttattcttccctggtcagtctttttagattaccgaagaaaatgttaccttccaatttgagttctctcttacataggataaagtatccagcactatctcataagatatcattgaacccctgacatccctgatgctctgaacttgcctcagtttgtctataatcagagcccattaactagcaggctacagatttgtggaccttttcttgtgcttctgtttgcttgtttccagagatttgaacttggacactttttgattcagcgtggtctttccagtacccataagccccacaactctttcctttttgtaaatctgttcacttcacccatttcttacctttctgtcccagggctcctagaatatagcaacta

SEQ ID NO: 336228 - DNA, 569 bp, Homo sapiens
agcatagtgcctttcagctcctcaaacatattataccatttttttttttcttatttttgtttttttgaggtggagttttgctctgttgcccaagctgaagtacagtgacctcggctcactgcaacctctgcctcccaagttcagggaattctcgtccctcagcctcctgaatagctgggattataggcacagaccaccacacctggctaatttttgtatttttagtagagatggggtttcatcatgttggcyaggctggtctcgaactcctggcctcaagtggtctgcccaccttggcttcccaaagtgctgggattgcaggcatgactcaccacacgcagccatattataccattctggactcaaagcttttgcacattctgttctctctttcagaaacatttttctcatttttactattttcccagatagccctttttttatcccccctgatttcagagatactgttctctgaccatatcactccttttcttgaaaatatgtaattatttcccaatgcacagaatataatgtctgattttttaaaaactagatccagcatgtactga

SEQ ID NO: 336229 - DNA, 569 bp, Homo sapiens
agcatagtgcctttcagctcctcaaacatattataccatttttttttttcttatttttgtttttttgaggtggagttttgctctgttgcccaagctgaagtacagtgacctcggctcactgcaacctctgcctcccaagttcagggaattctcgtccctcagcctcctgaatagctgggattataggcacagaccaccacacctggctaatttttgtatttttagtagagatggggtttcatcatgttggctaggctggtctcgaactcctggcctcaagtggtctgcccaccttggcttcccaaagtgctgggattgcaggcatgactcaccacacgcagccatattataccattctggactcaaagcttttgcacattctgttctctctttcagaaacatttttctcatttttactattttcccagatagccctttttttatcccccctgatttcagagatactgttctctgaccatatcactccttttcttgaaaatatgtaattatttcccaatgcacagaatataatgtcygattttttaaaaactagatccagcatgtactga

SEQ ID NO: 336230 - DNA, 582 bp, Homo sapiens
taatttgaatcatgggggcagtgtcccccatactgttctcatggtagtgaataagtttcatgagacctgacggttttatcaggactttctgctttttcatcttcctcattttctcttgccgctgtcatgtaaaaagtgcatttttcctcccatcataattttgactcctccccagccatgtggaactataagtccaattaarcctctttttcttcccagtctcgggtatgtctttattagcagcataaaaacaaactagtacaatgcttatactagtttgaatagtgtccccccaaaattcacgtccaccagaatccgtggatgtgaccttatttggaatagggttgatacaggtcacacggaattagggtggaccccaaatcaaaacactgttgttctcttataagaagagaggaattcagacacagagacagaggagacacagggaagacagccatgtgacaaagaaagaagacattggaatggtgcagctgtaagccaaggaatgctaaagactgccagcaaacaccagaagctgcagaggcaaggaaggacttccctagatattcagagggagcatga

SEQ ID NO: 336231 - DNA, 539 bp, Homo sapiens
tcattgccctggcctgggtcccatggccactcctatagatggaagagcagtaaatcatcacacaaatcaaaggaatgaaactgggaagttattccccaaaacaaactgggaagctgttagcaagggaaaaaaaacaaagaaaataaatgcaggacaaggaaaaaacaacagatgcctactgaaactacttttatgagaatacagagaatgttaggatggacaaaacccaagtataaattcaaagttcttcaggatacattattattgttttctaagctcaggcaactgtccaagtcttaaagcacttccacagaatacayagggtcagaggtctgcagactcttgtctctcatctctcttcactgacttacaaatcctaaatcaggcacttacagttaaattgtggttcccttaccatcttaatgaccagttttatgcaatcatactggtcgttggatcgatcctattcagttagaaagacaaccccaaacatcaaattgaccttttcagactagcgttttttaaaaatcctagacatt

SEQ ID NO: 336232 - DNA, 601 bp, Homo sapiens
  misc_feature (1)...(601): n = A,T,C or G
gacagtatttaggtttatggatgggctatataaataaaattagacttctgtcagcttgtctactgttactgcatcacatgaaaaatgtctggatgaattttcaccaattttggagagaatatatgtgatgatttgagtgataayataggttatgttcttcatatcaagttggattccttcacaaagatctgaaagtctagagtaatttatttgagagataattctgggtggcaggacggaaggaaggagaaaaagccaagacagctgcatcactgaactggtgatgactataagcaactaggctcattcccactggggaatgtctaaaaccataacgaacgtgtttcagaatggtcccttcaaaagccagagagactgggacatttatncatagactctcatcctccagtgattgggattcaccctgggtattatcttctttgcatatgaacactactcatggcttgggaagaagtcttgaggcagaagagcagaaagatactgggggcatttgatgtgggatgaccttaccatcataggaaccctccatcacatcagcagctggtgtgtaatccaggtagaccacatacacacacaaata

SEQ ID NO: 336233 - DNA, 601 bp, Homo sapiens
  misc_feature (1)...(601): n = A,T,C or G
gacagtatttaggtttatggatgggctatataaataaaattagacttctgtcagcttgtctactgttactgcatcacatgaaaaatgtctggatgaattttcaccaattttggagagaatatatgtgatgatttgagtgataatataggttatgttcttcatatcaagttggattccttcacaaagatctgaaagtctagagtaatttatttgagagataattctgggtggcaggamggaaggaaggagaaaaagccaagacagctgcatcactgaactggtgatgactataagcaactaggctcattcccactggggaatgtctaaaaccataacgaacgtgtttcagaatggtcccttcaaaagccagagagactgggacatttatncatagactctcatcctccagtgattgggattcaccctgggtattatcttctttgcatatgaacactactcatggcttgggaagaagtcttgaggcagaagagcagaaagatactgggggcatttgatgtgggatgaccttaccatcataggaaccctccatcacatcagcagctggtgtgtaatccaggtagaccacatacacacacaaata

SEQ ID NO: 336234 - DNA, 386 bp, Homo sapiens
atctcaagtccttctcacattgagaaatacaatcatgccttcccaacagttgctcaaagtgttaactcattccaacattaactcaaaagtccaaagtctcatctaagacaagactagtctcttccatccataagtctgtaaaatcaaaaaaaagtaagttacttccaagatacaatggggatataggcatttggtaaatattccaactccaaaagggagaaatcaactaaaagaaaggggctacaggccccayaaaagtctgaaatccagcagggcagtcgttaaatcttaaagcttcaaaataatctttgacattatgtcccacatccagggcacacttgtgcaaggggtgggctcccaaatccttgggcaactctgcccctgtg

SEQ ID NO: 336235 - DNA, 386 bp, Homo sapiens
atctcaagtccttctcacattgagaaatacaatcatgccttcccaacagttgctcaaagtgttaactcattccaacattaactcaaaagtccaaagtctcatctaagacaagactagtctcttccatccataagtctgtaaaatcaaaaaaaagtaagttacttccaagatacaatggggatataggcatttggtaaatattccaactccaaaagggagaaatcaactaaaagaaaggggctacaggccccacaaaagtctgaaatccagcagggcagtcrttaaatcttaaagcttcaaaataatctttgacattatgtcccacatccagggcacacttgtgcaaggggtgggctcccaaatccttgggcaactctgcccctgtg

SEQ ID NO: 336236 - DNA, 539 bp, Homo sapiens
cacatgtacacacatatatacatacatatgtatgtgtacatatatatatataaagtcaaaaatgttttaaacttaaatatggttgttacttcttgmgaagagactgggattggggatgcagtcagaggaatttgaccaaacctataatcttttagttttttcacagggagaaaatatatgtataacttaaaattagttaaaattaagggtaacaataaccaaaaatggacaagataaagtagttatcaagtggcaatcacacatcattgcaaataaaatgatctgcttccttttgctgaaaatacttaacggtaactactggaagaatagaaatacgatatgtaaatgttaaactgctgaaagaaaaaaacaaagggaaccaggacacctaaaaccttgattaatccaacaaaagtaagaaatgaaaaaattaaaagaaacaacaagaaagcgcataactaaaaagtacaagcatgtggacaaatatgtccaaatatgccaatatttggaattaatatgatttggttaatgtgtctatt

SEQ ID NO: 336237 - DNA, 539 bp, Homo sapiens
cacatgtacacacatatatacatacatatgtatgtgtacatatatatatataaagtcaaaaatgttttaaacttaaatatggttgttacttcttgagaagagactgggattggggatgcagtcagaggaatttgaccaaacctataatcttttagttttttcacagggagaaaatatatgtataacttaaaattagttaaaattaagggtaacaataaccaaaaatggacaagataaagtagttatcaagtggcaatcacacatcattgcaaataaaatgatctgcttccttttgctgaaaatacttaacggtaactactggaagamtagaaatacgatatgtaaatgttaaactgctgaaagaaaaaaacaaagggaaccaggacacctaaaaccttgattaatccaacaaaagtaagaaatgaaaaaattaaaagaaacaacaagaaagcgcataactaaaaagtacaagcatgtggacaaatatgtccaaatatgccaatatttggaattaatatgatttggttaatgtgtctatt

SEQ ID NO: 336238 - DNA, 504 bp, Homo sapiens
aagattggtcaaaagtaggaagccagggtaggagaccaagttcaggcagaaggcacacatacccttagtcaggtatgaatgtggctaacsgaggactggagtttggagttcagcgagcaaaggagaaaggggaagtaagaaacatgtaagagatacaggcgaagaagggcagatcctatggggcccgagggccagggagaggggttttgtttttgttctcaatacaatgagaggtcactggaggatttgaagcagacaaatcccatgctctcacttaaattttgaaaagatcattctggatgtcatgggaagaacagaaaggggcaagagtaaaaacaggcagataagctgtcaaacctggattttcacaaggctgctcctgcaaggctgtgtaggctgcacactgcccaactccaggggtgccttgcacctgaacagcagtaggaacagtaccctctgaggctgtgtgtagtgggccgggggatttttggtcccttatgaggc

SEQ ID NO: 336239 - DNA, 568 bp, Homo sapiens
tttaaccttctgggctcaagcaatcctcctacctcagcctcccaagtagctagaactactgrcacatgccatcatacctggctaattttaacatttttctgtagagatggggtctccctgtgttgtccaggccagtctccaactcctgtgcccaactgattctcctgcttcagccttccaaagttctgggattataagcgtgagccactgcacctggcctcatatcccttttttggtgagatgtctgctcgtgtcttttgtccattttctcaggggattttttaaaatgtgttcagttttaagagttcttcatatatcctagatgcaagtcctttgtcagatatacggtttgcaaatgttttcactcagtctatagcatgccatttcatcctcttataggatccttcacaaagccaaagtcctaaatttcgatgaagtccatttgatccattttttcttccatcaattactattttggtgccatgtctaaggactaagtcttgaatatttatcccatattttcttctaaaagttttatagttttacattttatatttaaatctgtggt

SEQ ID NO: 336240 - DNA, 476 bp, Homo sapiens
ggagcgggccggggcggggcgcggcctacaaaagccacgcgcggcgcggtgggcgggcctgggcgcgagcggctgagtcggctgggtctctggcgccgcagaggccgcgggcgaggaccgggaggggagagggaggagacaggaggaggagacgcgagtgcggggtggcgccggtccacctccgcagcgctcctgcctcccccmggctttggaaggcgggcccgggctgcggcagcggcggcctcggctgcctggggaggtgaagtcgggctgcggcggcctcggtcggcgcggcggagggaggcggctgacccggcgagggtgggcaggtctgggcggccggcgccgctgcgaggtggaggggcggcttggcatccccggggcggggcggggctcccgagggccgcggtcggtgcgttttccgcaggtcagcctcccccggggccttgcagaagcggcttctgcgtacccggggc

SEQ ID NO: 336241 - DNA, 476 bp, Homo sapiens
ggagcgggccggggcggggcgcggcctacaaaagccacgcgcggcgcggtgggcgggcctgggcgcgagcggctgagtcggctgggtctctggcgccgcagaggccgcgggcgaggaccgggaggggagagggaggagacaggaggaggagacgcgagtgcggggtggcgccggtccacctccgcagcgctcctgcctcccccaggctttggaaggcgggcccgggctgcggcagcggcggcctcggctgcctggggaggtgaagtcgggctgcggcggcctcggtcggcgcggcggagggaggcggctgacccggcgagggtgggcaggtctgggcggccggcgccgckgcgaggtggaggggcggcttggcatccccggggcggggcggggctcccgagggccgcggtcggtgcgttttccgcaggtcagcctcccccggggccttgcagaagcggcttctgcgtacccggggc

SEQ ID NO: 336242 - DNA, 587 bp, Homo sapiens
tcctggagtgcagtctggcattttctataaagtaatttacatgctctgtaattcagcagttccactgcttggtatatgtcccagataaattcacagacaattataagaagaaacatgagcaaggatgcccatttcagcattgtttgttgtagcagagagctgtctaaccaacacatctttcatcaggggaatagggaagtaacaataatgttaactaaggtgttttttcctctgcactttttatgtgccaagtgcttctcgaagctcttcagatacatccagtccaaaactcayttaatcgtcataaccaccctgtgatgtaggcactagtaccatcccattttatatattaggaacctgaggtacagagcacttaagtaatttgccaaagacaacacagctagtaagagacagagtgggatacggtggggtgcatacagtgaaatattctgcagtagtcagaaaccatgaatcagatttagtgacaagatcttcaaaaaggtagtgttgaatgaaaaagtgagatatataacccaatatcactcttattaaataaaagcacatacattctcaaaaatgttaggtat

SEQ ID NO: 336243 - DNA, 520 bp, Homo sapiens
agaccacatccttgccatgcaaccactgagtcttggcagtgcagatgaaaaactgggaactgtttgtgatgggtccagcatttgccatggacaagatgccaggacctgtatgctttaggatgaagttctcattattaaatttctcgacatagatggaaactaccaaaggtactatactttgatttattcctcaccgaattccaggatttctgtggatcttctcatcaatgttgctatggtctgaatatttgtgtcccccyaaactcatcattgaaatcctaactgctaaggtgatagtataaggaggtagggcctttgggaggtgaataggtcatgagggctggcctctcatgaatgcaattagtacccttgtaaaagagaccccagagagctagccagccccttccgccatgtgagaacacagttagaaggcaccatctatgaatcagaaagcaggtcctcaccggacagtaaatcggctggcatcttgatcctggacttctcagcctccagaacagtg

SEQ ID NO: 336244 - DNA, 560 bp, Homo sapiens
agtggcctgataatgttttcttaaaggtctaaaggaaatgttttcttccatcataatattctgtgcactgctgaagatcttttcttttgatttttggtaactggcctaacagatttacaygttatcacaacaattactatgctattattataaagcattggtttgcttagggaaaaaactgagattaaattaaaaaaaaaaataaggttattacatctgtgtatctctctgtatgcacttttaaaggcattgagttagagggctttgacttctgggtctaaaaaggacaccaagtcctgctaaattgtaaacactgacagcaattaaagctccatttttagggccccatagaagataccaatcaaaataaactgcatgtcagacacacagggctagaagttaaagctatttcaattcaaggcccaggaactctcatggaagaggtgggcatgtgggattgtaagggctgattttgaaaaaaaaaaaaaaattagttcatattctctataaattaatcattaatgttaaaggcacactgaagcaagaccagcatatgggcc

SEQ ID NO: 336245 - DNA, 576 bp, Homo sapiens
ttatggaagttatatcttacggtctacattaaaattttatagattgtttataacattttgaaaaacaaatttggctgggcgtggtggcttaygcctgtaatcccagctatttgggaggctaaggcatgagaatctcttgagcccgggaggcggaggttgcagtgagccaagattgtgccactgcactccagcctgggcaaaagagcaagactccatcttttaaaaaaaaaaaaaaaaaaaaaaaagggaaagcaaatttaattggcttcatcctgtttttattagggcttattatttggaaaattaactctctcacagaatgaaggttttcacctttttaaaaaaatctttgagttaccactttggttaaatgaatgacttattttacattgacctgtgatcctattttgtgatatcaagttttaaacctttgatatttcacaggctttccaaaatcaaattataaattattctttttctgacataattaattctttaagatattaagttccctaaagtccaaaaatgacataatttggcttatttgttacaaaaattacacaggaagcattgtca

SEQ ID NO: 336246 - DNA, 576 bp, Homo sapiens
ttatggaagttatatcttacggtctacattaaaattttatagattgtttataacattttgaaaaacaaatttggctgggcgtggtggcttacgcctgtaatcccagctatttgggaggctaaggcatgagaatctcttgagcccgggaggyggaggttgcagtgagccaagattgtgccactgcactccagcctgggcaaaagagcaagactccatcttttaaaaaaaaaaaaaaaaaaaaaaaagggaaagcaaatttaattggcttcatcctgtttttattagggcttattatttggaaaattaactctctcacagaatgaaggttttcacctttttaaaaaaatctttgagttaccactttggttaaatgaatgacttattttacattgacctgtgatcctattttgtgatatcaagttttaaacctttgatatttcacaggctttccaaaatcaaattataaattattctttttctgacataattaattctttaagatattaagttccctaaagtccaaaaatgacataatttggcttatttgttacaaaaattacacaggaagcattgtca

SEQ ID NO: 336247 - DNA, 576 bp, Homo sapiens
ttatggaagttatatcttacggtctacattaaaattttatagattgtttataacattttgaaaaacaaatttggctgggcgtggtggcttacgcctgtaatcccagctatttgggaggctaaggcatgagaatctcttgagcccgggaggcggaggttgcagtgagccaagattgtgccactgcactccagcctgggcaaaagagcaagactccatcttttaaaaaaaaaaaaaaaaaaaaaaaarggaaagcaaatttaattggcttcatcctgtttttattagggcttattatttggaaaattaactctctcacagaatgaaggttttcacctttttaaaaaaatctttgagttaccactttggttaaatgaatgacttattttacattgacctgtgatcctattttgtgatatcaagttttaaacctttgatatttcacaggctttccaaaatcaaattataaattattctttttctgacataattaattctttaagatattaagttccctaaagtccaaaaatgacataatttggcttatttgttacaaaaattacacaggaagcattgtca

SEQ ID NO: 336248 - DNA, 581 bp, Homo sapiens
agggtaaaggaaaaactttcaggactcatggagagctaaaatgttcatgaatatcaagcagaacaggaatttttttgactttttgcttaagacattgctgatcctttgttttgtttttcagagtcttgaaacttttcttttgaactattgacaacttttaacaatttagtatacccctataaacaaaatttggagcatatttgtttctctctacctgatttctccagaatttggaaactactgatgagtattcttaacggcaatacagttatttgcataagtgcaataagaatctgttttcatttgtaacaggacacaattggaaaaactcattattttaccaaggctttgactggaatggtatgctttcctttaaggaatcaaacttaaagtatggagccaataaagcccttgggaaaactggccccatattttgtgtacacagttcctatacacagtttttgacctgtgacaagtaaagaatgtcacttactgaaagtcccaggagtcccaggtttataytggaacctcaaaaggagaggatcatccaactcatagatatttgatggcacaaatccatg

SEQ ID NO: 336249 - DNA, 546 bp, Homo sapiens
gatgtcaactccactgtgctagaaggtggcaaatatcatcaccaattaccagaggacaatrgtgaggagcacatgcttcaggttggggaatggggaaagaaggattccaggtcagagcccaggagttctcttttgggggattgatgatgtttggaaactaagtgtgacttgggatatgagtacctcaagtttctaaacagtttgctagaacccatttcttgtatcctgagcacatcttatgaactgtgatctgggcagaattgaagatatagtgttagtgttggggtaaaggggcaaggcaggaaaaatgagatgaaaatggggaaggattggggatactggccccaaagtctgacatggtcctaagatggtgtcctaaacctccttctgggatagcttaggcagtcacctttgttattacaaccaactcatcatcccagtcaattgactgaccagctgtctgctagtccacctttagactaaatatccatgccatctgcctatctatctattcacacacttttgtacttaccttcctgacactgg

SEQ ID NO: 336250 - DNA, 621 bp, Homo sapiens
atagcatgagtggaaggacatcagcagagtggggaactgggtggtagagaccctcacacctgccaggaaggtcaatgtgactgcgaaaacaccaccagattgaaaatcttcctatatagacccttgatatatcagccactccaccccactggtcactgtggatgggtgaactaaacatgtctttccacaaaatggtgagacagccaagtaaaaagtggtcccyggagaacctccgactggcctgtgcactgggaggatggggcagggcctcaggaagttcgtgctgtttgtaggggggaggagcctggcctctcctgttcctgggtggtgacctggaattcaatctgtgagatgggggccttttaacaggaacccctttagctttgctgagaatcttttttctttttgcccaataaattctgtaaccactcacccttcaaagtgtctgcatgcctaatctttcctggttgtgcgatgagaacctgtttttttctacaacaatgagaagacacagaaggagccaaaatatgcccttttcttgcccctattctccccacagtcctctctctgctgacctttaccccagaaccaggtcttctttaaaaagcagaattggcccag

SEQ ID NO: 336251 - DNA, 621 bp, Homo sapiens
atagcatgagtggaaggacatcagcagagtggggaactgggtggtagagaccctcacacctgccaggaaggtcaatgtgactgcgaaaacaccaccagattgaaaatcttcctatatagacccttgatatatcagccactccaccccactggtcactgtggatgggtgaactaaacatgtctttccacaaaatggtgagacagccaagtaaaaagtggtccctggagaacctccgactggcctgtrcactgggaggatggggcagggcctcaggaagttcgtgctgtttgtaggggggaggagcctggcctctcctgttcctgggtggtgacctggaattcaatctgtgagatgggggccttttaacaggaacccctttagctttgctgagaatcttttttctttttgcccaataaattctgtaaccactcacccttcaaagtgtctgcatgcctaatctttcctggttgtgcgatgagaacctgtttttttctacaacaatgagaagacacagaaggagccaaaatatgcccttttcttgcccctattctccccacagtcctctctctgctgacctttaccccagaaccaggtcttctttaaaaagcagaattggcccag

SEQ ID NO: 336252 - DNA, 568 bp, Homo sapiens
tttaaccttctgggctcaagcaatcctcctacctcagcctcccaagtagctagaactactggcacatgccatcatacctggctaattttaacatttttctgtagagatggggtctccctgtgttgtccaggccagtctccaactcctgtgcccaactgattctcctgcttcagccttccaaagttctgggattataagcgtgagccactgcacctggcctcatatcccttttttggtgagatgtctgctcgtgtcttttgtccattttctcaggggattttttaaaatgtgttcagttttaagagttcttcatatatcctagatgcaagtcctttgtcagatatacrgtttgcaaatgttttcactcagtctatagcatgccatttcatcctcttataggatccttcacaaagccaaagtcctaaatttcgatgaagtccatttgatccattttttcttccatcaattactattttggtgccatgtctaaggactaagtcttgaatatttatcccatattttcttctaaaagttttatagttttacattttatatttaaatctgtggt

SEQ ID NO: 336253 - DNA, 568 bp, Homo sapiens
tttaaccttctgggctcaagcaatcctcctacctcagcctcccaagtagctagaactactggcacatgccatcatacctggctaattttaacatttttctgtagagatggggtctccctgtgttgtccaggccagtctccaactcctgtgcccaactgattctcctgcttcagccttccaaagttctgggattataagcgtgagccactgcacctggcctcatatcccttttttggtgagatgtctgctcgtgtcttttgtccattttctcaggggattttttaaaatgtgttcagttttaagagttcttcatatatcctagatgcaagtcctttgtcagatatacggtttgcaaatgttttcactcagtctatagcatgccatttcrtcctcttataggatccttcacaaagccaaagtcctaaatttcgatgaagtccatttgatccattttttcttccatcaattactattttggtgccatgtctaaggactaagtcttgaatatttatcccatattttcttctaaaagttttatagttttacattttatatttaaatctgtggt

SEQ ID NO: 336254 - DNA, 637 bp, Homo sapiens
tttattgcattcttcagctacaagatttctgtttggttctcttttataatatctatctcttggttgaatttctcagtcagatcatgaattgtttccttgagttttttgagttgtccatctgtatyctgaatctcatatcttgctgaattttcttaaaaatattattttgaactccttttcaggcaattgataaattttcttttctttgaggtcagtcactagagaattattgtgttcctttggtggtgtcatgttttcttgctttttcatgtttcttttatccttgtattgatgtctgtgcatctggtggaacagtcacctcttccaaaatttacagagtgtcttttgtaggtaaagactttcacctgcaggtgggtcttaaggtgctgtttgggcagggtgtggtggccctgattccaagtggaggcagtggtatagtctctgtgcagcttcttcagctgcagtcaaggtcaagaatgactgtgggcacctcaccggcctaggctgccagagtttgtgacagcagtggcagaagtgtgtgctgttagagttctcagtagcaagagcttttagggtcctcccattctcatttcctccataagaagagtcttaggtgagggcatctctcctcatgttg

SEQ ID NO: 336255 - DNA, 593 bp, Homo sapiens
aaacatcagaatgtgcttacacaaacctagatggtagagcctactccacacctaggctatgtgggatagcctattgctcctaggctacaaaactgtaaagtatgtgactgtattgaacattgtaggcagttgtaacaccatggtaagtatttgtgtatctaaacacagaaaaggtgaaataaaaatacaatataaaagatacaaagtggtatacgtgtatagggtacttttcatgaatggagcttgcaggactgaaattgctctgggtgagtcagtgagtgagtggtgagtgaacgtgaaggcctaggacattgctgtatgctacagtaggctttgtaaacactgtagacttaggctgcactgtttatttctaaaagttattcttccttcaataataaattacccttagcctactgtaactttastttataaactttaaaattttaaaaaactttttgacttttttgtaataacacttagcttaaaacacaaatatattttacagctctacaaaatactttctttgtttcttattctattaatataagctttttctattctttaattctttaattttaattttgacttcttaa

SEQ ID NO: 336256 - DNA, 631 bp, Homo sapiens
catctcctatgataacaatgcctccttctggaatacctctgaaaggaccaccacaaacacatgagtaatgtaytgccctacaatgttatgagagctatgatgttactaggtgaccagaaattttcagctgcattataatcttatggaaccatcgttacatatgcagtttgtcattgaccaaaatgtcattatgcagtaaatgactattcagaaaaaaacacaatacaatacaaaataatagaaataaaaaagacagtataactatttacatagcatttacattatattgtaatctagagatgatttaaagtatacaggagggcacatgtaggttatatgcaaatactacaccattttatataagggacttgagcatccacagattttggtatgcacaggggtcctggaaccagttcccctcaggctactgagggacaactgtctatgagaaagatataggtcaaatagttaatggtggttgtctttgaatgattgaattatagatgatttccatattgtctctgtgtttcctgtattttccaaattttctataataaatatgagtcttttcatatttaaaagcaaattttgaaaaagatgacagccaggaaatagcaggcagaggaagaaa

SEQ ID NO: 336257 - DNA, 574 bp, Homo sapiens
gcagtggtgcaatctcagctcactgcagtctccacttccctggttcaagggattctcatgcctcagcctctcaagtagctgggactacaggcaagcgccaccacacttggctaatttttgtattttcagtagagacagggttttgccatgttggccagactggtcctgaactccttacctcaagtgatccgcacgccttggcctcccaaagtattaggattacaaacgtgacccagcgcacccagctggaagtagctttgaaagggcttccagarcatctcattttgatgttataaatgtttagggagggtgaggaagaggagctgggcagagtaggagaaactttatgtatcatcgaagtagcatgacataatttaaagggggttggtaatttcacctcagcttaacatatgaaccactctcaggaactagtttctgaaacttcaccatcaggccttcgttccatattgtcactcacacatctctctagtgaggcttcgagaattattcttctcatcactgaaggggcttagaatggcacctggcaagagaagaagaataagagatcaaaatc

SEQ ID NO: 336258 - DNA, 492 bp, Homo sapiens
tgacgggtagtgagggcattaaaggagcaggaatttttgcttatagacagaggagtttggaatagactgcaaagcttcaagagtgctgaagcttctttcgcagcctgtggggcaagtgcccccaaatgyccttagaagtggtcgtaaggggacatgggatcttaaaggtctcatagaagacccaggttgaagtgaaaggcccagattagaggatgatttgagcagaggccaggcatggctgagtcgatgctggtggcagggatagggctgcaatgtgacagcgcagctcacagtaggtctcgctaccagatggggctcctggctttcatttggtttcactttctgtcttgcaggaagcaagttggacctgcactccagcctgtggagatgaacctaggactgtgattctgctatccagtatgttggctgaccacagggtaagataggctctcaaggaacttaccatcttgtttgtgcaaaatgaaaatactt

SEQ ID NO: 336259 - DNA, 499 bp, Homo sapiens
gctgaagcttctttcgcagcctgtggggcaagtgcccccaaatgcccttagaagtggtcgtaaggggacatgggatcttaaaggtctcatagaagacccaggttgaagtgaaaggcccagattagaggatgatttgagcagaggccaggcatggctgagtcgatgctggtggcagggatagggctgcaatgtgacagcgcagctcacagtaggtctcrctaccagatggggctcctggctttcatttggtttcactttctgtcttgcaggaagcaagttggacctgcactccagcctgtggagatgaacctaggactgtgattctgctatccagtatgttggctgaccacagggtaagataggctctcaaggaacttaccatcttgtttgtgcaaaatgaaaatactttgaaataactgtcttggggaaagacaaaaataagaacagaatgccgagaagattacacacaaggcatgcaaccccaaggtacaatacctga

SEQ ID NO: 336260 - DNA, 574 bp, Homo sapiens
ctttttaatctgtagtactacctctgttattacatctgtagtactacrtctgttatcacatctgttattatttgcttgatatttattttttaaaatatatcttttatctcacctttgtgcatcatttgaaaatggcttaatattttcctttttaggcctatttttaattgtttataataaactatgaggaagaaaattttaaagcaccaaaatgttggggcaccaagagaaagaaccagtcagagtatttgtttttccttttattttctaattatcttaaccaatgcttttttcctcaaaacgttaaaaatggaactatgttatgacccagcatttctactcctaggtatgtaccccaagagaactgaaaacgtgtccacacagatacttgtacacaaatgtttataagagaattactcataatagcctaaagttggaaacaaaaaaatgtccatcaacaaatacatggataaacaaactgtggtatatacatacagtggaatataatttagccactaaaaagaatgaagtactgatacatcctacgacttggatgaacctcaaaaacattgca

SEQ ID NO: 336261 - DNA, 475 bp, Homo sapiens
tttctttatctcttttagtctttttaatctgtagtactacctctgttattacatctgtagtactacgtctgttatcacatctgttattatttgcttgatatttattttttaaaatatatcttttatctcacctttgtgcatcattkgaaaatggcttaatattttcctttttaggcctatttttaattgtttataataaactatgaggaagaaaattttaaagcaccaaaatgttggggcaccaagagaaagaaccagtcagagtatttgtttttccttttattttctaattatcttaaccaatgcttttttcctcaaaacgttaaaaatggaactatgttatgacccagcatttctactcctaggtatgtaccccaagagaactgaaaacgtgtccacacagatacttgtacacaaatgtttataagagaattactcataatagcctaaagttggaaacaaaaaaatgtccatc

SEQ ID NO: 336262 - DNA, 592 bp, Homo sapiens
  misc_feature (1)...(592): n = A,T,C or G
tggctaggtaatcgaagagaaaaaagtaagtcctatttccttagctctgcagcaaagaaagaaagaactttgacatcaatcttcatatgaagaaaaggtcattaagctcagtagattaaaaatctgaaatgattctttaactgtatcaaacataaaaatcacctggagggcttgataaaacagagattgttaatccctacttcaagagtctatgatttagtgggtctgaatagagcctgtgaaccaaaaagtggctgaggcagatctcaatcgagttagaggtttgttttgccaaggttgaggatgtggccagggaaaaagaaacrcaagttacagtagaatctgcggcctgtactttttccaaagagggttttgaggacttcaatatttaaagaggaaagagcaggtagaagaggaaggagaaaaaaaaagaggctgggtgtaggcagtaacatgtttacattcttgtgaggcttctattagcccttaaaaactactcactgaatccacattttacatgtganaagagagtgtggggttaaagtcaatatgcattcttctcatgctgcgtatatctacattttacataaga

SEQ ID NO: 336263 - DNA, 576 bp, Homo sapiens
taggagggatatgtattctgaaagatgtggagtccacgaggaatttccttgtgagcaatttgtgagggaggmcccctgggaagatatgtgaccttctattttgcagctatttggttgggaacaaaaaggaaggcagtttgattgcttttgtgtgactcagttcccaagcttcactttccctttggcatagtgagttcggggtcccgagatttttattttccattcacagccctgagaatttgcatttctaataagttgctaggtgatgcagataatgtgggtccagggaccagattttgggaaccacagcaggtatggttcccagtcctgactaatcatcagaatcacctgtgatgttaaaaacaaaacaagacaaaaaaagaaaaacaaacaaacaaacaaaaaaaccagattcccaagagcctcatgccagaagccaccaatttgaatcttcagaagtggagccaccgggaacctgtttatttgataaagctccccattagatcctggcgttcagcagatgcagagttccacagccccagagtactcaggattatgctaaacatttagtcagtg

SEQ ID NO: 336264 - DNA, 609 bp, Homo sapiens
aggcttacatgtcataggtagattcaaagactttctcatttgcaattggtttaggaggaaaagctttttwaaaaaaaaaactgggatcagcagaaaaatgtcaagcagaatgatatagtttggctctgtgtccccagagcccccaggggactgtgacattctctaagcccctctggaaaaattttaggacaaagaatgtggtcagagttcagttttcaatttccacttatctgaggtctacaggccagcagatccattcagtgagggccctgaaagacaactcagggacatatgttaagatgttatctttagtttccataaggaaagcaaacatctctggaactctaacttccttggctattgctttagactactattacctttttgtttgacaaatttcttatttacttctggggctagctaggttcctggaatttccctttaaggaactccagatttttctttatttccatgcttggggttttcaggcctctagagagggggctcctgctccatctcaccccaatgccctcagtaatctcgccccttgctttcctctctaattctgtttttatatcattctccctcttactagcagttctagccaca

SEQ ID NO: 336265 - DNA, 434 bp, Homo sapiens
tgttccaatagcacctattgaaagagtgtctttgtttactgggttgcctttgcacctctgtcagaagtcaattggctgtatttgtgtagacctatttctagactctctgtattcttctttttaccttttatctttgcatgtaaattatagaatcatagaatcatcttgtctctataaaatatcctgtgctgggattttgatggagttgcattaaaggtatagatcaatttgggaagaattaaaatctttactrtgttgggtcttccaatccatgaatccatatactcttgatttatttagaacttctttgattttgtttacagcattgtgtaagttttcagcacacagatcctatatatacctagaagttttatgtttcagagatattataggtgcaattatttcaaaatttttggttttatttattgctagtg

SEQ ID NO: 336266 - DNA, 463 bp, Homo sapiens
ttcttctagcatgcaagttagcaaatgtctgtggcaccaatctccatgttctgattctgtgtcccagtgagggtctacactggaaactgyctgctggcctgtggggaatcattctgtttcctctgttgtcatcctatcattgacctgactgagataccagagattgctgaactctcgggctgcagttatggcggcacctctcttatttggggttagtgtctgatttagcagtaacattatatctctccatgtcagatcaaaggattatcctaacccttgtaaaacatcaatatagccatcagggttatctgagaatttacctaggtctattttaattttgcttcaagtctgagagagaaaaaggtacatacactctggctgggccaaattctccatctcccacagcttggagggggcataatcggggaacattggcattcttttgttcattgtttaccccttt

SEQ ID NO: 336267 - DNA, 463 bp, Homo sapiens
ttcttctagcatgcaagttagcaaatgtctgtggcaccaatctccatgttctgattctgtgtcccagtgagggtctacactggaaactgcctgctggcctgtggggaatcattctgtttcctctgttgtcatcctatcattgacctgactgagataccagagattgctgaactctcgggctgcagttatggcggcacctctcttatttggggttagtgtctgatttagcagtaacatkatatctctccatgtcagatcaaaggattatcctaacccttgtaaaacatcaatatagccatcagggttatctgagaatttacctaggtctattttaattttgcttcaagtctgagagagaaaaaggtacatacactctggctgggccaaattctccatctcccacagcttggagggggcataatcggggaacattggcattcttttgttcattgtttaccccttt

SEQ ID NO: 336268 - DNA, 463 bp, Homo sapiens
ttcttctagcatgcaagttagcaaatgtctgtggcaccaatctccatgttctgattctgtgtcccagtgagggtctacactggaaactgcctgctggcctgtggggaatcattctgtttcctctgttgtcatcctatcattgacctgactgagataccagagattgctgaactctcgggctgcagttatggcggcacctctcttatttggggttagtgtctgatttagcagtaacattatatctctccatgtcagatcaaaggattatcmtaacccttgtaaaacatcaatatagccatcagggttatctgagaatttacctaggtctattttaattttgcttcaagtctgagagagaaaaaggtacatacactctggctgggccaaattctccatctcccacagcttggagggggcataatcggggaacattggcattcttttgttcattgtttaccccttt

SEQ ID NO: 336269 - DNA, 557 bp, Homo sapiens
gcagtcctgcacctgtttacccacctttctttgaagggggcctgcccctccacacgtgtgggtatttctcatcargtggagatgagagactgagaaaagaagtaagacacagagaaaaagtatagagaaagaacagtgggcccaggggaccggcacactcagcatgtgaggacccacaccggtgctggtctctgagttctctcagtatttatcgatcactattttcactatctcggcacagggagtgtggcaggagaacagggtgatggtggggagaaggtcagcaggaaaacatatgagcaaaggaatctgcatcataaataaattcaagggaaggtagtgtacccagatgtgcatgtaggctagatttatgtttctctttatccaaacatctcagtgtagcaaagagtaacagagcagtatcaccaccagcatatctcgcctccagccatagggcagttttctcctatcttggaatagaatgaatggtcggctttacacggagactttccattcccagggacatgtgggaaacagaggctttcctcttatctcaa

SEQ ID NO: 336270 - DNA, 563 bp, Homo sapiens
ccgctctccaaaccctggcagtggaggcacagtgctgagagcatctctgggtgctgcgggagggagaacacagcaattgtgaggcactgaactcagtgctatcctgttagagcaggaagaaaaaccagaccaaagtcagctgatgcccatccatggagggagcatttaaaccagccctagctacaggggaatcaccgatcccagcagtcctgagtgcccacaaacctcgataccaagggctacaatgctccatgtctccaaataaacttamatggcagtctaggccataagaactgcaactcataggtgaggcctagtgccacaggggagtctctgatcacagcaaacctaacttgagtgcccgcaaacctcgccaccaagggctacaatgctctgtgtctccaagtaaacttgaaaggcagtctaggccataaggactgcccctcataggctaggggtagtgcagaactaggcccagaggcactggattagggggacacatgacatattgagacgcaagctggggcagcaaaggggaatgtttgtatcacccctcccctaac

SEQ ID NO: 336271 - DNA, 563 bp, Homo sapiens
ccgctctccaaaccctggcagtggaggcacagtgctgagagcatctctgggtgctgcgggagggagaacacagcaattgtgaggcactgaactcagtgctatcctgttagagcaggaagaaaaaccagaccaaagtcagctgatgcccatccatggagggagcatttaaaccagccctagctacaggggaatcaccgatcccagcagtcctgagtgcccacaaacctcgataccaagggctacaatgctccatgtctccaaataaacttacatggcagtctaggccataagaactgcaactcataggtgaggcctagtgccacaggggagtctctgatcacagcaaacctaacttgagtgcccgcaaacctcgccaccaagggctacaatgctctgtgtctccragtaaacttgaaaggcagtctaggccataaggactgcccctcataggctaggggtagtgcagaactaggcccagaggcactggattagggggacacatgacatattgagacgcaagctggggcagcaaaggggaatgtttgtatcacccctcccctaac

SEQ ID NO: 336272 - DNA, 528 bp, Homo sapiens
ctgactgagggaactatggaaactcaggcctaatgtcccaaggggacaagcttggggaggctgagtccaggacggtggaactgaggggtcaccgacagctgggtgggagcagcccagaacgattcccagaacacacggcactgcagctgggcctgaaagagggtagagctgcaagggagcaggttgggggcacagtgccccaggttatggaactcagcgcctcattccacaggctgctgccgtctgctaggcacagagcagagagatgcgcaaggatggagcagcacatagagttacatggatctgattaagggcaggcagggatcctcagagggtcagaaaggcttcctgggaaaagcagcctctgagccaaaaatacagtacaggtgggtgacaggagtacctccagccaagggaacagcctgcccagacacagggccagtgagagctagctctgtgggacygtaagcacagattgggggtggccaggggatgagagaagagaagaggtcaggatgtgagtgaggc

SEQ ID NO: 336273 - DNA, 524 bp, Homo sapiens
cacattgctactacaaccagtatctgagaaagtcatcatacaatgactctctataaccaatgacctcatatgaagacttcatccttgaaagcaccaagagctgaattaggcwaccataaactataaacattaaagtcacatatttaatggggggaagaagaaatttttaaaaagaagtcaaataaaaaataaattcaataataattagaagaaatagtctaccaaacgagaagaaattagaaaaataattttcataatatgacaaaacaagattctataacacccccaaaagatcagattaatcctccagcaatggattcaaatcaagataaaacattcgaaataccagataaaaattcaaaatgttgactattaagctaccaaatgagataccagagaaaggtgaaaaccaaataaataaatttaaaaaacaattctggatatgaatgaaaaaatttttgtaagacataaatatttaaagaaaagccactaagaacttcttaaatgaaagacatatttaggaa

SEQ ID NO: 336274 - DNA, 521 bp, Homo sapiens
ggtgggagataatttgaattatggaggcggtttcccccatactgttctagtggtagtgaataagtctcacgagatctgatgagtttatcaggtgtttgcactttttcatcttccccattttctcttgctgcctccatgtgagaagtgtcttttgcctcctgccatgattctgaggcctccccaaccacgtggaagtgtaagtccaattaaatcttttcttcttcccagtctcgtgtatgtctctacaagcatcatgaaaatgcactaatacacagcccacttttcatacaatcattaacaatggagcttccaccaatcctgggaagccaactgatcacatgatggtcaaataaggtaaatrccccctcacatccttcacaaataaaccacattcctagctgcagacaatccagtgatttctccattttgctgcagtgttgaactatcaaagctcaccactcacactgctgggaagagttctccgtacctcttctggttgggagtgctctctcaattcatga

SEQ ID NO: 336275 - DNA, 554 bp, Homo sapiens
tattatttatcttatcctgcctttgaggcaatatttttactagatctgtaaatttacatttttaaccaattttggataatccataacaattttctctttagtttttcacttcattttctcactttctcctctcagataaatgatgacacttctgattctttcctctttataattagcctctctttttttgtttttgatattcctatctctttataatgccttatmaatacatttctaatatagttcttccatgttaattctttctttagtttttcactcatccattgacttttggcaagttatgtggtgtttttctagatattttattaattttttcaactctaactcatcgttactgacagtttcttagcatttacttgcctttgtaattttatctgctttttctttaaacatgtttatacagaataattttattttctgaacttaacaaatatagcatatcttagtctatttttgctgttgcaacaaaaatgtcatgaactggacagtttataaacaatagaaatttatttcttacaattctagaggctggc

SEQ ID NO: 336276 - DNA, 561 bp, Homo sapiens
gcacctgtaaatctaaaatatgaaacacagatttcccagttggtgtactttccagtgagcatggtaacaaatatctatttttatgctgagttctggattgcttttgttttacatgattagcaactgataaattacggtttattttaacctataaatrtcaaagagtctaacttgtggaaggttttttaccaaacattttgctgctggtagccaaatagtggaaatccctattaatctaggaaattgtaaactgctcttcacacattttagtttttagcaattttagacccagctcaatcatttgctgaggtacaaatgattgctatcattaacttcagtgttgctgtaaagatccgtgctcaaatcatctaccaaacccttgtaactacaaatttagatcaagctgttactccgtcttcttgcacttgtaatttcctacttctctgaaactggcttcctgactccatgcctctgtattttgtgtattccctcttccattatagtaagcagaaattcaagttcttggccaccacattcccaggtgctcaggactgcagtcca

SEQ ID NO: 336277 - DNA, 613 bp, Homo sapiens
aaactcataaatggctgatattgtttggctgtgtcccaacccaaaactcaacttgaattgtatcccccagaattcccacgtgttgtgggcaggacccagggggaggtaattgaatcatgagggttggtctttccccatgttattctcgtgaaaatgaataagtctcacaagatctgatgggctaattggggctttctgctttttcttcctcatttttctcttgctgccrccatgaaagaagtgcctttcacctcctgccatgattctgagggctctctagccatgtggaactgtaagtccaattaaacctcttttccccactcccccaccccagtctcaggtaagtctctatcagcagcgaaaacagactaatacaatgacttagcagagtcccaggcaccttgtaaaaatgtttaataatttcaacactatcatgatggccatcattccaaacattgtatctgacataacttttactgtaatcaacaaagtgctccttgcttcagaatgggtttctatctctgaaatgtattctcaatattacctactcatgcattccactttccatgtttgctaagaaacttaattgttaaaaaaattgaaactattcaag

SEQ ID NO: 336278 - DNA, 492 bp, Homo sapiens
atctcaaacagatctacccacactgaaaaacacacctgatccatcatgaaatagttaaatgggtcctatataggtttcatatataggaaaatctgtgccacttatattagaatcttatatatgatctgctcttataaagttyaatatgactcaatattgcagggctttaatggcattatgccaaagcatatttttaccaggtaaaatgtgcccttttgtgacccaccaattgaagagaacaaggactttaataatctcaaacctggaaattggggtttctaaaaataacaccagagaaaagctgcccttgagccccactggaaggcaccatacatagtttttctcagcacccacattgcaaaaaactgcagggcctcgtgtcttgtgtccacatttcttaagtcagtagggcccctccatacttttgggacctgcaatggtttgaataattgtcctcctctaaaattcatgttgaaatttaatcctcaatgc

SEQ ID NO: 336279 - DNA, 527 bp, Homo sapiens
tagatgtttaataagcatctggtttacaaattaataaccgttattacttttacttagaatcaaataaaaaggaaaataacttttaagacattagcaaatgtttggaaattgatctgctttgctaatgcttttagtctaaattaacttttacagaaaaataatgagcttaatttctattataattgagaacaattaaataaaatatcatgcaaagagacttttagctacaatcattacaaatacatccatttaactcctagycttttgcactagtcagcttgggctgacataacaaaataccattgaccagtagattaaacaacagacacaggtgtggaagctggaagttcaagtcagggtgcaatcattattggtttctttctgaggcctcttcttttggcttgtagacagctaccgtctcaccatgtgatcacataatatcttctttttgttcacactgggagcaagaaagcaagctctctggtgatttttttttataaggacattaattccgtcaaaagggctcc

SEQ ID NO: 336280 - DNA, 567 bp, Homo sapiens
tctgctctcaattcttgtaatcaaataactctagatcttaataagtgcaataagtaagatttaaaaaaaaaaaggagaagacatagagattgtgaaagaacaaataaagcttaaatagaaacaacatacttgttgtcataaacttgtttcatatagctgcttcttcagcacccgtttttaagtctggcctaaggtatttgaaatccagttgtttcttgcctcctttgacctagttgaaacttctccctatgtgttggtttgtaatatagtctgcttgcttcttatcttactaagacaaatcccaacatakcccacagctactgaccacaataaaacataatggtcaatatgagagtcatgcaaacaagctctccctttcttgttgcattttctagtgactaacagtgttttcttcaaagtagccaatccgcaatctcagcaggaatgcctaagggataacactcatagaccttactatagccatagactcacaggtgatctctcttttgctctttctcttctattcactccctcctcattcctcacctgctggttgagcatcctgct

SEQ ID NO: 336281 - DNA, 585 bp, Homo sapiens
acagttgaaactcaataatgccgaaacatagaaatatgcaaactacgtagaaccatcacagttttggggttgctgatgggaccatcatgatacttccttggccacttgccataatatgcacagctctgtccctagggctcaagtggggccagtaacatcagagatgggtcattttcagtccagaggatatactgtcactcccagctgcacactgctgtaaaccatcctgtaatggttttgtattataatttggatatataatgtatattaaaattatagttataatggtagttacaaaatggataataacttcaagggtatttttctgtaaacaattccatgtctggctcgctttcagtgtttcagttccttaataaatgatctgtacttatttgttcaytagcaaaggatctttatgatatttttgaaagtcttttttcacctctgtggtgaaatgaaagttcttaaaatgtcatgttctggctttaataggatgtttacagattttcttgctgccctttcatctcaatatagacaaggcagagagacacctaaaagaaggttactcggccttggatatactgg

SEQ ID NO: 336282 - DNA, 567 bp, Homo sapiens
gctgatttttgtgtttttagtagagacagggtttcaccatgtgatccgcccgcctcggcctttcaaagtgctgggattacaggcatgagccaccacgcctggctaacacactctcattaaatgagtttggttatgaaaatttttctttaccttaggccattaagtcctatctaccaattcaagggtgaatccgcccattgattggacgaatttttcaagattaaaaaagccactttctctcgatgaacaaatgcttactgtgaaacagcctttgcaaaattatgacagtaagagaaatctgacatggctgactctatctcgcctccagcctcacaggttggctgtctgcttattcttgggcgtgcgccaagctaactttgggagaaatttagtttatagtttaaataataatcacccttccccaaaactaagctgttcttgtaaaactaatgaaaggccaccaagttaggargatgagaggggcttgaattctgaataattaccagccattattctggaggtcataagatttgcagctttcccagttaaactcttggagataacatt

SEQ ID NO: 336283 - DNA, 567 bp, Homo sapiens
gctgatttttgtgtttttagtagagacagggtttcaccatgtgatccgcccgcctcggcctttcaaagtgctgggattacaggcatgagccaccacgcctggctaacacactctcattaaatgagtttggttatgaaaatttttctttaccttaggccattaagtcctatctaccaattcaagggtgaatccgcccattgattggacgaatttttcaagattaaaaaagccactttctctcgatgaacaaatgcttactgtgaaacagcctttgcaaaattatgacagtaagagaaatctgacatggctgactctatctcgcctccagcctcacaggttggctgtctgcttattcttgggcgtgcgccaagctaactttgggagaaatttagtttatagtttaaataataatcacccttccccaaaactaagctgttcttgtaaaactaatgaaaggccaccaagttaggaggatgagaggggcttgaattctgaataattaccagccattattctggaggtcataagatttgcarctttcccagttaaactcttggagataacatt

SEQ ID NO: 336284 - DNA, 646 bp, Homo sapiens
caaaagcccgaacaggaaatagcacttgcacctaattgcttcaaagtacaacttttgtgcactttaaattggaaggtctgggttacaaccccagttccatgacctttagcactctacatactttttatgaaagttgctttgctcttttgtaaaatggaaagaacaatcctactgggctattgtgagaactaagaatgagcaggtgaaaggagctagcacaatgtctggtacaaagtaaaagccatttcgcactgagcagggcacaaaagaggactgcctcagctgatttagcacagactcacttaggaacatcatctttaaagcctacttgggctggttggcttgtccattttatgtgtgagtttcaaaggcaccttctcagaaaaacatatcaagaaacccagatgtaattatttttttacttctgtttttatagttattaattttctttttcgacagttaagataaacttcagttcttaacacataaatctcatatggatgttgtcttagtctattctggctactgtaacaarataccataaactgggtagcttataaaaaacataaatttgttcttttggcttaggattgacttggtgatgcaggctctattttggttccatatgaactttaaagtagttttt

SEQ ID NO: 336285 - DNA, 593 bp, Homo sapiens
gtttatgtccatgagtatccaatgcttagctcccacaatgcttagttctcacttataagtaagaacatgctgtatttggtttcctgttcttgacttaawtcacttaagaacctggattctttaaagccaccccccatgaccccacccaacatggtctcttagggcaagtcggcatgtactctgatatacccagactcgtttgaagagtgctactttacattatcttacattgggtaatcaagctttttaattgtttatccacaatgggttaatagctactacactgtcatagcctgcagtgttgatgtattcacttctgcccaggaaggcgagagtattttgtgtgatcctcatttttgtgactttaaatcagatgagacttcaaatttacacattttcttccattgctctgtgctttattacatggttaagtgctttaagatttattaaatccaggtgttttatttctcagtaatcaccagaactcacctgatttgattatgccaatctgttatttttaagaattgtttttttaaaaatattctttcccagttaatattgtatatgtggctttcttgatttaaaaatatatt

SEQ ID NO: 336286 - DNA, 611 bp, Homo sapiens
tcatatgtttaatatatttaaattaatgatgagttataataatataattccaatttaatccaggggaaatttttcaatagcaagggcatatagtcraagaattttaaaatttaatttatatatatccagagagagattatacagtaattaataaaagacttttaagcataaagatatattttattaggataaaattctacagagaataaagaatgaatatgtaagctgaagacaaaaaaagaaacaatgtaaaatttctgacttttctgagtttttttccacaaatgtatttttgtaaatggatgaagacaggcatcaggttactctggtaggtgaggtatcagcaaaaatggcagagtatgaattccaaaagtctgtccctccacaaaagccatgcataaagtggcacaactgtcagaaccaactttttcagaacctagaatgtaatcaaaagcttacaacaaccaggggaacacttaatcaagaaaagcagccaaatctcagcatatgtcctagcaattccactcctgggtatacacccaagagaactgaaaacatatgttcacataaaaatttgtacatgaacattcatagcagcattattaataata

SEQ ID NO: 336287 - DNA, 611 bp, Homo sapiens
tcatatgtttaatatatttaaattaatgatgagttataataatataattccaatttaatccaggggaaatttttcaatagcaagggcatatagtcgaagaattttaaaatttaatttatatatatccagagagagattatacagtaattaataaaaracttttaagcataaagatatattttattaggataaaattctacagagaataaagaatgaatatgtaagctgaagacaaaaaaagaaacaatgtaaaatttctgacttttctgagtttttttccacaaatgtatttttgtaaatggatgaagacaggcatcaggttactctggtaggtgaggtatcagcaaaaatggcagagtatgaattccaaaagtctgtccctccacaaaagccatgcataaagtggcacaactgtcagaaccaactttttcagaacctagaatgtaatcaaaagcttacaacaaccaggggaacacttaatcaagaaaagcagccaaatctcagcatatgtcctagcaattccactcctgggtatacacccaagagaactgaaaacatatgttcacataaaaatttgtacatgaacattcatagcagcattattaataata

SEQ ID NO: 336288 - DNA, 487 bp, Homo sapiens
cggttccacggtagcatctagggatgggtgcctgcaactcccgaagccccagtgggcatgttacagtgctcctttagctctgccatccacagaggacttaagtgataaccagttcagtacccacttggtatycgggttcttgtccagtgtccaggaagaacaaggtcccccatggacttgaaggatggtgaatgtgggggttttattgagtgctggaggcggctcaatgggatggatgggatgctaaataggggatggggtgggaagatgattttccccagaaatttggctgtcctgtggctgatctgccctccaaccatccccagctgaactcttctagacgttcagatgctccttctcttctctccttctccctactcttttgttctgtttgtcctctcatggagcctgcagtttggagtttatatgggtatagaatagaggtgtgtggtgggacaaaaggcaaaatttgggcaaggaaacagga

SEQ ID NO: 336289 - DNA, 566 bp, Homo sapiens
gccaatattttgttacattaagcaatactgctgaagaaaatttctatttgaagtctaaacagtaaaatgccattgtcatagcataaaataaactacataacaatggatgcttctttactcaggaagattaagtccatatttttcaaggaaagtcaagaaatgtagttccctacagtttgataacataactggttattagtatcctccccagtctaatcatactgaayggtatatatcagaagcaaaacaaaagatgctgaaagcttaagggcaggagtaagggtagaggaaaggaagtcagtaaaatgatctccatgaatgctcttatttcggtccaaggagtcttttcagtgtttaagagaaaggctgagccagtgcctaagaggccaagagctcctcatttaggaaactatagaacaaagggaatctggaaaattcttacctggagtaaaaccagaatgtaaagtttccttttatgtaccattccacatggcactaaattcatgggcattgaatatttttttaaaaagttattaggcatagaaaacaaatattgaataaattac

SEQ ID NO: 336290 - DNA, 580 bp, Homo sapiens
aaggctaacatcataacaataaggttgtatagaataaactgacaacacagaagttattttggccctgtgttccacagtgactcaccaaatataccctgcactgtttattttatttttttctatttcactattgaaatgaacagatgcatttcacrtcacatggatctcgtggaaacatgccaaacattttcttagcaaccaaactcctgtcttctgcactgtgcatgattaactaaaacagcctgttgacggcttaaaataaacctgccttttccatttagcattttatcaaatgaatataatttcatttgctgatgaatttagttcagcttcaagagaatttttcttttcttcatggggaggctgaagaatcagaactgtcataccaaagaatgaaaagcaagcctagggagaacaagacagtctgatgtttacatgggtaaagtaaaagtatctttgtcaatattaccagcactctccctcaccctctgttttatagggtggaatgttgattttagttctgcttttgcattatggtgtttacgttgcttgattacaagcattaattaaaatgactgct

SEQ ID NO: 336291 - DNA, 533 bp, Homo sapiens
gtaggtgttagaaattatcaatcagtgagcttgatgaaaatctctaccaggtttttaaatgttttggaaaatattgcttacttagaactattcttactttcttccccccacygccctgcttaggattgctagaatggtgcatgaaaatatgctatatctactatattctcctatgtgtatatactatatattatacatctgtattctatactacatactatactgttatactatatacttatagaatatacagttatagaactctatatattatacatagagaactatatagaactctatatattatatagagagaactatatagaactcagtatagtatatacagttatagaattctgttatagttatagatgtatatagtatatgccatatattaatatatagaatatgcaatatactatatacaatatagtatataactatattgtacctattagcatatagtggatataattggatactatatagtaaattcagtaagcctttcatgtttgtattttaatggagaagta

SEQ ID NO: 336292 - DNA, 533 bp, Homo sapiens
gtaggtgttagaaattatcaatcagtgagcttgatgaaaatctctaccaggtttttaaatgttttggaaaatattgcttacttagaactattcttactttcttccccccaccgccctgcttaggattgctagaatggtgcatgaaaatatgctatatctactatattctcctatgtgtatatactatatattatacatctgtattctatactacatactatactgttatactatatacttatagaatatacagttatagaactctatatattatacatagagaactatakagaactctatatattatatagagagaactatatagaactcagtatagtatatacagttatagaattctgttatagttatagatgtatatagtatatgccatatattaatatatagaatatgcaatatactatatacaatatagtatataactatattgtacctattagcatatagtggatataattggatactatatagtaaattcagtaagcctttcatgtttgtattttaatggagaagta

SEQ ID NO: 336293 - DNA, 533 bp, Homo sapiens
gtaggtgttagaaattatcaatcagtgagcttgatgaaaatctctaccaggtttttaaatgttttggaaaatattgcttacttagaactattcttactttcttccccccaccgccctgcttaggattgctagaatggtgcatgaaaatatgctatatctactatattctcctatgtgtatatactatatattatacatctgtattctatactacatactatactgttatactatatacttatagaatatacagttatagaactctatatattatacatagagaactatatagaactctatatattatatagagagaactatatagaactcagtatagtatatacagttatagaattctgttatagttatagatgtatatagtatatgccatatattaatatatagaatatrcaatatactatatacaatatagtatataactatattgtacctattagcatatagtggatataattggatactatatagtaaattcagtaagcctttcatgtttgtattttaatggagaagta

SEQ ID NO: 336294 - DNA, 584 bp, Homo sapiens
gctttccattctgttctgtttcttctcgttagctctcctaaagcttagcttcccattttctactgcatttttcatttttgaataacaacagctttattgagatatgattcacataccatagtattgatctatttgaagtatataatttaatgtctttcagtatgttcagagagttatgcagcaatctctacaatacattttagagcatatttataatccccaaaagaaattgcatatgcattagcagttattccccattttccttcagtttccccaccctctgaggtaataagcaactacttacctaattttctgttttaataggtttgtscattctggacatttcatataaatggagacatacaatatacactcttttgaatttggcttctttcactaagcataatgattcgcagatcattcattctatggcatatattagaaggtaattctttttatggcttagtaatgtttctttacatgaatgttctacattttgtttattaattcaccaattgatagacagttgagtgttttcaatttggtgctattatgaataatactatcatgaacttttgtataaa

SEQ ID NO: 336295 - DNA, 619 bp, Homo sapiens
tttattatcagagtaggatgattatagttaataacgtatcatatgtttcaaaatagctagaagagagaatttgaaatattcccaacatatagaaatgataactacctgaggtgatggatactctaaatgccctgacttgattgttatacattctgtgcatgtaagaaaatgtcacatgagccccataaaaatacacaaatattacgtatcaataaaaaatatttcaataagttggttacatttaaaacttgggagaaagttttctgggtatttgaactctctggaatcatccagatgttctcacaacactaagcctcagtcttacaaggtggcaattggctggaactgtataattgccattctctttagaatggcatgttctctccaatttactagagtcatatcttttgagtgtgacaatgattgtatcagtttccatttttattatagttgtgctgttatttttctgtagttaggcaatattttgtgactccatgtctgtagcaaaagtggaaaataacatagagactgcaaagacaatataattcaagaaaagtaggagagaacaaagttgttttcaaagaaactaaataaatatacaaaraaacaaaaaatatac

SEQ ID NO: 336296 - DNA, 673 bp, Homo sapiens
tttgaaactgtaaattatattttaatatttagtgacactagactctccaacctgttactcatctcaagtttttcattcctttatgtatacattttgcctataaactttagtatcattttgtttagctttttaaaaaaacattttggtgcttttatttaaatattatatccatgcttttataatgtttggcctacctatcaaagaatatagtatatgtttccatttgtttaattcttctctatacttcagtaatgttttaaagttttgttgtagttattgtttttgtataggtcttacacatttcttgtgattctataratttttaaacctttgtgttgccattgttaatgtggtctttcatatcttatctcattagtatttgtataagtaaaagctatttttttagttttccaggtacataataattttgataatgatagttttaagtcttcatttccattttaaagctctctaatttctttctcttggctaattgcattggcttcttcctccagcacagtattgtataataatggtgatagaggtcataattgtcttgtacatattttttagttggtttgccttctcctcttttccctttaagcatgatgctgacttttgggctgagatagatttattacattaggcaaatatacatcttttcccattttac

SEQ ID NO: 336297 - DNA, 345 bp, Homo sapiens
attctgaggattgtactgaatgtgtcttggaactgtctcctcaaaagacaaaggggagaagtatttctccattgactccttctcacaaatcctacttgagaatccatgagtactgagtatgactaactctttargtgagctgccctgtgcacaaaacagtttgcaacctatatggaaatatttgccacaaatataactggaatcagagatgagaccaagaggatgtgaggtggtacacaggaggcatctgatacaattccagtgtcttaaactgtgattttaattacctctgtgaccagatggttaagattattttatatttcggttccatttaaaattttattt

SEQ ID NO: 336298 - DNA, 615 bp, Homo sapiens
ctcgaattggattggatcggatgaaatattagcttctttgcatgctacactgaattaggggacttctctaattcaggactgaatttctaaccaaaacagactttccactacttactcactttatttagtcataaataaaggtagatgagaaaaggcagttgccccagaatttttaaatggtagggataggaacaacaatgtgattggaagagcatgcttgggagtgtatcttgaagtggtgtctgcatagcaagcacactgttttattgttcattggatggcttaggtgggagggctgaatttttccaaagccagaytttaattttaccattgtatgattcagggaggtttccacacagaactcacgctgttttcagatgggtaagcgagtgtgtcaatgagagtagtccacgaatgcagaatgatccttttctgatttcactgatcaaataagttaaccctgtggaaggaacaaatgagagctaaggggaggcacttctggaggtgcaccttaacacttaacacttatcagggggagcactcagagggagaaaatagtatcacttccctttgtcattattgtgtaatttttggcaacataaaagtctccctttt

SEQ ID NO: 336299 - DNA, 562 bp, Homo sapiens
gagaaaatagtatcacttccctttgtcattattgtgtaatttttggcaacataaaagtctcccttttgcttcaagtaatttcttttaccttgaattttattttggtgttgacatcaagaccccctacttctcyttggtttgcatgtctcatgtttttgttcatcccttgatttattttatgccttctatatggttttgtctttgatatgttcttataaagagcatatatttggatttctttaaaagccagcataagtgttttttgcttgttacacttagagttgtcactgctgggttttgtttaacattaaccagctaatacttgaagttcttgattttttttttcctctgttaggttttgttttttctgtctattgatttgaatgttattaatcatagtacttttatattacctcatcattaaacacttgttcactcagttatttatttcctaaatttttctctctgtgtcaagaataacccaaatctgttgaccctctcagtggaagatataaaaattatcctattttcttcattccccctttcccatttgctggttttt

SEQ ID NO: 336300 - DNA, 621 bp, Homo sapiens
cttagagaggagagtctaaggggaagtacttctgctctcctcccttgagtgtttgttattttattggattgcctcattgacacatgacccaaagtaaagtgtgtaagtgacgaaaagcgaagagcattggcttaaagggtggaaacagggttgttcgctagcagtgtcctcaggtccagttatttaactcctctgttagttttgctagcagccgattggggattttaataacttgccctgcctaaccacgtggaattctgtccrtgccatttttgtctgtgtccaagtactgatgaccatatagtacagtataataaaaatagctaacaggacaagtggagctgggttgtggcagtgataagcctcagtttttgtgggcatcagcaggaacacaacagccccttcctcagactcagggctgtggctgatgaccagggtactgaaggcagcttctccaacactcacttgtacctaggctgtgtctgttgcccaggctagaaacgttcttgcttattcatccagaagcacctatgagcagcaaacttcatctagagccattgttcttgagcagggccttggttccagaagggaattctgaaaatgctgagagaatgctgcaca

SEQ ID NO: 336301 - DNA, 511 bp, Homo sapiens
ccatgctatggtggtgataaactccctacaagcacgtctttggctcctyctttaaattagcctcttagctaaaaataataaattataggaggaggggttttgtgttacctcctgccctggagatttaaaggaatctttgctctctgggatttctcttttaagagccattggaaggaaaacctaaacgaacatttaaagtccctttgaactgtagcctgtgaagttccaaatacaccctaggaggcctgtgagtcgatgtgatgtggtgataacagtcagctgcttccagcagctcctgctgtccttctgctctgatgacacaacttgtagctttggtctcattttgaggaacctgctaaagatggctctatttgctttaattctcagattacttcagactaatgtgtcacatctaattaagatggtgcagtgctgtccccttgctctacttaccacagcttctctgctgaaatgtgccatttaacctggattgtcccaaaagctggggaac

SEQ ID NO: 336302 - DNA, 614 bp, Homo sapiens
ctacttaccacagcttctctgctgaaatgtgccatttaacctggattgtcccaaaagctggggaacagcttgctgactgtggttgatgccrcggtatcatcttagcagatttttttatttccattaacatttaacctagtatatcttcaagtgttttaatattccaatcaataagtagaaaaatagatattggaaaattaattttcccacataatatgactcatgctccacaagattttttttgtcttgctctgctattatagtagctgctctgccaaccccatgagttattgtgaggctcaggtgaagtgatatatgtatagtaatatgtcagggtaagttgtccaatatttcagggtaagttttctacaggtgtacatgctaagtgccgacctactctgtgatctttgttatctgataaagctggacctgaactctggaggaaaagttttaaaaatgtaaacagtgctctatacgtgtagttttggtaacaataaatgaagtgttttcattcccaaccatctcattatgacagtaactctgctgcagccattaatatctggagttaataatcttctgtactcactgactttttaatgtctgtaaggcagata

SEQ ID NO: 336303 - DNA, 589 bp, Homo sapiens
tcagactaatgtgtcacatctaattaagatggtgcagtgctgtccccttgctctacttaccacagcttctctgctgaaatgtgccatttaacctggattgtcccaaaagctggggaacagcttgctgactgtggttgatgccgcggtatcatcttagcagatttttttatttccattaacatttaacctagtatatcttcaagtgttttaatattccaatcaataagtagaaaaatagatattggaaaattaattttcccacataatatgactcatgctccacaagattttttttgtcttgctctgctattatagtagctgctctgccaaccccatgagttattgtgaggctcaggtgaagtgatatatgtatagtaatatgtcagggtaagttgtccaatatttcagggtaagttttctacaggtgtacatgctaagtgcygacctactctgtgatctttgttatctgataaagctggacctgaactctggaggaaaagttttaaaaatgtaaacagtgctctatacgtgtagttttggtaacaataaatgaagtgttttcattcccaaccatctcattatgacagta

SEQ ID NO: 336304 - DNA, 605 bp, Homo sapiens
ttttgcccaatatttcttgtgacattatcaagctatttgtgaatggatctgtgtgtgtttgaaaaatggacagaagcaaaaccataaaccacaaaattagatggacaaataaaaatccataaatgtttcatatcactttttcttttcatgctcataggtttcagccaggctacactgcctgccctcttctaattcagctaatttgtctatctttcccrttacacaggttttcagcgattgccctgggcaaaagctgactttctcagcatttaattctgcagatattttcttcagtgtagcacgttttcccaagatacctacttggatctgttctggggttccaatctctccaaatcctaggatgtctaatcctctacttggaaattatccccttttccctttctaggaactttccataaggatggtaacaacagttcacaaggggcaaaagcaactaggaccgaagtggctctgccagccagtccagcattggtgtagacagctacttgtgatacttatgacgagggctggcctgcattctttttgtaatttttaatctgtattattataagttacaattaagtagcattttcgtggaataagtg

SEQ ID NO: 336305 - DNA, 605 bp, Homo sapiens
ttttgcccaatatttcttgtgacattatcaagctatttgtgaatggatctgtgtgtgtttgaaaaatggacagaagcaaaaccataaaccacaaaattagatggacaaataaaaatccataaatgtttcatatcactttttcttttcatgctcataggtttcagccaggctacactgcctgccctcttctaattcagctaatttgtctatctttcccgttacacaggttttcagcgattgccctgggcaaaagctgactttctcagcatttaattctgcagatattttcttcagtgtagcaygttttcccaagatacctacttggatctgttctggggttccaatctctccaaatcctaggatgtctaatcctctacttggaaattatccccttttccctttctaggaactttccataaggatggtaacaacagttcacaaggggcaaaagcaactaggaccgaagtggctctgccagccagtccagcattggtgtagacagctacttgtgatacttatgacgagggctggcctgcattctttttgtaatttttaatctgtattattataagttacaattaagtagcattttcgtggaataagtg

SEQ ID NO: 336306 - DNA, 534 bp, Homo sapiens
aagcatattttatgtccttttcttgactaaccactctactatatatgatattattgaatttctttttttccttggttttgccattttgtactggtccttattttccatactaaatgttatagattttttatttcctaaaacatatcagtatttgatagacttagacatggactaaaacaagtaaaatatggcatatgaaggattaatataaagaccagaagctgaaaaacagattgttgtagctgtatgggtcctgctttggattcaaataattaatagaataaactcagattggatcagatggttcttaatagttgcttatgcagaaacttcctgaaagagttttagttaacttaaagttgatatgaatgacagcttttgctaygcagagatcaaaggaacaaagaggtttactggcttctatctggccaaagaacacttggaatgcagggtctactgtggatgactcattttagagggatgcaaacaactcccgggcctccaggtaagtatggtggggccatgggaggagtc

SEQ ID NO: 336307 - DNA, 609 bp, Homo sapiens
tctggttcactcattatgacatatttgttaacaatatagatactttcatttggggaaatccagacaatttaaatttgtctttatggcataccaatggataattttataaagctttttcaccagaaatacgggtcctgcctatgatcaattctcatctgtatgttggaaagcaatttcagtaagtacttagcttaatcaatttgtatctgcacattgaccttcgggactctgcacgtgggtcccatcatgcagcgtgctctgcaattctctgtctctttagacagcatatttctcaatatttgtacatggttttcatattcaatcaatacaatcatctgttctctcctttcaaccacttcccttgactggggaggtgagaatccagcagcgcctctgtcacttgtgtgtattagagaatacttgtttacyatttccccaaaacctgaagaactgcaaaggtagtggggcattgtgggataacaaaaataatgtgaaaaataaaaataaatttataagcttgtttacacaattaagcaaatgatgagcacttatacatggctgattcctcaattattcatggtttgaagcccttgaaaattcaattcaact

SEQ ID NO: 336308 - DNA, 609 bp, Homo sapiens
tctggttcactcattatgacatatttgttaacaatatagatactttcatttggggaaatccagacaatttaaatttgtctttatggcataccaatggataattttataaagctttttcaccagaaatacgggtcctgcctatgatcaattctcatctgtatgttggaaagcaatttcagtaagtacttagcttaatcaatttgtatctgcacattgaccttcgggactctgcacgtgggtcccatcatgcagcgtgctctgcaattctctgtctctttagacagcatatttctcaatatttgtacatggttttcatattcaatcaatacaatcatctgttctctcctttcaaccacttcccttgactggggaggtgagaatccagcagcgcctctgtcacttgtgtgtattagagaatacttgtttactatttccccaaaacctgaagaactgcaaaggtagtggggcattgtgggataacaaaaataatgtgaaaaataaaaataaatttataagcttgtttacacaattawgcaaatgatgagcacttatacatggctgattcctcaattattcatggtttgaagcccttgaaaattcaattcaact

SEQ ID NO: 336309 - DNA, 602 bp, Homo sapiens
agctttttgtttgtttgttttaatggagaccaagtattgtttacaagcagaagaaaaagaacttacagagagtgaaagaaaatgcaagtgaggaaaggagagcaatgggtggatcaggctatagaggagaagggtaaggaagagaccaaggactcattggaagagttagttgtggccaggaggaaccctttctctccagagacaggacaaaagcaagttgggcaggatgattgcacagaagcattctgagaaggagagtgaaattgagcaagctctttatagctccaggcttagcgaaggaggaggtgagtttgcatgtaaactgccagttgatgcatccaatgccattacrttttgcacatgtgaagcataagatgttgagagcaaacacaagtactaggaaggtacttggacaagcagtcgcctgttagataatatggtcttaatgaaagccttgtcacaatggcacagaatgcttaatttcctgagatgtgggtaggccaaggcctggaggctctgccaagacctcctctgatactcctctttccccttccatagtgatatggtttggctgtgtccccaaccaaatctcatcttgaatt

SEQ ID NO: 336310 - DNA, 602 bp, Homo sapiens
agctttttgtttgtttgttttaatggagaccaagtattgtttacaagcagaagaaaaagaacttacagagagtgaaagaaaatgcaagtgaggaaaggagagcaatgggtggatcaggctatagaggagaagggtaaggaagagaccaaggactcattggaagagttagttgtggccaggaggaaccctttctctccagagacaggacaaaagcaagttgggcaggatgattgcacagaagcattctgagaaggagagtgaaattgagcaagctctttatagctccaggcttagcgaaggaggaggtgagtttgcatgtaaactgccagttgatgcatccaatgccattacgttttgcacatgtraagcataagatgttgagagcaaacacaagtactaggaaggtacttggacaagcagtcgcctgttagataatatggtcttaatgaaagccttgtcacaatggcacagaatgcttaatttcctgagatgtgggtaggccaaggcctggaggctctgccaagacctcctctgatactcctctttccccttccatagtgatatggtttggctgtgtccccaaccaaatctcatcttgaatt

SEQ ID NO: 336311 - DNA, 489 bp, Homo sapiens
ttgcttttatttttataaaatctgacggaagggtattaagttgaaaggatatatctatttggcttgataagtgtgtttttcctttttgggagtgaacccacccataagagttacagagggtgctgaacatattcataaagtgaaacattcatatttctgactatcttacattattctcagccaaagtcaggtactaacagcattaatatcaaagtaaatggctaaataatagttgctcaataaaggttattgtctggaactgaaagttatcataaggtgtgggggtatagagtgaagcttttccatagattatcacaattgaaggacagaactctgtcctgggccccttcccccagattaccattttttgaaaatgcatgatcatggagacatatctacacagagaatcacagacctttagagatgaagggcacyttatggacacacacaaacccagttttaggctgcaaaacgggagaaagtagtatg

SEQ ID NO: 336312 - DNA, 558 bp, Homo sapiens
gaatatctgacagacagagtccataattatcttttattattattactaatggaaaatatgatcagggagttcaagttttcccagaatctcaggtttaattgaatgacccagtggaggatcaaaatgaacaggctgccctttccacattgttttattaaaaatattttgaaattgagtggtgccttgcatgcaggagctttgttggtgatctttaactaggcatagaggaagcttggtgtgctaccatggggttgcagggtccctccagaaaagcacacagtcacattttgatgactgtaccagcagcattttattaacaccccgctcctcctcccagggaaggtcttggtttggaggtcagaagacattgctttaaggtctgaactgaagaagagaagagaggagctttttaaatgttgccataatgatattggcctcagtcttttagaagttgcatccaggaggtgcagcaaatccctaacttatgttggtggctcaacaacctcatrctcacacaagagcaatggaccatcctggctgaggctggccatgcctgga

SEQ ID NO: 336313 - DNA, 575 bp, Homo sapiens
gagtcagaaaataacaagagacttgggttccaaacctagttgtatcatgtatcagttttgtgaccttggccaaggaatagacttcttggagcccctgtttgctcatctgcaataccctatcagtagtgcttcagggaaattaaataacgtgtgaatctttaagaagctcagtaatacttgcataactctttaccatcagacactcaaaaagtcttcatyttttacttctctttttcttccctccccttcgtcattattcttttccatgtagcttagtgctaggcatattatgggtgctcactaaataattattttacttttttagcacagattccttttcacccccaaaaggcaaggctaatgtcttgttcagctcacaccaccttgtgtctgacacaaaggaggcccttaatatttgttgaatgtatgactgtgctttaggggttccaagaagaatgggtgtgaggtgaaagagttgagaaaagcatcaacctccaagttgaacaaagaaagttctataaggaacagagagtagtgatttcctatgggatgaattttctgtgctattgttaaga

SEQ ID NO: 336314 - DNA, 543 bp, Homo sapiens
tcacagctggtcaactttctgagtcccacattataatcaacttacatctcattgaccttcccttgattacctggccactcctaaaaagaaagactgggatatgcagtctttgagttgaatgcagtatgaccccaaataacattatgtgtttgccaccaaaagagaagaggagagtgaatattgggtgaagtccagcagtctcggctccatttaggttataagcatawgaggagcagagcagaggcccctaggctcctaatacaataccatagaacataaagcaataaaaaaaaatactcagcaagaggagcaagccttgaaataatgggaaaactgaaagaagaaaggaaagatggagcagagaaggaaaagaaaatgaaagaaggaaagtaagaaagaaagtcgtgtaggaaaaataatggggaacaagaacaaggaagaaataaagaaaaggctatagaaagaagggaaaggaaaatgtaatgcaggtgttaccgggtgcccgttttctatccttaggggtgacttttgctgcctgggcaa

SEQ ID NO: 336315 - DNA, 596 bp, Homo sapiens
atgaatgaatgaatttagacgtaaataggtggcaaaaagagagacaaggaaggaagcaagaaaggaaagaagaaaggatgaagttaagaagaaggaaggaaggaggcaagaaatatccactgatttgctgtctttagctggccgtatttgtcttctactgctgtgtgacaaattatcacaaacttaatggcttaaaacaacactcatttattctctctcagtttttctaggtcaaaagtctgggcatgacatagctgggtcctctgcccaggcctcacaaggctgcaatcaatgtttcagctgggtcagtttctcacttggaactcaggggcctcttccaagctcattcaggtggttggggaaatttagytcctgtggttaacagactgaagtacctagtttcttgctggctattggcagggggctgatctcaacttctgcagctcacccctaggtcctagctacatggtcacattcatagtccatttacaacatagccgcttacttcctttattattttttatattttggctgtctacttccttccaggccaacaggagagtgtgtctgatacttcaccttcttttaaaggctca

SEQ ID NO: 336316 - DNA, 552 bp, Homo sapiens
agtgagccactgtctgtctcatagcccatctttgtgcctgataagcaggggtatctagctttgggagatgacactgagttagaagttaagatggggtctaagaatagaaggctttggagcagaggtattgaatgtagtagtgatgaaagaggtggctgctttaaaataagaggtggtccaggaagaaatggctctggcaggattagcccttagcatttaagccccacttgctccttttgaattgttatatttcagcagacaaagatcctagtgaggattgtctaactgatgtctgaagacaagctgagactccatcttaggcagtagcaaaccccaggcacaagawctcttcatacagcttctttccccagctgccaaatgcattttcctcttgttttcattaagcttctggtttctgttcctgtcaatatcatcacatcaaatgcatgcacacacatgctcatcaccagcagccccccagagatgctctcggacatcatcttgaattttaaaaaccagtattgcccccttgatgaagaaacaccaggggag

SEQ ID NO: 336317 - DNA, 539 bp, Homo sapiens
ggatggtgccactgtgcctttgcacctgctggaccctgtatcctgaaatactcttttccttcttttattaaactggcaaatgtatgttcatctttcaaaatccagattgcttccttcaagaaggcaattactcttcaagtagaattaagaaccccatgtgttccttttcctaccctggatgaggaaaaaaaaaactcattcttacccarcttacttattgtcaatacataaatataagaaggagaatccaagaaataatgagcaatttgagcaatctaaggactaaaactggcatttcttccagagtatctaacttcccctctaaccttcaatcgtcctataatgaaatgatattttaaggtataagctatctctgcaggataaggggaacattaaagccaatgatgtgaacaaaaaagagagctgaacaggaagagcaaacgcagcccaaattggagaatcaagggaatatgatgttgtccagtggccacaaatttatcaacacacctatgcctggtaacctgctatcttgttcttgc

SEQ ID NO: 336318 - DNA, 579 bp, Homo sapiens
agtaagaccctcgttggaggaattttcaggtacagacaagggattatcccctctgctgcttggagaggacaggacactttcccagcccgtggatggccaatgcagctgaggtgtccacaacacagtagaatgagacacagcctcggcagaataatcagagcagaaacctgatcagactacatgcttgtggctgacttggaaaagaaggtggtgggtgggcccatggagggattgaccattggctaaatgttgggttttgcttttttgtgtgcctttctgatggtagcactactagaagacagtattccaggtcatcctcaaggtccagccttactctggtatcctgaataggaacttgggaatctagattgacrcagaacttttctctaagaacaagcacacacgtctgcccagaaagcactgtcctgctgcctcctgctggaagttgggaaccatatctgttctggttgtcattcctctgtaccagacccaactgaatagtgtctaagggttgcctcttctgtgaagcccacctgatgcactcagcctccacaaccacaccctgcctcgtgttgtcac

SEQ ID NO: 336319 - DNA, 605 bp, Homo sapiens
tgttggcagggctgcattctttctggaggctctcggggagaacatgttttcttgcattttccatgcagggtacaggctacccatgctctttggctggtgtcctcttcctccatatcaaagccagcaatggctgatggagttctcacatagcatcactctgatttcctcttttgcctccctcttccacttttagggacccttgtgattacactaggaatacccagttcatcaggttaatctccctattttaaggtcagctgatgagcaaccttaagtccccttagctatataaggtagcatattcacagattccagagactaaggtatggatgtctttgaggmgtcattattctgcccatcacaacttatatgactctggacctctggaagtgatcctttacataacctcatgggtccagtgtggaccttccaatggtgacatcagagtcacctggaagctttttagaaatgcagatactccaaacccatcccagaccttcagaatcagaatctacattttcacaaattttccgcggattagatgtgcatgtgcagtgagtttgagaagccctctccagaggttccctgagcaggcagaggaaaga

SEQ ID NO: 336320 - DNA, 616 bp, Homo sapiens
gtcaacacagttgctaagaccatttaaaaaccaacagacatttgcatatgaggacatgaaacatgccttctgggtaaacttgcttctctggataaaaggataaaaaggaccccagcttcggaacagcctcttacgggtcatttttctccatctgttcttgcatatttctacagcagaaggacattgcagtcacctcttccaggttctctagtgtatttccctcataagccctggccyctggcactgtgcaggtcagggcaacacctggaaagctggttgatttcctgcagggcccaccagctgtggctccagcacccacttgaggttctgttcatactgaattagataatggggaggtgagggaatgtagaagaagaaagaaaaagaaacagccaagtgaggagaataggaaatggtcttctcaacttctcatgggatgtctgcatggccaacatgctcttgcctccatgttttcatttattattggggctacacccttctggctggagctgattattaatgttaatattctttaaggatttggaactaaaaccagaactctggttctctaattagcctgtgttggaccgtgcagagccagggctggtgtggccat

SEQ ID NO: 336321 - DNA, 550 bp, Homo sapiens
tgttgtggttctcatctctggtcaactcagccttttgtcctggacttaaaactggctttctggtacatcaatttctgtttatgaaaaacacataaagctgtaccaatagtcacctatctcaatttctgttactgacagagaaagttgcttagcctctgagtttcagctccatcaacaataaaatgagaaccaaaacttatgccagatgctatttataactttcgagacattcttggtgaggacacacacacatttatacatcacaatagctaatttacagcattgaagttgaacactctttgttagctgaggatacaataaggcaaaatatgacaattaatgaatcaatcctggaaatataataatcttgaatgaggtgatctgtgggatgaaataataatagacttaagccatcaccttgaacagtgacccaacccatacctacttatttttgaatgacttgtttcctaccactttcacttctgaraatgttctgagtatatgtgcgtataccaagtattgagcactcactctcatcagcacagagctg

SEQ ID NO: 336322 - DNA, 550 bp, Homo sapiens
tgttgtggttctcatctctggtcaactcagccttttgtcctggacttaaaactggctttctggtacatcaatttctgtttatgaaaaacacataaagctgtaccaatagtcacctatctcaatttctgttactgacagagaaagttgcttagcctctgagtttcagctccatcaacaataaaatgagaaccaaaacttatgccagatgctatttataactttcgagacattcttggtgaggacacacacacatttatacatcacaatagctaatttacagcattgaagttgaacactctttgttagctgaggatacaataaggcaaaatatgacaattaatgaatcaatcctggaaatataataatcttgaatgaggtgatctgtgggatgaaataataatagacttaagccatcaccttgaacagtgacccaacccatacctacttatttttgaatgacttgtttcctaccactttcacttctgaawatgttctgagtatatgtgcgtataccaagtattgagcactcactctcatcagcacagagctg

SEQ ID NO: 336323 - DNA, 573 bp, Homo sapiens
tgtgggagacgtgactggagaaggctttgtgaagagatggtatccgagtccagatggagggggatggtggagggtggagaggagttgtgggcagtgggtgggagagggggcggcaaagggtatagaatcaacaaagttaactggagcccccaggccaaatgaaaggaagtatggctgctgaagggaccatcttcagtcttcatgaaggcttaaagttgatkaacagtgaaaataatacatacacacttggtgtgtgcctgttagataagggactggtcgcatattaacgtattagcagatggaccactggatatcaagctctggaaacactactaatatgtgctaaacatgggctcagaacttccaagtaattataactgtaaatgtaggaactgattgcttgcttttttttttcttagaacattgaaaccctttagaaacaaacaaatcttaggaatagtcacctttgaaaattgtactcatccacatccagaataccagataaatttatctgccctaaaaatatcaaatgacagattcaaatatcaaattcatgctgtttccaattatata

SEQ ID NO: 336324 - DNA, 573 bp, Homo sapiens
tgtgggagacgtgactggagaaggctttgtgaagagatggtatccgagtccagatggagggggatggtggagggtggagaggagttgtgggcagtgggtgggagagggggcggcaaagggtatagaatcaacaaagttaactggagcccccaggccaaatgaaaggaagtatggctgctgaagggaccatcttcagtcttcatgaaggcttaaagttgattaacagtgaaaataatacatacacacttggtgtgtgcctgttagataagggactggtcgcatattaacgtattagcagatggaccactggatatcaagctctggaaacactactaatatgtgctaaacatgggctcagaacttccaagtaattataactgtaaatgtaggaactgattgcttgcttttttttttcttagaacattgaaaccctttagaaacaaacaaatcttaggaatagtcacctttgaaaattrtactcatccacatccagaataccagataaatttatctgccctaaaaatatcaaatgacagattcaaatatcaaattcatgctgtttccaattatata

SEQ ID NO: 336325 - DNA, 481 bp, Homo sapiens
gcagcaagaaaaaaatgcagaggtgcagaaaacagggcattactggattatgcccacgtgaagccagctgccatagcagatggggaaaacaaatggccaaggaccccacagacaggaatgttagagaagatttgagatggtatagaagaaacgtcttatgcaaccaagaaaaaatgcagaaatgactgagagagaccactggtgcacccaaatacttcatttaagtcatcagttaggtatatcatgtgacaacatgcctggacctctaccgacccgtcagccacttaatctacaaatctgattcagcttaattcctttctacaaaccaaactttgccctaggtactcytcagagttgggtactattcaaggaacttaaagcccactagatcaataatgcaacatccagagagctttgtcctaattctctgattctaggacccaggtttggttactgggctcctgcagtgttacttagttct

SEQ ID NO: 336326 - DNA, 614 bp, Homo sapiens
tgtcccataggttctccatctgcagtgggatgacccatctttggtgggacagtcaggaactagctggttcaaatgsagaaggtccatgggacaggaaaggagtccaagaactgcttttacacaaaagtggagcatggtaggcagcttctacgttggcccccagtgatcctcacctgctaatattcacactgtcatttacccatctccccttaagtgtgagctaaagttactgactcactactaaacaaatgactatggtgggagtgaagggacacttgtgttataaaaggctgtggcttccatggcttccatcttggatgctctctggcttgcttgctagcttactctttcctggaccctactatgtgttatagactgaattgtgtccctccccaggactaaatttatatgttgaagccctaactcccaatgtgacgatatttagagataaggcctctagggaggtaattaaagttaaatgagatcatgagagtggggcctcaatccaataggactggtgtctttacaagaagaagaagagacaccagagatctctctcccactctctccctgcccaccacacagagaaaaggccacatgaggacacagtgaca

SEQ ID NO: 336327 - DNA, 563 bp, Homo sapiens
tagtgggggacttcagtactccagtgacagcactaaacaggtcatcaagacagaaagtcaacaaagaaacaatggacttaagaagctataccctagaacaaatagacttaacagatatttacagaacattctacccaataactgcgagaatatacattttattcatcagcttatggaacattctccaggataaaccatatgataggccagaaaacaagtctcaatacatttaagaagactaaaattataccaagtactctcacagttcacagtgaaataaaattggaaatcaactccaaaagggacmctcaaaaccatgcaaatacatggaaattaaataatctgctctggaatgatctctggatcaacaataaaatcaagagggaaatttttgttttttgaattgaatgataatagtgacatagcctatcaaaagctctgggatacagcaaaagtggtagtaagaggaaagttcatagcaatgaatgcctacatcaaaaagtctgaaagaatacaaatagacaatctaaggtcacacctccaggcctttgagaatcaagaac

SEQ ID NO: 336328 - DNA, 502 bp, Homo sapiens
cacagttctgcaggctgtaaaagcatagcacccacatctgctgtgggcctcaggaagcttacagtcatggcagagggaaaagtgggagccagtgtatcacgtggtgacaaarggagcaagagacagacgaggaagttccaggctcttttaaacaaccagatctcatatgaactcatggagtgagaacacactcattctctcaaggagggcaccaagccatccatgaggggatccacccccatgacctgaacacctcccactaagccctacctccaacattggaggtcacattttcacatgagatttagagcagacaaaatatccaaaccatatcatctaggaatcggatccggcattttaacaagatcccccaggtatgcatattaaagtgcgaggaattcactttaataaagtggacaccaattgttcagccttcccagcatcccttcctactttttaaaatcccagccccccaattctcctttaggaaactactcttctc

SEQ ID NO: 336329 - DNA, 594 bp, Homo sapiens
tccaggctcttttaaacaaccagatctcatatgaactcatggagtgagaacacactcattctctcaaggagggcaccaagccatccatgaggggatccacccccatgacctgaacacctcccactaagccctacctccaacattggaggtcacattttcacatgagatttagagcagacaaaayatccaaaccatatcatctaggaatcggatccggcattttaacaagatcccccaggtatgcatattaaagtgcgaggaattcactttaataaagtggacaccaattgttcagccttcccagcatcccttcctactttttaaaatcccagccccccaattctcctttaggaaactactcttctccaatctcaggctacgggattcaaatgttcctaactgcctgcccctgggtggccagataaaagctttcatcacactggcctctgtgattaatcaggaagcccatgcactccaagccagaacaatgaacgttagccacatttgctagaatgaagggaaagaagcatgctcttctctgtacagttaccaacctagtaagatggaagcctggagctactgtaaccatctcta

SEQ ID NO: 336330 - DNA, 594 bp, Homo sapiens
tccaggctcttttaaacaaccagatctcatatgaactcatggagtgagaacacactcattctctcaaggagggcaccaagccatccatgaggggatccacccccatgacctgaacacctcccactaagccctacctccaacattggaggtcacattttcacatgagatttagagcagacaaaatatccaaaccataycatctaggaatcggatccggcattttaacaagatcccccaggtatgcatattaaagtgcgaggaattcactttaataaagtggacaccaattgttcagccttcccagcatcccttcctactttttaaaatcccagccccccaattctcctttaggaaactactcttctccaatctcaggctacgggattcaaatgttcctaactgcctgcccctgggtggccagataaaagctttcatcacactggcctctgtgattaatcaggaagcccatgcactccaagccagaacaatgaacgttagccacatttgctagaatgaagggaaagaagcatgctcttctctgtacagttaccaacctagtaagatggaagcctggagctactgtaaccatctcta

SEQ ID NO: 336331 - DNA, 594 bp, Homo sapiens
tccaggctcttttaaacaaccagatctcatatgaactcatggagtgagaacacactcattctctcaaggagggcaccaagccatccatgaggggatccacccccatgacctgaacacctcccactaagccctacctccaacattggaggtcacattttcacatgagatttagagcagacaaaatatccaaaccatatcatctaggaatcggatccggcattttaacaagatcccccaggtatgcatattaaagtgcgaggaaytcactttaataaagtggacaccaattgttcagccttcccagcatcccttcctactttttaaaatcccagccccccaattctcctttaggaaactactcttctccaatctcaggctacgggattcaaatgttcctaactgcctgcccctgggtggccagataaaagctttcatcacactggcctctgtgattaatcaggaagcccatgcactccaagccagaacaatgaacgttagccacatttgctagaatgaagggaaagaagcatgctcttctctgtacagttaccaacctagtaagatggaagcctggagctactgtaaccatctcta

SEQ ID NO: 336332 - DNA, 607 bp, Homo sapiens
gattaatcaggaagcccatgcactccaagccagarcaatgaacgttagccacatttgctagaatgaagggaaagaagcatgctcttctctgtacagttaccaacctagtaagatggaagcctggagctactgtaaccatctctatctcttcatacagaaagtctgactgagcattagacagagcctcgagataaagactcgaaaagtcattgtttgagcacttgaatcatcctgccgagatccacataccctctctaggcaaggggcagacattcaagggagtaaggataggattctttttttttttttttaatgtactttttctcttccttcttttgttttattattatactttcagttttggggtacatgtgcacaacatgcaggtttgttacatatttatacatgtgccatgttggtgtgctgcacccattaactcatcatttagcattaggtatatctcctaatgctatccctcccccatacccccaccccacaacaggccccggtgtgtgatgttccccttcctgtgtccatgtgttctctttgatcaattcccacctatgagtgagaacatgcagtgtttgcttttttgtccttgcgacag

SEQ ID NO: 336333 - DNA, 646 bp, Homo sapiens
tgggtggtgctggatttaccatcttcatggttccacagcaagtgattttacccatcaaccttgtgtatgtgatgtcatttaccacttcctagtttaaacaaatagttttccagcaggacaatatgcacattgctctattgtactaaatttgtttcacattccaaattggcaggaatttctccatgtgcttgggtataatagcatttcttgatatgataattatcatctagttgtctatatttatgtatctacctaactacaagagaaaatttgcagcagaatatctgtcttttcatttttgctttttactcttatcatactataaaacactttcataatagttkaaataatttcctgggggagttaatttggctaagtcatcgttctttttttggtgcttcagtttctctttgactctcatggaatgtttgcttttgccctttgggtgtttaaagaccacattttgtagccccagtgttctttctaattatagaagtgacataagaaaaacggaaagtaagtaagaagtggagaacagagtcattaagggagagtctagatcagagagatgtcaaagagtttcgttgggtatttaaggaaattaatgaataactcatctgggacttagagatagtgacttaagtcg

SEQ ID NO: 336334 - DNA, 592 bp, Homo sapiens
tgcccacttctggcatctgtgtctattagatggagattggcatggccaaggctaaccacctcacatacactgcaatgaccaggaatcccttgcaatcctcctgtagtgcacacaagcartaagaagaaacccctcccccaccactgtcttatcttccccagcctagcgagaaaccaagaacaatgtatagtgagcttccactagaacttagtggcattaaaggttgtcatttaattatcaaactgtgccaaaacctggcagaaaaactgagttccccaatatactacatgggtagtcctatcaagttctgccaataccaataaccacctaaaagcacaaggaccataatcatcaaagccaccaatattagccacgttgccagaaatacctccaaatgccactattgagcttccaataccacaaagccactattatctaaaactagttattataaccagagctataaaattgccaatatccaaaatatgtaccactgttgctgtcacccagaagcccatgtccaatatcaaatattagctattgtcacagtaatgctgtgtaacaaaccaacctaaaattaagcggctgtaaa

SEQ ID NO: 336335 - DNA, 592 bp, Homo sapiens
tgcccacttctggcatctgtgtctattagatggagattggcatggccaaggctaaccacctcacatacactgcaatgaccaggaatcccttgcaatcctcctgtagtgcacacaagcaataagaagaaacccctcccccaccactgtcttatcttccccagcctagcgagaaaccaagaacaatgtatagtgagcttccactagaacttagtggcattaraggttgtcatttaattatcaaactgtgccaaaacctggcagaaaaactgagttccccaatatactacatgggtagtcctatcaagttctgccaataccaataaccacctaaaagcacaaggaccataatcatcaaagccaccaatattagccacgttgccagaaatacctccaaatgccactattgagcttccaataccacaaagccactattatctaaaactagttattataaccagagctataaaattgccaatatccaaaatatgtaccactgttgctgtcacccagaagcccatgtccaatatcaaatattagctattgtcacagtaatgctgtgtaacaaaccaacctaaaattaagcggctgtaaa

SEQ ID NO: 336336 - DNA, 592 bp, Homo sapiens
tgcccacttctggcatctgtgtctattagatggagattggcatggccaaggctaaccacctcacatacactgcaatgaccaggaatcccttgcaatcctcctgtagtgcacacaagcaataagaagaaacccctcccccaccactgtcttatcttccccagcctagcgagaaaccaagaacaatgtatagtgagcttccactagaacttagtggcattaaaggttgtcatttaattatcaaactgtgccaaaacctggcagaaaaactgagttccccaatatactacatgggtagtcctatcaagttctgccaataccaataaccacctaaaagcacaaggaccataatcatcaaagccaccaatattagccacgttgccagaaatacctccaaatgccactaytgagcttccaataccacaaagccactattatctaaaactagttattataaccagagctataaaattgccaatatccaaaatatgtaccactgttgctgtcacccagaagcccatgtccaatatcaaatattagctattgtcacagtaatgctgtgtaacaaaccaacctaaaattaagcggctgtaaa

SEQ ID NO: 336337 - DNA, 601 bp, Homo sapiens
gctgggctgcacaacaggaggtgagcagggacaagcaaagcttcacctgtatttatagctgctccctatcgctggcattaccgtctgagctccaccacctgtcagatcagctgtggcattagattctcataggagcacgaaccctattgtgaactgtgcaagccagggacctaggctgcgtgctccttttcagaatctaatgygtgatgatctgtcactctctcccgtcacctccagatgggaccatatagttgcaggaaaacaagttcagagctcccactgattctacattatggtgagttacataattattgcattatatagcacaatgtaatcataatagaaataaagtgcacaataattataatgcacttgaatcatccccaaaccatccccctccccagtccatggaaaaattgtcttccatgaaacaggtccctggtgccaaacaggttggggaccactgctctatcttatgtaatactttgtttacacaaagttaatctcatgaaagaaaattagaccgtacctttgccagatatgattgggtgcaggaaaagccaaatatgtgccccaaagaaaaagaaatatatagggatcc

SEQ ID NO: 336338 - DNA, 546 bp, Homo sapiens
tctagagactgcattgtgtaactacaaaaatttgattttatacaaatcctggtwttaaaagatctattgtttctttgtgtttaattagacatcttgtagctgtatcagtgattacagaggttgcagttctgcagtggccctttttttattcaagcttatacatgtctacaacatatacaattattaaattgactgcatgattattaaatatgtgtgagtcagaattgtcttgatctgtgcaaacaaaagaaaatagagaaacaaattggatacagtaattgtcattcataaccctcaatttcatatattctttagaacagtactatgattttcctttattaacttttactgttatatttgtgaatttagaaaatataattatgctaataaggtattggtgttatctattttatactcaacatctaatctctgttttgacaaagcccagctgtctacctccagtgtgacatggggatgaggggttggggaatattcactgtatattgcttcactacaaattaccaccaacttagtaactaaaaacaa

SEQ ID NO: 336339 - DNA, 546 bp, Homo sapiens
tctagagactgcattgtgtaactacaaaaatttgattttatacaaatcctggttttaaaagatctattgtttctttgtgtttaattagacatcttgtagctgtatcagtgattacagaggttgcagttctgcagtggccctttttttattcaagcttatacatgtctacaacatatacaattattaaattgactgcatgattattaaatatgtgtgagtcagaattgtcttgatctgtgcaaacaaaagaaaatagagaaacaaattggatacagtaattgtcattcataaccctcaatttcatatattctttagaacagtactatgattttcctttattaacttttactgttatatttgtgaatttagaaaatataattatgctaataaggtattggtgttatctattttatactcaacatctaatctctgttttgacaaagcccagctgtctacctccagtgtgacatggggatgaggggttggggwatattcactgtatattgcttcactacaaattaccaccaacttagtaactaaaaacaa

SEQ ID NO: 336340 - DNA, 562 bp, Homo sapiens
atgaattgtgcattgcttatggaattattctaaggataaaacaaagggttttcttgtactttatcaagcattgtgagcttctcaattattagtaatttattgtaagagttggagggaatgacacgtgcaaagcctttatcataaatcctggcacaaaagattctcacctagttccctttccctggtcctcccattaataccatcgtcattagtatcctacactaactgtgatggcccaaatgtcattttatgcttaaaaaatgaaaactgtaagaaatactgtaaatgcaattatgcccttaattttcattccctttttaagaatccatattaaaaattttcttcagagrtgaacttagcattttttcagtgtttttagtatgcttatacttactgaatttttcttatattccttttgcagcctcaaggttttcctttctccacttgattctgatgtgtctttatcgggatcaacctctcctctgggaggcacctctaacgtgccccccagaaaggcacaagtgaaaaacctctaggcaaaaaaaatgtcaatggcaaaatg

SEQ ID NO: 336341 - DNA, 553 bp, Homo sapiens
acagtccccctgtgttgagccattgtgaggactgaaatggcacagataaagcagtgcatacagcacccagctttgagtttgtggctgttattttctatatctttaaggggaaacaattatagcagcatctgctgtgcctattycccagacttatagaagaatcaaaatcagacgatgtgagtgagggctccatagaagcaagccaggcactgtactaacaggtgctggctctcattccacgaacagtgctctctgagttgagctccgggaccaatgcagaccacttcctctcatgtcccggtggctgggctctcctggtggcccttccacaagctatcttctcccttttcctgctcctttttcctagcgcccagcagtgacccaggcagctgtcctgtcacctctagtaaccctggtcaccatcactgagtcatggtggcatcagtgacatccacaagcctccacctcctccttgtcatcttctgtctcatctgctgctgcctgcccagaagctgccataaaacttttcccccatggaagtccaaaggaatag

SEQ ID NO: 336342 - DNA, 631 bp, Homo sapiens
  misc_feature (1)...(631): n = A,T,C or G
ttttccaaagcagaatattgtaagaaaaggccctgatggaaatcccatgcaggtcatggagagggtgcaggtggcgataaaaaaagttaagggcttagagatgnctatggatgaatgtttgtgtcccccaaattcataccttgaaatcctaacccccattgtgatggtattgggggatagagctcttaggcgatgattaggtcatgagggtggatcccttatgtgtgggattagtgccattataagaagacacttaacgcttaatagcttggggtaaaaataaataaataaatggaatttttttwaaaaaagaaaagacacagagttcccccagctccttctctccctcccttcttctcctccttctctccccatatgaaactacaaagagaaggtgctgtatataagccaggaagcaagctgtcaccagacatcagacctgccagcacctcggtcttggactccccagacttcagactatgagaaataaatacttattgtataagccacccaatctatggtacttttgtttagcagcctgaatgaactgagatagagacatatcaggacctactgtttaagggccagggaattaagaccaagaggggaagttgatgtaaaattaccattc

SEQ ID NO: 336343 - DNA, 620 bp, Homo sapiens
  misc_feature (1)...(620): n = A,T,C or G
tcagacctgccagcacctcggtcttggactccccagacttcagactatgagaaataaatacttattgtataagccacccaatctatggtacttttgtttagcagcctgaatgaactgagatagagacatatcaggacctactgtttaagggccagggaattaagaccaagaggggaagttgatgtaaaattaccattcttggccttaaatctctctctcaagtactaaaattggcatttgaggacagctctgggtctatccatcaagctgggtatatggacaggaatatcacccgttcatagagtctcagagttggaaagaaccacarttgtcaaaaagagagccatggtcactcgtttgatgcctcatccaggtcctggtggagttgccgactatgtagggcagatctaaaaagtgatggtcatgcttgagtacagttactcttatcgggtccttggctctctgaaccagaaagcttcatgtgcattgcttttgtgcttgctagtcaaatgtcctagacctagtcattaattcactcgtttcccaaaagtggggacatttccctctgagggagaacncncagaggtttgttntgccanncaagcnnggcgntggttacc

SEQ ID NO: 336344 - DNA, 620 bp, Homo sapiens
  misc_feature (1)...(620): n = A,T,C or G
tcagacctgccagcacctcggtcttggactccccagacttcagactatgagaaataaatacttattgtataagccacccaatctatggtacttttgtttagcagcctgaatgaactgagatagagacatatcaggacctactgtttaagggccagggaattaagaccaagaggggaagttgatgtaaaattaccattcttggccttaaatctctctctcaagtactaaaattggcatttgaggacagctctgggtctatccatcaagctgggtatatggacaggaatatcacccgttcatagagtctcagagttggaaagaaccacaattgtcaaaaagagagccatggtcactcgtttgatgcctcatccaggtcctggtggagttgccgactatgtagggcagatctaaaaagtgatggtcatgctwgagtacagttactcttatcgggtccttggctctctgaaccagaaagcttcatgtgcattgcttttgtgcttgctagtcaaatgtcctagacctagtcattaattcactcgtttcccaaaagtggggacatttccctctgagggagaacncncagaggtttgttntgccanncaagcnnggcgntggttacc

SEQ ID NO: 336345 - DNA, 571 bp, Homo sapiens
ctcactgctatattttcctaacatgattttgatgggaagaaatttccataaattatgtgacttagacttttgagagctatggaggagcttagagattccttcacatctaactctcttatttcatgtatatggaatttatttcttccttcactcactcagcaggtatttattgagtatctgcctatgtcaaagattatgctagatgctggggatgcagacatgaataagtcttatcccccctgtcaaagaattcacaaagtgactgggtcaatgaacagtgcacaaataaggtgaaatgtgtggggagagacagtgataaatcagcatagcctgaggaccacagagccctgtgcttgaaatcttgtgacctggaaagctttgtgtccttggacaaatcaatttttataagcccmagtttccgtatttgtaaaatggggagaagagaactcgcaaggttttaggaggactgcatgagacaaactacaaacactaggacccaagaggtttctcagaggaggagtcgctggagctcagagggtgtgaagtgactgggctactggcagagacaaga

SEQ ID NO: 336346 - DNA, 553 bp, Homo sapiens
gggccctctgctgtttccttattttgttcctaagtatggggatctggacacctctactccaggcagaaagctaggaaacgggatggttcctctgaagaaactgcataacctcagaagaaagtcttctgatcctggcrctgggctggagactaggcttgcatgcagtctgatcacccctgctgaggctgactagttcgaaagctctccgcatactcagagtggagagacatacccctagacccagccccccaccgcacaaatgtgcatatgcattagtttaatcgccacagagagaaaagaagatgtatttcagccaaaaaacacaaggacagaatgtcactgaaaaggagcaacagaaaatagaaaagcagccttgaaaattaaaaatataactaaaattttcaaaaattacatagcagaattagaagataaagtataagaactctcctagagaacagaacaaaaagtcaaaaatagggatgaaagggcagatgagataagaaaatgagataattaatccagaattccataaagggaaatgagagacaagagc

SEQ ID NO: 336347 - DNA, 579 bp, Homo sapiens
taatttgttcagcaactactctgtgcaaagcactccattcattctactaaataatttgctaaacatgtggggttattatcattatgattacacctttacagatgaggaagctgagtcatgaagtagtcagggaacttgtcccagggcacacagggtgtgagcaatgtccctgagtccaatgtggggtggccaatgagtgcagctagcaggtcctgttttttgttttttgttttgtttgtttgttgttgttttttgtttatttatttatttatttattttgagacagggtctccttctgtctcatccaggctggagagcagtggtgcaatcatggttcaacctcccaggctcaagtgatcctcccacctcagtgtcctgagtagctgggactataggcgcatgccaccacacctgytaattttttgtatttttagtagagatggagttcaccacattgcccagactggtcttgaacttctgggctcaagggatcctcccaccttggcctgcccagcctagcaagtcctttctaaaccaatgagtcagtgccagtctcccatagtccctgtaaatcttgcc

SEQ ID NO: 336348 - DNA, 630 bp, Homo sapiens
aactatatgctgcctacgagagactccctgcacttttaaggacacccacagactgaaagtgaagggatggaaaatgatgttccacacaaatgcagatgaaaagacagcaggagtagctatacttttattattcaaaatagatgttaagtcaaaaacttcaaaaagagacaaaaatggcattatataatgctaaaagggtcaattcatcaagacgatataacaattgtgtgtatatgcatccaacatctgaagacatacagcaaatcttaaaggatctgaagggagagatagattgtaatgcaataataatagagaactttaataccctactttcaataatgagcagataatccagacagaaaattataagaaaacattggacttgaactacatttaaaacccaatgtatctagcagacatatatagaacattcaatccaacagcaacagaatrcacattcttcacaagcaggcatggaacattcttcaggatagatcatatattaacccacaaagcaagtcagagaaaatttgaaagtattgaaatcatatcagatatcttttctgatcacattgatattaaactagaaatcaataataggagagatcttggaaaattcacaaatatgtg

SEQ ID NO: 336349 - DNA, 641 bp, Homo sapiens
tcatgtttttcttcctattttaaagtaaattagaattaaaacatttttgtgagcccctaaaagtaactgaggcctgaggcactgtgtctggtgggcccagtggagtgctaggccctgcttgtctggcaacctgctctccccttttcctacccatctctgccgctatatggcaacagctgtcctggatggtataggaatgaacatgtggactgtgttcccatcagaccttattgatggacacagcaataggaatttcctataattttcaggggtcacaaaggcttcttctgagttcttttccacccatgtacaaatcattctttgctcaaggaccttggaactatgccatgtaggtttcctgggcaaagcctcccctgacgttggacttggtaacatgagaaacaagttctaggcatatctgctgagaaataatattttatttttcctttatccattagggatggccccattttgagggagctgtccctttgcccaccaagtgctaatgacacagagaattgtgctgtctcccaggcctggggctgaggaggctgaaagcaacgaacmgcacccccatcctctccagcatttttctccacctctggtagaaaattgtaagggaagttctgtctttgtcatcc

SEQ ID NO: 336350 - DNA, 579 bp, Homo sapiens
aagaataaactttttgtgcaaatatatttatagttaatatgtaatagtgttctaaataaattgttgcaaaaaaattttatgtgctattttcccttttgtatcataagaaaaggggcctataaacttggatggggaaaattacaccttaatcttcattaacctctcaatgagatttagcatttcctgcaattatgaatataggcaacaaaacacttatatggtctgcatgtttgtattcccccaaaattcttctgttaaaatcctaactcctaatgggatcatattaggaggtggggcctttggtaggtaattaagtttagatgaggtctttagggtgcaacatccatgatggtattagtgtccttatatgaatagaaagagaatagagctctttctctccatcrtgttagaatatgagaagacgcatcatctgcaagccagaaagggagcccccaccagacaatggcactttaccggattctaactgtatttcaatataactggttttctcttaaatctttttagcattaaagacattattctgctagtgccttgatcttggacttctcagattccaga

SEQ ID NO: 336351 - DNA, 485 bp, Homo sapiens
ggggaagttttctgttcttgtttttcctctataaattatgtcgctcacacatgcagcatatgagctactgttgctgtggtgtatttatttgttgaacaatcctgtacttgaaatgattcatttaagagccatgaaacattcaaagcaggatgtgtgactcacatagcaaacagtagcatcttttttttccttttatttatttatttcccatcattggckaaacatcttgaagtagagagcaggagcctaggattgaccaaggtagaaatgaaagttatgtttggtttgaagtatgtgtgtatttaatcccttccttcttctccctttccctgctttcccaaacttaaatgatgtctgacattgggaacagaagcactgcagtgagggcaagaagccttgtcaagacttttacagatcttccagtttcttctttcagaatatgtgatcacttgaagtgattaattaaatagtgttcaaaaaaaaga

SEQ ID NO: 336352 - DNA, 578 bp, Homo sapiens
tattttctcctgagggcaggccttgtaaagaagaacagaatgctctggggtatttcaaaatggttccagtagtccccccttattcacaaggatacattccaagattcccagtggaggcatgaaaccagatagtaccaaaccctatatacagtcagccctctgtatccatgggtttctcatccatggattaaaacaatcataggtaawaaatactcagaaaaaaaaaattccgcagaattcaaaaaggcaaaacttaaatttgctgcctgccaagcactacattgaatccacacgaatgaagtgatatgtaggcattgtattaggtattataataatctagagatgatttaaagtatataggaggatatgcacattttatatgcaaatactacaccattttatatcagggacttgagtatctgtggattttggtatcctcatgggtcttgaaaccagtcccccatggatatggagggatgaccatactatgtttccctatatgtacatacctatgaaaaagtttaatttataaattcagcacagtaagagattaacaactaataataaaatagaacagt

SEQ ID NO: 336353 - DNA, 581 bp, Homo sapiens
ttgaagaaggaacttaaaagggaatggcttgtaaattcacatttttttgcacaaggtattttagttgagtttagtttatattttgaaacagagtcttgctctgtcgcccaggctggaatgcagttgtgtgatctcagctcactgcaccctccacttccygggttcaggtgattcttgtgcctcagccacccaagtaactgggattatcaggcatgcaccaccatgtccagctaatttttatatttttagtagagacagggttttgccatgttggccaggctggtctcaaacgcctagcctcaagtgatctgcccacctcagcctcccaaagtgctggattacaggcataagccactgtatctggcctcacaggacattttaattggtaataaaattcagtgctggaatcagataccctaagaaagtgaattgacccacaaagaccatggcaccagtgtcctttcatacaacagcagtataactctagcatactgtaattgtcttaggtgcctttctgtaataaagggaatctggtatcaaaaaaagtaggcaagaggatacactaattctcactgatttga

SEQ ID NO: 336354 - DNA, 581 bp, Homo sapiens
ttgaagaaggaacttaaaagggaatggcttgtaaattcacatttttttgcacaaggtattttagttgagtttagtttatattttgaaacagagtcttgctctgtcgcccaggctggaatgcagttgtgtgatctcagctcactgcaccctccacttcctgggttcargtgattcttgtgcctcagccacccaagtaactgggattatcaggcatgcaccaccatgtccagctaatttttatatttttagtagagacagggttttgccatgttggccaggctggtctcaaacgcctagcctcaagtgatctgcccacctcagcctcccaaagtgctggattacaggcataagccactgtatctggcctcacaggacattttaattggtaataaaattcagtgctggaatcagataccctaagaaagtgaattgacccacaaagaccatggcaccagtgtcctttcatacaacagcagtataactctagcatactgtaattgtcttaggtgcctttctgtaataaagggaatctggtatcaaaaaaagtaggcaagaggatacactaattctcactgatttga

SEQ ID NO: 336355 - DNA, 548 bp, Homo sapiens
tgttttctttggcaataatatgggataaacagcccttgccaacagtctcgtagtttatacaccagggagccagattatggccctgtaaaatggagcacccctcctataatcccttaattaattaaatgacaaattttggtcttctctcgttcagaaatatggcttccgcatcgagcgttcagtgaatttattgacataaggaactgcactagttgtaattcaacagactggagaagtgtgttatrtactgtagtagaaagagggaaaatctagcaaaggtttgaaattccttgactatttagatctcattctttctaattaaaagtttcagttgagacacagtagatcatatgccacctgtctaatgggtctccccaaagtagcctgtgtttacaactttgatagatggcattcgtggaacacctgtttctagggttgatatttttgaagcactttttttttttttttgctccagcatatttaacataactttttccctcacctccccctcctcagctcctctctgctatatgaaatatgggagacga

SEQ ID NO: 336356 - DNA, 473 bp, Homo sapiens
tcactatctgatgaaagtgaaatcagttgagaccatatatatgataatatttcatatagaattcactgagctttctaatatgaaagagaaaagcttcgggtataaacaatgttttgggttagatgagtaagagtatataacatggaataatgccatgagaaaggcaaaatcaacttaaattttatctgattgcaggacagaactgcatatcctcaatccaatgtttccatcatgtagtagacttttttcctttaaagaaatgactaagtggcatataaatctgggcaactaaagaaatggtattcagaggaaactacttttttcttatgtttggtgacatatgtaaggaacattttacctggtcagaatttaagccagatttatttcagcctggtaycaatgcccccataaaaagtcacatgaggttcttgttacaaacagctctcaaagttgaacagtaacaaaatcctcac

SEQ ID NO: 336357 - DNA, 577 bp, Homo sapiens
ctcacccctgggagtttaacagggagaccaggcacgcatacaattgggacaagagccttctcactgaacttagtccctgccagagactctggactgcaatctcccatgacatcacaagtgagaaaagtggggttcagaagtcaaaaagactgggtttcaatcttgatgttctcacttttaacttcgtgaatgaggacaatgttattgaatatctcagatgttcagtttccttcaggtaaaacagcaattatattatttaccccaaagtggagttgccagatgaaaatataggggatccaattaaatttgagttttgtataaacattaaatatttttaaaaatataagtaagtcccaaatactgcatggggaatacttacaccaaaattactacatgaggccataatgttaaaataaatattttgttatctaaaattaaaatttaattgagtatsctgtgttttgtctccacctcaagggctattgtgatgttgagataacaactataaagcctagcccacttcttggtacataatagatagataacagatgttagtctccttcctcctgtctaagaa

SEQ ID NO: 336358 - DNA, 423 bp, Homo sapiens
atagagaaacaacattttgaacagaaaaaaacagaaatctgtttacctcgaacgctcctttatttcctccctccaaatgatcatgtaaaactactggctatgtaaatactttcccttcttaccttgtaaaatatttaatttttatatttcttgctctgaaaatggcctcttaagagttcaggtaggttttgccaaggacatttgagggccaggttgatgacaaacattgggcatcagcatcattttgtttctcagtcacgtggttcctggaatggaaatggggttctaatggctgcagagaaagagcaacctgcagactaaattggcatgcacaggaagtgctaggagccaaatgacttgcaagggatccrctgtgtcctaacaggcctgaagattgtctgaagaccctggcaaggtggtgca

SEQ ID NO: 336359 - DNA, 585 bp, Homo sapiens
ttttttcctgcttctagaactgatctggaaggatgtgcacttgtcagaaacagcactttattttattcccctctttattagagacacaaactagctcmctttattcagaagaaaactaaggtaacattttgttttgacgttgttcctatttaggatactgatttgattcgcaaaggttctaaagattgtggatgtgtctttttatagattacttctcctttattacatctcccaaaaagcaaggcttaggagaatatattctgaatttaggtttcaactattgtggattttttttcaaggatcttttttttttggaacttattgaacaaatcaaagattttcagaggactttctattctgggtatgctatagctctgattggaaaattctaacatgctctgactatacgttatgccatatacctacaaggattgtgggaaaaagtgcttttagagcagcagtccttaacaaggcatccatgggctttagggggtctcattgcaattgtctgcaacatttgtttatcgaagttcaagggagtctctgacattttaagggcactgctttagatgatctctaaagtta

SEQ ID NO: 336360 - DNA, 585 bp, Homo sapiens
ttttttcctgcttctagaactgatctggaaggatgtgcacttgtcagaaacagcactttattttattcccctctttattagagacacaaactagctcactttattcagaagaaaactaaggtaacattttgttttgacgttgttcctatttaggatactgatttgattcgcaaaggttctaaagattgtggatgtgtctttttatagattacttctcctttattacatctcccaaaaagcaaggcttaggagaatatattctgaatttaggtttcaactattgtggattttttttcaaggatcttttttttttggaacttattgaacaaatcaaagattttcagaggactttctattctgggtatgctatagctctgattggaaaattctaacatgctctgactatacgttatgccatatacctacaaggattgtgggaaaaagtgcttttagagcagcagtccttaacaaggcatccatgggctttagggggtctcattgcaattgtctgcaacatttgtttatcraagttcaagggagtctctgacattttaagggcactgctttagatgatctctaaagtta

SEQ ID NO: 336361 - DNA, 612 bp, Homo sapiens
attgtggagagaatgacttcttttctactttccggccccatctacaatgataggcaaattctcatgccataaaaccccattggaaggagagggagggatgtgacctgttctttgcatgagttttgtttgggctaagaaagggcttcttttctcttttattaacattatttacacccgtttaattgagccgtgttttattatggttacctactctgctgacaggctttgaacacaactatgagggaatctatgggaggaggagctgtggtctcaaggaagctaaggctccagaagatcttctttggctctggtgtgaactcagtgtatgaaaaccatgctttaaawtttttctaactctttattttgaaattattttagatttaaagacaaattacaaaaaaatcatacaaactaggaaattaacattgatacgataatactaactaatctacacatcttattcaaaatttgcagtgttcctagtaatgtcttttttttctggtccagaatcaaatccagagccccatgtaaaaaatgtacccatcttaagtgtacatttttatgagctttgataaatttatatgccatataaccactactaaaataatacat

SEQ ID NO: 336362 - DNA, 586 bp, Homo sapiens
ccacattttctttatccattcatctgtttatraacacttaagttgcttccaaatcttagctattataaacttggtagatattttaaaaattattctatagtctcttgatctacagaatctgctttgcctgcaagtttaacatttttcacgctatactgctttttacatgtgtgagccagccagctctagccaagaagggcttaaggttttcctggttctgggtaacataaccttaccttaagtttctctattttcggcctcgcaacagtgttgtccggtatgtttgtttgtttgtttgtttgtttggtctgtcattatctcatgaagccagaagtttagccacttttccattttttctatagcttcatcaaaaactatagatgttattttagtacttttcagagtggcctcatatacagagcagtgaatgtcttctttttgctggatgtactgtatagctgagtcattaacattgaactcacagccaatagcactataactcatgcctgaaggaagcttatctaacacatgtattttctccaaaaggcacattgtggccttcttgtgcacttaggaacaggaggca

SEQ ID NO: 336363 - DNA, 586 bp, Homo sapiens
ccacattttctttatccattcatctgtttatgaacacttaagttgcttccaaatcttagctattataaacttggtagatattttaaaaattattctatagtctcttgatctacagaatctgctttgcctgcaagtttaacatttttcacgctatactgctttttacatgtgtgagccagccagctctagccaagaagggcttaaggttttcctggttctgggtaacataaccttaccttaagtttctctattttcggcctcgcaacagtgttgtccggtatgtttgtttgtttgttkgtttgtttggtctgtcattatctcatgaagccagaagtttagccacttttccattttttctatagcttcatcaaaaactatagatgttattttagtacttttcagagtggcctcatatacagagcagtgaatgtcttctttttgctggatgtactgtatagctgagtcattaacattgaactcacagccaatagcactataactcatgcctgaaggaagcttatctaacacatgtattttctccaaaaggcacattgtggccttcttgtgcacttaggaacaggaggca

SEQ ID NO: 336364 - DNA, 568 bp, Homo sapiens
gcaatttataattatcctattgatagcctatgatcttgaaccaatctgtacctccttccagtgggttttcaacaaagaaaacagaagtattacaagaaccagtgaaggacaaatgagtcttttcctactaattcttctattacaatccttattctttctttttttcctggtatcaaaaggtattttgcaacattggctaaggctcaaccccagtaattctaacaatattggtaggtttttttctcccatagggaatctggtacctcacagagttcttcaaactgtgtctgctttaagcataagacacaggtacgtctgtgtcctaattagctcaaatctgattatgaacaaaagagtccccaaggatttcaaagatcatttaatttgacaagtgcattataaaatatatatacctcctgattaatttgattagtgtagcatcacagaggaagaaatcatgtttctgagtcaaaggaccaagggtgacagtagttggctgggtgacagggaatatctgagggctgtagggaacacctaccaartgggtttgttgattttcagggagacg

SEQ ID NO: 336365 - DNA, 520 bp, Homo sapiens
tcacaaatatgtggcattcgattatggtaaaaatatgggaactattgctctgtcattctcaaaaaagttaccattaagtggcttgaayatttttaattttcacatttaaacaatatgtttcttgggatttatgatcactttttgctacataggtatctaaatcaaagatgaccatgccactgcacttgttgccagggacaggcggccccttgggatcacactcaacattgtctatgacagagttcctcattctgcccaccactcctatcctgaactctttgttgttacgttcacacattttgcagttgcatactcctcatgttgtttgtgctatgctttctgcctagagactttcccacctttcttcagttcactatcttttaagagtcagctccagctaaacttctcaagttgggtaagatgctctgtcctgtggttccatagcactttgtgcatacttccattattgcactttttatttagatggctttccaactagggtgtgaacaatacctgactc

SEQ ID NO: 336366 - DNA, 520 bp, Homo sapiens
tcacaaatatgtggcattcgattatggtaaaaatatgggaactattgctctgtcattctcaaaaaagttaccattaagtggcttgaatatttttaattttcacatttaaacaatatgtttcttgggatttatgatcactttttgctacataggtatctaaatcaaagatgaccatgccactgcacttgttgccagggacaggmggccccttgggatcacactcaacattgtctatgacagagttcctcattctgcccaccactcctatcctgaactctttgttgttacgttcacacattttgcagttgcatactcctcatgttgtttgtgctatgctttctgcctagagactttcccacctttcttcagttcactatcttttaagagtcagctccagctaaacttctcaagttgggtaagatgctctgtcctgtggttccatagcactttgtgcatacttccattattgcactttttatttagatggctttccaactagggtgtgaacaatacctgactc

SEQ ID NO: 336367 - DNA, 680 bp, Homo sapiens
atgatattaattagaagctaaaaaccaaattatatacttatcatattgaataaatatgaaggtgtttatgaattggtgtgttctttggaagaaaattaattgtttagatgcataattcaattaacaggtatgagtaatggcatagtatcttcattttgtggaatagaaaagcaattgcaccctgaaagctcttgacaccattttttaaatattaaaattctctcaggctatgaacaagtataaggaaaattttaggtgataatcaatattgagctttcacaaatatgtggcattcgattatggtaaaaatatgggaactattgctctgtcattctcaaaaaagttaccattaagtggcttgaatatttttaattttcacatttaaacaatatgtttcttgggatttatgatcactttttgctacataggtatctaaatcaaagatgaccatgccactgcacttgttgccagggacaggcggccccttgggatcacrctcaacattgtctatgacagagttcctcattctgcccaccactcctatcctgaactctttgttgttacgttcacacattttgcagttgcatactcctcatgttgtttgtgctatgctttctgcctagagactttcccacctttcttcagttcactatcttttaagagtcagctccagctaaact

SEQ ID NO: 336368 - DNA, 560 bp, Homo sapiens
aaaaagccccaggtttaattcttggtttgggcctaggagctgaactggcttctaaaacacttctttcatttttatttatttcaactctttgggcaatccgggatatgacgagcaaattattcttatgcaaggcagtcacttgggtctgattattcatttctgggctttgcaggtgtttgaactgcttctgctcagtcaatatgcaaagaactgggtaaggcctttggttttggctcctaaacgtccctgtcttcttcaaaggttctcattttaaaatactagctatagtctatcaataattagctgagagtgctgcacactaaataagtttctacattkgaaagtctcctaactctttcgggccccttgcaaattaccactgttgcatgttagtggtgggcctctgatgagctttctagacccttcttcaaaaccagtggacttattcccagctcttgagagttctattggaaggaaaccctcaggtatcagtcctctttagaattgtcttgcctgaaaagggacacctccaccaaggtcacctcctctttccagggtag

SEQ ID NO: 336369 - DNA, 560 bp, Homo sapiens
aaaaagccccaggtttaattcttggtttgggcctaggagctgaactggcttctaaaacacttctttcatttttatttatttcaactctttgggcaatccgggatatgacgagcaaattattcttatgcaaggcagtcacttgggtctgattattcatttctgggctttgcaggtgtttgaactgcttctgctcagtcaatatgcaaagaactgggtaaggcctttggttttggctcctaaacgtccctgtcttcttcaaaggttctcattttaaaatactagctatagtctatcaataattagctgagagtgctgcacactaaataagtttctacatttgaaagtctcctaactctttcgggccccttgcaaattaccactgttgcatgttagtggtgggcctctgatgagctttcyagacccttcttcaaaaccagtggacttattcccagctcttgagagttctattggaaggaaaccctcaggtatcagtcctctttagaattgtcttgcctgaaaagggacacctccaccaaggtcacctcctctttccagggtag

SEQ ID NO: 336370 - DNA, 343 bp, Homo sapiens
ttcttcaaaaccagtggacttattcccagctcttgagagttctattggaaggaaaccctcaggtatcagtcctctttagaattgtcttgcctgaaaagggacacctccaccaaggtcacctcctctttccagggtagcatgaatccaatgactgatgggtgttgggttacggaggcccgcttgaccctcctgccctygctagcaacaattctgatcatcattccagcttcagatctttccaaggtgtctccactgaggccatatatggctcagctgctccctttgactaatccttttttcccttactttccacaggtggtgatcctaagagcactcccatata

SEQ ID NO: 336371 - DNA, 575 bp, Homo sapiens
ttacattgtcaactgctacaaatgaggtcttgatttattgttttttgtagactgtctatacagttgtacagttgtgtagattgtctacacagaatgtaataggaaaaatygtaatcatgtagattttatgtattcatttgtttattttagaaactggatctcattctgttatccaggctggagggcagtggcagcttcaacctcctgggctcaaggaatcctcctgcctcagattcctgagtagctgggataatagacacatgccactatgtgttgcgggaagtcagggaccccaaacgaagggactggctgaagccatggcagaagaacgtggattgtgaagatttcatggacatttattagttccccaaattaatacttttataatttcttttgcctgtctttactgcaatctctaaattgtgaagatttcatggacacttatcacttccccagtcaatacccttgtgattttctatgcctatctttactttaatctcttaatcctgtcatctcataaactggggaggatgtatgtcgcctcaggaccctgtgatgattgcattaactgcaca

SEQ ID NO: 336372 - DNA, 575 bp, Homo sapiens
ttacattgtcaactgctacaaatgaggtcttgatttattgttttttgtagactgtctatacagttgtacagttgtgtagattgtctacacagaatgtaataggaaaaatcgtaatcatgtagattttatgtattcatttgtttattttagaaactggatctcattctgttatccaggctggagggcagtggcagcttcaacctcctgggctcaaggaatcctcctgcctcagattcctgagtagctgggataatagacacatgccactatgtgttgcgggaagtcagggaccccaaacgaagggactggctgaagccatggcagaagaacgtggattgtgaagatttcatggacatttattagttccccaaattaatacytttataatttcttttgcctgtctttactgcaatctctaaattgtgaagatttcatggacacttatcacttccccagtcaatacccttgtgattttctatgcctatctttactttaatctcttaatcctgtcatctcataaactggggaggatgtatgtcgcctcaggaccctgtgatgattgcattaactgcaca

SEQ ID NO: 336373 - DNA, 555 bp, Homo sapiens
cagaggctgtagaggagaattcattccttgattcttctgaaggctgatggctttccttggtttgcggccacattacttcaatatctgwttcgcagtcacattgccttctcttctgtctgtgtcaaatctccctctgcctgcctcttgtaagaatgcatgggattacatttagagctcacccagataatccagtattatctctccattgtaaaatccttgatcacatctgtataaccctataaataagataatatttaggttccagggggaccacattttggggggccatgatgtagcttactttaggggaaaagggtttgaatggcacttcccaatgaggatatccaagtggcttactgtaaaaactgtctaaagtcccttaaaattaaaaaattctatcattctgtaaaagtcagtattcctagagttagatattgtaagaacaatgtgacagtctttttttttttaactgttatagttgttatgattgtttgggggataattcaggaagttttaacaacaaaagtcatttttaaaaactgatttgaggcaaag

SEQ ID NO: 336374 - DNA, 555 bp, Homo sapiens
cagaggctgtagaggagaattcattccttgattcttctgaaggctgatggctttccttggtttgcggccacattacttcaatatctgattygcagtcacattgccttctcttctgtctgtgtcaaatctccctctgcctgcctcttgtaagaatgcatgggattacatttagagctcacccagataatccagtattatctctccattgtaaaatccttgatcacatctgtataaccctataaataagataatatttaggttccagggggaccacattttggggggccatgatgtagcttactttaggggaaaagggtttgaatggcacttcccaatgaggatatccaagtggcttactgtaaaaactgtctaaagtcccttaaaattaaaaaattctatcattctgtaaaagtcagtattcctagagttagatattgtaagaacaatgtgacagtctttttttttttaactgttatagttgttatgattgtttgggggataattcaggaagttttaacaacaaaagtcatttttaaaaactgatttgaggcaaag

SEQ ID NO: 336375 - DNA, 519 bp, Homo sapiens
ctaatgagacatgcgatgtgtgtattagctgtatgaccacagggcatgcacactcaaggggactgcctaaaacatgattgtaagtgacaccccctcacatcccttcatgaataatcatgtaagattagagttccccagcactagctgctgctggctcattctcttttgagtagcccgctgactcatctttcagagtgtactgtctatttaaataaactctgctattgttatttttccagccagaccagcctggagctgttttccagcagggtcaayccattcctctcttggagtatactcttatctcgttataaacctttgccttacattactaattgtctcttggctaaatcctttctcccaagttagacaacaaccaaagattccctgcacccttccttttaacactggtaaccattgaaactctgccatcaaactttggtgggtacaggtgaaacagagattatgacacactgagtcttgctcaggattaggacggatttggcctggtcagcagtt

SEQ ID NO: 336376 - DNA, 580 bp, Homo sapiens
gataatccagtattatctctccattgtaaaatccttgatcacatctgtataaccctataaataagataatatttaggttccagggggaccacattttggggggccatgatgtagcttactttaggggaaaagggtttgaatggcacttcccaatgaggatatccaagtggcttactgtaaaaactgtctaaagtcccttaaaattaaaaaattctatcattctgtaaaagtcagtattcctagagttagatattgtaagaacaatgtgacagtctttttttttttaactgttatagttgttatkattgtttgggggataattcaggaagttttaacaacaaaagtcatttttaaaaactgatttgaggcaaagaaataaaagaagattggaattaaaaaacacagacattgggaatgagtgagataatatggaatcaggggagcaagaaaaagcaaacacaggtaatattaaaaatttttataccacgagctgagatctacaagtttcctaagatggcactgtgaataaatgtatttccctgtggaaagtctcaacaccatcaccttagtgtgattaagt

SEQ ID NO: 336377 - DNA, 599 bp, Homo sapiens
tggaatcaggggagcaagaaaaagcaaacacaggtaatattaaaaatttttataccacgagctgagatctacaagtttcctaagatggcactgtgaataaatgtatttccctgtggaaagtctcaacaccatcaccttagtgtgattaagtcctaagtaccggagccagcaaatgtaatctcccagtgttatccaatggaagaggaaacattctactgattccaattaggccacgtacaaggaatgcttagttttatatgatcccccaaaacaaaaacatattatatgtaagtttttcttaaatacaggcatccagaagaataaatatctctcctctgtcttattgttataccactgacttagtgaaagcactgaatagttaatcccgtgacaagrcagtctctccacctatgcaacggaaaactgcatctctcctttctaatttccagccctggtttcatagggggctatgaggactaagtaaacagtgaacaggactctccctcaaggcccaacaaactgaaagagcaaattcgcaaatgctcactggggtacactcaaaggtaccctaaccatactatttatactcagaaacatcc

SEQ ID NO: 336378 - DNA, 599 bp, Homo sapiens
tggaatcaggggagcaagaaaaagcaaacacaggtaatattaaaaatttttataccacgagctgagatctacaagtttcctaagatggcactgtgaataaatgtatttccctgtggaaagtctcaacaccatcaccttagtgtgattaagtcctaagtaccggagccagcaaatgtaatctcccagtgttatccaatggaagaggaaacattctactgattccaattaggccacgtacaaggaatgcttagttttatatgatcccccaaaacaaaaacatattatatgtaagtttttcttaaatacaggcatccagaagaataaatatctctcctctgtcttattgttataccactgacttagtgaaagcactgaatagttaatcccgtgacaaggcagtctctccayctatgcaacggaaaactgcatctctcctttctaatttccagccctggtttcatagggggctatgaggactaagtaaacagtgaacaggactctccctcaaggcccaacaaactgaaagagcaaattcgcaaatgctcactggggtacactcaaaggtaccctaaccatactatttatactcagaaacatcc

SEQ ID NO: 336379 - DNA, 599 bp, Homo sapiens
tggaatcaggggagcaagaaaaagcaaacacaggtaatattaaaaatttttataccacgagctgagatctacaagtttcctaagatggcactgtgaataaatgtatttccctgtggaaagtctcaacaccatcaccttagtgtgattaagtcctaagtaccggagccagcaaatgtaatctcccagtgttatccaatggaagaggaaacattctactgattccaattaggccacgtacaaggaatgcttagttttatatgatcccccaaaacaaaaacatattatatgtaagtttttcttaaatacaggcatccagaagaataaatatctctcctctgtcttattgttataccactgacttagtgaaagcactgaatagttaatcccgtgacaaggcagtctctccacctatgcaacggaaaactgcatctctcctttctaatttccagccctggtttcatagggggctatgaggactaagtaaacagtgaacaggactctccctcaaggcccaacaaactgaaagagcaaattygcaaatgctcactggggtacactcaaaggtaccctaaccatactatttatactcagaaacatcc

SEQ ID NO: 336380 - DNA, 550 bp, Homo sapiens
tttgtaagtgctgaccaagaaatgagctgtgaagttaagtagccggtgtcgcctctgaacacacccgggcagggcgagcaggatgtccttgtccagggagaccccttctcctggctttggggaaggtgctccctatccccgcaggaggctgggtctgcaggacgcagcactgggcgggtgagrgaaagcctgggcagaagagcacggagccggcgactggacgcgagcaaggggcgaatggagagcgtctcccctgcgccaatgctgttgttccgggtgctgaaaagccgggaacttcccggaaagcagcggcacttttctccctggaaggtgggtgtgggggttccaggcttcgcacctgctaaacctgcctcgtcacctgggaggggtccgccagatgtgcccctcctcagccccattttggggagaacgatgggggcgggggcgtgggggtgagcacagccgggcacccccgcacacccgcaggcgggaccccggggtgcccttgccctcctctcctgggcagccgcacgccgggatccccactcca

SEQ ID NO: 336381 - DNA, 550 bp, Homo sapiens
tttgtaagtgctgaccaagaaatgagctgtgaagttaagtagccggtgtcgcctctgaacacacccgggcagggcgagcaggatgtccttgtccagggagaccccttctcctggctttggggaaggtgctccctatccccgcaggaggctgggtctgcaggacgcagcactgggcgggtgagagaaagcctgggcagaagagcacggagccggcgactggacgcgagcaaggggcgaatggagagcgtctcccctgcgccaatgctgttgttccgggtgctgaaaagccgggaacttcccggaaagcagcggcacttttctccctggaaggtgggtgtgggggttccaggcttcgcacctgctaaacctgcctcgtcacctgggaggggtccgccagatgtgcccctcctcrgccccattttggggagaacgatgggggcgggggcgtgggggtgagcacagccgggcacccccgcacacccgcaggcgggaccccggggtgcccttgccctcctctcctgggcagccgcacgccgggatccccactcca

SEQ ID NO: 336382 - DNA, 550 bp, Homo sapiens
tttgtaagtgctgaccaagaaatgagctgtgaagttaagtagccggtgtcgcctctgaacacacccgggcagggcgagcaggatgtccttgtccagggagaccccttctcctggctttggggaaggtgctccctatccccgcaggaggctgggtctgcaggacgcagcactgggcgggtgagagaaagcctgggcagaagagcacggagccggcgactggacgcgagcaaggggcgaatggagagcgtctcccctgcgccaatgctgttgttccgggtgctgaaaagccgggaacttcccggaaagcagcggcacttttctccctggaaggtgggtgtgggggttccaggcttcgcacctgctaaacctgcctcgtcacctgggaggggtccgccagatgtgcccctcctcagccccattttggggagaamgatgggggcgggggcgtgggggtgagcacagccgggcacccccgcacacccgcaggcgggaccccggggtgcccttgccctcctctcctgggcagccgcacgccgggatccccactcca

SEQ ID NO: 336383 - DNA, 436 bp, Homo sapiens
acacagtgaggattgtcagggactatggcaaattgtgaacacctgcctcatctaaatggatgcctaaattatccatgcaggctggcccagtgtggctgattcctctgatatttcaagaaaagccaacacaaaactttcatgtttgcatattaaacatgtaacagctaatcaagtaagttcacagaccaatcctcgcccacagcagtctatttactacatttgaatagacaatggtctttgtaactccaaagaggaaatttctttggatgttactcagaacaaatgtactccttcagtatttcattcattcattcattctttcatccacctatcccttctaatatataytgagtgcatttgagccaaccattatgcactgggtataagctaaagatacgataaagatcctgactttgaggaatttgccttctttcca

SEQ ID NO: 336384 - DNA, 584 bp, Homo sapiens
ggttccccgataaaggatgtaaaatatcttagcttttaaggaagagtttcttcatgttttttataaatgaaaaatgatggagtttcacattgctatggcwtttagactctactgggcacttttaaagcagtgatattaaggttttattttaaaatgtcagtatatacaatgaactgaaaatctttttatttaaaattatgatgcaaatttaaatattaacctaaaagatgagagaggacacaatttttaaaaattcttttatgaggcaaaagggtaaaatgcctctactgtgaactctatagaactctgacaataggtcactggcagtgtgttacattgctttaaatgtcagcattatagttctggtaagtgatttttctgagtctagttgaaaatctgtacttaaagtaccttggagacaatgatcagaagaaggaacaaatgagaaaggcaggtaaccatcttaattcaatgcttgcagagagggagtacatgaaactgcaggtgaccttgggcacagtgatcacaagctgtaaagtttaggttgaattctaaggaaaaaggaaagttctattagtaaaatg

SEQ ID NO: 336385 - DNA, 584 bp, Homo sapiens
ggttccccgataaaggatgtaaaatatcttagcttttaaggaagagtttcttcatgttttttataaatgaaaaatgatggagtttcacattgctatggcatttagactctactgggcacttttaaagcagtgatattaaggttttattttaaaatgtcagtatatacaatgaactgaaaatctttttatttaaaattatgatgcaaatttaaatattaacctaaaagatgagagaggacacaatttttaaaaattcttttatgaggcaaaasggtaaaatgcctctactgtgaactctatagaactctgacaataggtcactggcagtgtgttacattgctttaaatgtcagcattatagttctggtaagtgatttttctgagtctagttgaaaatctgtacttaaagtaccttggagacaatgatcagaagaaggaacaaatgagaaaggcaggtaaccatcttaattcaatgcttgcagagagggagtacatgaaactgcaggtgaccttgggcacagtgatcacaagctgtaaagtttaggttgaattctaaggaaaaaggaaagttctattagtaaaatg

SEQ ID NO: 336386 - DNA, 584 bp, Homo sapiens
ggttccccgataaaggatgtaaaatatcttagcttttaaggaagagtttcttcatgttttttataaatgaaaaatgatggagtttcacattgctatggcatttagactctactgggcacttttaaagcagtgatattaaggttttattttaaaatgtcagtatatacaatgaactgaaaatctttttatttaaaattatgatgcaaatttaaatattaacctaaaagatgagagaggacacaatttttaaaaattcttttatgaggcaaaagggtaaaatgcctctactgtgaactctatagaactctgacaataggtcactggcagtgtgttacattgctttaaatgtcagcattatagttctggtaagtgatttttctgagtctagttgaaaatctgtacttaaagtaccttggagacaatgatcagaagaaggaacaaatgagaaaggcaggtaaccatcttaattcaatgcttgcagagagggagtacatgaaactgcaggtgaccttgggcacagtgatcrcaagctgtaaagtttaggttgaattctaaggaaaaaggaaagttctattagtaaaatg

SEQ ID NO: 336387 - DNA, 536 bp, Homo sapiens
gtgggtaacgatgataccccaagactacccagactcagactggtgatgctggctcccaacaggtggatattgtcccaaggtctgttttggtggtaattaatcataaggattaagtgtaatcatatctttcagagacccatcttgtatcctgtgtgatttggttttaggcaaatgaccacagaacgaaaattcttgtgttcgtcacatgccataatcacatccataaattttatagctgaagatatagcaatgaaaagatatcacacaacscttaccctaggctctttttccccactcctaggcctttggattttcccataatcttacctacattttcttttttaaattaaattaaattttatctttttatttattttataaagttatattttagttgacaaataataattgtatatatttctggaaaacagtgtggtgttttgatagacgtatacatttaggaatgatcaaatcaggttaattagcatacctatcacctcaaatgcttatcattttcttggggtaagaacattaaa

SEQ ID NO: 336388 - DNA, 579 bp, Homo sapiens
gactggagaattaggattgttgattggtcagggcaaggggggtgaactcatcaggatttagaaactgcattmtttgatgagtaggcttctcatggggtccctcagatcagttgagtcagtggagtcctttggacctgctgatgtagtagtttcatagtatgcagaacctgaaggagtatctcaaagaaaaaacttcttaatgtttcataatgttcaagttgttctctacagagcagttaagggaaagtgtaatcttataacatggtctacatgattctaggacaacagataacaaacaactatgaggaaacaggtcagagagtgagctaacttcatgattaatgctgaatgtgctacaggctgggtttatgttggtttctccctctccctgtttcctgattaattttgattaattttttaaagtttatatggggagtttcaggccaatgacaattaatgtttcttaagcactaactgtgcacctgccaagcctcacaacaaccctatgagaaaggggccattactattttcattttatacaagaagaaactgaggtctaaagaataaccagcccaaagt

SEQ ID NO: 336389 - DNA, 579 bp, Homo sapiens
gactggagaattaggattgttgattggtcagggcaaggggggtgaactcatcaggatttagaaactgcattctttgatgagtaggcttctcatggggtccctcagatcagttgagtcagtggagtcctttggacctgctgatgtagtagtttcatagtatgcagaacctgaaggagtatctcaaagaaaaaacttcttaatgtttcataatgttcaagttgttctctacagagcagttaagggaaagtgtaatcttataacatggtctacatgattctaggacaacagataacaaacaactatgaggaaacaggtcagagagtgagctaacttcatgattaatgctgaatgtgctacaggctgggtttatgttggtttctccctctccctgtttcctgattaattttgattaattttttaaagtttatatggggagtttcaggccaatgacaattaatgtttcttaagcactaactrtgcacctgccaagcctcacaacaaccctatgagaaaggggccattactattttcattttatacaagaagaaactgaggtctaaagaataaccagcccaaagt

SEQ ID NO: 336390 - DNA, 537 bp, Homo sapiens
tgattaatgctgaatgtgctacaggctgggtttatgttggtttctccctctccctgtttcctgattaattttgattaattttttaaagtttatatggggagtttcaggccaatgacaattaatgtttcttaagcactaactgtgcacctgccaagcctcacaacaaccctatgagaaaggggccattactattttcattttatacaagaagaaactgaggtctaaagaataaccagcccaaagtgaaacagctaataagggatgaagttggaatttggacccaagtttgtatgactccagagactatatcattaacctgtgtgcacccccacctacaacagaggaacaaagaacaagtgctaggagaactcctagcacatctgctgccaaggcctggctccccttcgtaccatgaaccagttgtattaygtgaaattaaataaaggtgttggaacttaaagctattttgagccttgagaggaatgtggctatgtggcccaagtcatgtagcatgcagctgaagctttgttttttgac

SEQ ID NO: 336391 - DNA, 539 bp, Homo sapiens
atctggactgtggtaagataaagatrtgtaatgcaatagttaaaaaggagactaactaacaaactgatatagtttggatatttgtcccctccaaagcacatgtcaaaatgtgatccccagtgttggagctggggcctggtgggagatgtctgggtcatggagcgaatccctcttgaaaggcttggtgccatccccatagtaatgagtgagttattgctctattagttcatgcaagagctggttgtttaaaagatcctggcatccctcttgcttcctctctcatcatgggacatatctgctcccctttcaccttattccatgagtaaaagcttcctgaggcctcaccagaagccaagcagatgctggtgccatgcttgtacagcttgcagaactgtaaacccaataaatctcttttctttgtaaattatccagcctccagtatttcttcaaagcaacacaaagcagacaaatacataagccaataggagaggtgaaatagaatcataaagaattcaaaagaagacaataaaagggaaaca

SEQ ID NO: 336392 - DNA, 546 bp, Homo sapiens
aaagaaattaatagtataagcacctcaattaaaaggcaaagattgtcagattggatgagaaaaagcaagacccaattacgtgccgtctaaagaaaacccactttaatataaagacatagataaattaaaagaatggaaaatatataccatgcaaatacyaatcaaaagaaagctggagtggcaatattaatagcagaatattccttaatgttctgaataaggaacactactgttgataaagagaggcatttcatgacacaggagttaattcatccagaagaaacgataattctaaatgtatacacatcttattacagagttcaaatacacaaacaataggtgatacaacaatagttttgttgattggtttggtttgtgccactactcaaatgctgtgacaaagtgactgcacccttggtacccatcaccaccaccacctttctgcttccccaagttaagtgataatggtcttgacgtagccatcagaagctctacaactaaagacaaatatttttacctcccaagaaaagaaaaattttcatacaa

SEQ ID NO: 336393 - DNA, 618 bp, Homo sapiens
ctcagctatatccttaatactggaagagtgtgtcatacacaaaataaatatatgccaaatggatggctgagggaagaatgagtgaatgagtgttcccacttatgcagagatgctcaatgtgagggctgaaagtttcttaaagagtgcagaattggaaaatgagctttgagccttttaagctacatatcagcaaaataattccttccacagacttggaagcttgttaggatgaagctttgaaaaaagaagcctagctctatagagatgggatgaaaaagagaaaaagtgtaagcaacattggctggagagtcacaagaccatgagaaacagtaattcattgatgaaattaaaatagctgcaccaggcaagagagcattcgtagtcagttgtcacatccattgttgtcagtgagcaaagcagaagggagttaggaggcagctttgtttggttacattaaaagactttattttttagagcagttttaggttcacagcaaaaytgaaaggaagatacagaaagttctcatatacccccttccccctcaatacagagcctagaggcaacttctgagttcctgtgagaaggtgcctttgagaagaggaaagcttgctctctgat

SEQ ID NO: 336394 - DNA, 629 bp, Homo sapiens
gtgtccgagatatataggacaaagagtggctacaaggataatagaattagttggccattgctatgctagatattacagaggaggcagcagtgggagtgtgtgtggggtggttgagtagctgagtgattaattactgattaaaagttatgcgtgaagccaaagagcttccttgacagattacaaagaggtttcacccttgcagatraggcagagaaagctgagaaccagacccaggatgtaattgccagagcagctgagtcctaaataaagttaaactcctatccaagcaagagctactatgccaaggtcagatccttgcttggaaaaggatgggactatgacacactggatgaaacatctcagttgatgcccaccaaaaattttagatccccagaccagagtccccagagctctctgaaagctacagaagcagcccattcttacctatccagagctaacacttctcctatccttgcttgaagatgatacaaagagctctcccctctagcagataatatatatcccctcaaaaaagagactctaccagagctgctgcaagttccagccagcttggacaaacagcggtatacatgaaattgcattctgagggggcttggtcaagaaggcca

SEQ ID NO: 336395 - DNA, 629 bp, Homo sapiens
gtgtccgagatatataggacaaagagtggctacaaggataatagaattagttggccattgctatgctagatattacagaggaggcagcagtgggagtgtgtgtggggtggttgagtagctgagtgattaattactgattaaaagttatgcgtgaagccaaagagcttccttgacagattacaaagaggtttcacccttgcagataaggcagagaaagctgagaaccagacccaggatgtaattgccagagcagctgagtcctaaataaagttaaactcctatccaagcaagagctactatgccaaggtcagatccttgcttggaaaaggatgggactatgacacactggatgaaacatctcagttgatgcccaccaaaaatyttagatccccagaccagagtccccagagctctctgaaagctacagaagcagcccattcttacctatccagagctaacacttctcctatccttgcttgaagatgatacaaagagctctcccctctagcagataatatatatcccctcaaaaaagagactctaccagagctgctgcaagttccagccagcttggacaaacagcggtatacatgaaattgcattctgagggggcttggtcaagaaggcca

SEQ ID NO: 336396 - DNA, 629 bp, Homo sapiens
gtgtccgagatatataggacaaagagtggctacaaggataatagaattagttggccattgctatgctagatattacagaggaggcagcagtgggagtgtgtgtggggtggttgagtagctgagtgattaattactgattaaaagttatgcgtgaagccaaagagcttccttgacagattacaaagaggtttcacccttgcagataaggcagagaaagctgagaaccagacccaggatgtaattgccagagcagctgagtcctaaataaagttaaactcctatccaagcaagagctactatgccaaggtcagatccttgcttggaaaaggatgggactatgacacactggatgaaacatctcagttgatgcccaccaaaaattttagatccccagaccagagtccccagagctctctgaaagctacagaagcagcccattcttacctmtccagagctaacacttctcctatccttgcttgaagatgatacaaagagctctcccctctagcagataatatatatcccctcaaaaaagagactctaccagagctgctgcaagttccagccagcttggacaaacagcggtatacatgaaattgcattctgagggggcttggtcaagaaggcca

SEQ ID NO: 336397 - DNA, 585 bp, Homo sapiens
cccagagctctctgaaagctacagaagcagcccattcttacctatccagagctaacacttctcctatccttgcttgaagatgatacaaagagctctcccctctagcagataatatatatcccctcaaaaaagagactctaccagagctgctgcaagttccagccagcttggacaaacagcggtatacatgaaattgcattctgagggggcttggtcaagaaggccagaacataaggttggatttttaaaagattaatttgagagtattctcctgggaaataatacctaatccgttggcaaagaccccagtagatggtgtgaacttgctactagcaaggcttcaaaaggcatggragaaggcaagacccatgctaaatgaggtgaaaaagtcagaattggatgacagatggtggaaagtggcttaaaggctgaaagaagaggcacactgaagtggttatacaaggtaaggcctgaaaacccaccagatgattatgtttcttaggaaggcctggagggtgtacaatttgctagggccataggagcaaactagtgagagggtaggtcagggctgatgggaggagagac

SEQ ID NO: 336398 - DNA, 585 bp, Homo sapiens
cccagagctctctgaaagctacagaagcagcccattcttacctatccagagctaacacttctcctatccttgcttgaagatgatacaaagagctctcccctctagcagataatatatatcccctcaaaaaagagactctaccagagctgctgcaagttccagccagcttggacaaacagcggtatacatgaaattgcattctgagggggcttggtcaagaaggccagaacataaggttggatttttaaaagattaatttgagagtattctcctgggaaataatacctaatccgttggcaaagaccccagtagatggtgtgaacttgctactagcaaggcttcaaaaggcatggaagaaggcaagacccatgctaaatgaggtgaaaaagtcagaattggatgacagatggtggaaagtggctkaaaggctgaaagaagaggcacactgaagtggttatacaaggtaaggcctgaaaacccaccagatgattatgtttcttaggaaggcctggagggtgtacaatttgctagggccataggagcaaactagtgagagggtaggtcagggctgatgggaggagagac

SEQ ID NO: 336399 - DNA, 585 bp, Homo sapiens
cccagagctctctgaaagctacagaagcagcccattcttacctatccagagctaacacttctcctatccttgcttgaagatgatacaaagagctctcccctctagcagataatatatatcccctcaaaaaagagactctaccagagctgctgcaagttccagccagcttggacaaacagcggtatacatgaaattgcattctgagggggcttggtcaagaaggccagaacataaggttggatttttaaaagattaatttgagagtattctcctgggaaataatacctaatccgttggcaaagaccccagtagatggtgtgaacttgctactagcaaggcttcaaaaggcatggaagaaggcaagacccatgctaaatgaggtgaaaaagtcagaattggatgacagatggtggaaagtggcttaaaggctgaaagaagaggcacactgaagtggttatacaaggtaaggcctgaaaacccaccagaygattatgtttcttaggaaggcctggagggtgtacaatttgctagggccataggagcaaactagtgagagggtaggtcagggctgatgggaggagagac

SEQ ID NO: 336400 - DNA, 589 bp, Homo sapiens
aaactcatttaatggaagcagtcagtccagggagcaccactaccagtagaggcctggagggaacgctgggaagaaagttaratagagatgggaggctgagccagcacaatcagagcttctgtccggaaaaacatcatgacgtttggccagtgttcatgagcttcccacagctctggacatccagccagagcttccaaaatccactctgcttctgcctggtggccagcctgtcctccgacttctagctctagttgggaagatggacccagatgggcttcccatcaatgctctgcacaaggagaagttggtgatatttaatacttcactgctttgagaccagtaactcagccaaggctaaaagtgtgagtccagacccaggattgaaggctaggagtattcctgaatagcccaaggaaatgtgccatatctctggcttttagctgattacaagttttctggggtaaagttggatgtaaccaagactcgaatcatttttttctccagtatttacaggaagtagatcatggatactctgctgttcactacggtgtatcacttccatcagttgataggcaactcctaatgattc

SEQ ID NO: 336401 - DNA, 589 bp, Homo sapiens
aaactcatttaatggaagcagtcagtccagggagcaccactaccagtagaggcctggagggaacgctgggaagaaagttaaatagagatgggaggctgagccagcacaatcagagcttctgtccggaaaaacatcatgacgtttggccagtgttcatgagcttcccacagctctggacatccagccagagcttccaaaatccactctgcttctgcctggtggccagcctgtcctccgacttctagctctrgttgggaagatggacccagatgggcttcccatcaatgctctgcacaaggagaagttggtgatatttaatacttcactgctttgagaccagtaactcagccaaggctaaaagtgtgagtccagacccaggattgaaggctaggagtattcctgaatagcccaaggaaatgtgccatatctctggcttttagctgattacaagttttctggggtaaagttggatgtaaccaagactcgaatcatttttttctccagtatttacaggaagtagatcatggatactctgctgttcactacggtgtatcacttccatcagttgataggcaactcctaatgattc

SEQ ID NO: 336402 - DNA, 593 bp, Homo sapiens
ttcaagtgtaacgtttgattttgagaaagaaaaaaagatcaatttagctttaatttttgctcttattccatattccaattatacttccgctttagtgtgtgaagaatacaaggcaccaaacatcaccgtaataaaagcaagtctaggattctttttttttgtagcttttttttaatttttaatttttgtaggcacacagtagatgtatatatttatggtgtacctgagatgttttgatacaggcatgcaatgtgtaataatcacatcatggaagatgggatatccatttatcttttgtgttacaaacaatctaattatactcttgtagttatttttaaatgtacaatttagttattattgactatagtctccctgttgtgctatcaaatacaaatgcctattcattcattctattttcgaacccattagccatccccacctccccgtctccaccctgttgtgctatcaaatactaacgcttattcattcattctctttttttggacccrttaaccgttcccacctcccccccttcaccgtcccctccactatccttcctagcctttggtaaccatcaagtccgggattcttga

SEQ ID NO: 336403 - DNA, 557 bp, Homo sapiens
ctggagtgagcttttagaaacttttattagatcatcccaagcttgtgcttaaaatcctgcaactcattagactcaaatgaaaacttcatagtctggcctacaaagctccatgtctggctgctgcccacctctccccatcaacaaccaggtcactgtaacactctccacctcaccccctgtactgtagctactgtcaccttaatgcctttgaacaagctccaccctttgcctggaatctccttttctagggacctcccactctgcttctgtttttctcctaagagtgaggaagaaatgataaacaggttgggaaatatgagcaaggagaatttatacctccactaagcaaataaataaaaacattacagaccagccttaataattatctagaaaagttactaaacattcacaaaaaacaatcattcattcactaaygtttattgtctactctgtatgtaagaaactgttctagaggctagggatactcctcatggaacttacactgtattggagagagaaaaaaataagcaaatatataatgcctgtcagcaatgagt

SEQ ID NO: 336404 - DNA, 606 bp, Homo sapiens
ttgttgtctattatattccagaaactatgttaatcactcacaattttaggttcctaaaagagggagactgagagagaaaatccctgtatgattggaattgacatttgacattttagacccaggttctaggcagaataggtgctattctgaagggataaatgaattcatctttgcactaaactttcttattcagtgatacattagaagtgctgccaggtgagtgggcaaaagcctactgataacatacagaacatattactgaagggagtaggaagagggtgggcaataagccatacaagagaggattcctaaaaccagtgcctgcaggccttatagaagggtgcagcagcaacaagagctatatttatttcattgtaagtctacttttttattgaataaattgaaagacacccayaatattttccctggaaacttgggatcttaaaaatagacacagaaatttgggtttttcagcttttccatcagatcaagttattgcaaagagtataacttccaccccctgcctaagaactacacaaatatcctagctggtttttaggaaaaaagggatattttatggaaaatagtcacatttcttagaaggca

SEQ ID NO: 336405 - DNA, 606 bp, Homo sapiens
ttgttgtctattatattccagaaactatgttaatcactcacaattttaggttcctaaaagagggagactgagagagaaaatccctgtatgattggaattgacatttgacattttagacccaggttctaggcagaataggtgctattctgaagggataaatgaattcatctttgcactaaactttcttattcagtgatacattagaagtgctgccaggtgagtgggcaaaagcctactgataacatacagaacatattactgaagggagtaggaagagggtgggcaataagccatacaagagaggattcctaaaaccagtgcctgcaggccttatagaagggtgcagcagcaacaagagctatatttatttcattgtaagtctacttttttattgaataaattgaaagacacccacaatattttccctggaaacttgggatcttaaaaatagacacagaaatttgggtttttcagcttttccatcagatcaagttattgcaaagagtayaacttccaccccctgcctaagaactacacaaatatcctagctggtttttaggaaaaaagggatattttatggaaaatagtcacatttcttagaaggca

SEQ ID NO: 336406 - DNA, 606 bp, Homo sapiens
ttgttgtctattatattccagaaactatgttaatcactcacaattttaggttcctaaaagagggagactgagagagaaaatccctgtatgattggaattgacatttgacattttagacccaggttctaggcagaataggtgctattctgaagggataaatgaattcatctttgcactaaactttcttattcagtgatacattagaagtgctgccaggtgagtgggcaaaagcctactgataacatacagaacatattactgaagggagtaggaagagggtgggcaataagccatacaagagaggattcctaaaaccagtgcctgcaggccttatagaagggtgcagcagcaacaagagctatatttatttcattgtaagtctacttttttattgaataaattgaaagacacccacaatattttccctggaaacttgggatcttaaaaatagacacagaaatttgggtttttcagcttttccatcagatcaagttattgcaaagagtataacttccaccccctgcctaagaactacacaaatatcctagctggtttttaggaaaaaarggatattttatggaaaatagtcacatttcttagaaggca

SEQ ID NO: 336407 - DNA, 503 bp, Homo sapiens
ctatattttttaggttattacctttaggaatattgttcaattagaattgacttttttgtgtatgatgtgaggtaggggcagagtttgtttgtttgtttgttttcaatccagtattccagcatatttgttgaagagattttcctttccccrttaggctgctttggtgctcttgttgaaaatcacttgactatataagtttggcctctttgttgactcctcattctatctaattgatctatttgtccttttgccaatattatactgttttaggtatagtagctttatgataaatgccgaagccaggtagcataaatccttccatttttgtttttctttttgaagattgccttcattattcttgatcttttgtttttccggatagtttaaaatacgtttatgttagaaaatattttgatttacaaaggttgcaaagagagtaaaaagatttcccacgtagtccacacttggtttcttctattgctaatatattacattagtgtggt

SEQ ID NO: 336408 - DNA, 537 bp, Homo sapiens
atctatgtaaactatttagaatttttctgcactggagatattccattatttcctacttatttacttatgtatgtatgtatacaattgtgtatgtgttcagtcgttaactacagaaaatggatgtgaaattcttctctatggaatatttgtctctctttctccatttatttatttattcaaacatttatttatatcartatggagccaaccataattattttatatttcatgttataattcaatggcatactactaattgctcagaattttttagcattggctattaggaggcctttcatattggtcctgtatccctttggaaagttcccataattgtttttgagcattttctttctttttggtaatagaagatgctctagatggatattgcatatttcctgcatcagtcctaaaattagtcatttatctaagaagttctggctccttttattggagaatggcactggaaactgagatctgggcaccaatgtgctcattgatttagggtgttactgtttctaggccctttcagctcat

SEQ ID NO: 336409 - DNA, 537 bp, Homo sapiens
atctatgtaaactatttagaatttttctgcactggagatattccattatttcctacttatttacttatgtatgtatgtatacaattgtgtatgtgttcagtcgttaactacagaaaatggatgtgaaattcttctctatggaatatttgtctctctttctccatttatttatttattcaaacatttatttatatcaatatggagccaaccataattattttatatttcmtgttataattcaatggcatactactaattgctcagaattttttagcattggctattaggaggcctttcatattggtcctgtatccctttggaaagttcccataattgtttttgagcattttctttctttttggtaatagaagatgctctagatggatattgcatatttcctgcatcagtcctaaaattagtcatttatctaagaagttctggctccttttattggagaatggcactggaaactgagatctgggcaccaatgtgctcattgatttagggtgttactgtttctaggccctttcagctcat

SEQ ID NO: 336410 - DNA, 537 bp, Homo sapiens
atctatgtaaactatttagaatttttctgcactggagatattccattatttcctacttatttacttatgtatgtatgtatacaattgtgtatgtgttcagtcgttaactacagaaaatggatgtgaaattcttctctatggaatatttgtctctctttctccatttatttatttattcaaacatttatttatatcaatatggagccaaccataattattttatatttcatgttataattcaatggcatactactaattgctcagaattttttagcattggctattaggaggcctttcatattggtcctgtatccctttggaaagttccyataattgtttttgagcattttctttctttttggtaatagaagatgctctagatggatattgcatatttcctgcatcagtcctaaaattagtcatttatctaagaagttctggctccttttattggagaatggcactggaaactgagatctgggcaccaatgtgctcattgatttagggtgttactgtttctaggccctttcagctcat

SEQ ID NO: 336411 - DNA, 583 bp, Homo sapiens
gtgcagccctctgaaaatggagggttgtggactacagccaacatgaattttagacagtctggcccacctctgatggaccaagcttgtttcatagcccgtgatggagccagaaacatcgcttgtcaaatgtcaactggataccaccatgaagcatgcaagagcaaatatctgacattttctaacccctgcagcctttgcttctgttgctcccaacatgaatcctccatctgctccactggttttttccctctcagccattacagggactgatgctgagatttcatttartgtcacccttaattaacctgagaggacaggataaagtctttagtcccctcctgggactaagagaaaagaagagacttagggtgggaaactgaaaaggctcttatgttcctggctcttctgcaggtaaatctctcagaaaattgctgttttattgtttccaggcattgagctcacattacaccagcccaagccaggaaggctctgtcggcccatccatcagcttttatagggtgaggacctctgggaactcggaaaccactcaacaaattggaaatgttaatgacatggtccaagt

SEQ ID NO: 336412 - DNA, 563 bp, Homo sapiens
tttattagggggaatttgctcacaggatcacagaaggaaagtcccttcataggccatctgcaagctggagaagcacagaagctggtagcatggctcaagctagtaagtagtatggtttagtccaagtccaggagcctcagcaccaggaaagtaaacagtgcagcccctactcaggtcctagagcccccaggaggctgctcgagtaagtcccaragttcaaaagccaaagaacctgaagtcttatgtccaaaggcagaaggagaaaaagtgtcctcctctggaagggagagagagagtaaagagagcatgagaatcccactttttctgcctactttttctgctcctagccctttggaggtgccagtcggcactgatgacaggtcttcctctcagtgcactgactcacatgccaatctcctctgcatacacactctcaaatgcccaatcatgatgcttcatctaggcatccctcaatccagtcaaattgacacctatattaaccatcacaactcaaaagcacatttttttacctctgatagtaaataccattagttgttttcctt

SEQ ID NO: 336413 - DNA, 563 bp, Homo sapiens
tttattagggggaatttgctcacaggatcacagaaggaaagtcccttcataggccatctgcaagctggagaagcacagaagctggtagcatggctcaagctagtaagtagtatggtttagtccaagtccaggagcctcagcaccaggaaagtaaacagtgcagcccctactcaggtcctagagcccccaggaggctgctcgagtaagtcccagagttcaaaagccaaagaacctgaagtcttatgtccaaaggcagaaggagaaaaagtgtcctcctytggaagggagagagagagtaaagagagcatgagaatcccactttttctgcctactttttctgctcctagccctttggaggtgccagtcggcactgatgacaggtcttcctctcagtgcactgactcacatgccaatctcctctgcatacacactctcaaatgcccaatcatgatgcttcatctaggcatccctcaatccagtcaaattgacacctatattaaccatcacaactcaaaagcacatttttttacctctgatagtaaataccattagttgttttcctt

SEQ ID NO: 336414 - DNA, 563 bp, Homo sapiens
tttattagggggaatttgctcacaggatcacagaaggaaagtcccttcataggccatctgcaagctggagaagcacagaagctggtagcatggctcaagctagtaagtagtatggtttagtccaagtccaggagcctcagcaccaggaaagtaaacagtgcagcccctactcaggtcctagagcccccaggaggctgctcgagtaagtcccagagttcaaaagccaaagaacctgaagtcttatgtccaaaggcagaaggagaaaaagtgtcctcctctggaagggagagagagagtaaagagagcatgagaatcccactttttctgcctactttttctgctcctagccctttggaggtgccagtcrgcactgatgacaggtcttcctctcagtgcactgactcacatgccaatctcctctgcatacacactctcaaatgcccaatcatgatgcttcatctaggcatccctcaatccagtcaaattgacacctatattaaccatcacaactcaaaagcacatttttttacctctgatagtaaataccattagttgttttcctt

SEQ ID NO: 336415 - DNA, 583 bp, Homo sapiens
gtgcagccctctgaaaatggagggttgtggactacagccaacatgaattttagacagtctggcccacctctgatggaccaagcttgtttcatagcccgtgatggagccagaaacatcgcttgtcaaatgtcaactggataccaccatgaagcatgcaagagcaaatatctgacattttctaacccctgcagcctttgcttctgttgctcccaacatgaatcctccatctgctccactggttttttccctctcagccattacagggactgatgctgagatttcatttaatgtcacccttaattaacctgagaggacaggataaagtctttagtcccctcctgggactaagagaaaagaagagacttagggtgggaaactgaaaaggctyttatgttcctggctcttctgcaggtaaatctctcagaaaattgctgttttattgtttccaggcattgagctcacattacaccagcccaagccaggaaggctctgtcggcccatccatcagcttttatagggtgaggacctctgggaactcggaaaccactcaacaaattggaaatgttaatgacatggtccaagt

SEQ ID NO: 336416 - DNA, 646 bp, Homo sapiens
gtgcacatctcacttcactacataaaattctaagaaggaatttactcaaaaagtgaagtttcaataaaatcaatacttattactgcttcatcaagacttcaagtacctgactctgaagaaatacaatgagtgccagtgccttgatttgggcaaaaggcagttttacccaccattgcttctgcacaaccactgcaaatgttaacacggtgaaaaaataacatcttaatattacaataaaaatagttttgaccctatggacccattgaaaggatcttggagacctccaggattccgatggactacactttgagaaccgatgctctattttgagaaagaaaaaaactcattcactaactgaaattcacacagaggaccgaatattgccaatrccagtttccaatccacactagacaaactccaaggacatcagcagctagggactccacccactgccattcataaattaaaaggaattttcttcctcggcatgtgattcatctggaaaaagcttttagtgcaaagttctgaaagaagccaagaagcattttattataacaatctattttaatgttgagctcagttccaacaccaaagcagttttcaataaaggtttagaaaatgcatcaagataatttctcatttacca

SEQ ID NO: 336417 - DNA, 575 bp, Homo sapiens
gcttttgtttgcaacaaccatcttgctttagtatgcagcataagtggtttatgtgcacatctcacttcactacataaaattctaagaaggaatttactcaaaaagtgaagtttcaataaaatcaatacttattactgcttcatcaagacttcaagtacctgactctgaagaaatacaatgagtgccagtgccttgatttgggcaaaaggcagttttacccaccattgcttctgcacaaccactgcaaatgttaacacggtgaaaaaataacatcttaatattacaataaaaatagttttgaccctatggacccattgaaaggatcttggagacctccaggattccgatggactacactttgagaaccgatgctctattttgagaaagaaaaaaactcattcactaactgaaattcacacagaggaccgaatattgccaatgccagtttccaatmcacactagacaaactccaaggacatcagcagctagggactccacccactgccattcataaattaaaaggaattttcttcctcggcatgtgattcatctggaaaaagcttttagtgcaaagt

SEQ ID NO: 336418 - DNA, 473 bp, Homo sapiens
tcactatctgatgaaagtgaaatcagttgagaccatatatatgataatatttcatatagaattcactgagctttctaatatgaaagagaaaagcttcgggtataaacaatgttttgggttagatgagkaagagtatataacatggaataatgccatgagaaaggcaaaatcaacttaaattttatctgattgcaggacagaactgcatatcctcaatccaatgtttccatcatgtagtagacttttttcctttaaagaaatgactaagtggcatataaatctgggcaactaaagaaatggtattcagaggaaactacttttttcttatgtttggtgacatatgtaaggaacattttacctggtcagaatttaagccagatttatttcagcctggtatcaatgcccccataaaaagtcacatgaggttcttgttacaaacagctctcaaagttgaacagtaacaaaatcctcac

SEQ ID NO: 336419 - DNA, 573 bp, Homo sapiens
ctcataaataaaatcaaaggtgaaaagggagacattgtaactgatactayagaaattcaagggatcattagagactactaggagcaactatatgccaatgaatttgaaagcctagaagaatttgttaaattccttgacacatccaacctaccaagattgaaccatgaagaaatacagaatctggatagaccaataacaattgaagccataattcaaagtctccaggcaaacaaagcccaggacctgatggcttcactgctggattttaccaaacatttaaaaaagaacttaataccagttctactcaaaccattccaaaacacagatgaggagagactatttccaaactaattatgttaggtcagtatgactctgataacaaaaccagataaagacacattaaaaaggataagtacagtctaaaatccctgataaacattgatgcaaaaatcctcaacaaaatactagcaaacaaatttcaaccacacattaaaaagatctttcattatcaccaactgtaatttatcccaaggatgtaaagatgttccaacatatgcaaatcaatcaatgtga

SEQ ID NO: 336420 - DNA, 319 bp, Homo sapiens
atgagatatcatcttactccagttaaaatggcttttatccaaaagactggcaataatgaatgctgacaaagatatggasaaagggaaatcctcatacactcttggtagaaatgtgcagccactatggaaaacagtgtggatattcctcaaaaaactaaaaatagaactaccatatgaaccagcaactccactgctaggtatatgtccaaaggaaaggacatctgtatgttgaagagatatctatattcctatgtttattgcagtactgtttacaatagccaaaattcagaagcaaccaagtgttcatcaacagactaat

SEQ ID NO: 336421 - DNA, 538 bp, Homo sapiens
ttgttgttgctgttattttatgtttttaaataatatagcatttcttttttatattgcagatatatgaatcagtatggattttcccccttattttacttttccagtataatctatatcttgctctcatattatggctatatacaggcctaaagttacccagacatagttctatatctggaacctttaagacaagattcagtgaccacctgaaggtcccttggggtctaggttaacatgataaaaagcatagattttggcatcaatgtagttatacaaaagtaatggtttcatatttatgtaaccttagcaagtttactttactaagccttattctctaaatatacacaatgaatgaaagtatctaatcatcraagttgtccacaaggaggaaaatacatggaattgcttaaaaatttaaatactgtaaaatataaataaatatatggcaggatgtgtggtgtgggagtatatgtgtgtagtgtggatgtgcgtatatatgtgtgtgtctgttgtttatgtaaaaatgaggtagacacat

SEQ ID NO: 336422 - DNA, 613 bp, Homo sapiens
ggtcagacctccccattcacaattacaactagttaatcttatcatagaaaaattcaattacatttatcaaggttattccatagattcaagctattgctttaagaaaatggattttagtgctaggaatgttagcattgtgtgttccctcaattttaaaataaaaataaaaaataaataattaaatcttgcctttacatctatattattaatgtagagttgtaataaagtaatatttgacagctttgtaaaaagkattattaatacatagattatggaagtttaggagggaggctcataactgttaatagacttcaattctcagcctacactgacattttaaaaaatctagtttcaaatttgataacagattaccagctaggctggaagccaaccacctgattaaggcaatttaaatgcttgcaaagtggtgagattaaaatcaaataagtgccgattttttttcctgcttcacttatctttccctggattcgttccttaactaccaggtggtggaggactctgggtaattttcctctgcgccaattaccccaggatggtttttagggtgaagcagaataattactgcactatcaatccaaaatgggctgcttaa

SEQ ID NO: 336423 - DNA, 525 bp, Homo sapiens
tattctgtgagcttactaaattgactcagccaagaagattttatgtagatccttagtgtttgtatgtacataatcatgttgcctgaaaatatgaacagttatastctttgcactataaactttgtacctctttttcttttgcttgccttctttcactggctaggatcactagtataatgttgaggagaggtaatacaccattattgttgttttctctctggtcttaggtataccactaagataaaagtgtaattttatctatggttttgtgggatttttcctttctaacaacatccatagtcagtttaagatgttttccttctatccccatattcctattttgctgagaggttattttattatccttactttccaaaaaaaatgtgaatgggcagagacttttattaaaatatttatttggatcttttaaagtcctcttagggtttttctgttttctcttttattttatcatgtgatgaatcacattgtttgatatcttggactttaaaccagccttgcattgat

SEQ ID NO: 336424 - DNA, 560 bp, Homo sapiens
tttttactaaaatgaggaatatcaaataatggaaaaagataagccaggaattgtaggtgggaagcacttcatgttaagattagtatttccataaatacatamctaatctgtgaatggtattaggagggtttgcttaggctgtataaagacatacgtcagggagcctgagaaatgtggttagtggtccacgtttgagctggcaaaagaataggtcaaaatagctggatttcagaaggttgataataggagccccttataggtaccacagaaggagcagagcctgatgaaagtagaaactgaaaaatattattttaaaatttgaatatttttaaatattacctttactgatgattatcactcatgacctaaaaggtcaaaatttattgccttattttacgcctaaattcttaccaggcactactgaaaacacacacatgcttttatatagtaacaaattcaacataatataatctcaataatagataaaattaaaaataatgtcatttgcttttatgtgtgtatgggttcacattcccaagacatatgacagatgataacaa

SEQ ID NO: 336425 - DNA, 420 bp, Homo sapiens
ctgtgttgcaaaagctctattccaggcaagagtggctgggaattgtggagctctcttcctacatctagcaccagtaataggatagaatctctacctcaggcacagcaggccaagagtactgggtactgcattgccctgccatccacttgttcttgaaatttaggtttcatacttgaaaaagaaaaatgagaagaccaaaaggtaatgkattttcagcacccagctcattaatcaggcatgcctatctgagagaagtaggccactgttcatgcccacagctctggagaaatggcacagaggttttttctaggaagagagagctccgtagctatcctcaagggtattgactttatttgtaaaagagcataagtaagttcaaacttaagggtgctgttgaaaacaatggaggttttcttgtca

SEQ ID NO: 336426 - DNA, 539 bp, Homo sapiens
tgtgtgtgtgtgtgtgtataaacacattttctttatctacccatcagcttatgggcacttaggttggttccatttctttgcaattgtgaattgtgttgcaacaaacatatgtgtgcaggtgtcttttttatataatttcctttcctttgaagagataccactgggatccactgggtgaatccagctgggctcctgagtctggtggggactaggagaacctttatgtctagctaagggattgtaaatacaggaatcagcactctgtgtctagctcagggattgtaaatgcaccagtcagcaccctgtcaaaacggaccaatcagctttctgtaaaacagaccagtcagctctctgtaaaatggacaaatcagcaggatgtgggtggggccagataagggaataaaagcaggctgccccagccaggaatggcaacccgcttgggtccctttccacactgtggatgggtggttcttttgctctttgyagtaaatcttgttgctgctcactctttgggtctgcactgtctttatgagctgtaa

SEQ ID NO: 336427 - DNA, 609 bp, Homo sapiens
ggtggttcttttgctctttgcagtaaatcttgytgctgctcactctttgggtctgcactgtctttatgagctgtaacactcacctggaaggtctgcagcttcactcctgagccagcgagactatgaacccacaagaaggaagaaactctgaacacatccaaacatcaaaaggaacaaactccggacacgccaaccttaagaactgtaacactcactgcgagggtcagcggcttctttcttgaagtcagtgagaccaagaacccaccaattccggacacagaaccatccctgcatccctgggatgaaacccacttgatcatggtgagttatctttttgataagctgttggattcagtttgctaggatttttgttgaggatttttgcatctatattcatcaaggatatttgtcagcagttttctttttttttgttttgttcttttctggctttggtatcagggtgatgctagcttcatagaatgagaaaaattcaatcagtaatataaaaaaaattatcaccaccaccaacaacaaaaataaaaaagaacggaagatggattcacagccaaattataccagtagtttaaaataatcttttgttctactagg

SEQ ID NO: 336428 - DNA, 525 bp, Homo sapiens
agtgctccacaagggctgtccatagatgcacccatgccaagggcccatgggaaaatccccaactatgtctgcagtggtcagcaaatggaaaaagaagtaccatttwccaagatccttcatgagcaccagggctgcttgactgttagggtatagccatgaactttgctaagcacagtgctgcatctgtgcctctactgaaagaaacttcccaccaagaaagttctggggctgaatttttttatcccaagggtcacttactcccttgatgtgggtgcgctcctccttacccttggagtaggagtccttgaaggccagactcctgtgaatcctgctactcctttgatccagccatccagtgagtgtcactctccaggctggtgctggggaatgtctgtgtgggatccagtgatgtgacctgtctgcaagtcccccagcagtggttaaccagtaccagctctgatgggtgtggcaggggagtgacagactctgtgaaattccttggttatacatagccttagtgggttg

SEQ ID NO: 336429 - DNA, 564 bp, Homo sapiens
ataattatgtcttagattaagtttgaagtctttgtgtaataccattcaaaacattcagtaagcagttatatatgtaagtctgaatctcaaaagaggaaatctgaatgagtaattatagcaaggttgcaggatacaaagttaatatacaaaagccagttgctttttgatataccaaaaatgaacaagagggatttgaaattaaaactacaataccagcaagttattttgtaaatagcaacaaaatgatyctaaagtttgtatggagaagcaaaacatacagaatagcgaacacgatattgaaaaattaggacaaagttggaggaatgacactaccagatttcgagatttacagtaaagtcatagcagtcaaggtagtgtggtgttagtaaaagaatggaaaaatagataattggaacaaaatacagagcccagaaatagatccacataaatataatcacctgacctttgacaaagaagcaaaggcaatacaatggagaaaagacagatttttcaacaaatggtgctggaccacctggacatccacattaagaaaatgaatataaa

SEQ ID NO: 336430 - DNA, 549 bp, Homo sapiens
tctttttttctttttttttttttttttgagacagagtctagctctgttgccaaggctggagtgcagtggcacaatctcggttcactgcaacctccatctccggggttcaagctctcctgcctcagccgtctgagtagytgggactataggcacgtgccaccaggcccagctaatttttgtattttttgaagagatgaggcttcactacgttgaccaggctggtctcgaactcctgacctcgtgatctgcctgcctcggcttcctaaagtgctgggattacatacataagccaccatgcccagcctcctttttctttatttatctgcttttatctttccccacttctctccttctctcatatctccctccttttttctctttccatttttcttcccctttccttcctcttgcctgcctgccctcccttccttccttgtttccttttttcaacattatcttttttcattattgaagtctgctaatttctgaatacctactatggactggatgtttgtattcccccaaattttgtagttgaagtcctcatac

SEQ ID NO: 336431 - DNA, 549 bp, Homo sapiens
tctttttttctttttttttttttttttgagacagagtctagctctgttgccaaggctggagtgcagtggcacaatctcggttcactgcaacctccatctccggggttcaagctctcctgcctcagccgtctgagtagttgggactataggcacgtgccaccaggcccagctaatttttgtattttttgaagagatgaggcttcactacgttgaccaggctggtctcgaactcctgacctcgtgatctgcctgcctcggcttcctaaagtgctgggattacatacataagccaccatgcccagcctcctttttctttatttatctgcttttatctttccccacttctctccttctctcatatctccctccttttttctctttccatttttcttcccctttccttcctcttgcctgcctgccctcccttccttccttgtttccttttttcaacattatcttttttcattattgaagtctkctaatttctgaatacctactatggactggatgtttgtattcccccaaattttgtagttgaagtcctcatac

SEQ ID NO: 336432 - DNA, 601 bp, Homo sapiens
aatataatacaaatattataggggtaatatttttattattagcatgagaaattgagattgttaaaataccattataggcttaactttcagactattgagtagatgtcatgttgatggcgatcaaaaactttattgacaactgtctactccttcaggtagaacagcaaaacggtcaccctttggtgaaatgtgttaaatattttgggccagtagattgcactgatcattttmtctgtaagtttaaacaagctatattcccctttctacaaataatatttgtcacatagtaataatactatatattaacatggacatcaattattcatcattttctatgtaacaataattattctgagagtttccatatattctaaaaataagcagacacatctcacaaacgtttatgcaaagggttttttttttttgaaattacaagcatatatagtacaatttcttctaagtggagaaaaaacatgtttacagatttctagtatctgtaatcattacataagagaaacttaaaagaaaatcaaattcccttgatcaggttcaaggtcttatttacttatttcaaaaatgtcagtataactctactcagctt

SEQ ID NO: 336433 - DNA, 629 bp, Homo sapiens
atataatttgcaaatattttctctcaatcagtgaacactctgtttaacttattgatggtataygctgaagcacaaaagtttttttttattttgatgaagtctaatttatttgttttttattttgtttccttaagcttttggtgtcatatataagaaaccatttactaatataaggtcaagaagatatatgcttatgttttcttctaagattgttacaatttgagattttacatgcaggttatttattcattttgagttaatttatatgtgtggtaagaggtggaggctccaaattctttctttttgatcaagatatttgttgtaccagaatcatttgtttaaaagactattctttacccatcaggttgacttaacaccttattaaaaatcatttaatagtcagaggtggagcaagatggctaaatagaattctgcagcaattgttcccacaggaacaccaaattgaacaactattcacacaagaaagcaccttcataagaaccaaaaatcaggtgagtgatcacagtacctggttttaacatcaaagcaagaaaaggcaccaaagagggtaagaaagacattcttgaattgccaacaccacccttctcccttactccagcagtagctgt

SEQ ID NO: 336434 - DNA, 544 bp, Homo sapiens
gtgtttggtcaatcttggcaaggaagtggttgtcaaggattttttgtttgtttgctttcacaaggcagactgatttatctgcaggcaaagtggaaagtgtttagaataattgatatgctataaagtattcataattaataattattataaattaacttcataaataacattttggcacaaaagagttggcaaatgatcagcagatttgacaattctttaaaaatgaacattgtascaaatgaatctgttgtgtgtagcatgtaattacagtgctgtggataaggtgctaagctatcaaaaggaaaagtatgctctaaattggcctcctggagcatgagggttgtgagaagcacattacaacactctaataaattacccatgtcaccagcttgggcaacatagtgtgacttcatctctacaaaaaaaattttttaattagctgggcatgatggcacacacctgtagtcccagctactcaagaggctgaggtgggatcacttgaggtcaaggctgagccaagatcatgccactgtattcaagcctg

SEQ ID NO: 336435 - DNA, 562 bp, Homo sapiens
tgtgcaaaattaaaggttcaagaataaccaagatagttttggaaaaaraaaaagaatgaggaggaacttgctctgttggatgtcaagatgaatttaaaaattatggtatttagccccgggcatggtggctcatgcctgtaatctcagcactttgagaggcggaggcgggtgaatcaccttaggtcaggagttcaagaccagcttggccaacatggtgaaaccccatctctactaaaaacaaaaattagctgggcatggtggcatgtgcctgtaatcccagctacttgggaggctgaggtgggagaattgcttgaacctgggaggcggaggttgcagtgagccgagatcatgccattgcactccaacctgggagacaagaacgacactccatctcaaaaaatagaaataaaagttatgctatttagattgaaatactatatacaatgacaaagaacaaactgttatgcataacatgggatgactctctcccagacttaatgttgaatgaaattagtgagacacaaggattacgtattgtatgatttcatttatagcaagctca

SEQ ID NO: 336436 - DNA, 529 bp, Homo sapiens
acgtgaaaaacttttttaaaaagaggatagtatagatgagtatgcaactttaggatatggaagatctttaacaagtcaggaaaagaagaatgaaccatcaaggttaaagacatcaagggtaaatgattttgttgcctcaaaaaggaaaacttgagtttaataaaagacatcaggctgggtgtggtaactcatacctgtaatgccatcaatctggggagaccaaggcagatggttcacttgaggtcaggagtgcaagaccagcctgatcaacatggtgaaaccctgtctctacaaaaaatacaaaaattagccaggcgtggtggcacatgcttgtagtcccagctactcagaaacctgaggtactagaattgcttgaatccaggaggtggaggttgcagtgagccaagattgtgccactgccctccagcctgggctcaacaacaacaacarcaacagcaacaaaaaagacattataaaccaaactaaaagatatgcgacatacctaggaggagacacacacaatgtcttt

SEQ ID NO: 336437 - DNA, 600 bp, Homo sapiens
cagtggaggatatcgattggggcaatgaggatggagcagagtgggcagatatgggaatcacataggggttaattggcacaatctggggacaaatctcacatgggggattagggagtggttaggagatttggatggctcccagacttccccgtyggattttacatgaatggtggaattatgaacaaggagaaaatgtgtaagaaatacaacaagctatttttgttttaattagggaatggtgggttagagcaccattttggccgtgctgattttgacacctgtagaatatctgtgccatatagtgtactggttaaaagactaaaagatttggagccagactgccagtctggatattctagatccattgtatttgctgtgtgatcttaaggcaagttatttaccatctttgttaaaatggtgataatgatagtatttgcctcctagagttactgtgcagtttacctgagttaataacaaaatacctgaagtgtgcttggcacacgctttatacatgtaatcattggctattattattataagcaattggagatataaatctagagatctgggcttgagatgaagattttggaattatagtag

SEQ ID NO: 336438 - DNA, 600 bp, Homo sapiens
cagtggaggatatcgattggggcaatgaggatggagcagagtgggcagatatgggaatcacataggggttaattggcacaatctggggacaaatctcacatgggggattagggagtggttaggagatttggatggctcccagacttccccgttggattttacatgaatggtggaattatgaacaaggagaaaatgtgtaagaaatacaacaagctatttttgttttaattagggaatggtgggttagagcaccattttggccgtgctgattttgacacctgtagaatatctgtgccatatagtgtactggttaaaagactaaaagatttggagccagactgccagtctggatattctagatccattgtatttgctgtgtgatcttaaggcaagttatttaccatctttgttaaaatggtgatartgatagtatttgcctcctagagttactgtgcagtttacctgagttaataacaaaatacctgaagtgtgcttggcacacgctttatacatgtaatcattggctattattattataagcaattggagatataaatctagagatctgggcttgagatgaagattttggaattatagtag

SEQ ID NO: 336439 - DNA, 551 bp, Homo sapiens
atgttcttaatcagatggaactgatgacacaggctcatagaagcgattgtggaacaatccagacatggagaaagagtaaatgctggcacatcaactgcagtggtgccgatgaacacgaggacagcagaaatacctttaagatgcagcaaagcttatgtgtgcaggggacctagctttgatcttctggacaaaagcagtgaccacagaatagctttgcacatacaattagaaactgctgatgttaccagtagagatgagtccctggcatcattgcaagtagsgacatgctcagtgggaaaggactgttggaatctcagccgcattcccattctcagagacaatattcttggtcattttctttttcagtcctccattacctccagaactttttgtgcctctgaatctgtgtgtttactctacttcccctccatccctttagggcccttgttctcctggagtaatcttcctcatccttcaaaaatcacttctctaacaccccaaagaagctctcagtcttctaggttagtatttctactttgtaaatagctcta

SEQ ID NO: 336440 - DNA, 551 bp, Homo sapiens
atgttcttaatcagatggaactgatgacacaggctcatagaagcgattgtggaacaatccagacatggagaaagagtaaatgctggcacatcaactgcagtggtgccgatgaacacgaggacagcagaaatacctttaagatgcagcaaagcttatgtgtgcaggggacctagctttgatcttctggacaaaagcagtgaccacagaatagctttgcacatacaattagaaactgctgatgttaccagtagagatgagtccctggcatcattgcaagtagggacatgctcagtgggaaaggactgttggaatctcagccrcattcccattctcagagacaatattcttggtcattttctttttcagtcctccattacctccagaactttttgtgcctctgaatctgtgtgtttactctacttcccctccatccctttagggcccttgttctcctggagtaatcttcctcatccttcaaaaatcacttctctaacaccccaaagaagctctcagtcttctaggttagtatttctactttgtaaatagctcta

SEQ ID NO: 336441 - DNA, 545 bp, Homo sapiens
cctgagttacctcacttagaataaatggtctccagtctcatccaggtcactgcaaatgctgttaattcattcctttttatgactaagtagtatttcatcatatatatatatatatatatatrtatatatatacaccacagtttctttattcagtcattgacattgatcgatgggcattttggttggttccatgattttgcaattgtgaattgtgctgctataaacatgcgtgtgcaagtatcttttgcatataatgacttctttttgtttgggtagtaatcccactacccagcagtgggattgctggatcaaatggtagttctacttttagttctttaaagaatctccacactgttttccatagtgggtgtactagattacattcccaccagcagtgtaaaagtgttccctgttcactgcatccacgccaacatcaactattttttgattatggccattcttgcatgaggaaagtggtatcgcattgtggttttgatttgtatttcccttatcattagtaatgttgagcattttttcatatgttt

SEQ ID NO: 336442 - DNA, 532 bp, Homo sapiens
tctgtttgtagaaacaaatcataacagggtatttttatgggacaatgatgactcaccacccccaaagtcaaaggccagtcaaatgtgctttttttaaattttactttgaattatagtaaataatatttttgttaatattcttaaattacagggaaagttttgcaaaatctagttaatctcasaatttgcataatgttactctaaactgtctgttaccttctcaaatgataatcaatgaaaatataccatataaaagaagtatacataactgctgttttaaaacatgtatataatacccagataataaaccacattaaaagtgacatcttctggattaaagacttaaacgttagacctaaaaccataaaaaccctagaagaaaacctaggcattaccattcaggacacaggcatgggcaaggacttcatgtctaaaacaccaaaagcaatggcaacaaaagccaaaattgacaaatgggatctaattaaactcaagagcttctgccagcaaaagaaactaccatcagagtgaa

SEQ ID NO: 336443 - DNA, 491 bp, Homo sapiens
taacaaagtatcccaaactccaaaatacaagtaagtagtaataaaccactaacagccacaaaacctacatatcagtgactatgaggagaaaacagagtgaaacaaaaaggccagggaatgacctgagaacaggagaacatccatgtccaatgagtgtttgcaggaaggcacagtggccaacagataacagcagctgagtgattatgtccaaaacaataacagaggcwtgtaagagccaaaggtcagctccacaatgtctcaagcagcctgagcacctccaaactctcacactaaccagccagggctcttttccaaaagaggacactacactgaggagaaacagctggcagtggattcagcaatggacaggaaaaagtcaacagggacaaaagagaaagaagatatagataaaagtaaagaagagaaagagagccaagacagaaagcaaaccaccatattttaaaggcgtgaaaacaagagagggagtttgg

SEQ ID NO: 336444 - DNA, 590 bp, Homo sapiens
caacttgaagaaactactcatgtccaaagtttcagcttaaggtgaaataaataaggtaagaattacaatgaactaaaactgataaaatacgtttaaattaatcatgacactttataaaaattaattgaacaatttcagaggatgatagataactaattcattatcttaaaagtcagtaccttaaaaactggtagataaagggaaaggaaatatttattctgactttcctttatgaactgtaccactgagtaatcaactagtagatgcagaggacagcttccttttttttttttttttttttttttttgagacagagtctcrctctgttgccaggctggagtgcagtggtgcagatctcgggctcactgcaacttctgccccctgggctcaagtgattctcctgactcagcctcctgactagctggtattacaggcatgtgccaccacgcccagctaatttctgtatttttagtagagacggggtttaaccatgttggccaggctggtctcgaactactgacctcgtgatccatccacctcagcctcccaaagtgctgggactacaggcgtgagcccctgctccctgccaa

SEQ ID NO: 336445 - DNA, 467 bp, Homo sapiens
acacgtggctggggctgcacactccgtggagctagctggggccaggaacaggtgggaaccctgacccctaccaagctggtggggtggkaacctcatgctcccaggtacaactacagctgcccagccacagctctggaccccgggatccctgtactctccagggactgggaagaccctgtccccatatgcacagaagtgcctgctcccactccctgttcccagtgcccactccagtgcagagcaaagatgtggttgagcccaggcactactgcaacccgccaggtgtgcatgcgctcgagtggcactaatacaacagacccctgctgcctcacctcctcttctaactttgggtgctgacaactgagagggaagccagcacggctgagggaggctcagcacaggcctgcaggtgccccttggcattaacagcctgcatgccctgtatgacatgttgatggtgggaggca

SEQ ID NO: 336446 - DNA, 467 bp, Homo sapiens
acacgtggctggggctgcacactccgtggagctagctggggccaggaacaggtgggaaccctgacccctaccaagctggtggggtgggaacctcatgctcccaggtacaactacagctgcccagccacagctctggaccccgggatccctgtactctccagggactgggaagaccctgtccccatakgcacagaagtgcctgctcccactccctgttcccagtgcccactccagtgcagagcaaagatgtggttgagcccaggcactactgcaacccgccaggtgtgcatgcgctcgagtggcactaatacaacagacccctgctgcctcacctcctcttctaactttgggtgctgacaactgagagggaagccagcacggctgagggaggctcagcacaggcctgcaggtgccccttggcattaacagcctgcatgccctgtatgacatgttgatggtgggaggca

SEQ ID NO: 336447 - DNA, 467 bp, Homo sapiens
acacgtggctggggctgcacactccgtggagctagctggggccaggaacaggtgggaaccctgacccctaccaagctggtggggtgggaacctcatgctcccaggtacaactacagctgcccagccacagctctggaccccgggatccctgtactctccagggactgggaagaccctgtccccatatgcacagaagtgcctgctcccactccctgttcccagtgcccactccagtgcagagcaaagatgtggttgagcccaggcactactgcaacccgccaggtgtgcatgcgctcgagtggcactaatacaacagmcccctgctgcctcacctcctcttctaactttgggtgctgacaactgagagggaagccagcacggctgagggaggctcagcacaggcctgcaggtgccccttggcattaacagcctgcatgccctgtatgacatgttgatggtgggaggca

SEQ ID NO: 336448 - DNA, 581 bp, Homo sapiens
accccttctttcttttttggaatcagcattactcctgtrtgtcatcaaggcaagagaaagcagggagaataatactggggcccaggtcagccacatggggctcctaaaggctaaataaatgtgctcttccatttaaccctgaggtctaatctccacagccacttcttcagcttgttctgctccccatactttgttttttcaactgcatttgttaaagagaacactgtctacaactagttttagagactatagaacatgaaaaattaaatttttctcttagataattagcagaaagtaaaattttttaaaatagtatagacaatcatactgagaaacgttttaagggaaataataaaaacagaaaggaatacttgaataagggctttaacttttggcagagtgcaaaagagagcgagaaagaatgaaataaagtgctattgtttctgagatgtcattggattctctctaatctccagaatttagataaaataagctcacaccaccagaacaaccacacaccctcacatgcagtttcaagattctgattttattttcgttcaaacatttatcatcctttgtct

SEQ ID NO: 336449 - DNA, 581 bp, Homo sapiens
accccttctttcttttttggaatcagcattactcctgtgtgtcatcaaggcaagagaaagcagggagaataatactggkgcccaggtcagccacatggggctcctaaaggctaaataaatgtgctcttccatttaaccctgaggtctaatctccacagccacttcttcagcttgttctgctccccatactttgttttttcaactgcatttgttaaagagaacactgtctacaactagttttagagactatagaacatgaaaaattaaatttttctcttagataattagcagaaagtaaaattttttaaaatagtatagacaatcatactgagaaacgttttaagggaaataataaaaacagaaaggaatacttgaataagggctttaacttttggcagagtgcaaaagagagcgagaaagaatgaaataaagtgctattgtttctgagatgtcattggattctctctaatctccagaatttagataaaataagctcacaccaccagaacaaccacacaccctcacatgcagtttcaagattctgattttattttcgttcaaacatttatcatcctttgtct

SEQ ID NO: 336450 - DNA, 581 bp, Homo sapiens
accccttctttcttttttggaatcagcattactcctgtgtgtcatcaaggcaagagaaagcagggagaataatactggggcccaggtcagccacatggggctcctaaaggctaaataaatgtrctcttccatttaaccctgaggtctaatctccacagccacttcttcagcttgttctgctccccatactttgttttttcaactgcatttgttaaagagaacactgtctacaactagttttagagactatagaacatgaaaaattaaatttttctcttagataattagcagaaagtaaaattttttaaaatagtatagacaatcatactgagaaacgttttaagggaaataataaaaacagaaaggaatacttgaataagggctttaacttttggcagagtgcaaaagagagcgagaaagaatgaaataaagtgctattgtttctgagatgtcattggattctctctaatctccagaatttagataaaataagctcacaccaccagaacaaccacacaccctcacatgcagtttcaagattctgattttattttcgttcaaacatttatcatcctttgtct

SEQ ID NO: 336451 - DNA, 581 bp, Homo sapiens
accccttctttcttttttggaatcagcattactcctgtgtgtcatcaaggcaagagaaagcagggagaataatactggggcccaggtcagccacatggggctcctaaaggctaaataaatgtgctcttccatttaaccctgaggtctaatctccacagccacttcttcagcttgttctgctccccatactttgttttttcaactgcatttgttaaagagaacactgtctacaactagttttagagactatagaacatgaaaaattaaatttttctcttagataattagcagaaagtaaaattttttaaaatagtatagacaatcatactgagaaacgttttaagggaaataataaaaacagaaaggaatacttgaataagggctttaacttttggcagagtgcaaaagagagcgagaaagaatgaaataaagtgctattgtttctgagatgtcattggattctctctaatctccagaatttagataaaataagctcacaccaccagaacaaccacacaccctcacatgcagtttcaagattctgattttattttygttcaaacatttatcatcctttgtct

SEQ ID NO: 336452 - DNA, 600 bp, Homo sapiens
ctgtctttaattaagctgacttttaactgtaatgctcctttttttaagaagtccttttcaatctcttattacctgaccttagccataccaaattgccaatacttctggctttttaactcatgaagaggcagataatacagtaatttttatattcctacaactaatttccacagagagagaggtcagaagtctgactggcaagaacttttacccttttgcaggcacgtcaggctctgggttccctgttcctgagccatggagccctattgaccctggaatcctaygaagggggaacagaaaatgagaagtttaccttcttcgagaggttgccaggaagtttaaggtttggggaaattaaactcttcccagtttgaaagatgcatctgaggggagagtcctgtggtacaaagatgtgattacccacccgtgaagagaggacacaggaggaaaaatgaaaaaactttttttttctccagtgtctgagggtcaaaggagttctagtgatttaggatgtgcttgagaggagttcaggctgcagatggttggttactcacctggaaagaggggaaaaagttatccctttgttcctctctctcttca

SEQ ID NO: 336453 - DNA, 528 bp, Homo sapiens
agtaacccagatttatatcaatacagtcacttcaattttgctatattctcaaagtcatgatctaaatatttacayaaacacaatttttttacacaaacacaaatatttgggcatagtaaagtctgcccaaatattattatatctggctatttgagcctgtaactgccaaaacttccataatgatacattgtaaaactaatctcgaaacaacaagccttctagaaagcatagaattttcattttgctgatccaaaaaaaaagttaatgtttgcaagcaaataattgttgtaatgctaatggaataatgatgaaatatatttcatcatgtttattccttgcaataaataagagtaaaatacagtgtttaaaccatgcaagttaattattttgatagcaagcaagaaaatggtgctttccatcttatagatttcttagcccttcaaatgcttttgagattcaggcaacatggcctggcaaccagatacagaaattgttaaagaagcaaagagtggcctcataatcaccaaa

SEQ ID NO: 336454 - DNA, 605 bp, Homo sapiens
aaatccagtatattgaaaagatatttgcactccatgtttatttgagcactaaccataatagccaaaaggtggaatamacctgagtgcccatcagggaatgaatggataaagaaaatatggtctacacacacaatagaatattgttaatccattaaaaaagcatgaaatcctgtcatatgttagccacatggatggaactggaggtcattatattaaatcacataagtgaaatgcacagagtcaaatattccatattcttattcatatgtgtgtgtttaaacttgtttctcataaacatagataatcaatttgtggttgccagaggccaagaaggtaagggggaggaggatttgaagaaaaggtgattagtgggtacaaatatgtggtttgatggaagaaataagaattagtgttagatagatcagtagagtaactatagttcacaataatgtatttacattttgaaagagctaaaagagaataattcaaatggttctagtattaaaaaaaagaaaactatttaagtgggtagatatcccaggtacactattttgatgtttacactttatatcaatatattacattttcacatgtactcccaaacc

SEQ ID NO: 336455 - DNA, 605 bp, Homo sapiens
aaatccagtatattgaaaagatatttgcactccatgtttatttgagcactaaccataatagccaaaaggtggaatacacctgagtgcccatcagggaatgaatggataaagaaaatatggtctacacacacaatagaatattgttaatccattaaaaaagcatgaaatcctgtcatatgttagcmacatggatggaactggaggtcattatattaaatcacataagtgaaatgcacagagtcaaatattccatattcttattcatatgtgtgtgtttaaacttgtttctcataaacatagataatcaatttgtggttgccagaggccaagaaggtaagggggaggaggatttgaagaaaaggtgattagtgggtacaaatatgtggtttgatggaagaaataagaattagtgttagatagatcagtagagtaactatagttcacaataatgtatttacattttgaaagagctaaaagagaataattcaaatggttctagtattaaaaaaaagaaaactatttaagtgggtagatatcccaggtacactattttgatgtttacactttatatcaatatattacattttcacatgtactcccaaacc

SEQ ID NO: 336456 - DNA, 605 bp, Homo sapiens
aaatccagtatattgaaaagatatttgcactccatgtttatttgagcactaaccataatagccaaaaggtggaatacacctgagtgcccatcagggaatgaatggataaagaaaatatggtctacacacacaatagaatattgttaatccattaaaaaagcatgaaatcctgtcatatgttagccacatggatggaactggaggtcattatattaaatsacataagtgaaatgcacagagtcaaatattccatattcttattcatatgtgtgtgtttaaacttgtttctcataaacatagataatcaatttgtggttgccagaggccaagaaggtaagggggaggaggatttgaagaaaaggtgattagtgggtacaaatatgtggtttgatggaagaaataagaattagtgttagatagatcagtagagtaactatagttcacaataatgtatttacattttgaaagagctaaaagagaataattcaaatggttctagtattaaaaaaaagaaaactatttaagtgggtagatatcccaggtacactattttgatgtttacactttatatcaatatattacattttcacatgtactcccaaacc

SEQ ID NO: 336457 - DNA, 622 bp, Homo sapiens
cccccacttttcctgcaaaagcagcatccttatctctgaagacagatggatgccaataataatctgagtgacaaggtcttgctaagtttcccccagtcaactaccctcagcgtgtatgccctttktgtcatatctcatatgcctacaactctgtgcttttcattaaactcagtataaaaacactgaggtttaattgtttcttcaggtcttcctttcattatgaaagctcccgtgttgtaaaacatagattaaatacatttttgtgcttttctcgtgttaatttttgtggtggtgatagagccctcagcagagaaattagaagggtagaagagaatccttaccatgtgaaataactggaattctacaatttgctggtggtatatatcagcacaactattatggaaaactgtttggtagtattaccaatgaagaggttcaaaatatgccacctcaaaatatatcattttggaaaatggaatgttttgagctaaaggcaattgagaactagcaggcccagaaaaagcttttaatttcctccttaaccacttataatagtgtataaatttccacttttgtaaaagaaattttcatcagtaaaaatatctgtattaggaagacagtt

SEQ ID NO: 336458 - DNA, 622 bp, Homo sapiens
cccccacttttcctgcaaaagcagcatccttatctctgaagacagatggatgccaataataatctgagtgacaaggtcttgctaagtttcccccagtcaactaccctcagcgtgtatgccctttgtgtcmtatctcatatgcctacaactctgtgcttttcattaaactcagtataaaaacactgaggtttaattgtttcttcaggtcttcctttcattatgaaagctcccgtgttgtaaaacatagattaaatacatttttgtgcttttctcgtgttaatttttgtggtggtgatagagccctcagcagagaaattagaagggtagaagagaatccttaccatgtgaaataactggaattctacaatttgctggtggtatatatcagcacaactattatggaaaactgtttggtagtattaccaatgaagaggttcaaaatatgccacctcaaaatatatcattttggaaaatggaatgttttgagctaaaggcaattgagaactagcaggcccagaaaaagcttttaatttcctccttaaccacttataatagtgtataaatttccacttttgtaaaagaaattttcatcagtaaaaatatctgtattaggaagacagtt

SEQ ID NO: 336459 - DNA, 622 bp, Homo sapiens
cccccacttttcctgcaaaagcagcatccttatctctgaagacagatggatgccaataataatctgagtgacaaggtcttgctaagtttcccccagtcaactaccctcagcgtgtatgccctttgtgtcatatctcatatgcctacaactctgtgcttttcattaaactcagtataaaaacactgaggtttaattgtttcttcaggtcttcctttcattatgaaagctcccgtgttgtaaaacatagattaaatacatttttgtgcttttctcktgttaatttttgtggtggtgatagagccctcagcagagaaattagaagggtagaagagaatccttaccatgtgaaataactggaattctacaatttgctggtggtatatatcagcacaactattatggaaaactgtttggtagtattaccaatgaagaggttcaaaatatgccacctcaaaatatatcattttggaaaatggaatgttttgagctaaaggcaattgagaactagcaggcccagaaaaagcttttaatttcctccttaaccacttataatagtgtataaatttccacttttgtaaaagaaattttcatcagtaaaaatatctgtattaggaagacagtt

SEQ ID NO: 336460 - DNA, 622 bp, Homo sapiens
cccccacttttcctgcaaaagcagcatccttatctctgaagacagatggatgccaataataatctgagtgacaaggtcttgctaagtttcccccagtcaactaccctcagcgtgtatgccctttgtgtcatatctcatatgcctacaactctgtgcttttcattaaactcagtataaaaacactgaggtttaattgtttcttcaggtcttcctttcattatgaaagctcccgtgttgtaaaacatagattaaatacatttttgtgcttttctcgtgttaatttttgtggtggtkatagagccctcagcagagaaattagaagggtagaagagaatccttaccatgtgaaataactggaattctacaatttgctggtggtatatatcagcacaactattatggaaaactgtttggtagtattaccaatgaagaggttcaaaatatgccacctcaaaatatatcattttggaaaatggaatgttttgagctaaaggcaattgagaactagcaggcccagaaaaagcttttaatttcctccttaaccacttataatagtgtataaatttccacttttgtaaaagaaattttcatcagtaaaaatatctgtattaggaagacagtt

SEQ ID NO: 336461 - DNA, 428 bp, Homo sapiens
aatatctgtattaggaagacagttactctcagagacaatttttatcacctgagagactcttcaaggcatagcaaggcaacttttattaactatacttttcctcctctcacactcccataatttacctcctcccccatacccagaagccccaaatcgctgtttctttgcatagcccaggataatatatgtctcagtggagtctcagcagtcttaggctacttcaagtctcatatatttttgtgaaacttccatgcatacttatatttgtgataattttttttccttctgttatcctgtgttatgtcaaattaactcttaaggcagccasagaacctagaagggtagaagaaagctttttttgttccctacactggccttaagaatatgtgtatcctatgatccagaaattccatttctagcatacacct

SEQ ID NO: 336462 - DNA, 535 bp, Homo sapiens
tccctctacccacagagacagatgcatattctgattgcctcctttggaatgacttaccagaaactcaaaataatgcaaccatttctctctcacctacctatggcctggaagtccccaggggaagacttgctttgagttgtctccacctttctggatggaagtactgtacttcttacatatattgattgatgtctcatgtctccctaaaatgtataaaaccaagctatgccccgaccaccttaggcacatgttgtcagcacttcctgaggctatgtcatgagcatgtcctcaaccttggtgaccrttaatgtcctctagctcaggattcagttctttgtgatctacattcactcaaactgggagagttccattgtctcctcaggttcacagttttagcaaagtctctttcagatagcctcaagtcagctttactttttatccactgtgatggcttccaattacaactagtctctctctttttggtagcagtatttaaaaaccctgaaacagttttttgaacagagatttccttcaa

SEQ ID NO: 336463 - DNA, 564 bp, Homo sapiens
tttagctttgtaagaaactgccaaactgaggtaggaggtgggactcaactgtggaccagattgaagactggttgaaacaggaagatacactgaaagcacttttccataagacacacctaccagcaccataacagtttaccattgctatggcagtacccgaaacttactgccccttccttcctttccaaggaagttaccatcccttttctagaaatttctgaataactctccccttaatttgcatgtaattgaaagtgggtataaatatgactgtagaactgcccttgagttgctattctcaacacgctgcctatggggtagtgctgctttgcaggagaagtcatagagctgtaactctgctgcctcaatatagctgttttcttctactaccagcttggtcttgaattcttcactgagcaaagccaagaaacttccaaggctaagccccaattttagggcttgctcaccctacatcaagtggtgcccaaagtggggctgaagagagaagatgayggtgagagaagcagtggttatagttggcaagatgatggcaagagacagcga

SEQ ID NO: 336464 - DNA, 495 bp, Homo sapiens
tttggagttaacttttgtgaaaggtataaagtctgtgtctagattctttctcctttktgtttgcatataaatgtctcattgttttcagcaccatttgttgaatagactctcctttcttcattgaattacccttgatcttttgtcaaagatcagttgattgtacctgcataggtctattcttgggctttctattctattccattcagtgtactctctttccagtgccatgctgtctttcttactgtggctttatagtaggtcttgaaatgggtagtatgagtcttccaactaggtttttcttcagcattgcattgtattctggatcttttccctcttcatttaaagtttagagtaagtgtatctacaactacacaagagcttattgagattatgctcgggattgcatttaatctatagatcaaattgggaagaactaacattttaacgatattgagtctttcaatccatgaacatggaatatctgtccattagagc

SEQ ID NO: 336465 - DNA, 495 bp, Homo sapiens
tttggagttaacttttgtgaaaggtataaagtctgtgtctagattctttctcctttgtgtttgcatataaatgtctcattgttttcagcaccatttgttgaatagactctcctttcttcattgaattacccttgatcttttgtcaaagatcagttgattgtacctgcataggtctattcttgggctttctattctattccattcagtgtactctctttccagtgccatgctgtctttcttactgtggctttatagtaggtcttgaaatgggtagtatgagtcttccaactaggtttttcttcagcattgcattgtattctggatcttttccctcttcatttaaagtttagagtaagtgtatctacaactacasaagagcttattgagattatgctcgggattgcatttaatctatagatcaaattgggaagaactaacattttaacgatattgagtctttcaatccatgaacatggaatatctgtccattagagc

SEQ ID NO: 336466 - DNA, 495 bp, Homo sapiens
tttggagttaacttttgtgaaaggtataaagtctgtgtctagattctttctcctttgtgtttgcatataaatgtctcattgttttcagcaccatttgttgaatagactctcctttcttcattgaattacccttgatcttttgtcaaagatcagttgattgtacctgcataggtctattcttgggctttctattctattccattcagtgtactctctttccagtgccatgctgtctttcttactgtggctttatagtaggtcttgaaatgggtagtatgagtcttccaactaggtttttcttcagcattgcattgtattctggatcttttccctcttcatttaaagtttagagtaagtgtatctacaactacacaagagcttattgagattatgctygggattgcatttaatctatagatcaaattgggaagaactaacattttaacgatattgagtctttcaatccatgaacatggaatatctgtccattagagc

SEQ ID NO: 336467 - DNA, 495 bp, Homo sapiens
tttggagttaacttttgtgaaaggtataaagtctgtgtctagattctttctcctttgtgtttgcatataaatgtctcattgttttcagcaccatttgttgaatagactctcctttcttcattgaattacccttgatcttttgtcaaagatcagttgattgtacctgcataggtctattcttgggctttctattctattccattcagtgtactctctttccagtgccatgctgtctttcttactgtggctttatagtaggtcttgaaatgggtagtatgagtcttccaactaggtttttcttcagcattgcattgtattctggatcttttccctcttcatttaaagtttagagtaagtgtatctacaactacacaagagcttattgagattatgctcgggattgcatttaatctatagatcaaattgggaagaactaacattttaacratattgagtctttcaatccatgaacatggaatatctgtccattagagc

SEQ ID NO: 336468 - DNA, 483 bp, Homo sapiens
tttggcacgctgagcaccttgaatgaaaagaaattggaagacatttgaagctgcctcacaatcaatgtctctctgaccttcccttgtttctttcccagtgcagacagggcgtctgtctgaaattccctttatttgactaaggaaagttctttcaaaacaaacacaatggcaatcaatcccctgtgtgaaatctcattaaccagggaagatgaatcacaaaagatgaaactaaaggttattgtcatgtccacataggcagatgttttatctattcttttgaaggmtgttacctgagagactttatctgcatagtttggcaatctttgtttgtagtgcagttctacccctcaccttttcgtaactgtcaccacctcccacacagtctggaggaactttgtcccaggctgttttctgtgctacaggcccgttcatctcccctaaaaatcatttactcttcctttcaaattgtctgcattccacact

SEQ ID NO: 336469 - DNA, 566 bp, Homo sapiens
gcaaggtgacaaccattattaaaccaattctattctgttttatctcaataatcaaatcagtaggaagtatcaattaacagttaaatcatttataacttagcccatcagagcatttgttacccagcgcttctcaatctttgtcacagcatggcacacacacaaaatgatgttatttgaatagcacagagagataaacagataagataattgactccacaactctaaccaccggagggctgccccagggccaaggggacaaatacctctcagtctatacataaagaattcttgmacacacaaattagaaatctctttcctaaccaactgaaaatggaaatgtgtgttataacaatatcccaagctgacacacattagcttccacatgccaaacaaaatttaaaaatattcactgaatgtctactatgtactagtggtctatttttaatgatagaaccagcaggcagatttgaatatcaggctaaatcctaatttcattctgtaggcaccaaagtgcaatgaaatatttgagcacaggaaaataatttcaggaaaaaattaagtttaaa

SEQ ID NO: 336470 - DNA, 566 bp, Homo sapiens
gcaaggtgacaaccattattaaaccaattctattctgttttatctcaataatcaaatcagtaggaagtatcaattaacagttaaatcatttataacttagcccatcagagcatttgttacccagcgcttctcaatctttgtcacagcatggcacacacacaaaatgatgttatttgaatagcacagagagataaacagataagataattgactccacaactctaaccaccggagggctgccccagggccaaggggacaaatacctctcagtctatacataaagaattcttgcacacacaaattagaaatctctttcctaaccaactgaaaatggaaatgtgtgttataacaatatcccaagctgacayacattagcttccacatgccaaacaaaatttaaaaatattcactgaatgtctactatgtactagtggtctatttttaatgatagaaccagcaggcagatttgaatatcaggctaaatcctaatttcattctgtaggcaccaaagtgcaatgaaatatttgagcacaggaaaataatttcaggaaaaaattaagtttaaa

SEQ ID NO: 336471 - DNA, 601 bp, Homo sapiens
acaaaatatcccaaaatagggaagcacatgtattaatttaaataaaattaaaccagtggggtaataaatgcttggagtgcaaacaaagaattgtggcatgagggatcaaatactttcaatgtttctagtgtttgtactgggttactatgattttccttacaacactgacattctggtgtaagtagtcaaggaattcactgaggtttctttgaatctacacctcccaatgactttctatgatagtcaatcacggcaccaaaagtcatttcatagtcagtgaatagtcagtgtgaagctgatccagagcccaagatgtatgcctgtaaaagcaaggagaaaaatacctaagagtcagacagaactgggactagaataaagaaagacaaagaaaaagagagtgcccaaaacaaaaattacatttccctagcttttcatctggcaacayttagcacatcatacagttagttgctcactttgcagtctttacaaaagagcagcattgggtattgagcacttcgttatatattggctacactttcctgtcatgttgcctttattctagaagggagtaagagaggagtaggaattctccataagagaa

SEQ ID NO: 336472 - DNA, 512 bp, Homo sapiens
acatttccctagcttttcatctggcaacatttagcacatcatacagttagttgctcactttgcagtctttacaaaagagcagcattgggtattgagcacttcgttatatattggctacactttcctgtcatgttgcctttattctagaagggagtaagagaggagtaggaattctccataagagaagatctgaccaaataatagtcgattcaatgggttttcccctttgggtttgcaagtaagggtttgcagggccttcatgttattttaccctctcttctccattcaccctsactaaaaaacatgtccttgtattaaactctgagagaaagaaatcaaacatgatttaatgctctgtgtttgacaacaatattcaatgaagtaatttgtatgatttacagagatataatttcctctgaaagaaattacacatgcttaaaaataattttatgatatagcatagttgtttaaaatttggcatagatacatgcttaaacaaattatctttgctt

SEQ ID NO: 336473 - DNA, 464 bp, Homo sapiens
atagtgccaaactagtagggaaatgcactaaattttattataaaatactagaaacatgttataaatgcataatatatattattattaagattagaaatattaatggatctttaactctaaaagtagtacctcaatttgtgcttaatgttgtgaaagaaaacattaaacataaataaatagctattaatatatgtggartctatctgtgaaaactgttcaaaaatttgaaatagattttttttacttgtcataaaaatcctagtcactatatatttaagtgatattttgtatttctccaaattttataatttgctttcaacctttttggaagcatgtgtagtataaaacattaaaacaagggttttaagatctacaatacaagcacagctagtacccccatatcataccctcataagtaatcactgggccagccaagctgttcaatctcccaaaatacggaataa

SEQ ID NO: 336474 - DNA, 464 bp, Homo sapiens
atagtgccaaactagtagggaaatgcactaaattttattataaaatactagaaacatgttataaatgcataatatatattattattaagattagaaatattaatggatctttaactctaaaagtagtacctcaatttgtgcttaatgttgtgaaagaaaacattaaacataaataaatagctattaatatatgtggagtctatctgtgaaaactgttcaaaaatttgaaatagattttttttacttgtcataaaaatcctagtcactatatatttaagtgatattttgtatttctccaaattttataatttgctttcaacctttttggaagcatgtgtagtataaaacattaaaacaagggttttaagatctacaatacaagcacagctagtacccccatatcataccctcataagtaatcactgggccagccragctgttcaatctcccaaaatacggaataa

SEQ ID NO: 336475 - DNA, 568 bp, Homo sapiens
ctactcatatacatatttaattacattcaataataaaatattttaaaagaaaccccaatattgtggtgtaaataagttatttacaccagtgtaaataagttatttaacaggatgttaaacaaagctctgtataaaaacacaaagcatattctatgagtagctaatatgttaaaacagcataattgatagtctgttccaaaaacgacaattaatataaaaggaaacattgtttcttaaaacagcctttagttaaatccaatcctgctaatataaagaagaatgccttatgaaagtatttgagctcaaactttattttaataaagaggtaaaagagctaacaaaatagaattctggtgactaacatgaactgtaactttatactacagaggatcaagaaaatcaatatcaaattctcctcagaaaagcatccatcyctgtttttcctttgttaaaccctccacacttctgcgtagcatgttggaatatgtgcagtaaaattcaatgtcttcaaaacagttttcctttcgttcactgataaccaaagttatctgaacaaagaagtatgagc

SEQ ID NO: 336476 - DNA, 616 bp, Homo sapiens
aaatccagtatattgaaaagatatctgcactccatgtttatttgagcactaaccataatagccaaaaggtggaataaacctaagtgcccatcagggaatgaatggataaagaaaatatggtctatacatacaatagaatattgttaatccattaaaaaagcatgaaatcctgtcatatgttagcaacatggatggaactggaggtcattatattaaatgacataagtgaaatgcacaaagtcaaatattccatattcttattcatatgtgtgtgtttaaacttgtttctcataaacatagataatcaatttgtggttgccagaggccaagaaggtaagggggaggaggatttgaagaaaaggtgattagtgggtacaaatatgtggtttgatggaagaaataagaattagtgttagatagatcagtagagtaactatagttcacaataatgtatttacattttgaaagagctaaaagagaataattcaaatggttctagtattaaaaaaaagaaaactatttaagtgggtagatatcccacgtacactattttgatgtktacactctatatcaatatattacattttcacatgtactcccaaaccatgtacatact

SEQ ID NO: 336477 - DNA, 617 bp, Homo sapiens
ggaggaataatcttttgattaaaagacattttaaaaatatattgagttttttaaaaagtgagcaacagtaaagaagaacctctaggatgtagccatactgattaagstataaataaatgcaagggaataattactataaaagtcaagataatggttatttggggtgggaaggaggcagatgtaaatggaatgagacacatggagggcttatgggatgtgtgaataataattgacttcttaatgtgcagatggtaattactgagatgtttgcttttcaatacatacttcactaagctatacatcaattttatatagttttctgtattgtgttttattatttaaaaagaatttcaaaaattctgtccaattatttataacttcatgattaactacacattagtttattatgaagaaagagcaatattctaaagtattttaattacctaataaacacaccattattagccatttgacaaaagcattcacacattaatgtgtaaccagctacttacttttattaaaaataaaaaacctactcattttatttaccctcagaaagtgcagttgtttgcaaatatgaaaataaaatggcatgattattttagctaatttaaaac

SEQ ID NO: 336478 - DNA, 532 bp, Homo sapiens
taatttctgatcaattctggtacttttgaagtttctttttgcctctttttagttgtttggggatatttgtgaatrgcaaatagtaatatgtaactaacacttctttccttaacttggtctttttttcttacgagtggcttcagttgaattagtttgtcttctgaagatgtgcaaaggcatttctgactttggcctctctcgtacaccagacccttgtagctcttccatcccacgagagtgaagactctggacacagaacttagaacttgagcccaagccaccagatacttgagttaaggggtctggtgggcctttaaaacaatcacgtacccttctttgctttcattttctttgtctataaagtggggatgttatggactatgtcctctctaccatcccaaattcctatgttgaagacctaatccctagtacctcacaatgttgctgtttttggggataggggctttaaaaatataattaagattaagtggggttgttaaggtgggacctactccaatatgactggtttcct

SEQ ID NO: 336479 - DNA, 544 bp, Homo sapiens
attcatacattgagaaaatggtttaagtgttaaataacacattcacattgtaaggcacagactaatgaaataaaaaaayttaaacaagcaaacaaaacttaccttcccatctgctagagcatcaagtaatattcacataaaatgaaacaaaaacctcctgtcttgcttgacacatgtcacaaatatattctgatgcatatgtaatggacagcatttctgaggcttaggttcaagatagagaatactcttattctccccttaatgagaaaccacagaatgcagttctgaagccctcagaattgtcatgacagggcgtagaacaacagatggtccctcaggcaaactaatcctatgttatttaataccaaaagcaaaactgtcaactgtttcagggaaaacatagagcccggaaccaaagaattgatgagtaaacatgaaagaaattgattttgaaatatttggtttgaaatgtattttaatttttcagtctaaacacatattgttgctgatttggaatcctaaaccactgtttggattttaaaaa

SEQ ID NO: 336480 - DNA, 600 bp, Homo sapiens
ccagctggggtcagcactcacattgccaactgctccttgggtgcacctgctggggaccatggcaccctgcaactgctgaacacttaaatgcagaacaggagggggccagagtgagtggccagagaggggcccagtgaggacctggagcccccgccccaggctgcaaggaggtgcagccagggctgcatgctccatggagctggcagaagctggggacaagtgggagccctgtcccttccaagttggtggggcaggagctccccaggtgcagctgtagccacctcccacagctcaggccctgggaatcttcatgctcttgggggccagggaaggccctctgtccccagcaggctcagaggtgcctgctcccactagctggcttcttcccactgtcagagcctgctccaatctcagagtgagatcagggctgagcctgggcattggccaggccaggtgtgcccaggcttggggcagtgatgacatgacagycccctgccgcctcagccccctcccaactttgggcaccaataagcatgggaaggaggcaaagggaaggctgaagacagcctggcactggcctgcaggcatcccttggcatta

SEQ ID NO: 336481 - DNA, 600 bp, Homo sapiens
ccagctggggtcagcactcacattgccaactgctccttgggtgcacctgctggggaccatggcaccctgcaactgctgaacacttaaatgcagaacaggagggggccagagtgagtggccagagaggggcccagtgaggacctggagcccccgccccaggctgcaaggaggtgcagccagggctgcatgctccatggagctggcagaagctggggacaagtgggagccctgtcccttccaagttggtggggcaggagctccccaggtgcagctgtagccacctcccacagctcaggccctgggaatcttcatgctcttgggggccagggaaggccctctgtccccagcaggctcagaggtgcctgctcccactagctggcttcttcccactgtcagagcctgctccaatctcagagtgagatcagggctgagcctgggcattggccaggccaggtgtgcccaggcttggggcagtgatgacatgacagtcccctgccgcctcagccccctcccaactttgggcaccaataagcatgggaaggaggcaaagggaaggctgaagacagcctggcactggcytgcaggcatcccttggcatta

SEQ ID NO: 336482 - DNA, 421 bp, Homo sapiens
ggacacgccgcctttaagaactgtraaactcaccacgagggggcccggcttcattcttgaagtcagtgagaccaagaacccaccaattccggacacatcagcaccaccccaagcgcacacacatctggctgggtagcgacagcactcaggcttagccacaactttgctccacgctgaagtgggtgctgggaacacggaaaggcaagggagtggagcacacacttctgagagtggggggtaggggggctcttctgacccccaagagcacagagatgccgaggtccagagccaccgctgggtggctgcagttgcacccgggagcttgggctgccaccccactaacttggtaaggcatggggttcctgctggtgtgacctgttcgtgcccccactggctccacggagtgtgtagccccagctgt

SEQ ID NO: 336483 - DNA, 421 bp, Homo sapiens
ggacacgccgcctttaagaactgtgaaactcaccacgagggkgcccggcttcattcttgaagtcagtgagaccaagaacccaccaattccggacacatcagcaccaccccaagcgcacacacatctggctgggtagcgacagcactcaggcttagccacaactttgctccacgctgaagtgggtgctgggaacacggaaaggcaagggagtggagcacacacttctgagagtggggggtaggggggctcttctgacccccaagagcacagagatgccgaggtccagagccaccgctgggtggctgcagttgcacccgggagcttgggctgccaccccactaacttggtaaggcatggggttcctgctggtgtgacctgttcgtgcccccactggctccacggagtgtgtagccccagctgt

SEQ ID NO: 336484 - DNA, 421 bp, Homo sapiens
ggacacgccgcctttaagaactgtgaaactcaccacgaggggscccggcttcattcttgaagtcagtgagaccaagaacccaccaattccggacacatcagcaccaccccaagcgcacacacatctggctgggtagcgacagcactcaggcttagccacaactttgctccacgctgaagtgggtgctgggaacacggaaaggcaagggagtggagcacacacttctgagagtggggggtaggggggctcttctgacccccaagagcacagagatgccgaggtccagagccaccgctgggtggctgcagttgcacccgggagcttgggctgccaccccactaacttggtaaggcatggggttcctgctggtgtgacctgttcgtgcccccactggctccacggagtgtgtagccccagctgt

SEQ ID NO: 336485 - DNA, 602 bp, Homo sapiens
tatgggatctttgggtttcctttttctggccagaaacatctgtggctggtcgtgcctttgcctgagttttgcttggacccactgggttcattcckcccatttggcctggcaggctgcacttggctcacactaccagcctggatcccccacctcaagggcgagtcaggcatggaatggtgaggggtgagagtaagcatggggtctggccactgtgcgcagtgagatacactggttgctgccatggggtgggaagctccaggtgctggtatgggcactggctctctgtgagtctgtggctggagcagtcgcattgcaagcagcttccctggtggcacttgggaatgcagtggcacccagaagcttgaagacaccaggaaccacagggccccaaagagagagtcacagaccaggctcagggagctcctaggtctaggctccctgaagggctgcagctcttttctccttctctttgcccaccatgtggcaagcagggggcaggtttcagccctgtttgtgttacagctcttttagcctcaccattcagcaggtactgagttcttgtcctgtgaccaggaagaatgaggtatacagacaagtggagg

SEQ ID NO: 336486 - DNA, 602 bp, Homo sapiens
tatgggatctttgggtttcctttttctggccagaaacatctgtggctggtcgtgcctttgcctgagttttgcttggacccactgggttcattccgcccatttggcctggcaggctgcacttggctcacactaccagcctggatcccccrcctcaagggcgagtcaggcatggaatggtgaggggtgagagtaagcatggggtctggccactgtgcgcagtgagatacactggttgctgccatggggtgggaagctccaggtgctggtatgggcactggctctctgtgagtctgtggctggagcagtcgcattgcaagcagcttccctggtggcacttgggaatgcagtggcacccagaagcttgaagacaccaggaaccacagggccccaaagagagagtcacagaccaggctcagggagctcctaggtctaggctccctgaagggctgcagctcttttctccttctctttgcccaccatgtggcaagcagggggcaggtttcagccctgtttgtgttacagctcttttagcctcaccattcagcaggtactgagttcttgtcctgtgaccaggaagaatgaggtatacagacaagtggagg

SEQ ID NO: 336487 - DNA, 421 bp, Homo sapiens
ggacacgccgcctttaagaactgtgaaactcaccacgagggggcccggcttcattcttgaagtcagtgagaccaagaacccaccaattccggacacatcagcaccaccccaagygcacacacatctggctgggtagcgacagcactcaggcttagccacaactttgctccacgctgaagtgggtgctgggaacacggaaaggcaagggagtggagcacacacttctgagagtggggggtaggggggctcttctgacccccaagagcacagagatgccgaggtccagagccaccgctgggtggctgcagttgcacccgggagcttgggctgccaccccactaacttggtaaggcatggggttcctgctggtgtgacctgttcgtgcccccactggctccacggagtgtgtagccccagctgt

SEQ ID NO: 336488 - DNA, 616 bp, Homo sapiens
ctttgcccaccatgtggcaagcagggggcaggtttcagccctgtttgtgttacagctcttttagcctcaccattcagcaggtactgagttcttgtcctgtgaccaggaagaatgaggtatacagacaagtggagggtgagcaagatgaagaggagctttattgagtgataaaactgctcagaggagatgtgcagtgggtagctcctttctgcagtcagggtgtcccaacaagtgytgagctcctagcagagaggagatgctagaatgaggaggtcctctctgcaggcaggtggttttgttgtctctgcagctctcagcagagaggaggccctagagtgggtggctcatctcagcaggcaggtcatcctattgtctccctgttgtctctctgtcctctcttccagcctggctgagtccaggggtttggggggtggttatgggccttacaggggaggaagtgcatgctggttggttcaggggtggctaaggatggacccaaggaaaagcactgcaagttccccctctggtccacaggactgtcagcccagccctcaggctttaggccctctccagcctgaaggttgggcttcaccagggacctgctctcttctgccca

SEQ ID NO: 336489 - DNA, 500 bp, Homo sapiens
gaagttccagctcacacagtgaggcaggaaaaaaaaagggcaaattcctccctcctccaccttgtgttatattcaggccctccmccctgcacagattaaatgatgcccactcacattgcggaagagtatctactttactcagtcctgtgattcaaatactaatctcatccggacactcccagagacacactcaaaatatttaacctggatcccccttggtccagtcaatttgacacatcacattaatcatcacaggggagttgcaagatagcaaaaatcctgatctatgatattcaagttcaaataaacgccttaaactaattaatcgagagaaagaaatgtgagtatataacttaaaaatataaagtaactattataaaagagtgaaagtggctgccaaaggaagctatagtttgaaaataaaaagacatgaagcaggtgaatgaatttttaattttaatccttttgacactgtgagactttattaaatgtgctgcatg

SEQ ID NO: 336490 - DNA, 500 bp, Homo sapiens
gaagttccagctcacacagtgaggcaggaaaaaaaaagggcaaattcctccctcctccaccttgtgttatattcaggccctcccccctgmacagattaaatgatgcccactcacattgcggaagagtatctactttactcagtcctgtgattcaaatactaatctcatccggacactcccagagacacactcaaaatatttaacctggatcccccttggtccagtcaatttgacacatcacattaatcatcacaggggagttgcaagatagcaaaaatcctgatctatgatattcaagttcaaataaacgccttaaactaattaatcgagagaaagaaatgtgagtatataacttaaaaatataaagtaactattataaaagagtgaaagtggctgccaaaggaagctatagtttgaaaataaaaagacatgaagcaggtgaatgaatttttaattttaatccttttgacactgtgagactttattaaatgtgctgcatg

SEQ ID NO: 336491 - DNA, 500 bp, Homo sapiens
gaagttccagctcacacagtgaggcaggaaaaaaaaagggcaaattcctccctcctccaccttgtgttatattcaggccctcccccctgcacagattaaatgatgcccactcacattgcggaagagtatctactttactcagtcctgtgattcaaatactaatctcatccggacactcccagagacacactcaaaatatttaacctggatcccccttggtccagtcaatttgacacatcacattaatcatcacaggggagttgcaagatagcaaaaatcctgatctatgatattcaagttcaaataaaygccttaaactaattaatcgagagaaagaaatgtgagtatataacttaaaaatataaagtaactattataaaagagtgaaagtggctgccaaaggaagctatagtttgaaaataaaaagacatgaagcaggtgaatgaatttttaattttaatccttttgacactgtgagactttattaaatgtgctgcatg

SEQ ID NO: 336492 - DNA, 500 bp, Homo sapiens
gaagttccagctcacacagtgaggcaggaaaaaaaaagggcaaattcctccctcctccaccttgtgttatattcaggccctcccccctgcacagattaaatgatgcccactcacattgcggaagagtatctactttactcagtcctgtgattcaaatactaatctcatccggacactcccagagacacactcaaaatatttaacctggatcccccttggtccagtcaatttgacacatcacattaatcatcacaggggagttgcaagatagcaaaaatcctgatctatgatattcaagttcaaataaacgccttaaactaattaatcgagagaaagaaatgtragtatataacttaaaaatataaagtaactattataaaagagtgaaagtggctgccaaaggaagctatagtttgaaaataaaaagacatgaagcaggtgaatgaatttttaattttaatccttttgacactgtgagactttattaaatgtgctgcatg

SEQ ID NO: 336493 - DNA, 521 bp, Homo sapiens
tagttccacctacttgggggtctgaggtgggaggatcacttgaatctgggatgcggaggttgcagtgagatcgtgccatggtactccagcctgggtgacagagtgagatcgtgtctcaaaaaaagaaaaaraaaaaaaaagaaccagaatataatcctgtttataaatctttaaatttggaggtaatactttaccatctaaaattgttcttactaataatgatataaactgaattatgctataattgcccttattccagtgaagtctctgttgttacttgtttaattatctggtggtgaaaattacatacagataatatgtgttcctgaagagaaatgcacctctgacataattctcctccttttatttggaggggtgggtgttatatcgataaagacggtgtatattctctttattgatgtccttgtcacataaaggagttcagttaatgtttgttaataataactacttggtatctgtagttgagaggttttaaatagataatttttaaaatgagctat

SEQ ID NO: 336494 - DNA, 281 bp, Homo sapiens
tgcctctggcacacgtgtaattatcagagaataagcctgtatcgaggccccactatgtgccaggcactttggtggcactttgcttaccatatctctagctttcagagagygctctcgtggaggtgaagtgacttgcctaagatcacactgctagcacgtggccaagaattcggcaaagctaggactcttattaagtgaggctgacgatcgtattagagatggaccaattcccacatctcaactctagaaggaaactgaagctcagagaaggcaaatccctt

SEQ ID NO: 336495 - DNA, 281 bp, Homo sapiens
tgcctctggcacacgtgtaattatcagagaataagcctgtatcgaggccccactatgtgccaggcactttggtggcactttgcttaccatatctctagctttcagagagcgctctcgtggargtgaagtgacttgcctaagatcacactgctagcacgtggccaagaattcggcaaagctaggactcttattaagtgaggctgacgatcgtattagagatggaccaattcccacatctcaactctagaaggaaactgaagctcagagaaggcaaatccctt

SEQ ID NO: 336496 - DNA, 589 bp, Homo sapiens
accatcctgaccaaccaacatggtgaaaccctgtctctacaaaaaatacaaaaattagctgggcgtagtggtgcacgcctgttgtcccagctactcgagaggctgaggcaagagaactgcttgaacccgggaggcagaggttgcagtgagccgagatagtgccattgcactccagcctgggcgacagaccgagactccgtctcaaaaacaaaaaagaaaaatcctaagccaggtgcagtggctcatgcctgtaatcccagcactttgggggrccaaggcagggcaggtggattgcttgagcctagttcaaaaccaccctgggcgacacagtgaaaccccatatctacaaataacaataataataataataatacaaaaattagccaggcatggtggtgagtgcctatagtcccatcactcaggagactgaggtgggagggtcgcttgagcccaggaggcagaggttgcagcaagccaagatcgtaccactgtactccggagtggttgacagagcaagacactgtctcaaaaataaataagtaaataaaagaaaagaaaaagaaaaatacttatcttctgaaaggtacta

SEQ ID NO: 336497 - DNA, 616 bp, Homo sapiens
tagctagtggtcccagggagagggagaaagccagaatcccaagagagaagccacagtattttataacctaatcttagaagtgacatcccatcacttttgctgwattctattcaatagcccccactcaaggggaggaaattacactaagggtatgcataccaggagggagggataattgggggccataataaaggctgcctaccacagtacgcatgataaaaatttaaaaacataaaacaaaaaaacttgccctttagttatatattctttggtatatttatttaaatatgattctatgatcattatgcaattattcatcccaatgctagtcttttccatcttacaaaataccaaagagaatacattaaatattgaacatatcttgttaaccagtgtccattaatggtcatattagagataatacaactagcaaggataagtcaacaaaaatagcatctggagaaaaaaagacttactgggtaaatcttgctaagtagatgacactgacctttactatttaatcattataggcatcatctttaggagacggaatggcacttaataaaagatcagctttttatattacaattaaagaaataataaaaattcaaaggtt

SEQ ID NO: 336498 - DNA, 559 bp, Homo sapiens
gcagtggctactcacaggcacgatcatagctcactacagccccaaactcctgggcccaagtgatcctcttgcctcagtctcctgagtagctggtagtacaggcgcatgccattgcgcctagcttcaagaaaccactttcttgctcatctataagaagcaacttctcatccattaaagttttttcatgagattgcagcagcagcaattcagtcacatcttcaggccccacttctaattctagttctcttgctatttctactacatctgcagttacttcctccactgaagcctcgaacccctcaaagtcatccatgagggctggaatcaacttctttaaaactcctgtcaatattgtttttttcttttccccccsgtcagagacacagtcttagtctgttgcccaggctgagtgcagtgatcatagctcactgcagcctcaaactcctgggctcaaactatcctcttgcctcagtctcccaagttgctgggactacatgtgtgtgccaccatgtctggctaatatatatatattttatatttatattttgtagagccggag

SEQ ID NO: 336499 - DNA, 559 bp, Homo sapiens
gcagtggctactcacaggcacgatcatagctcactacagccccaaactcctgggcccaagtgatcctcttgcctcagtctcctgagtagctggtagtacaggcgcatgccattgcgcctagcttcaagaaaccactttcttgctcatctataagaagcaacttctcatccattaaagttttttcatgagattgcagcagcagcaattcagtcacatcttcaggccccacttctaattctagttctcttgctatttctactacatctgcagttacttcctccactgaagcctcgaacccctcaaagtcatccatgagggctggaatcaacttctttaaaactcctgtcaatattgtttttttcttttcccccccgtcagagacacagtcttagtctgttgcccaggctgagtgcagtgatcatagctcactgcagcctcaaactcctgggctcaaactatcctcttgcctcagtctmccaagttgctgggactacatgtgtgtgccaccatgtctggctaatatatatatattttatatttatattttgtagagccggag

SEQ ID NO: 336500 - DNA, 469 bp, Homo sapiens
aatttatatggtaaatacagcaacacatacaggttacatattaattatatatatataaatttatacatatttatttaaatgcatatatatatttatatattcaatctacatgtgttgctgtattcaccataaaattgatatacaattttatatatatatatataattgagtgatccactagttaatatttattttctctccctaatgtcccgatttctatatggaggcaccatctaattgtgcctaacattgcataattgtgcttcagaaaattcttaccttcaagaaaaatgayaaaaatattttggtaactttcaccactaaagacatcatttgtagattttccaattgtgttaatttgaatatataacataaactattactaaatccatagttctttacagaaaaagtcactgttgactggcgatgatataagtgtatatcattatgtatagaaagagaaaagaaa

SEQ ID NO: 336501 - DNA, 595 bp, Homo sapiens
caaaactgggtatccgggattaggctgagccaagggtatgattagagagtttattagggaatgttttttccatgaggtcagttgattctatggaaaagccattgagagggttggtttccaaagctcagaagagagccaaaatttagggatctgagggaagaaatcttaatataggttcattgagttagcagagattcatccagattggtgagtaggaacaagcagttcagttaactatgagatgaataggcatttgtaaagtctgtgtctgtctttattgcaagtaaacaagggrgtcagtcatccaggagtcttacctaaaggtggttctttgtagtaagccctctcatggaacacaaatggaagatttctcagccattgctgtttgccaggggcacagggctcaagtaaagctcagcatcacctatggtcaatgtgtaaacacaagttgccattgttctttctgtttttcattaccctgtcatttctactctttggaatcacttcccaaacaaactacctacatgtaaaccttttactggctctgctttatttaggaaaactagcctaagatagaaaaacaaaggcaatcttt

SEQ ID NO: 336502 - DNA, 583 bp, Homo sapiens
ccttccacgatcctctgcctgcttttatcctaaccaggctggcaactgattacatggtgtccacccaaattgagggtgggtctgcctctcccagtccactgactcaaatgttaatctcctttggcaacaccctcacagacacacccagaaacaatactctgcatccttcaaattgagttgacactcaatattaaccatcacatttaccaaagaaaattaatctgcaattatagaataattattcagcatgattaattttagagcagtatcatgttctcagtaggggatatgcacaactgaagaaatctacaagaattctatttcattcttttctttaytctattatttctcatttcatatttttttctcagagatccttgtttggatattcctcgttttaaatacatgttaaattccacctgttagtcaaactccagctagaaaatatagatcacactagtttttttaacagaaataaattgatataaagaggtttttttaactagatataaaactgttacctaggtaactcgaaaagtaaaaaaaaacatgaaggtatcacagaagtaacaattttaggaag

SEQ ID NO: 336503 - DNA, 633 bp, Homo sapiens
gacgtaattattagcccactatgatctatcatattctagaaaagaaggtttttgtcaatattttttactaaatgtacaatatgactgaatttacttaggataaatcagttataattaatttaacattgctggttaatacttagcaaatgaaagcacactttttgacagttctggatactcatacctatctctctgtgtaagaaactaagtgttttttttaaaaawtatattttccaaagcagatatttgagtgaatatatattctcatatgtgaagttttagagataggataggtagatataggtatctaatatatatttgcatattaaataacaattttattatagttaaataagcttataaattttaaattattcccatataagctggtctagtgctgtcaatctgtttccaaatattatttttcaatgccaaacaaaactttttatgaagtataaaactatgacctattagaaatgtattacataaaaacccattaaactctgtgatcattgctcagaaatatcaaacattaaaaactatataaaattatggattcatctgtcagatgagaagattctattgagaaaaccgctttttttccctgaaagcttcctaattatgtctcttagc

SEQ ID NO: 336504 - DNA, 584 bp, Homo sapiens
aaataaaataaaataaaataataaaaaaataaacaatcaaccaaccaaattagccatgtgtggtagcacatggttgtggtctcagctacccagaaggctgaggatggaggcttgcttaygccccagagtttgagattgccatgagccgtgattgcgccattgcactccaacctgagtgacggaggagaccctgtcacaaaaacaaaacaaaacaaaacaaaaccaaaatccaaacagaagcaattaactgctttggggcaaattacgcttatctaacttagtggaaacttcttaaaatacgtaccactaaaaggaaacagtattctcctacatgtggctagccattatcccagcaccatttgttgaaaaaggtgtcctttccccacttcatatttttgtttgctttgttgaagatcagttggctataagtatttggatttatctccaggttctctcttctgttccattggattatgtgcctattttaataccagtaccatgctcttttggtgactatggccttatagtatagcttgaaatcaggtagtgtgatgactccagatttattctttttccttagtcct

SEQ ID NO: 336505 - DNA, 584 bp, Homo sapiens
aaataaaataaaataaaataataaaaaaataaacaatcaaccaaccaaattagccatgtgtggtagcacatggttgtggtctcagctacccagaaggctgaggatggaggcttgcttacgccccagagtttgagattgccatgagccgtgattgcgccattgcactccaacctgagtgacggaggagaccctgtcacaaaaacaaaacaaaacaaaacaaaaccaaaatccaaacagaagcaattaactgctttggggcaaattacgcttatctaacttagtggaaacttcttaaaatacgtaccactaaaaggaaacagtattctcctacatgtggctagccattatcccagcaccatttgttgaaaaaggtgtsctttccccacttcatatttttgtttgctttgttgaagatcagttggctataagtatttggatttatctccaggttctctcttctgttccattggattatgtgcctattttaataccagtaccatgctcttttggtgactatggccttatagtatagcttgaaatcaggtagtgtgatgactccagatttattctttttccttagtcct

SEQ ID NO: 336506 - DNA, 619 bp, Homo sapiens
tttgacataataaattacttgcatgaaaagtaccaatcacaaaatcagtccgtaagaagataaaatatgcttcataagagtatcttatttcactttcacatttcatgtgattagtatgtttagatttttttctgttgtttgatacagtgtcctgtattaacagaatgtcatctcctaaaataaacatggtcaataaaaaagataaccttgctatcaaccaatggtgaatggaactgtcaaggatcccatttaaatttctttttcattttctcttagaggcytgtgataactgatcaaataattcatatagcaaattgaattatgggaaatggtgtgtattttcaggtcctaaaaaacccattaatagccactgttctgttgtcataatttaagctctaatagtatacagagaaactggactattgtgtaactgataaaatagggcatgtatttcctcacttggactcctgaattctacttaacacatctgcagaaaagctttaaccacctcaccacaatcaccattctttagttttctctcttttttttttatttttatgggcatattcaataaaattctgaaaatcagaaaaatgttacatgtttttaaatttaaaaa

SEQ ID NO: 336507 - DNA, 451 bp, Homo sapiens
tggtctgttttcacattgctatgaagaacttcccgggacagagtaatttataaatgaaaaaggtttaattgacttacatttccgcatggctggggaggcttcaggaaacttacaatcaggagagaaggggaagcacgtaagtcttacaaagtagcaggaaagagagtgtgtgcaggasaactgtcatacttacaaattcatcagatctcatgagaactcactatcacaagaatagcatgggggaaaccacttccataacccaatcacctcccaataggtccctttgacacgtggggattatggggattacaattgggtatgagatttaggtggggacacagagccaaaccatgttagccatatagtcattctaacacatgtgcagtgatatctccttttcattttattttgcatttatttgataattagtgatgttgaaactttttttaaa

SEQ ID NO: 336508 - DNA, 470 bp, Homo sapiens
caccactaccccttgcctaatatatacatattatatataatatatagatataatatgtataaaaatgcttgtatatatattatgtatatatgtatatgtataatgtatatatgtatataatatgtatatattagaacattttttgtawaaatattatatataatacatattacatgtattatacattatatgattctggggattagaacatttatatatacatagtatatacatatatactattatatgtttacatataatacatcataacatgtatacatgatatattatgtatattatatatcattgaaatatattatgtgttatgtatattatatagaaatatatatataacagtatatacatatatactattatatgtttaataatatgtatgtattatatgtattatatataatatgtattaaagtatattacatatgatataaatatatatactagatattaca

SEQ ID NO: 336509 - DNA, 592 bp, Homo sapiens
tgatcttgttgactttgatgatgaagcaaggggtcacaggctaaggaatgtgtgcagcctctcaaagttgaaaagggcaagggaaaaagttctccctaaggcttccataaagaaaatagttctgctgaaaccttgatcagtcttctgaaactacataatgataagataattcgtgttgctttaagccactaaatttgtagtaatttattacagtagttggtcacagaaaattaatacaatggccagacacagtggytcatgcctgcaatcccagcactttggaaggccaagatgggcagatcacctgaagccaggagtttgagagcaacctggccatcatggtgaaactccgtctctactaaaaatacaaaaatttgtcgggcatggtggcatgcacctgtgatcccaggtactcaggaggctgaggcaggagaatcgcctgaacccaggaggtggaggttgtagtgagctaaggttgcatcactgcactccctcctcggcgacagagcaagactttgtctcaaaaaaaaaaaaaaagaattaatacaacaaggcttctatcttaatttctgaaataagcataggttgtgtc

SEQ ID NO: 336510 - DNA, 631 bp, Homo sapiens
tctagtgtatgttttatgcaccttatgtagaaatgaaagataaagttaggggtgctggatgtcccaatatcacctaaccatctggtgacatagattctagtcagtgtcaatgctaggttggtctccttggataagtgacctggatttcttagcttaacaccctttgtgaaaggagggattcatcattatattgtcttccatttgtattttttgagagaagtatacgcccaagacatatgacaaattaaagacaatggaagtggtactggtaaaaataacaataataataataattttaacaaagacataaattatcactaagaaactactagctaacatctctgtgacaattactttaaatgcattgtttcttgtaattctaataaaatgtttgtaagtttcaatattcttattttgctaatgaggtgactaaggcttgtatcagttaagtgacagtctcaggctcacgcaactacttgagctacttaaggtcactgctgagattccaggaaaggagtaatttttccaacacrattccagcaaattgggcagagacacgatttctagaactaacaccctaaaaacagcagaacgacaaaggggtggagactattctgacccttttctcaat

SEQ ID NO: 336511 - DNA, 614 bp, Homo sapiens
aaactcacacaaatcttggaagatctgttcaggctggcatattttaggtgaaattttgcaactgctaaatgattataccataggactggaaagaggtatattcttaataaaataaaagcaatagaataaagccaagctatgctgaacaatgctgcaggacttgttattgcaagggagtggattgttaaacaaaataaaaataataatttcattctagccttatttttttttaaatgtgaagatgaaaggtaatttatatcaagtggagaaaaacaaaaacttgacacttggcagtatagagctataaaatcgcctcttttatttttctatctaatacaaaaattttataagagaaacaaatttgtataaagttgaggcttttgccttacagaataaagaaaggaaaaatactacaacaatmtttaagaaaagctacatattttgatcctttgttaaagacttttcaaacaggatagaagatagaaaaccaggctctccctaagaatattaatgaagagggtaaaaatatgcattcctgctggacatgagtcgaagtaaaaatttaatacaatgcaccgtatctcttagcctaacaatcaaaccttgacaaacat

SEQ ID NO: 336512 - DNA, 542 bp, Homo sapiens
aaagcctacgagaaactgccatttattaaaccattggatcttgtgagaactccctcgctatcaagagagcagcatgggagaaacgtcacccatgatccagtcacctcccaccagattcttccctcgacacttggggattacaattagtggtgagatttgggtggggacaaagagccaaaccatatcaatcagttaagacataaccaactgatagaatcatgtatagaatcttgagaaatttatgttttttttctcaaatcaggacatcaaatgcctgggaatttaaggttttttttttttttttttttcataaaatctagtacccaaccagttaaggacagagccagtactgcaaggcttagcatatcattctttttcccatctgtaaaatgggcttttaatattaatgccttaataaattgaggkgtttaatttactttggatgtattgggggaaaccaaaaaaaaaaggcctctttcttttcacatgcttgctccaagactcaaagaatagaactcgtgaggcttcagatagagccaggc

SEQ ID NO: 336513 - DNA, 542 bp, Homo sapiens
aaagcctacgagaaactgccatttattaaaccattggatcttgtgagaactccctcgctatcaagagagcagcatgggagaaacgtcacccatgatccagtcacctcccaccagattcttccctcgacacttggggattacaattagtggtgagatttgggtggggacaaagagccaaaccatatcaatcagttaagacataaccaactgatagaatcatgtatagaatcttgagaaatttatgttttttttctcaaatcaggacatcaaatgcctgggaatttaaggttttttttttttttttttttcataaaatctagtacccaaccagttaaggacagagccagtactgcaaggcttagcatatcattctttttcccatctgtaaaatgggcttttaatattaatgccttaataaattgaggggtttaatttactttggatgtattggrggaaaccaaaaaaaaaaggcctctttcttttcacatgcttgctccaagactcaaagaatagaactcgtgaggcttcagatagagccaggc

SEQ ID NO: 336514 - DNA, 542 bp, Homo sapiens
aaagcctacgagaaactgccatttattaaaccattggatcttgtgagaactccctcgctatcaagagagcagcatgggagaaacgtcacccatgatccagtcacctcccaccagattcttccctcgacacttggggattacaattagtggtgagatttgggtggggacaaagagccaaaccatatcaatcagttaagacataaccaactgatagaatcatgtatagaatcttgagaaatttatgttttttttctcaaatcaggacatcaaatgcctgggaatttaaggttttttttttttttttttttcataaaatctagtacccaaccagttaaggacagagccagtactgcaaggcttagcatatcattctttttcccatctgtaaaatgggcttttaatattaatgccttaataaattgaggggtttaatttactttggatgtattgggggaaaccaaraaaaaaaggcctctttcttttcacatgcttgctccaagactcaaagaatagaactcgtgaggcttcagatagagccaggc

SEQ ID NO: 336515 - DNA, 542 bp, Homo sapiens
aaagcctacgagaaactgccatttattaaaccattggatcttgtgagaactccctcgctatcaagagagcagcatgggagaaacgtcacccatgatccagtcacctcccaccagattcttccctcgacacttggggattacaattagtggtgagatttgggtggggacaaagagccaaaccatatcaatcagttaagacataaccaactgatagaatcatgtatagaatcttgagaaatttatgttttttttctcaaatcaggacatcaaatgcctgggaatttaaggttttttttttttttttttttcataaaatctagtacccaaccagttaaggacagagccagtactgcaaggcttagcatatcattctttttcccatctgtaaaatgggcttttaatattaatgccttaataaattgaggggtttaatttactttggatgtattgggggaaaccaaaaaraaaaggcctctttcttttcacatgcttgctccaagactcaaagaatagaactcgtgaggcttcagatagagccaggc

SEQ ID NO: 336516 - DNA, 557 bp, Homo sapiens
ctgtttataataacaacaaaagaataaaatatagagacaaatttgacgaaagatgggtaaggatattatataaaaactataaaatataaaagaacttaaataatatctaaataaakgagaagatagcccatgttataatttaaaaggcaaaatattattattgtaccactactttcaacatcaatctgtatatctatgcagttaccattaaaatcccagctggtttcttgaagaaattgatgagattgtaaaaattatatggaaatgcaagaaactcagagtagtcaaaacaattgagagtgtagaaataaactattacattaatggcaagtttattttgacaatgtcaaaaagaccttcaatgggaataaaaaaggtttttcaataaatagtgcaggataactgtatattcatatgcaagaggaggaaattgaaaacatatctcccaaatactaacctgaaatataccaaagacctaaatgtaagaactcaaactataaaattcttgaaataaaacattggttaagtattcattagcttggattagaaaatgattt

SEQ ID NO: 336517 - DNA, 439 bp, Homo sapiens
agtgtcctcatatataaagggggtttataatagaatccacctaataggcctgttctaaggaataattgattgagcattcataatagagactggtttatggtcaggactatgaaactgtttgttaccattattatcattatataactcacatgtgctgtgaattctgaatcatctaacttcttttgtgtatattttaccaatattgttccaatgttcactaaaggaaaaaatgaaatcatgagtttctaggagatcatactcaggatagttaaccatgaaatgacgtggtacacattgtgctaagcrtaggcaaaggacactgctttgattagaggctgacatgtgagagaaaggagatcaaatacaaagccatatttccccatgagccatgcctcaacaaggtgttggccaatacaagaagtcaggagtaggagaagag

SEQ ID NO: 336518 - DNA, 632 bp, Homo sapiens
aaaaacctgttttttaagatctaaaatttaaatttaattgggtatcatgtacttcatctgacaaatgtaaccccagagaagccatcactaggttataaggaattgtaaaaagatatttattgcagcattctttatggatgtcatccattggggcaacctaaatgtccactgccaggaaaattaaaaaagaaattacagttaatctgtcgtgtcaacctttcttttcttcattttttttttcttttataatagttcttttttaaaacttttaagttcaggttacatgtccaggcttgttacataggtaaggttgtttcatggtggtttgttgtacagattattttgtcaccaagatattaaacctagtactcattaattatttttcctgatcctctccttcctcccacccttcaccctaygataggtcccagtgtgtgttgttcactctgtgtgtgtccatgtgttctcatcttttagctcccatttataagtgagaacatgaggaatttggttttctgtttctgtgttagtttgctaagaataatggcctccagctccatgcatgtccctgcaaagacataatctcattcttttgtatgcctacatagtattccatggtattatgtgtacca

SEQ ID NO: 336519 - DNA, 632 bp, Homo sapiens
aaaaacctgttttttaagatctaaaatttaaatttaattgggtatcatgtacttcatctgacaaatgtaaccccagagaagccatcactaggttataaggaattgtaaaaagatatttattgcagcattctttatggatgtcatccattggggcaacctaaatgtccactgccaggaaaattaaaaaagaaattacagttaatctgtcgtgtcaacctttcttttcttcattttttttttcttttataatagttcttttttaaaacttttaagttcaggttacatgtccaggcttgttacataggtaaggttgtttcatggtggtttgttgtacagattattttgtcaccaagatattaaacctagtactcattaattatttttcctgatcctctccttcctcccacccttcaccctacgataggtcccagtgtgtgttgttcactctgtgtgtgtccatgtgttctcatcttttagctcccatttataagtragaacatgaggaatttggttttctgtttctgtgttagtttgctaagaataatggcctccagctccatgcatgtccctgcaaagacataatctcattcttttgtatgcctacatagtattccatggtattatgtgtacca

SEQ ID NO: 336520 - DNA, 632 bp, Homo sapiens
aaaaacctgttttttaagatctaaaatttaaatttaattgggtatcatgtacttcatctgacaaatgtaaccccagagaagccatcactaggttataaggaattgtaaaaagatatttattgcagcattctttatggatgtcatccattggggcaacctaaatgtccactgccaggaaaattaaaaaagaaattacagttaatctgtcgtgtcaacctttcttttcttcattttttttttcttttataatagttcttttttaaaacttttaagttcaggttacatgtccaggcttgttacataggtaaggttgtttcatggtggtttgttgtacagattattttgtcaccaagatattaaacctagtactcattaattatttttcctgatcctctccttcctcccacccttcaccctacgataggtcccagtgtgtgttgttcactctgtgtgtgtccatgtgttctcatcttttagctcccatttataagtgagaacatgaggaatttggttttctgtttctgtgtwagtttgctaagaataatggcctccagctccatgcatgtccctgcaaagacataatctcattcttttgtatgcctacatagtattccatggtattatgtgtacca

SEQ ID NO: 336521 - DNA, 566 bp, Homo sapiens
tgtcaatttctgttcctcttgcaattgcttgtggcatcttcatcatacaagcttatgataattcatagtttacaaaattctttttaatcttttaccaaatctaacagactctgccttctagtaagtccattttgactgataaatatttttattcccactrtctttttctacgtttattacttattttagtgttttttcttttactttgtgggtttgatacagctgtcatttatttcatgttttttcttttattcatttagatattattttatatttttctttttatcctattaatcataaccatcacttccccctgctttcctaattagttacacctgactctccttttattaatggacaaaatactaactatttccttcagaaagacacattgtccttcccacaacatactaatccctccacctcatctctctaccggcttcctcacaaaaagttgtttcacctctatcctactcaattcatacacacagactacccagccaacttcagttattataacagcatagttattagtttccataattttatatgtctacctagtgcag

SEQ ID NO: 336522 - DNA, 546 bp, Homo sapiens
ttaaattaattagatcccattgtcaatttctgttcctcttgcaattgcttgtggcatcttcatcatacaagcttatgataattcatagtttacaaaattctttttaatcttttaccaaatctaacagactctgccttctagtaagtccattttgactgataaatatttttattcccactgtctttttctacgtttattacttattttagtgttttttctyttactttgtgggtttgatacagctgtcatttatttcatgttttttcttttattcatttagatattattttatatttttctttttatcctattaatcataaccatcacttccccctgctttcctaattagttacacctgactctccttttattaatggacaaaatactaactatttccttcagaaagacacattgtccttcccacaacatactaatccctccacctcatctctctaccggcttcctcacaaaaagttgtttcacctctatcctactcaattcatacacacagactacccagccaacttcagttattataacagcata

SEQ ID NO: 336523 - DNA, 566 bp, Homo sapiens
ttttactaaacaaaaatatacatacaggagagttcgtatatcataagtgatttataaattttcacaatccattcatgtaacatgttctcatcacgaagccaagcaataccagctccccaaaaaacacatctcagctcccatccagtaactgcaactctctgcatcttttctaatttctaacagttagttttgcctgtttttgttttctatatatatatgctaatgagcatatgcttttctgtgtctgactttttaagttcaaaattatgtttctgagagtcatctattttctgcattctgtagttgtagatagctcattcccagtgatgtgtagaattctgttatgttaatatggcacagttatttatccattcttttattaaggtaaatttctttttaatttttctagttatagctattatgaataaagtttctmtggacacacttacacatgtctttggtgaatatgcactcatttctctaggatatataaccaaatatgtattgcaggatcagagcatatacatatactcagcttcagtagatactggtagtattttattgtg

SEQ ID NO: 336524 - DNA, 558 bp, Homo sapiens
aatgtaagtgtgttttatctagcaatgtatcatatggctaatacaccacaccaagttgtgttaattctaggaatgattttttaacattaaaaatcaatctgtgtaattcaccacatcaacagaataaatgaaaaataatttgatcactccagtagaagccaaaaaagcactcattcatgatagaaactcagcaaactatgaatagatagggaaatcttcaatacaataaattacagttgagaaaaaaactcagcatgtattatattcaatgataaagtactgcaaatattgtcttattatcaggaacattgtatgaaggatctttaccataacttttactccacttgatactatattatttagctagctaaatagacaaaaaaaattaagtcactagtctaaataattttacatgtaaaatgtrcaaagggatacactattattaagtttttttgccacaatttttgtttgtgtataagattaatttacaaaaaaaatccacatatcatctgcaaagaattagcatatgtgattttaagacatcatttgtaataacat

SEQ ID NO: 336525 - DNA, 558 bp, Homo sapiens
aatgtaagtgtgttttatctagcaatgtatcatatggctaatacaccacaccaagttgtgttaattctaggaatgattttttaacattaaaaatcaatctgtgtaattcaccacatcaacagaataaatgaaaaataatttgatcactccagtagaagccaaaaaagcactcattcatgatagaaactcagcaaactatgaatagatagggaaatcttcaatacaataaattacagttgagaaaaaaactcagcatgtattatattcaatgataaagtactgcaaatattgtcttattatcaggaacattgtatgaaggatctttaccataacttttactccacttgatactatattatttagctagctaaatagacaaaaaaaattaagtcactagtctaaataattttacatgtaaaatgtgcaaagggatacamtattattaagtttttttgccacaatttttgtttgtgtataagattaatttacaaaaaaaatccacatatcatctgcaaagaattagcatatgtgattttaagacatcatttgtaataacat

SEQ ID NO: 336526 - DNA, 558 bp, Homo sapiens
aatgtaagtgtgttttatctagcaatgtatcatatggctaatacaccacaccaagttgtgttaattctaggaatgattttttaacattaaaaatcaatctgtgtaattcaccacatcaacagaataaatgaaaaataatttgatcactccagtagaagccaaaaaagcactcattcatgatagaaactcagcaaactatgaatagatagggaaatcttcaatacaataaattacagttgagaaaaaaactcagcatgtattatattcaatgataaagtactgcaaatattgtcttattatcaggaacattgtatgaaggatctttaccataacttttactccacttgatactatattatttagctagctaaatagacaaaaaaaattaagtcactagtctaaataattttacatgtaaaatgtgcaaagggatacactattattaagtttttttgccacaatttttgtttgtrtataagattaatttacaaaaaaaatccacatatcatctgcaaagaattagcatatgtgattttaagacatcatttgtaataacat

SEQ ID NO: 336527 - DNA, 547 bp, Homo sapiens
gccttcaaagcacttgacatcagggaccctgaacccttcccctgggaggtgagggcctgatcraggcacctcctctgcccactcggggcccagctgtgatttttatcagtaatggccatgcctccacccaccttagttaggagctacttccaaaaagcatccttcagcctcttcctgtcctttagacctgactctctaccagatgtttggagggaagggctggggctctgagccagattccacacctcacgttcagtcacagccctcagctatcttccctccggccactgggctacctctccttcagtcccagaagacaagtctcaccaacccagggagtcaaggaccagcaaaccaaagtggataatggactttttcattcctgtttttcttggcaggagagaagcaaggccactaaaagaggagatggtggagacggaggctcagcagtggtcttgaggggtaaaggacttagatgcccagatgaagagggaaagctgacatctgcagggaacccactttgaggctgaggccatggcaggacagc

SEQ ID NO: 336528 - DNA, 472 bp, Homo sapiens
catcagtttccctctcccattggtcaagactggccctagggaacatttatgtttcctgtaaatgagtgctaagtggactcccacagacatcaggcatggcagctcaaagagactggaaggcagaaaatgaaagacatgagacgggcctgaggccaggcattttcaggttacatcttcatgaagatggtcactgctgcacaatggctggaataagaggtgagactgacaagatatgaagtgggacatgagaggtgtttgacagagtccaacccttgcaccattcaagcccacttaaaatgcccttgtgtaaatttaatttgtcatacggtcgtcttcagtatggcagttggctgcrttctctgcaaacacttgataatccaagcaaattagtgaaacaagttataacacttgctgctacagttgatcccaaagctgtaattgatattcattatctgcttcttctaccactcaa

SEQ ID NO: 336529 - DNA, 565 bp, Homo sapiens
ttcacccttgttgcccaggctggagtgcaatggcacgatctcagctaactgaaacctccgcctcccaggttcaagcgattctcctgcctcagcctccctagcagctaggattacaagcatgcgccaccacacccagctrattttgtatttttagtagagatgggtttctccatgttggtcaggctggtctcaaactcctgacctcaggtgatccaccgtccttggcctcccaaagtgctggcattacaggtgtgagccaccatgcccggccaactgtaattttttaaagcttgcttatggttcataactgtgtccataaaaacttatataattaactatgttaaaatgcagttatagccatgtgacccagcaattccacccctatacccaaaagaatggaaacagggactcaacagatacttgtacatcagtattcattgtagcattattcatactagctaaaagatggaaacaacccaatgtccatcaacaaatacatgataaagtgtgatatatacatatagtggattattcagccaaagaaaagaatgaagttccaatacat

SEQ ID NO: 336530 - DNA, 570 bp, Homo sapiens
ctagaactcctgacctcaggtgatccacctgccttggcctcccaaagtgctgggattacaggcatgagcctctgcacttggccctaaatgtgaaatttaatatactcttgactctggccttggctataataattgacagcaagacagtgcagatggggaagctttagctaggaaatgtttgctaaaccaggatgactcatctaaaatcagacttttctctcttttttccttcagaaaagaaaaacctctttttaattggatggaaactttctacctgcttggcctggggcctctggaagtctgctgtgaatttgtattccctttcacctcctggaaggtgaagtaccccttcatccctttgttactaacctcagtgtattgtgcagtaggcatcacatatgcttggttcaaactgtatgtttcagtattgattgactctgctattggcaagacaaagaaacamtgaataaaggaactgcttatatatgtgccaagcaattatttcatgggaaattaaccacaacttgaagaaagttgccagtggcatcagccatttgtttcagtagaact

SEQ ID NO: 336531 - DNA, 570 bp, Homo sapiens
ctagaactcctgacctcaggtgatccacctgccttggcctcccaaagtgctgggattacaggcatgagcctctgcacttggccctaaatgtgaaatttaatatactcttgactctggccttggctataataattgacagcaagacagtgcagatggggaagctttagctaggaaatgtttgctaaaccaggatgactcatctaaaatcagacttttctctcttttttccttcagaaaagaaaaacctctttttaattggatggaaactttctacctgcttggcctggggcctctggaagtctgctgtgaatttgtattccctttcacctcctggaaggtgaagtaccccttcatccctttgttactaacctcagtgtattgtgcagtaggcatcacatatgcttggttcaaactgtatgtttcagtattgattgactctgctattggcaagacaaagaaacactgaataaaggaactgcttatatrtgtgccaagcaattatttcatgggaaattaaccacaacttgaagaaagttgccagtggcatcagccatttgtttcagtagaact

SEQ ID NO: 336532 - DNA, 570 bp, Homo sapiens
ctagaactcctgacctcaggtgatccacctgccttggcctcccaaagtgctgggattacaggcatgagcctctgcacttggccctaaatgtgaaatttaatatactcttgactctggccttggctataataattgacagcaagacagtgcagatggggaagctttagctaggaaatgtttgctaaaccaggatgactcatctaaaatcagacttttctctcttttttccttcagaaaagaaaaacctctttttaattggatggaaactttctacctgcttggcctggggcctctggaagtctgctgtgaatttgtattccctttcacctcctggaaggtgaagtaccccttcatccctttgttactaacctcagtgtattgtgcagtaggcatcacatatgcttggttcaaactgtatgtttcagtattgattgactctgctattggcaagacaaagaaacactgaataaaggaactgcttatatatgtgccaagcaattatttcatgggaaattaaccasaacttgaagaaagttgccagtggcatcagccatttgtttcagtagaact

SEQ ID NO: 336533 - DNA, 467 bp, Homo sapiens
gtgcacacacaaaaaattaaaggtataacacccactggtcaaattaagtacgtggacaaaaccagaatactctgatactggaattgtggtatgaaacccattcataactgtagtatgaagcccaaaacaaaactatcaaaagttrtattatctacaacaatctgttaataaataggcaatataaaaatatgtaaattgagaaaactaaaaggcaaagtgtggggaagatggagttaaaacatagaattttgttttgtttttgtttttattcttttcattgtgatctaaggtaagttgtcgtctctttaaaataacatgctattatctataagatattttttgcaagcctcatggtaaccacaatgcaaaaactctaatagaaaggaataattttaaaaatgataccaagaaaaagtaacttaaccacaaagaaagacagtaaagaagtaagaaatgaagacagaggt

SEQ ID NO: 336534 - DNA, 478 bp, Homo sapiens
aaaaagtagtaagctttaaataatcaacctaataatgcagctcaaggaactagaaaagcaagaacacacctaaggcaaaattagtagaagaaaagaaataatawaaaccaagcagaaataaatgaatttgagattaaaaaatgcaatcaataaaatgagaaatcacttttttgaaaagataaacaaaatcaacaaaactttagctagactaagaaaaaaagaaggcccaaattaataaaatcaaaaatgaaaaaagagacataacaactgagagcacagaaatacaaggaatcaagcatagataaaacagataaattaatggacacattgatttagtttggatattagtccctgcccaaatctcatgttgaattctaatccccagtgctgaaggtggggcgtggtgggaggtgattgtatcatgggggcagatttcttatagtttaacaccatcctcttgatgctgttcttgcaatag

SEQ ID NO: 336535 - DNA, 558 bp, Homo sapiens
ataattcaatataccatattttattaatactatcttaaataatttttttctttttaaattttattttattttagatwcagtggtatatatgcaagtttgttacatggatgtattgcataatggtgggttttgagcttctagtccaatagtctatcatccaagtaatgaccactgtatgcatatgtaactctttaacccttacctccaagaaatctttattttactttcttttcattgggctatatgatacaaactagatcgtgatcacattaattaaataaattaatataaaacaacaattgaagaaataaataactcacaatgataccatctcaagaaattcaaatgttttcacccctctgggtacctctgtaacccttttatcacaaagataaacctcttgttttacttagtaggccaaatctgccccaagtttcatgttggaagagcaaatcacaattttcaaatgcttctaacagaacaacatattcatgtatctagaaggggactgtgtaacatctagctttactttttaattgctcttcttctgagttggag

SEQ ID NO: 336536 - DNA, 558 bp, Homo sapiens
ataattcaatataccatattttattaatactatcttaaataatttttttctttttaaattttattttattttagatacagtggtatatatgcargtttgttacatggatgtattgcataatggtgggttttgagcttctagtccaatagtctatcatccaagtaatgaccactgtatgcatatgtaactctttaacccttacctccaagaaatctttattttactttcttttcattgggctatatgatacaaactagatcgtgatcacattaattaaataaattaatataaaacaacaattgaagaaataaataactcacaatgataccatctcaagaaattcaaatgttttcacccctctgggtacctctgtaacccttttatcacaaagataaacctcttgttttacttagtaggccaaatctgccccaagtttcatgttggaagagcaaatcacaattttcaaatgcttctaacagaacaacatattcatgtatctagaaggggactgtgtaacatctagctttactttttaattgctcttcttctgagttggag

SEQ ID NO: 336537 - DNA, 589 bp, Homo sapiens
aatggtaatttattatgaataggaatttcctattacttaggcattaccttcttctgcaaaactgtgtttgagcaagctggtgaatgaggaaaaggcatctgggtaggctgtctcatgttagcctgtaaagagagcatattagatgtaatagaaaaatactaacattaaaattaaaaagttgggtttaaagcctatctttttcactttaacaatggggaacattgacacagagcagtagtgttcctcaaagttttatgtgcaggtgaattgcctggagatcttgttaaaatgaggatttagattcactaggcccaatagtctcccagggggtgcttgatgctcctgctttcccatggaccacactckgactagcaaaaggccagagtctttcatttatttgtgttctgccacactgttgacaagaactaggattgaaattcagtattcttcatattacagtccatgaaataggcattgacccatcataaacttctttcttttcccttgaagtatggattctcatcgataagcaaaaacaaattcacaaaacattgccccttatcatttatgttccatgtgtatgttgaaa

SEQ ID NO: 336538 - DNA, 558 bp, Homo sapiens
ataattcaatataccatattttattaatactatcttaaataatttttttctttttaaattttattttattttagatacagtggtatatatgcaagtttgttacatggatgtattgcataatggtgggttttgagcttctagtccaatagtctatcatccaagtaatgaccactgtatgcatatgtaactctttaacccttacctccaagaaatctttattttactttcttttcattgggctatatgatacaaactagatcgtgatcacattaattaaataaattaatataaaacaacaattgaagaaataaataactcacaatgataccatctcaagaaattcaaatgttttcacccctctgggtacctctgyaacccttttatcacaaagataaacctcttgttttacttagtaggccaaatctgccccaagtttcatgttggaagagcaaatcacaattttcaaatgcttctaacagaacaacatattcatgtatctagaaggggactgtgtaacatctagctttactttttaattgctcttcttctgagttggag

SEQ ID NO: 336539 - DNA, 560 bp, Homo sapiens
actaagccatcgctcctgttccctcttcctccagcctctggaaaacacgcatattatttctgtttttgtggatttgtctayttggggcattttataaatatgagattacaaaatgtgtggccttttgtatctgatttctttcacttaagaaactttcaaggttgatacacattttggcttgtatcattacttcatttttgtcgttgaataatattccattttatcaataatcatattttgtttattccttaatcagttgataaacatttgtgttgttttgtttgtcaactataatgaataatgttgctagaatagttctgtgcaagtttttgtggggacatatatttttatttatcttgggtatatacctagaggtaaaatttccgagtcatattgtaattccatgtttaactttatgaggaatcgctaaactgttttccaaagtaagtgtcacatttcaaattcccactaacagtgtttgagggttcccttttcttcacattctcatcaatacttattattttctgttttttcatgttgattgatttttttttaaacag

SEQ ID NO: 336540 - DNA, 607 bp, Homo sapiens
gtctgacaacaattgacagcagaggaagtaaagcagggtaagataagatgaaaccacctttgcaaaaatcataacagtgagaaaattatgacagtaaaagagatctgatctaaacctccaaactatgcttggtcattcctggatgtgggtcaagctaactttgggagaaatttatagtttaagtgataatatcctttcccaaaactaaactgcctttgtaaaactaaagaaaggccaggaggttaggatggattccactaaaatgtaggtgtagttaagtgattagcatccattattctggaggtcatgagatgtgcaacttccccaattattcctgcaaataacattgaagcaagaaattttccctgatccctctgtgggtgggaactggagtgcatgggtgctggcagggacaaactccactaacttgaacctgctttgctcaaccccttgagggagggagtacacaggtgagggggtgcaggagctagagcaagcacttttgggtgccagcaggaatgaactttgtamaggctccatggcagcatctagggggagtgcccatgatccctgaagccccagaaggagcgttacagtaagcactctt

SEQ ID NO: 336541 - DNA, 584 bp, Homo sapiens
aagacgtgggaccctatattaattatacaatatagggcatgtgacatacccattccragcaccagatgtgtattcataaaatggacatcattgagtcttccataaatatagctataagaattatatgtgacacataaggaagagcacatcccatagtgtgtgcgtgacacttgacacacattcaataaatattgctttttgcaattatgattattacttatagtgctttaaaaaatattgatggaggtctgctgaatgtttaattagttccttaaggataggagtcatatttattatttgtgtatgtcacaaaacacagagaagcaccagcagcctcataggtaatgatagagaattgattcataaaaagaaattcataagaaattgatctgggttaaaactgaaccaccagacgtcaatgaaggaacacctactgaaactcctaatcattcagctaattacaggaaaagtgtggtgatggagttgttgctttatgttcatatttaatgtactgtctagttcactcctgcgtataccagaaaagcttagtgcttgtattccatggttttttcgaaagaaagctg

SEQ ID NO: 336542 - DNA, 584 bp, Homo sapiens
aagacgtgggaccctatattaattatacaatatagggcatgtgacatacccattccgagcaccagatgtgtattcataaaatggacatcattgagtcttccataaatatagctataagaattatatgtgacacataaggaagagcacatcccatagtgtgtgcgtgacacttgacamacattcaataaatattgctttttgcaattatgattattacttatagtgctttaaaaaatattgatggaggtctgctgaatgtttaattagttccttaaggataggagtcatatttattatttgtgtatgtcacaaaacacagagaagcaccagcagcctcataggtaatgatagagaattgattcataaaaagaaattcataagaaattgatctgggttaaaactgaaccaccagacgtcaatgaaggaacacctactgaaactcctaatcattcagctaattacaggaaaagtgtggtgatggagttgttgctttatgttcatatttaatgtactgtctagttcactcctgcgtataccagaaaagcttagtgcttgtattccatggttttttcgaaagaaagctg

SEQ ID NO: 336543 - DNA, 527 bp, Homo sapiens
tgatagagaattgattcataaaaagaaattcataagaaattgatctgggttaaaactgaaccaccagacgtcaatgaaggaacacctactgaaactcctaatcattcagctaattacaggaaaagtgtggtgatggagttgttgctttatgttcatatttaatgtactgtctagttcactcctgcgtataccagaaaagcttagtgcttgtattccatggttttttcgaaagaaagctgggggaaatctctcacaaaccttatttccaggggttctaataatgacacttccagctcatacctttcatattatatgtcagtgtagttcttctctaaatgcccaagaaaaattttatgttgactatagaaaataatgattcctggctaaatcaaacacttacaaagccatcagstgttttattcaaagtatcaagtaggtctttaattaatgtgttatatcacatggcaacaacccagtaaacaccaattaagaaatactttgtgtatgacttggaagatttttttact

SEQ ID NO: 336544 - DNA, 527 bp, Homo sapiens
tgatagagaattgattcataaaaagaaattcataagaaattgatctgggttaaaactgaaccaccagacgtcaatgaaggaacacctactgaaactcctaatcattcagctaattacaggaaaagtgtggtgatggagttgttgctttatgttcatatttaatgtactgtctagttcactcctgcgtataccagaaaagcttagtgcttgtattccatggttttttcgaaagaaagctgggggaaatctctcacaaaccttatttccaggggttctaataatgacacttccagctcatacctttcatattatatgtcagtgtagttcttctctaaatgcccaagaaaaattttatgttgactatagaaaataatgattcctggctaaatcaaacacttacaaagccatcaggtgttttattcaaagtatcaagtaggtctttaattaatgtgttatatcacatggcaacaacccagtaaacaccaattaagaaatactttstgtatgacttggaagatttttttact

SEQ ID NO: 336545 - DNA, 622 bp, Homo sapiens
gcacctttacaagctgaaaaaagcaaggaaattaattattctttagagccttcagaaggaacacagccttgccaacaccttgagtttagcctagtaggacctatttcagactctggtctccagaactgtaaaaaagtaaatttgtggtagtagtttgtgataatttgttatagcactatagaaatgtgttacatatcaaaattgaaaaaaatgtagcattatcataaagacaattataggtcagtagaagactgtagagtccagaaaaacatgaaatattgaacaggccattgatttttgacaaaagttcaagactaattcaataagggaaaggagtttttctaacaaatgtcttctttaaaaactggaagtcagtataaaaaaatagacttcaacctctatctcacaacacatataaaattaaattgagataaattgtagatctaaatataatacttagaactactcttgaaaaagcataggagaatatctttgcgaccttakactaagcaaagttttcacagataggatacaaaaagcgttaatataaaaatgataaattagaattaattaaaatttaaaattgtcacgaaaatgaatagtgagcagaaaaccaggaaaa

SEQ ID NO: 336546 - DNA, 181 bp, Homo sapiens
ccattagcataaataaattaaaaccactgacaacaccaaatgttagcagggatgtgaggcaactagaacttatacagtgctgactggagcgtaaaatagatcaacaaatttggaamacagtgtgaaaataatttcactcttaggtattacacaaaagaaatagtaacatatgtgcacaaaa

SEQ ID NO: 336547 - DNA, 508 bp, Homo sapiens
gaaagtctatagccatggagggaatgagagaacaaatgtgttaagtattgaaagatggcttgacatttaattatgaaagatattggtataacgttcagaaatatggttcagtctcccgggaggcagagcttgcagtgagcatatatgcgccactggactccagagagagagactccatctcaaagaaaaaaaaaaaaaaaaagaaaagaaatatggttcaatcttaaaggcatgaggaggaagtatcccaggttccaaatagagtcaaacatgatgaggttaacatatttgtagtaatattttratgattgcatgagatggactggagtagaaagagagttggcaaaatcatcagttagaaagcatatgtaatatttgatgtgggagatgttaagtgggtagaagtgtgaatgaagacaaaagaattgtaattgagaaatatttgaaggccaatttataggccttggtgaccacttaaattggagagtgaaggacatttgcaaaacag

SEQ ID NO: 336548 - DNA, 629 bp, Homo sapiens
actggtagacagcacacatggaaggttcagcaagagccaggcatcagtggataaaaatgaagccttaaagcctcttgcctctggcttagaatccttacaataagccttatacaagcaccatatattggaaattgtggctccaaatttagcagctgaaccattttgttgaattcagatataaagttagaattgtaatacattagacctaaactagtgataaaattgtgtatagctaaatatatttatatatttgaatakgtgtatatgcattatgcatatgcatgtatgtatatatatgcatacacatatatatttagaaaaagtatattaaatatatatattttaaaaaatacttgcccaggatcatagtagttatgatcctgggttatgacagatgtgggatactgtctgtctacttctaatgcgcgtgctatgatatcttaactatattttggaggtgataactgtacatacacatagagaaataattactctgtgttataagcatttactatttgccttggactatgctgaacatatcctatgagccttctaattagactataatgtaggtgtgttaggtgcactttaccaaagaaaaagtgatttcaaaggctcaagtaatttat

SEQ ID NO: 336549 - DNA, 629 bp, Homo sapiens
actggtagacagcacacatggaaggttcagcaagagccaggcatcagtggataaaaatgaagccttaaagcctcttgcctctggcttagaatccttacaataagccttatacaagcaccatatattggaaattgtggctccaaatttagcagctgaaccattttgttgaattcagatataaagttagaattgtaatacattagacctaaactagtgataaaattgtgtatagctaaatatatttatatatttgaataggtgtatatgcattatgcatatgcatgtatgtatatatatgcatacacatatatatttagaaaaagtatattaaatatatatattttaaaaaatacttgcccaggatcatagtagttatgatcctggkttatgacagatgtgggatactgtctgtctacttctaatgcgcgtgctatgatatcttaactatattttggaggtgataactgtacatacacatagagaaataattactctgtgttataagcatttactatttgccttggactatgctgaacatatcctatgagccttctaattagactataatgtaggtgtgttaggtgcactttaccaaagaaaaagtgatttcaaaggctcaagtaatttat

SEQ ID NO: 336550 - DNA, 629 bp, Homo sapiens
actggtagacagcacacatggaaggttcagcaagagccaggcatcagtggataaaaatgaagccttaaagcctcttgcctctggcttagaatccttacaataagccttatacaagcaccatatattggaaattgtggctccaaatttagcagctgaaccattttgttgaattcagatataaagttagaattgtaatacattagacctaaactagtgataaaattgtgtatagctaaatatatttatatatttgaataggtgtatatgcattatgcatatgcatgtatgtatatatatgcatacacatatatatttagaaaaagtatattaaatatatatattttaaaaaatacttgcccaggatcatagtagttatgatcctgggttatgacagatgtgggatmctgtctgtctacttctaatgcgcgtgctatgatatcttaactatattttggaggtgataactgtacatacacatagagaaataattactctgtgttataagcatttactatttgccttggactatgctgaacatatcctatgagccttctaattagactataatgtaggtgtgttaggtgcactttaccaaagaaaaagtgatttcaaaggctcaagtaatttat

SEQ ID NO: 336551 - DNA, 576 bp, Homo sapiens
tcagtaagctatctgtaggagaaaagatcaacattacatgctgattgacttatccattttcacccctccaacaatgtgtgtgtgtgtgtgtgtgtgcgtgagcttacatgtgtgtgtatttgcatgtgtagtgatggcaaattacgtttgagtcatatgctyggtaatggggaaccatctctggaccagacaaatatgattccttctctcacaggacatatgggttggatgttcaactgactacacaggtaaccaactaagtagtattgaaatgaggcttcagagctttgttacttcaagtatgatccctgtgcttcatgtatcagtcacaaaagtaagtgaaatatactgattttgttaaggatgccacacaatgtgatggggttagaaacacaaaattagcaaagcatatgttaagcaggacgaggtatttttttagtaagaaggacagaaacatcatcactcgagaagttatttagaagttgtttgaggagttgtctagaaagaggtgccattaacaccagactttatctgactacagatgatcaatttatctctcagtcatcagggaaaaaa

SEQ ID NO: 336552 - DNA, 512 bp, Homo sapiens
tttcatttccggtaaataagccaactttgagtccaattcttgtcccttccatttttctttattttctgactattgttaagaacttgtttttgctttggcattctttttctctagatagaagtttccttttatatgtactgtttggaatttgttacttttccagggtctgtaactcagtgtatttttagctttggaaaatggtttgccattatcttgtcaaatattacctctctctcattctctttcmtatctctttctgaatgtctgtctatatgtttttaaaccctgctctctttacgctccccatctcttaacctctcttttgtattctccatctcaaatcacagatgaaagcctgaaaatcaaagttgaaattccccgaattttgtaaattcttgcttttgcttggtgttcatttctaattatttgttattttcttatctatccactcattgcatttagcaggttttaaaaatatattttattcagaaaatttttgttgttttgtattg

SEQ ID NO: 336553 - DNA, 512 bp, Homo sapiens
tttcatttccggtaaataagccaactttgagtccaattcttgtcccttccatttttctttattttctgactattgttaagaacttgtttttgctttggcattctttttctctagatagaagtttccttttatatgtactgtttggaatttgttacttttccagggtctgtaactcagtgtatttttagctttggaaaatggtttgccattatcttgtcaaatattacctctctctcattctctttcatatctctttctgaatgtctgtctatatgtttttaaaccctgctctctttacgctccccatctcttaacctctcttttgtattctccatctcaaatcacagatgaaagcctgaaaatcaaagttgaaattcmccgaattttgtaaattcttgcttttgcttggtgttcatttctaattatttgttattttcttatctatccactcattgcatttagcaggttttaaaaatatattttattcagaaaatttttgttgttttgtattg

SEQ ID NO: 336554 - DNA, 544 bp, Homo sapiens
agtaactgctactgtctcatattttataaacaaaaaaataatattcttcctacacaaagcttaaagcaaaatcccatttaggaacaaattttaacaatttactggattaatcccaattttttttaaatttttcaatcctctaattttaattaagttactaaagggacatacaaataattgaatcaaaaaataatgaactattgattcttttgttgtgaattcattctactccttgacatatactttgaggccacagtgcactatatgagcaaattataktacatgaagctgaatttgaagaagaaatgacagctatgattttctcattaaaatcagcctaaaacaatgtttgcattcagaattaaccaagcattttcaatatgtcttaattttctaatactgactgccactggaaatctatagagtatataagctagaaacccctcactgtcactcagaatttttgcaagattttaaacaaacagacataattaaaaattaaaaatatacagaggaaaatacaaaattgttgccaaagttatag

SEQ ID NO: 336555 - DNA, 552 bp, Homo sapiens
ggagctctaaataaaattataagcctcccaactgactgaacagattatctcttgaccaaagagaccccagattaatcttgaaaaataagttctcagcctcaacagaatgaggggtcagacaaatctcattatacctcttcccttgctaaccacaattaggctgtcttccctaagagcctattgggaacaagctttttcaaaagacaccactactggtatcaaccaaccacttcacgctgcccccttttttttttttttttttttttttgcctggtaagagaccwctgaccatagaatggttctggccagataacagaggatgcacagtgagagtttttgcattctctgcttcaccttttgatgtcagagggccaaaacctccatcctcatatcatgctgactccaccattttttgatcatgggtgccgtggaaaggcaaaaagctcgactgcatacatgcaggtctccttttttcataaatgttaatgactcttcttataggttattgaatatgtatatttgtccatgctgctcagcataaactcctgttcc

SEQ ID NO: 336556 - DNA, 609 bp, Homo sapiens
tttcatacaaattccttctgcttggagacaagctccttttcttttgggggtctcaagaacatcttgactctaagaagatttgtttttgtatttcctcagatggaggccagttgtgagttctaaatattcaggtttacaaattggtaggaaatagagatggaaaattaaggctgatatatmtagtgagcaaaccattctctgaaaataagttatttcagaaaacatgtattagtcacctccattatgctatataaatagcattttaaccccatagaatgaagtagatgttttattctcatcatgtttagcattaggcttgtgtagctgtagattttctaaagtcacaaagcttgaaaataaatttggacataattttctttgtttttcaccctgaattcttcctccctccttgtttcagaaatataagcacacagaaatatatatatatctgaactataggccatatatagtatatatatttagagatagtcttcacaaatatggttcatatttagaaattgatattgcaaataaagctttagcagaaatagttttgtgtgtgtgtgtgtgtgtgtgtgtgtgtgtgtatgtgtgtgtgtgtatttaagt

SEQ ID NO: 336557 - DNA, 566 bp, Homo sapiens
tctccaatcatcttcatctgaattcccataatgcaaaacttatttacttattgatgtcccgtaagtcatataggttttgttcactcttttatattattttgttattttcccgctatgaatgggttattttaaaaaacctttcttcaaatgcasagattatttcttctgcttgatctaatctgctgttgaatttctcaattgcgtttttaaaaaatgttattcattgaattcttcaaccccaagatttctatttggttcttattttatgatatatctctttgttcaaatttatctttcagatcatggattttttcctgatttcattgaattatctatctgtattctcttgtatctcactgagtttcgttaagatcattattatgaattcgttttcaggtaattcataaattttcattttaggagggtcaattactaaatatttattgtgggctatttttgtggtataatgtactctagctttttcatgtttcttgtgtttttgttttggtgtctgtacatctggtggaactgttatccctttcaattttatagtgcaggttttgtag

SEQ ID NO: 336558 - DNA, 547 bp, Homo sapiens
aagcttcccttacttttgtgtgatatttactytttattctcttgtcatatacatagttctatacgctttcagaacttgggacagataaaatacaaagttccgcctaccatgtgtcatctgccctactttcttttctaaaagaggccacaatgaacctcaggaggactctggaaaagtaaaagaaatccacgaaatatctggccttttggctgtgggagactgagtcaaggaaattgaggtccttttcatcctaagagctgtgttcatgggctgattgcaggactcatgcacctgcaccttggtactgggcattcattcataatcgctctaatatttggagtgtctgctctgattggtaggtacttcgtggtgtcctcgctgttcagaattttaagtattattcatcactgattgtgtgagccacaaatcctttttagtgctgctttacaccacacctgctacctacccccaaagcccatattagtaaaagagaaccgctatggtttggatgtggtttgtgcccatcaaaactcccatcaaaacttaa

SEQ ID NO: 336559 - DNA, 547 bp, Homo sapiens
aagcttcccttacttttgtgtgatatttactctttattctcttgtcatatacatagttctatacgctttcagaacttgggacagataaaatacaaagttccgcctaccatgtgtcatctgccctactttcttttctaaaagaggccamaatgaacctcaggaggactctggaaaagtaaaagaaatccacgaaatatctggccttttggctgtgggagactgagtcaaggaaattgaggtccttttcatcctaagagctgtgttcatgggctgattgcaggactcatgcacctgcaccttggtactgggcattcattcataatcgctctaatatttggagtgtctgctctgattggtaggtacttcgtggtgtcctcgctgttcagaattttaagtattattcatcactgattgtgtgagccacaaatcctttttagtgctgctttacaccacacctgctacctacccccaaagcccatattagtaaaagagaaccgctatggtttggatgtggtttgtgcccatcaaaactcccatcaaaacttaa

SEQ ID NO: 336560 - DNA, 547 bp, Homo sapiens
aagcttcccttacttttgtgtgatatttactctttattctcttgtcatatacatagttctatacgctttcagaacttgggacagataaaatacaaagttccgcctaccatgtgtcatctgccctactttcttttctaaaagaggccacaatgaacctcaggaggactctggaaaagtaaaagaaatccasgaaatatctggccttttggctgtgggagactgagtcaaggaaattgaggtccttttcatcctaagagctgtgttcatgggctgattgcaggactcatgcacctgcaccttggtactgggcattcattcataatcgctctaatatttggagtgtctgctctgattggtaggtacttcgtggtgtcctcgctgttcagaattttaagtattattcatcactgattgtgtgagccacaaatcctttttagtgctgctttacaccacacctgctacctacccccaaagcccatattagtaaaagagaaccgctatggtttggatgtggtttgtgcccatcaaaactcccatcaaaacttaa

SEQ ID NO: 336561 - DNA, 547 bp, Homo sapiens
aagcttcccttacttttgtgtgatatttactctttattctcttgtcatatacatagttctatacgctttcagaacttgggacagataaaatacaaagttccgcctaccatgtgtcatctgccctactttcttttctaaaagaggccacaatgaacctcaggaggactctggaaaagtaaaagaaatccacgaaatakctggccttttggctgtgggagactgagtcaaggaaattgaggtccttttcatcctaagagctgtgttcatgggctgattgcaggactcatgcacctgcaccttggtactgggcattcattcataatcgctctaatatttggagtgtctgctctgattggtaggtacttcgtggtgtcctcgctgttcagaattttaagtattattcatcactgattgtgtgagccacaaatcctttttagtgctgctttacaccacacctgctacctacccccaaagcccatattagtaaaagagaaccgctatggtttggatgtggtttgtgcccatcaaaactcccatcaaaacttaa

SEQ ID NO: 336562 - DNA, 590 bp, Homo sapiens
aagagatttcaacacagtatctaatgcacaataaaagccgtatagccaaattcacagcacttattttcatgtatattttcagcacttattttcagctatgtctaatttcttaatgtttttgataaaaaggtttggagagatgctcagagaggtgaaaacctttggatttcttgagtttatatctctgtgagtgatttatactttctattatttctatatttctatttattcaattaatgtgatcactatgtagtttgtatcaaactgaatgatcataatgaactttttcataattctccattgaagtgtctctttttagttttcacaatcaggtctgttgctatcttttcagagcttagggcaggaatacaaatggagacctccataccatctaacctaatatttgaaatttgtaagtcaagctaacaagtcataaaactttctatcatactttcttggcaaatataccttcatagaaactgaagagtgggtttaaatttataatctcagactccttcaccaaaagcatakagaagtaggaggactgccacctggcccttggtctccacagcctgcttcctttgtgttct

SEQ ID NO: 336563 - DNA, 564 bp, Homo sapiens
ttccactgaggatgatctcagaaatcatttagaatttgcctcagaattttccctcaataggtagggaagtggagtatttatccacagtacttctgtctcttattttgttgaagtttgccccgtggcattaaatctttcacatctaggcagccctgagcatggactgcataagttcttgtagcactataggaagttctcagacagagaagcacagagacacgggctcttaaagtcagcatgtgtgtgaaatgggacagacatcaatagtgtctgcaggycttaaaatttccacattctgcttttcttccaaaaaaaaaaatatgcaaatcctgttcgtacattttttgcctacagttgtgcctacggttgtactaggctctgtaggcatttgtttaaaactgttgtccacatctttacctcaggatcaatatgtctcctttggctctaaattttttcactcagacacttaatcatctggctataaatcaccttcccagcacccctatcaactagtcttctaccccctgtacacaacatcatgctcaactactcataatttttcta

SEQ ID NO: 336564 - DNA, 577 bp, Homo sapiens
gtttcatcataaactttttaagggtagaaaatggagtatgatttatgttgctctctctaatattgtgtttcaaactgcagatttcaacccattgatgggttctaaaattgatatagtgagttgatcactttgtatgaagtagattataataataagttattaattagagtaggatagaaaatatcagaatgcctcacacttattaaggttaaatattgtttcatgaaatcttctttgagtcctrtaaatatatttctgagcatacactgtgtcacaatgtaaaatacatttttactgtttcttggagtgaaaattttcaaaattattgcctgagcttttagctcagttacttgtacataataggcagatcaataataatttttaataacagaatgaatttctatgaatgtctttatttattttaaaacaccttatgcatactcagtaatgcatatctctgcagatagattttactgtcaaaataacattgataaccattacttcacttcaggaatgatagaagagttaacattgacaattcagagaaaaatgctgttaaagtgtaaagtatctttac

SEQ ID NO: 336565 - DNA, 572 bp, Homo sapiens
gacttatttcaaatttaagcagcccagtgcctggcacaagtatacactcaataaatgttgcctgaaaaaaatggttttttttataataaagtttcatttcattcatacattaaagtatcacattattctacatacacttgctgtcaaatgtgcttcctctccttttccaaatctcctcattaagatacttgaaatgaatcacaggccttcagggatcatcaacactctttcaaatgacacctcaaatagcttaggttcccctggcagtcagtmtatggcaatttcacacatgccccactcatggtgtgtacttcttatcagattcacaaactaccctgatcatattcagattatacttaactgctcttcttgctacactgccttttctattctggctcaactgccaagtagctgaaaaagagtatatgaagttgagaacaggggaaaccagggagctgtcttctatcctgcagtgtcgaaattttacatctataaattatctatgtcattttccaagctgagctaaagaaaaacaagcaatcaaacgacaacagcaaaaccagttatatctg

SEQ ID NO: 336566 - DNA, 597 bp, Homo sapiens
tttctttgaaattaaggtttatggtcatgatgggaaacctttgatttaaaaccaagtggattaaaaaaaaacacctctaaccataattaaggagtcaagcatatccagagaatcttttcttttataatactgtcattttctgcagtaagtccatatttacagtcactctacagtatttcagcatttaatctcattttaaattactaacaaagacattttgggcaatagcaagctagcacattgccatagcaaaatmgtagttaaatataaatactaaaaacacatgaagaacacaaccattctccttcctggcagagctggtacccaggatagaggctgaaaggcaagacagtcactttctcagcatcctgggtctagggcctgggtatatgactcactttggcccaatggaccttcagggaagttcactaggtaagggggctggaggctggagtacagagctctgagagaggtttacctccatacttttggacatgactatgcatttaaggatgcctgtctggaagttgctgcagccacctggaccaccatgaatggcaacatcactgtcacattgaggataacaaacctgaacca

SEQ ID NO: 336567 - DNA, 611 bp, Homo sapiens
acatagctagggagaaagatataatctctgcctgtatggtgataacattgcaataaagggcacacacaaaaaccaaatttgtatatctctgagatgtgtatagaatcccagattccctccccttttttttaatggagaatggaatakaagtccacaagtgctgaagatgaaacacaccatttgaattgagctaccaattgtctggtgattcatttagatttagaggtatctaatatttttacatcaaactacagaatatccttacaacctacacacattgcaacttctggtaagaaaaagaaaaaataggaagaatagatgaagccgaaggcaggtaaagtgagagagtaaggcacatgcctgttttagagtagacctttggaatgggtcttacaagaggctttcagaattctggcctgtcacagggaagtgtgagccatgcattcattcatctacttggtcatgcattcattcatttacttgttcatttttttctattcagcattttctgtgtttggtaatgtgccctaagagtaaaagaacttcaggatctatttaattttaatctgtagtcataagacagctggaatacactagaattggatccaaaa

SEQ ID NO: 336568 - DNA, 611 bp, Homo sapiens
acatagctagggagaaagatataatctctgcctgtatggtgataacattgcaataaagggcacacacaaaaaccaaatttgtatatctctgagatgtgtatagaatcccagattccctccccttttttttaatggagaatggaatataagtccacaagtgctgaagatgaaacacaccatttgaattgagctaccaattgtctggtgattcatttagatttagaggtatctaatatttttacatcaaactacagaatatccttacaacctacacacattgcaacttctggtaagaaaaagaaaaaataggaagaatagatgaagccgaaggcaggtaaagtgagagagtaaggsacatgcctgttttagagtagacctttggaatgggtcttacaagaggctttcagaattctggcctgtcacagggaagtgtgagccatgcattcattcatctacttggtcatgcattcattcatttacttgttcatttttttctattcagcattttctgtgtttggtaatgtgccctaagagtaaaagaacttcaggatctatttaattttaatctgtagtcataagacagctggaatacactagaattggatccaaaa

SEQ ID NO: 336569 - DNA, 631 bp, Homo sapiens
cttctttcgtgttgttataaactgtctgtaccgacaaacaacccacctcactttggattaaatcctatttctcttgcctattcaagaacattgttctagaaattcttcctctctctcatatgttaacaaccattccctctgtactagattattcccatcggcatgtaaatatatttcttccctcttcgaaacaacaacaaccatcacaaaacaaacctacttaatcgtattcttggatgtctcttcttccctatataaactcacaccataggtgttcccatccagtgtcaagactacgtaccatgtatatatcctgagaactgccaaatttgtatattcaatccagagtcccctgaactccagactgttatatccaaaccatttatatatttccttttgatggctaactggcttcttaaaccaaacacagtgaaagcaaactccctttactcccaaacctgcttttcccacagtcttttctatatcaattgttgatactccaataatattaattgctaaggccaaacactttatctttgatgtgttgttttctcctacaccacacatctattccttgagygaatctcatgggacattaaaaatatatcgacgtctttagcagtggctcacg

SEQ ID NO: 336570 - DNA, 528 bp, Homo sapiens
aacacaggctgcaggggattacaggggctatttttccaatcgctgcctgtcaggcaagccttgggccgagagccaggctcagaccaggaacaaggaaacagcaagtcttcagcaggaccccagtggcttatgagaggggctgggcccagtcacctgacactccacctattgactttggatgtctactccaaaaatcttcctccttccgcttctccctagccagggtgtggaggtaacagcacataggacaatggttgggtaacctcaaaaaaggtttgctcatatgtccctgcctctcagaaacagagaatcaaagctctttggagtgtagagactagacccaaagaagaattgagagagcttttggaccatggctgactttccatttccagggcctttttctttctttttttttttttaaatattttttttatttatttatttttgagacagactctcgctccctcgyccaggctggagtgcagtggcacaatcttggctcactgtaacctccacctccagggttca

SEQ ID NO: 336571 - DNA, 528 bp, Homo sapiens
aaaaccacctctagatatggcataaaagtattcttcagttggaacaaagtcccacctagaaaaacatacagaagatctacatatatatacatgtgtatgtttgtatatgttatctctggtagtagggtgatgcgtgatttgcatccttccatcattttttctgattttttgatttaaaataagcacttatgactttttttttgagatggagtctctcgctcttgttgcccaggctggagtgcagtggcacgatctcggctcactgcaacctcccccttcctgggttcaagcaattctcctgcctcagcctcctgagtagctgggattacaggcacccgccaccackcccggctaatttttttatttttagtagagatggggattcaccatgttggccaggctgttctcaaactcctgatctcctgatctacccaccttggcctcccaaagtgctaggattacaggcatgagctaccgcatccagccacacttatgacttttataaagagaacaatctcatgttggcct

SEQ ID NO: 336572 - DNA, 615 bp, Homo sapiens
attaacaaatgcctacttttttaagttaaagactaaattaaaagatacatgaaaatgctcagcacaatacctagcaaatagcaagagcttaatacattttggcaattattgtgtacattgattttaaattttctccctgaccttttaatgctagtaagtggaatacctcaaatcctgatacctatcaaggataatctacctgtaggaaaaaccagcttccaggcaaaaatcatatctgttaagagtggtctctgtacctggtgggaaatttcttcccaaaaatagtagattcttctacctactctcttctccctacgaatgccaagtatcagtccatgaaaggagacaagagttgctaaactggttggtagtttgttttgtttttatttcataatatgtattgccaccttccatgaacagycaaaagagagcagaggaccaaatgacagagtgcatgctctctcctttcaagctgtccagtcactctttcatcaggacacggacctcttaggggatgaatggttttatttcccccagaaataaattaggccaaggagattgttggcaagcactggggcgagactggcccaactacagcatccctagcctggggac

SEQ ID NO: 336573 - DNA, 615 bp, Homo sapiens
attaacaaatgcctacttttttaagttaaagactaaattaaaagatacatgaaaatgctcagcacaatacctagcaaatagcaagagcttaatacattttggcaattattgtgtacattgattttaaattttctccctgaccttttaatgctagtaagtggaatacctcaaatcctgatacctatcaaggataatctacctgtaggaaaaaccagcttccaggcaaaaatcatatctgttaagagtggtctctgtacctggtgggaaatttcttcccaaaaatagtagattcttctacctactctcttctccctacgaatgccaagtatcagtccatgaaaggagacaagagttgctaaactggttggtagtttgttttgtttttatttcataatatgtattgccaccttccatgaacagccaaaagagagcagaggaccaaatgacagagtgyatgctctctcctttcaagctgtccagtcactctttcatcaggacacggacctcttaggggatgaatggttttatttcccccagaaataaattaggccaaggagattgttggcaagcactggggcgagactggcccaactacagcatccctagcctggggac

SEQ ID NO: 336574 - DNA, 616 bp, Homo sapiens
aatgaatgaatgaatgaatgaaatccactacaactactttgattcttatttttgtagcatttacggtttgtatctcaaaactcagcagatgaacttgcaagaatggaggctttatctgttctgcttatggctgaatccccactgtctagaacagtagctggcacttgggagttctcaatagataatcttaaatgttgtttaccatgaaaaagttcttgtactctagttttaagaacggaaatgaattgttctttgattttggtaacaagtcaccatcagaaccagttttaaactcaacccaatcaatcaatgacaattttgcattagtaaccatgctttggaaagcctaaaactctatatagcaacagcagtgtttggttttgagtgacagcatcttacaagcacagctctcacttgtttaccaagcaatgaagcaacttttggtttaaggcattgagctgtggtctctctctctctctctttttttttttgatggaaagatgatggttcttagctataatggcaaaagacaaataacttattataatcttatacagggttctaagcatatasaaataccaactatattaatccacaaaacaagcaggagagggag

SEQ ID NO: 336575 - DNA, 530 bp, Homo sapiens
tatagaaaaccttttgcctttcttataattttctacagtttcctctactcttgtattctcatcaatcactcagttattttgcacatgtctagttctatgtaatttctacatttgtctgtataatgttatctttktaaggtgacttatctctgtacaccataggcactattttccctactttacaagaggaaattgagtgtcagaaagagcctacttacttttcttcttactaacgaatgaaaaggcaatgttaatcatcatttttccccctaatcggtgagctatgaaaaaaatttggggtccatgcaaaatcatcattattatgtttaaactgtaactctacaaatttatgatctcctaaagctttccaagatgtagtatctctctcatctgttggcagatttttcaaatgaattcctactcaatgaaaaacagttcatttacattttaaaaaccttgtcagtattaaccagattattccttctaattattctttaggtctgatcttaggaaactatttgaagccatct

SEQ ID NO: 336576 - DNA, 590 bp, Homo sapiens
ttttaagtaactacatgaggtatgtttaagcaacatttaagtaacatgaatgaggttttgtttttttttttttttttgagacagagtctcgctctgttgccaggctggagtgcagtggcgcaatctcggctcactgcaatctccgcctcccgagttcaagcgattcttctgcctcagcctcccsagtagccaggattacaggcgggcacctccacaccctgctaacttttgtatttttagtagagacagcgtttcaccacgttggccaggatgggctcgatctcctaacctcgtgatccgcccgcctcggcctcccaaagtactgggattacaggggtgagccccttccctctcccggccaaggtgtgttttaagtagactacctgcttgaggtagatttatgatacatacccattatcgtgacaatgaaataaaatgaaatgtgatgagaaagtgaaccattccacaccatcacctaagcagggcagcacacgaagacctgatgtaacgctgacaatgttaacacccctgtgtgatgtccaactaaaaataataaaaaaagaaggtgaaaaatttccccatgctgtcaa

SEQ ID NO: 336577 - DNA, 590 bp, Homo sapiens
ttttaagtaactacatgaggtatgtttaagcaacatttaagtaacatgaatgaggttttgtttttttttttttttttgagacagagtctcgctctgttgccaggctggagtgcagtggcgcaatctcggctcactgcaatctccgcctcccgagttcaagcgattcttctgcctcagcctccccagtagccaggattacaggcgggcacctccacaccctgctaacttttgtatttttagtagagacagcgtttcaccacgttggccaggatgggctcgatctcctaacctcgtgatccgcccgcctcggcctcccaaagtactgggattacaggkgtgagccccttccctctcccggccaaggtgtgttttaagtagactacctgcttgaggtagatttatgatacatacccattatcgtgacaatgaaataaaatgaaatgtgatgagaaagtgaaccattccacaccatcacctaagcagggcagcacacgaagacctgatgtaacgctgacaatgttaacacccctgtgtgatgtccaactaaaaataataaaaaaagaaggtgaaaaatttccccatgctgtcaa

SEQ ID NO: 336578 - DNA, 590 bp, Homo sapiens
ttttaagtaactacatgaggtatgtttaagcaacatttaagtaacatgaatgaggttttgtttttttttttttttttgagacagagtctcgctctgttgccaggctggagtgcagtggcgcaatctcggctcactgcaatctccgcctcccgagttcaagcgattcttctgcctcagcctccccagtagccaggattacaggcgggcacctccacaccctgctaacttttgtatttttagtagagacagcgtttcaccacgttggccaggatgggctcgatctcctaacctcgtgatccgcccgcctcggcctcccaaagtactgggattacaggggtgagccccttccctckcccggccaaggtgtgttttaagtagactacctgcttgaggtagatttatgatacatacccattatcgtgacaatgaaataaaatgaaatgtgatgagaaagtgaaccattccacaccatcacctaagcagggcagcacacgaagacctgatgtaacgctgacaatgttaacacccctgtgtgatgtccaactaaaaataataaaaaaagaaggtgaaaaatttccccatgctgtcaa

SEQ ID NO: 336579 - DNA, 436 bp, Homo sapiens
tctgatggggtccaaaaaaaagaggcctctgggggactgcctgtcacagggtaggggagaggatataaagatgggagaggtcttggcttcataatcacccccaggtgctttggggctacacttccagaagcttgggatcaatgggagaaataaaatcyttccgtaaataatgcagtgtgtttctataaggctcgcacacacataagaaggaaaagggacaggaactattggttgaaacaggaaaggaaagtaattatctgctggtttggcagtgatttatcgagaatgggaaagcaaatcattaccaatcaagaaagctcttaggatagggcaaggcagagaggtaaaactattagatgcattcagaaagaatttatgtgctttcttcatcagcaaccccatacattttactgtatttttaaaaaattgtcattac

SEQ ID NO: 336580 - DNA, 436 bp, Homo sapiens
tctgatggggtccaaaaaaaagaggcctctgggggactgcctgtcacagggtaggggagaggatataaagatgggagaggtcttggcttcataatcacccccaggtgctttggggctacacttccagaagcttgggatcaatgggagaaataaaatccttccgtaaataatgcagtgtgtttctataaggctygcacacacataagaaggaaaagggacaggaactattggttgaaacaggaaaggaaagtaattatctgctggtttggcagtgatttatcgagaatgggaaagcaaatcattaccaatcaagaaagctcttaggatagggcaaggcagagaggtaaaactattagatgcattcagaaagaatttatgtgctttcttcatcagcaaccccatacattttactgtatttttaaaaaattgtcattac

SEQ ID NO: 336581 - DNA, 436 bp, Homo sapiens
tctgatggggtccaaaaaaaagaggcctctgggggactgcctgtcacagggtaggggagaggatataaagatgggagaggtcttggcttcataatcacccccaggtgctttggggctacacttccagaagcttgggatcaatgggagaaataaaatccttccgtaaataatgcagtgtgtttctataaggctcgcacacacataagaaggaaaagggacaggaactattggttgaaacaggaaaggaaagtaattatctgctggtttggcagtratttatcgagaatgggaaagcaaatcattaccaatcaagaaagctcttaggatagggcaaggcagagaggtaaaactattagatgcattcagaaagaatttatgtgctttcttcatcagcaaccccatacattttactgtatttttaaaaaattgtcattac

SEQ ID NO: 336582 - DNA, 436 bp, Homo sapiens
tctgatggggtccaaaaaaaagaggcctctgggggactgcctgtcacagggtaggggagaggatataaagatgggagaggtcttggcttcataatcacccccaggtgctttggggctacacttccagaagcttgggatcaatgggagaaataaaatccttccgtaaataatgcagtgtgtttctataaggctcgcacacacataagaaggaaaagggacaggaactattggttgaaacaggaaaggaaagtaattatctgctggtttggcagtgatttatcgagaatgggaaarcaaatcattaccaatcaagaaagctcttaggatagggcaaggcagagaggtaaaactattagatgcattcagaaagaatttatgtgctttcttcatcagcaaccccatacattttactgtatttttaaaaaattgtcattac

SEQ ID NO: 336583 - DNA, 441 bp, Homo sapiens
ttttcaggctcttctgatgaaaatgactagatttttcaactcatcagcctacagtgaaagtcaccaataaacaaggtctgctcagtcatacagaatgcaatcagcatattattatctcactctgaaatattcatagagagccaaggatggaaaagcagagatcaaaacaaatagtataaggaattcagaggctacagattcagtgcaggaaacaaacaaaaataaattttaaaaatatatttgataccstagggtaacatttttaaaagggtcacataaatggaacaagaataagtagccattgtataataaaagaggaaaacacagtaataaacaactctcataaattcaaagaaaattgttagcagatataaaaaggagttcattaaggaagagtaaaaataaatttaagagaatctcacataaagaaatacgttttag

SEQ ID NO: 336584 - DNA, 617 bp, Homo sapiens
attcattacacatttattgagttaaaaaataaacacaaagcaacaatcctagagacttttaccatctggcctatgctaggagccwaaataattggtgcagaaaatgagtgccatgagttctggggaaagagagttagctgtgggttgaaggagtcagaaggtctccaaggtagagaggaatcaagttgggttttgatagtttggttgaagctggccaggtggaacaaatgaaaaagatgcttctgcctgagagaattggctttgtcaattactttgtggtgggaataaacgagttggttgagcaaggagattaaataagatatggttcaagaacctggaattcatagctagtctggctaagttagaaccttgccttcaccatttagtaatttataaataatattggctgcatcacttaatctcaatttcctcaagtccaaaataggaatagtactagtgcttgattcatggggttatttcaagtatctacaaaacaaatacagaggaacaacctaacatattgtaagtgctcagtcaataatcagctgctattatcacttccttcttccaacctatattgagtgcctgctatagagaaagcagaagagtaaattgag

SEQ ID NO: 336585 - DNA, 499 bp, Homo sapiens
tataccaatcatatgtgatattttaatgtaacaggaccacttgtatgcaacaacaacaacaaaaacaaggctgggcacagtgactcatgcctgtaaccccagcactttgggaggccaagccggggggattacttgagcccaggatattgacaccagcctgggcaacataggataaccccrtaactacaaaatgaaaataaaaataaaaagttagctgggcttggtggtgcacatctatggtcccagctacttggggaggctgaggtgggaggatcgcttgggcttaagaggtcgaggctgcagtgagcattgcttgcaccactgcactgcggtctgggcaacagagcaagaacctgtctcacaaaaacaaacaaacaaacaaaaacggcaataaaaaaaacaaaccgccgttaacacatactaagtgcttaccatgggatgtatgactttacaatggattaagttctcatctatttatgaagtgtaattatgaagcaag

SEQ ID NO: 336586 - DNA, 499 bp, Homo sapiens
tataccaatcatatgtgatattttaatgtaacaggaccacttgtatgcaacaacaacaacaaaaacaaggctgggcacagtgactcatgcctgtaaccccagcactttgggaggccaagccggggggattacttgagcccaggatattgacaccagcctgggcaacataggataaccccgtaactacaaaatgaaaataaaaataaaaagttagctgggcttggtggtgcacatctatggtcccagctacttggggaggctgaggtgggaggatcgcttgggcttaagaggtcgaggctgcagtgagcattgcttgcaccactgcactgcggtctgggcaacagagcaagaacctgtctcacaaaaacaaacaaacaaacaaaaacggcaataaaaaaaacaaaccrccgttaacacatactaagtgcttaccatgggatgtatgactttacaatggattaagttctcatctatttatgaagtgtaattatgaagcaag

SEQ ID NO: 336587 - DNA, 588 bp, Homo sapiens
atcagaaggaaattctgacatacactacaacatggatgaaacttaaggacattatgtattcaagtcttttgcccatttttgaatcagataaatcatgtttctttgtcactcttgagttttaggaattctccctatatttgggatgttaatcccttaacagatatgtggtttacaaatattttttcccattctttgggtactattgatagtgtgtttcccttccttccttcctttccttccttccttcctttttttcttccttccttccttttccttctttccttccttttttccttccctcyttccttccttttttcttccttttttccttccttccttccttatttttttcccttttgtcccttccttccttccttctttctttccttcctcccttccacccttcttcccttcctcctgccctccccacttgcctccctctcccctatcccccaagacagggtctctttctatcacccaggctggagtgcagtagcatggtcatagcgcactgcaaccttacactcctggttgcacattatgaatgtatttaatacctttgaattgtacacttaaaaatggttaaga

SEQ ID NO: 336588 - DNA, 586 bp, Homo sapiens
catgttttgttgagtatttttgcattgatgttaatccaggatattggcrtgacattttcttttttgttgtgtctctgccaagttttggtatcaggatgatgctggcctcatagaatgagttaagaggagtcccttctcccaaattttttgaaatagctttagcaggaattatgccagctcttttttgtacatctggtagaattcaactgtgaatctgtctggtcctgggctttttgttgttgttgttggtaggctgtttattactgatacaattttggagataattttttatctgttcagggattcaatttcttcttggctcagtattggaaagaggtttgtgtccaggaatttattcatttcttctacattttctagtttatgggcatataggtgttcataatattctctgatggttatttgtatttgtggggttagtggtaatattacttttgtcatttctaactgtgtttatttatttggaccttcagtcttttcttctttattaatctatttatttcaccaattaaaaaaataacaactcctggattcattgctcttttgaatggttcagttctccctcagt

SEQ ID NO: 336589 - DNA, 586 bp, Homo sapiens
catgttttgttgagtatttttgcattgatgttaatccaggatattggcgtgacattttcttttttgttgtgtctctgccaagttttggtatcaggatgatgctggcctcatagaatgagttaagaggagtcccttctcccaaattttttgaaatagctttagcaggaattatgccagctcttttttgtacatctggtagaattcaactgtgaatctgtctggtcctgggctttttgttgttgttgttggtaggctgtttattactgatacaattttggagataattttttatctgttcagggattcaatttcttcttggctcagtattggaaagaggtwtgtgtccaggaatttattcatttcttctacattttctagtttatgggcatataggtgttcataatattctctgatggttatttgtatttgtggggttagtggtaatattacttttgtcatttctaactgtgtttatttatttggaccttcagtcttttcttctttattaatctatttatttcaccaattaaaaaaataacaactcctggattcattgctcttttgaatggttcagttctccctcagt

SEQ ID NO: 336590 - DNA, 579 bp, Homo sapiens
gttttttcactttgttctctgaatcattgatatgatttttttttgcaatttcagtttggctctttattgctctttaatgtggatttttattctgctgttgtcttttgtttttttcataatcattattttagccatctcatcctgcagcctctttatcttagctgatagtatgttcattcctactcctgaatgagaggyggcccatataggctattgattaccaaaacacagaatgtgtaggtttctgcaggccccaaactctttcttcttggatactggatcaattatatcactatttgatcaatgtcaaatctccttcttatatcaacattgatagaaatctatgtcaatgtcctaatctaataggcattgtctagcagactttctattatgtagtagattcttttttcctgagatggaactttctcccctctgcattgactcaatcaatggggaaatacatgaaaaaaataaaaatactttttgcttccacctataatatattgctgaagagctacacttccttagagtatagtactactgtcttatctcactttttctcccaattttttttttttt

SEQ ID NO: 336591 - DNA, 579 bp, Homo sapiens
gttttttcactttgttctctgaatcattgatatgatttttttttgcaatttcagtttggctctttattgctctttaatgtggatttttattctgctgttgtcttttgtttttttcataatcattattttagccatctcatcctgcagcctctttatcttagctgatagtatgttcattcctactcctgaatgagaggcggcccatataggctattgattaccaaaacacagaatgtgtaggtttctgcaggccccaaactctttcttcttggatactggatcaattatatcactatttgatcaatgtcaaatctccttcttatatcaacattgatagaaatctatgtcaatgtcctaatctaataggcattgtctagcagactttctattatgtagtagattcttttttcctgagatggaactttctcccctctgcattgactcaatcaatggggaaatacatgaaaaaaataaaaatactttttgcttccacctataatatattgctraagagctacacttccttagagtatagtactactgtcttatctcactttttctcccaattttttttttttt

SEQ ID NO: 336592 - DNA, 603 bp, Homo sapiens
gctaacatttaattaagtttgattctttaagataaaacattatggatgacttttaatgaaaagagttatgcaacattttatttttaaggtaaacaggtttgaaggggtcattttggaatttatgatagaaggatccttaagaccagttactctaacaccgttattctgttaatgaggacactaaacacataaaaattatgttctcaaaattaataagggaaaagctggcttatgttctacttctgaagctttacttgggagtaccatgaactactaaataaatgaatttattcctgaaaatataatagtggatacgtttcrttaacatttatatatcaatagtagctttttgggcataatgtctcaccttcaaaattaattcattagctcatgtttagggggaattttatgttggctcagagcgtaatatttgacttaggcagactaatatgtagattaccaacctatcagatctgtgcctgggccctaccttaggtaatacagccctttacttagcaaattaaaatcagacttatttcaggcctctgtcaatatattgaatgcatatattgaagaaagtttcgagtttagttagtttatgta

SEQ ID NO: 336593 - DNA, 444 bp, Homo sapiens
ttcctcctgccccagccatgtaagatgtgccagcctctcctgtgccttctcccatgatcataagtttcctgagacctccctagaagcagaagccagtatgcttcctgtatagcctgtggaaccgtgagccaataaaacgtttttctttataaattaaaaaaaaaaaaagaatcaaccaacataagcccctgtgtcaataggctaaaaaagaaaaatcatatgattatatcaattgatgcagaatagcatttgrtgcttaatataacgccaattcaaataataaaaatatctcaggaaactagaaataaaggagacctttctctatttgacaaagaacgtatttttaaaaacctatagcaaacattgtacgtaatgatgaaagactggatgagttctctctaagattgcagacagggcaatggtgtccaatcacatcattccctt

SEQ ID NO: 336594 - DNA, 532 bp, Homo sapiens
cagtttaaataaagaatgcatcttttacattaaatttgtcttctacagcagctccctagaaatctgagcatgagcaaaagaaaacaaaattatgtgtttccttactcacatatggcttctaacattgttctactttaaatattaattttacctaattagtccttgcctcaagaacatacaataaaaataaatcatcctagtgacaaatccaagttatgttttgtgtttgttttgcaattattaagttaaatattatattggcatattttgaaacaactacttgggtagctgctactattatyttctcattacttctcattttttcagttttaaatggaagctgtaacaaattatgcccaaacttttacatgcaaatttttattttttattttaatagactatattatagagcagttttaagttcacagcaaaattgagtagaaggtacagagatgttccatatggttgcagtggtttaaaaaaccattgaggtgttttttaataaagaacagttactgtggttggcccagtg

SEQ ID NO: 336595 - DNA, 614 bp, Homo sapiens
ttatctatacacctttttgttcactacagttgaaattctttaaatattactaaagtattctgagaatttcaattactgtttattatagttgagatcagtaccaggcattatttctatggctttcaagagatttcaacaacaagatgctactatcttagtctgtttgggctgctataaaaaatgccataaactgggtgtttataaaaaacagaaatgtctttatcacaattctggaggctaggaagtccaagatcaagcagcaggcagatttggtgtctggcaagaacccactttcgggttcataggtggcgtcttctgtctgtaaccttacacagcaggagaggacttagttcattctactgttatgactcctatatactctcttacattrtccacactgatcctctctggccatcaaccacattaaactttcctaagttagactccactaatctatattaagtaaacaaccgtaattattgaattagttcttcttgagagggaagtggctactaattcatctcaaaacctacctgtgtattattggagagatttttaatacctggaagaatattttgacttgttggagaaaacattttgaagagaggagaaag

SEQ ID NO: 336596 - DNA, 550 bp, Homo sapiens
attaaatgtaatagattaggctaggagtgagtcatattctactctacctccattggacctacaatctaattagactgttmacagtaaatttgttgccttgttagttaggttcgctccaagtgctaattttatacaccaaataaacaatgccaggcacatcctgacaatggaatatttgtgtttgagaaagacaattcacatcaaagaacaatcagtctggaatgtaggaaatggcttaatacatctgtgatgagacatcagcttatgtactgaagaggtcgtaacactcaataagtcgggcttttacagtcaaagcaggggaatagacaacaagagaactgagagtatgaagctgagtgggcttgtatattagtaagtcctgcgaggagataagttgggaatgagaatttctctacctgtctttcattctttatgagaaaagaaaacttaggtacccatctcctgtgggaaacttaactctgcttagaaagttcttcctgtgataactgtatcccaaatgtctgacaaaagatgccctacaaaattgcat

SEQ ID NO: 336597 - DNA, 550 bp, Homo sapiens
attaaatgtaatagattaggctaggagtgagtcatattctactctacctccattggacctacaatctaattagactgttaacagtaaatttgttgccttgttagttaggttcgctccaagtgctaattttatacaccaaataaacaatgccaggcacatcctgacaatggaatatttgtgtttgagaaagacaattcacatcaaagaacaatcagtctggaatgtaggaaatggcttaatacatctgtgatgagacatcagcttatgtactgaagaggtcgtaacactcaataagtcgggcttktacagtcaaagcaggggaatagacaacaagagaactgagagtatgaagctgagtgggcttgtatattagtaagtcctgcgaggagataagttgggaatgagaatttctctacctgtctttcattctttatgagaaaagaaaacttaggtacccatctcctgtgggaaacttaactctgcttagaaagttcttcctgtgataactgtatcccaaatgtctgacaaaagatgccctacaaaattgcat

SEQ ID NO: 336598 - DNA, 631 bp, Homo sapiens
agattgtttcttactaagtagttaaacaaatctgagggatttaacacaaacaagggagcagaccaatttacagtttgtggtttatatttatcatcatctgctatcagattaatattaaacttgaaaattcaaatgcatgacagaagtagcaaaataggactttatattgtaatgaagtgcatatttacaagaataaatataattgcaatgtctgtactcaaatggatatttagtaaagaattatggtcaatagcaaaggcctcttgaaaatttcaaagtgacatgataaatgtagaattctgctactgttataatagtcaaatctttattatttgcttgctgtctttctcttactmtctcaaaagtctgtgtctatgtacatattctttagttgtgtcagagtaaattagttaccttaaatctacactattgacttactagtgactcagttgtccctacaccagaaataaatcatctaaggttaaaagtttcttcataaatttgcaaattaatttattaaaaacttgagacatttttaaaaaattaatatttatttatgtttattatactttaagtcctgggatacatgtccagaacgttcaggtttgttacacagatatacacatgctat

SEQ ID NO: 336599 - DNA, 581 bp, Homo sapiens
aaatcatctaaggttaaaagtttcttcataaatttgcaaattaatttattaaaaacttgagacatttttaaaaaattaatatttatttatgtttattatactttaagtcctgggatacatgtscagaacgttcaggtttgttacacagatatacacatgctatgatggtttgctgcacccatcaacctgtcatctacattaggtatttctcctaatgctatccctccccttgccctcacagtgaagacttttttcatattcaaaaaatactaaataacttggggtttattttaaaaaaatacatagttgatatagttcggatgtttgtctcatccaaatctcaagatgaaatgtaattcccaatattgaatgtggggaatagtggaaggtattggatcatgggatggatccctcatgaatggcttggtacccttctcacagtagtgagtgagttctcgctctgagttgatgccagatctggttgttcaaaagagtgtggcatcctcgttcccccacggcttgctcccactgtagccatgtaatgcactcctccaccttcactttctgccatgattggaaat

SEQ ID NO: 336600 - DNA, 665 bp, Homo sapiens
ggattcagtaatatggttgacgttaaaaaggaaaataatgcatttggatcttattcaaaatgactgtttaggaaattaatagaaatattaaccaaatatraacattctgtgattattacctccataaagctaaaaagcagtgatcttttgaagaaatgataatgtgatcacagaggttaattgctgaactgttttattccattcaaaattcctacatattctatcgaatgactcaatcagagaatgcctcgttttacaaaaatagcatttgatacaataaaactcctaataaattatttcattgcaaacatggtatctctgtatgaggcagcaatagcctggagagcgtctaatgcatatgagtgttatatttcatagcagagaatgtcaacataataatgttaaattattaaaatcattgaaagtatttaatagccaaattttctataaaatcctcaaagccaaattcatatttgagttttatatgagtgaggtcttgtcacctaattcttcaaatagctgtggtctaataagagttgttcatgtgatcatatttaatgacatatggagaaattatttgctctatgtactggtgtatattacagtaatgaacactacaaaatatcattatcacaaaggaaatttgcatttgtattcattttaaa

SEQ ID NO: 336601 - DNA, 620 bp, Homo sapiens
ttggcttaaagaaattatgtggctggtttgatcttctatctagaccccctaatacttttccataatagcaacaaggcattttgctttcttatcatttgtgtgttcactgaagtagcacttttaatttccttccagaactttttctttgcattcacaatttagctaaccatggtgcaagagatctagctttgggcatgtcttggcttttgacatgttttcctcattaggcttaataatttctgccttttaatttaaagtgagagacatgtgactcttcctttcagctgaatagttagagacckttgcaaatcatcaatggccctgtttcaatattgttgtgtctcagtgaatagagacccaagggaaaggaaaaagatggtggaatggcaggctggtggagcagtcagagcgcaacatttatcaagtaagtttgcgttttgatatgggtgcagtacagtgttccaaaagaactacaatagtaacatcaaagatcactgactgcagatcaccatgacagatataataacaaaaacatttgaaatattgcaagaattaccaaaatgagacacagaaatattcatgtgagcacacgtcagtgggcacacaatgttagaaaaatg

SEQ ID NO: 336602 - DNA, 620 bp, Homo sapiens
ttggcttaaagaaattatgtggctggtttgatcttctatctagaccccctaatacttttccataatagcaacaaggcattttgctttcttatcatttgtgtgttcactgaagtagcacttttaatttccttccagaactttttctttgcattcacaatttagctaaccatggtgcaagagatctagctttgggcatgtcttggcttttgacatgttttcctcattaggcttaataatttctgccttttaatttaaagtgagagacatgtgactcttcctttcagctgaatagttagagacctttgcaaatcatcaatggccctgtttcaatattgttgtgtctcagtgaatagagacccaaggraaaggaaaaagatggtggaatggcaggctggtggagcagtcagagcgcaacatttatcaagtaagtttgcgttttgatatgggtgcagtacagtgttccaaaagaactacaatagtaacatcaaagatcactgactgcagatcaccatgacagatataataacaaaaacatttgaaatattgcaagaattaccaaaatgagacacagaaatattcatgtgagcacacgtcagtgggcacacaatgttagaaaaatg

SEQ ID NO: 336603 - DNA, 573 bp, Homo sapiens
tggtttttttcatgccttttgacttggacatagactggaattctaccwttgtctctcctgggtcttcagtttgcctactatagatcttgggatttctcagcatccatgaccatgtaagccaaatccttatagtaaatctctctctctgtaggaaatatatacattttctattggttctattctctggaaaacccagactaatacaattgggaaataagaaacagcggaacaaggcactggggaaaatagtgtagttctgtcttaaatgggccaatgtttttttcaagtttgatagaaagatattttcagacatccaagaagtcagaaaatttataagccaaatacatttcattttttcttttctgcaagtctttagaagtaagtaaaacctgaacattatttttgttcaacatttattaaatgttagtctatattctgtggcatattcaagattccctgttggctttaggtttattggcctgacttgttctgaattcatggatgttctctgctttctcccttcctgtgtttcaactcctcaatacccagtgggacactaggtgtcaggagagg

SEQ ID NO: 336604 - DNA, 462 bp, Homo sapiens
atccaattttcttggagtcactgaactttggtttgtccctctatgaatctgggctaaacatgcccgctctgcctatctcaggaagttcttttcacaattattgaattcacaagtgagactgtcctttgtaaggagctctaaaagttaaagatttcttttatctgatgaaacatttgtcaatcaaaaaatctaaaaaaatttagtggactctgattcctacgtttagaccttttcaatataatgctatgaataaactgaggttaatataaaataaaattacagtgtaaacttataaaataatctgatataaaattgcagataaggatacaaaagtgagaaatgaagcttgagataaagtacattaaaggtcctctattttggagagaggctgttwtttggggagtactgatactgtcgcaagtgtatatgttaatactagttaccttagttaaaaatttgatc

SEQ ID NO: 336605 - DNA, 586 bp, Homo sapiens
atttttattacatttttcatgaaatgaatgaaccttaagtgttaggggctctcacatgtacagattctttcccttgttagcagtggcctagcctatgtgttttgacagtcayatgtttctacaactttgcaaaaataaaataatttaccacattgaatgaatgccagtgacttgttccatgcaactttcttcactgtactttccctcataccagatacctttggagtggccacgtgtatttgctgatatccaggcaggagaaagtgagtcagagatacagcctgtagtttggatttcataggatgtagtgatgtgcttcacagtcatttccacatgtagttaagttgtttctagctgttccagtgtagaaatgactactgggaaacctaccaccttccactgtcaactcacttagtattgtgacagaaagaggcaagagcataggttgctttcaaacttgaatgtgtcctaaggtgtgcataactggaaacttgtgggtggtgggggagacgaaaggacttgaatacatggagctgaaaactagtctgtggaaaattcctccaaacttcatttaggtacaattgta

SEQ ID NO: 336606 - DNA, 586 bp, Homo sapiens
atttttattacatttttcatgaaatgaatgaaccttaagtgttaggggctctcacatgtacagattctttcccttgttagcagtggcctagcctatgtgttttgacagtcatatgtttctacaactttgcaaaaataaaataatttaccacattgaatgaatgccagtgacttgttccatgcaactttcttcactgtactttccctcataccagatacctttggagtggccacgtgtatttgctgatatccaggcaggagaaagtgagtcagagatacagcctgtagtttggatttcataggatrtagtgatgtgcttcacagtcatttccacatgtagttaagttgtttctagctgttccagtgtagaaatgactactgggaaacctaccaccttccactgtcaactcacttagtattgtgacagaaagaggcaagagcataggttgctttcaaacttgaatgtgtcctaaggtgtgcataactggaaacttgtgggtggtgggggagacgaaaggacttgaatacatggagctgaaaactagtctgtggaaaattcctccaaacttcatttaggtacaattgta

SEQ ID NO: 336607 - DNA, 586 bp, Homo sapiens
atttttattacatttttcatgaaatgaatgaaccttaagtgttaggggctctcacatgtacagattctttcccttgttagcagtggcctagcctatgtgttttgacagtcatatgtttctacaactttgcaaaaataaaataatttaccacattgaatgaatgccagtgacttgttccatgcaactttcttcactgtactttccctcataccagatacctttggagtggccacgtgtatttgctgatatccaggcaggagaaagtgagtcagagatacagcctgtagtttggatttcataggatgtagtgatgtgcttcacagtcatttccacatgtagttaagttgtttctagctgttccagtgtagaaatgactactgggaaacctaccacyttccactgtcaactcacttagtattgtgacagaaagaggcaagagcataggttgctttcaaacttgaatgtgtcctaaggtgtgcataactggaaacttgtgggtggtgggggagacgaaaggacttgaatacatggagctgaaaactagtctgtggaaaattcctccaaacttcatttaggtacaattgta

SEQ ID NO: 336608 - DNA, 586 bp, Homo sapiens
atttttattacatttttcatgaaatgaatgaaccttaagtgttaggggctctcacatgtacagattctttcccttgttagcagtggcctagcctatgtgttttgacagtcatatgtttctacaactttgcaaaaataaaataatttaccacattgaatgaatgccagtgacttgttccatgcaactttcttcactgtactttccctcataccagatacctttggagtggccacgtgtatttgctgatatccaggcaggagaaagtgagtcagagatacagcctgtagtttggatttcataggatgtagtgatgtgcttcacagtcatttccacatgtagttaagttgtttctagctgttccagtgtagaaatgactactgggaaacctaccaccttccactgtcaactcacttagtattgtgacagaaagaggcaagagcataggttgctttsaaacttgaatgtgtcctaaggtgtgcataactggaaacttgtgggtggtgggggagacgaaaggacttgaatacatggagctgaaaactagtctgtggaaaattcctccaaacttcatttaggtacaattgta

SEQ ID NO: 336609 - DNA, 574 bp, Homo sapiens
ggataaggtgtctgcaagctggagacccagaaagccagtggtataattcagtgcaagtgtgagggcctaagagccagaggagtcaatggtgtaaatcccagtccaagggcctgagaagatgaaatgagatgtcccagcccaaatagtcatgcaggaaggaaaaaagaggtgaatgctgtcttcctctgcctttcgttctattcagacccttgacagattggatgatgcccactcacactggggagggccatctgctttactgagacctccaattcaaatgttaattgcatcctgaaacatgcttgcagtcacacccagaaataatatttcatatggacaccctatggctagtcaagttggcaygtaaaattaactgtcacactaattaaccatttttagacaatgcaagtaaaggtagggattcagccatcaagggcagaaattaagaagaaatgcctttggtgaatgctattggagtattacagcacttttccaatgtagcttctgagagggtaggaagggaattcttagcccttccctctattaaagctagagagtttttaagggctaacaa

SEQ ID NO: 336610 - DNA, 553 bp, Homo sapiens
atgcgttgctcattagaatctggtggaggaatttaagtaaatgaactcattttcgtaggacacattcagaataagagatgaagccctcagctggactgctcagatgcatacttcttagttccccttgtcatcctctggatccccaacatcctttctcttattttagagagagtgatcctgtctaaaatagctgtttttgacacttggacctttttgttctagtattcacagagcttttttaaatattagaacagcataactttatttgaagaattaatgtcagaggtaaaaagaaattcatgtttcacaggaatggctgtcactgaatgtatagcagaagttggtgtataaatacaccagctcccccaccycttgagcgggataactctgtggcccaggctctatattagatcccagagtctcccagtggatccaactccttttgataattatgctaaatggctggataatgtacttgtttttttggctgccttccatcacctatctcttgtccttactcctgtatattattttctgagataacacttcaaaa

SEQ ID NO: 336611 - DNA, 553 bp, Homo sapiens
atgcgttgctcattagaatctggtggaggaatttaagtaaatgaactcattttcgtaggacacattcagaataagagatgaagccctcagctggactgctcagatgcatacttcttagttccccttgtcatcctctggatccccaacatcctttctcttattttagagagagtgatcctgtctaaaatagctgtttttgacacttggacctttttgttctagtattcacagagcttttttaaatattagaacagcataactttatttgaagaattaatgtcagaggtaaaaagaaattcatgtttcacaggaatggctgtcactgaatgtatagcagaagttggtgtataaatacaccagctcccccaccccttgagcgggataactctgtggcccaggctctatattagatcccagagtctcccagtggatccaactccttttgataattatgctaaatggctggataatgtacttgtttytttggctgccttccatcacctatctcttgtccttactcctgtatattattttctgagataacacttcaaaa

SEQ ID NO: 336612 - DNA, 640 bp, Homo sapiens
aggaaagaaagcttaaataattacttaaaaaaccatgttcagtttaaggaaaccagcatattttcccattctgttcaccaacagtttcctcatgaaagataatgactaaaaaagaaattcaagtggcatgaaagatgaaaaggctatctcacacctcagaaaccagagcttgacataaagctggaaagctatgtcttgtgtaacttattttttgaggtgtctcmagtagtgatatttttgttgcccaaacactgtctttgcagaactaccagaaaataatgaacaagaaagttgtgtatacttacatgccatctgacgactggggtggatatacgtggcattttttttgcttcatgggagaaataatcccaacaaaaaagcgtctgttgttagggtggggagaagaaacctggtaacagtgtgtaccaggaatcattgctttttatgtgattttaaaaattagagtatcagcaaattaggagcatgttacaggcagaacttttttctcccacataacttgtatgctgaagccctaatccccaatgtgactgtatttagagattggactttagggaagtaattaagatcaaattcagttgtaagagtgtaccaatgtctttaaaagaagaggaagaggcat

SEQ ID NO: 336613 - DNA, 640 bp, Homo sapiens
aggaaagaaagcttaaataattacttaaaaaaccatgttcagtttaaggaaaccagcatattttcccattctgttcaccaacagtttcctcatgaaagataatgactaaaaaagaaattcaagtggcatgaaagatgaaaaggctatctcacacctcagaaaccagagcttgacataaagctggaaagctatgtcttgtgtaacttattttttgaggtgtctcaagtagtgatatttttgttgcccaaacactgtctttgcagaactaccagaaaataatgaacaagaaagttgtgtatacttacatgccatctgacgactggggtggatatacgtggcattttttttgcttcatgggagaaataatcccaacaaaaaagcgtctgttgttagggtggggagaagaamcctggtaacagtgtgtaccaggaatcattgctttttatgtgattttaaaaattagagtatcagcaaattaggagcatgttacaggcagaacttttttctcccacataacttgtatgctgaagccctaatccccaatgtgactgtatttagagattggactttagggaagtaattaagatcaaattcagttgtaagagtgtaccaatgtctttaaaagaagaggaagaggcat

SEQ ID NO: 336614 - DNA, 640 bp, Homo sapiens
aggaaagaaagcttaaataattacttaaaaaaccatgttcagtttaaggaaaccagcatattttcccattctgttcaccaacagtttcctcatgaaagataatgactaaaaaagaaattcaagtggcatgaaagatgaaaaggctatctcacacctcagaaaccagagcttgacataaagctggaaagctatgtcttgtgtaacttattttttgaggtgtctcaagtagtgatatttttgttgcccaaacactgtctttgcagaactaccagaaaataatgaacaagaaagttgtgtatacttacatgccatctgacgactggggtggatatacgtggcattttttttgcttcatgggagaaataatcccaacaaaaaagcgtctgttgttagggtggggagaagaaacctggtaacartgtgtaccaggaatcattgctttttatgtgattttaaaaattagagtatcagcaaattaggagcatgttacaggcagaacttttttctcccacataacttgtatgctgaagccctaatccccaatgtgactgtatttagagattggactttagggaagtaattaagatcaaattcagttgtaagagtgtaccaatgtctttaaaagaagaggaagaggcat

SEQ ID NO: 336615 - DNA, 640 bp, Homo sapiens
aggaaagaaagcttaaataattacttaaaaaaccatgttcagtttaaggaaaccagcatattttcccattctgttcaccaacagtttcctcatgaaagataatgactaaaaaagaaattcaagtggcatgaaagatgaaaaggctatctcacacctcagaaaccagagcttgacataaagctggaaagctatgtcttgtgtaacttattttttgaggtgtctcaagtagtgatatttttgttgcccaaacactgtctttgcagaactaccagaaaataatgaacaagaaagttgtgtatacttacatgccatctgacgactggggtggatatacgtggcattttttttgcttcatgggagaaataatcccaacaaaaaagcgtctgttgttagggtggggagaagaaacctggtaacagtgtgtaccaggaatcattgctttttatgtgattttaaaaattagagtatcagcaaattaggagcatgttacaggcagaacttttttctcccacataacttktatgctgaagccctaatccccaatgtgactgtatttagagattggactttagggaagtaattaagatcaaattcagttgtaagagtgtaccaatgtctttaaaagaagaggaagaggcat

SEQ ID NO: 336616 - DNA, 580 bp, Homo sapiens
taatggcaccctgagggccgtctggtctccagaactgtgagaaaataaatttctgctccttaagccacccagtctgtggtattttattatggtagatagaacaaacagagaggataaggaaatatatttcctttttaaagaagaacaacatggtttgagaacctgccacctactgagaattagctgtgcactgaatcccaggtgtagatcaatgacacttacttaaagatttcaatataagatggaaaatagggaaaaggaagcccaccaaagtgcgcaatgccaagcacagaatttggctcatcttatttaagaggaaaaaagaaaccataagattgataaaaaagctatttataaaaatatgttaatattacatgaacttcacagaatgtacctcttcaaataagtgctgcagcattcagaaaaaaaatgttagaaatacctatggaattcttaatrcaatgttgaaaaatatagtgcctctgggaaaacagagaggaacaatgaagatatacataaaaataatcagataaaatgagaaagaaatttagatacatttaacatgtgatgccagaaataa

SEQ ID NO: 336617 - DNA, 613 bp, Homo sapiens
gtcataagctttttgccattggagagtcttgccttgaggttgatggttgctaaatgatcaaggtggtgattcctgaagattggggtgtctgtagcaatttcttaaaataagacaatgatgaaatttaccaagtcaattgattcttcctttcatgaatgatttctctgtagtatgcaatgttgttagatagcgttttacycacactagaacttctttcaaaattggagtcagtcctctcataacctgctgctgcattatcaatgacatgtatataattgtctaaatcctttgttttcatttcaaccatgttcacagtatcttcaccagtagtaggctgcatctcaagaaaccattttctttattcacttataagaagcaactcctcaaccactaaatattcatcatgagattgcagcaattccatcccatttttaggctccacttctaattctagttttcttgctacttccaccacatctgcagttacttcttccactgtagttatttccagatgcttcctgaactcctcaaagtcatctttgaaggttggaatcaacttcttcaaaactcttactgatgttgctattttgacccactgttatgaatcatgaat

SEQ ID NO: 336618 - DNA, 558 bp, Homo sapiens
agggtcatttgctgaagggacattgtgagaagtgacctagaaggcaagagctgagccttccatcacgcccgcataagggccgcttgagggctccttggtcaagcagtaacgccagtgtctgggaagacacccrttacttagcagaccgcaaaaggcactctcctttccttggaggagtcagggaacactctgctaccagcttcttgtggaaggctagatattatccaggcctgcccgcagtcatcaacaggcctaaacccctccctgtggtgctgtgcttcaatggtcgtgttccttgtccactttcatgttcctcccgtactcctggttcctctttgaagttcgtagtacatagcgatagaaggaatactgaaagtcttaaagttttttatctttcttataagtgcatagaagaaaacgctgacgtatgctgccttctctctctctgctttggctatctaaaagggaagggcccccgtcctttgatcacgtgacttgtttcaccttttcaatcacttagaaaagtcaccctccttaccctgcccccttgtcttgtat

SEQ ID NO: 336619 - DNA, 558 bp, Homo sapiens
agggtcatttgctgaagggacattgtgagaagtgacctagaaggcaagagctgagccttccatcacgcccgcataagggccgcttgagggctccttggtcaagcagtaacgccagtgtctgggaagacacccgttacttagcagaccgcaaaaggcactctcctttccttggaggagtcagggaacactctgctaccagcttcttgtggaaggctagatattatccaggcctgcccgcagtcatcaacaggcctaaacccctccctgtggtgctgtgcttcaatggtcgtgttccttgtccactttcatgttcctcccgtactcctggttcctctttgaagttcgtagtacatagcgrtagaaggaatactgaaagtcttaaagttttttatctttcttataagtgcatagaagaaaacgctgacgtatgctgccttctctctctctgctttggctatctaaaagggaagggcccccgtcctttgatcacgtgacttgtttcaccttttcaatcacttagaaaagtcaccctccttaccctgcccccttgtcttgtat

SEQ ID NO: 336620 - DNA, 468 bp, Homo sapiens
  misc_feature (1)...(468): n = A,T,C or G
nnnnnnggtaaagaaaacactctcccatctcttggtggacacttcttgcataaccttctccctttgagtgtgagaagaacttgcagatgttctgggattttattcacatgatttgcttatgctatatgggaatgatgtgattaagatccctaattagactggacagggtggctcatgcctataataccagtacattgggaggctgagtaakgaggactgcttgatcccaagagtttgagaccagcctaggcaatagaatgagaccttgtctctacaaaaaaaaatttaaattaaaaaaaaaaaaaacacttagctgggcatagtggcacatatctgtagtcccagctgctcatgaagctgacgtggaaggactacttcggcccagaagttcaaggctgcattgagctgtgatcatcctactgcactccagcctggatgacagagcaagaccctgtcctttaaaataaa

SEQ ID NO: 336621 - DNA, 468 bp, Homo sapiens
  misc_feature (1)...(468): n = A,T,C or G
nnnnnnggtaaagaaaacactctcccatctcttggtggacacttcttgcataaccttctccctttgagtgtgagaagaacttgcagatgttctgggattttattcacatgatttgcttatgctatatgggaatgatgtgattaagatccctaattagactggacagggtggctcatgcctataataccagtacattgggaggctgagtaaggaggactgcttgatcccaagagtttgagaccagcctaggcaatagaatgagaccttgtctctacaaaaaaaaatttaaattaaaaaaaaaaaaaacacttagctgggcatagtggcacatatctgtagtcccagctgctcatgaagctgacgtggaaggactacttcggcccagaagttcaaggctgcattgagctgtgatcatsctactgcactccagcctggatgacagagcaagaccctgtcctttaaaataaa

SEQ ID NO: 336622 - DNA, 583 bp, Homo sapiens
aacatacacatacatgcatstttatggtagaatgacttatattcttttgggtatatagccagtagcaagactgctgggtggaatggtagttctgtttttaggtctttgagaaattgtcagactgtttttcacaatggttggactaatttattatccaaacaatggtatataagcattgccttttctgtgcaaccttgccagcatctgttatgctttgacttgttaatgatagacattctgactggtgtaagatggtatctcattgtagttttgttttgcatttcactaatgataagtgatattgatatttcttccatatgcattgttggctacatgtatgtcttcttttgaaaagtgtctactcatgttctttgcccactttttaatggggttgtttgtttgttttcatataaatttgtttaagttccttatagatggcaggatattagaccattgtcagaggcatagtttgcaaatgttttctcccattctgtggattgtctgtttactctgctgatagtatcttttactgtgcagaagctcttaagtttaattagaacccatctatcaatttgcttttgtt

SEQ ID NO: 336623 - DNA, 583 bp, Homo sapiens
aacatacacatacatgcatctttatggtagaatgacttatattcttttgggtatatagccagtagcaagactgctgggtggaatggtagttctgtttttaggtctttgagaaattgycagactgtttttcacaatggttggactaatttattatccaaacaatggtatataagcattgccttttctgtgcaaccttgccagcatctgttatgctttgacttgttaatgatagacattctgactggtgtaagatggtatctcattgtagttttgttttgcatttcactaatgataagtgatattgatatttcttccatatgcattgttggctacatgtatgtcttcttttgaaaagtgtctactcatgttctttgcccactttttaatggggttgtttgtttgttttcatataaatttgtttaagttccttatagatggcaggatattagaccattgtcagaggcatagtttgcaaatgttttctcccattctgtggattgtctgtttactctgctgatagtatcttttactgtgcagaagctcttaagtttaattagaacccatctatcaatttgcttttgtt

SEQ ID NO: 336624 - DNA, 583 bp, Homo sapiens
aacatacacatacatgcatctttatggtagaatgacttatattcttttgggtatatagccagtagcaagactgctgggtggaatggtagttctgtttttaggtctttgagaaattgtcagactgtttttcacaatggttggactaatttattatccaaacaatggtatataagsattgccttttctgtgcaaccttgccagcatctgttatgctttgacttgttaatgatagacattctgactggtgtaagatggtatctcattgtagttttgttttgcatttcactaatgataagtgatattgatatttcttccatatgcattgttggctacatgtatgtcttcttttgaaaagtgtctactcatgttctttgcccactttttaatggggttgtttgtttgttttcatataaatttgtttaagttccttatagatggcaggatattagaccattgtcagaggcatagtttgcaaatgttttctcccattctgtggattgtctgtttactctgctgatagtatcttttactgtgcagaagctcttaagtttaattagaacccatctatcaatttgcttttgtt

SEQ ID NO: 336625 - DNA, 583 bp, Homo sapiens
aacatacacatacatgcatctttatggtagaatgacttatattcttttgggtatatagccagtagcaagactgctgggtggaatggtagttctgtttttaggtctttgagaaattgtcagactgtttttcacaatggttggactaatttattatccaaacaatggtatataagcattgccttttctstgcaaccttgccagcatctgttatgctttgacttgttaatgatagacattctgactggtgtaagatggtatctcattgtagttttgttttgcatttcactaatgataagtgatattgatatttcttccatatgcattgttggctacatgtatgtcttcttttgaaaagtgtctactcatgttctttgcccactttttaatggggttgtttgtttgttttcatataaatttgtttaagttccttatagatggcaggatattagaccattgtcagaggcatagtttgcaaatgttttctcccattctgtggattgtctgtttactctgctgatagtatcttttactgtgcagaagctcttaagtttaattagaacccatctatcaatttgcttttgtt

SEQ ID NO: 336626 - DNA, 499 bp, Homo sapiens
ataaagggcatccacataggaagacaggaaatcaaattatccgtgtttgcagatgacatgatcctacatctagaaaaccccatattcttggccsaaaagctccttaagttgataaacaacttcaacaaagtctcaggatatgaaatcaatgtgcaaaaatcactaagagtcctatacgccaagccaagagtcaaataaggaataaactttcattcacagttgacacaaaaagaaaaaatatgtaggagtacagctaactaaggaggtgaaaggtctctgcaaggagaattacaaaccattgctcaaagaattctattttaaatttaataagaattataaataaattttattcttaaacctaaaatttaaaaataacattgcaatttggtatctgctattgttgttaatcttaggatttttttctatactacaaaattactcattcaaagtaatatatgtgtgagaatataggctattagaacatttatttattagctca

SEQ ID NO: 336627 - DNA, 499 bp, Homo sapiens
ataaagggcatccacataggaagacaggaaatcaaattatccgtgtttgcagatgacatgatcctacatctagaaaaccccatattcttggccgaaaakctccttaagttgataaacaacttcaacaaagtctcaggatatgaaatcaatgtgcaaaaatcactaagagtcctatacgccaagccaagagtcaaataaggaataaactttcattcacagttgacacaaaaagaaaaaatatgtaggagtacagctaactaaggaggtgaaaggtctctgcaaggagaattacaaaccattgctcaaagaattctattttaaatttaataagaattataaataaattttattcttaaacctaaaatttaaaaataacattgcaatttggtatctgctattgttgttaatcttaggatttttttctatactacaaaattactcattcaaagtaatatatgtgtgagaatataggctattagaacatttatttattagctca

SEQ ID NO: 336628 - DNA, 499 bp, Homo sapiens
ataaagggcatccacataggaagacaggaaatcaaattatccgtgtttgcagatgacatgatcctacatctagaaaaccccatattcttggccgaaaagctccttaagttgataaacaacttcaacaaagtctcaggatatgaaatcaatgtgcaaaaatcactaagagtcctatacgccaagccaagagtcaaataaggaataaactttcattcacagttgacacaaaaagaaaaaatatgtaggagtacagctaactaaggaggtgaaaggtctctgcaaggagaattacaaaccattgctcaaagaattctattttaaatttaataagaattataaataaattttattcttaaayctaaaatttaaaaataacattgcaatttggtatctgctattgttgttaatcttaggatttttttctatactacaaaattactcattcaaagtaatatatgtgtgagaatataggctattagaacatttatttattagctca

SEQ ID NO: 336629 - DNA, 628 bp, Homo sapiens
ttctgtctctacttaatgctagtgttgtaaaaaaatttcttatgaattttaaaatactttttctaattctctgaagaatgtcattgacagattgataggaataacatttaatctataaattgctaggggcagtatggccattttaatgatattgatttttcctatccataagaataggatgttttttcatttgtgtcatctgattttttttcagcagtgttttgtagttctcattatacagatctctcacctcccaggtgagttgtattcttaggtattttattctttttgtggcagttgtgaatgggattccattcctgttttggctcttggcttgactgttgttgttgtatagtaatgctgaaaatttttgtacattgatgtttttctcttgaaactttgctgttatgttgtttatcattttaaagagcttttgggccaagactatctgattttctagacatagaatcatgtaatctgcaaacagggagagttygacttcctctcttcctatttgatgcactttatttcattctcttgcgtcattgctctggccaggactttcaatactctgtttaatgtgaatggtgagagagaacatgcttatcttttgctggttttcagggaa

SEQ ID NO: 336630 - DNA, 639 bp, Homo sapiens
gagacatcagagaataagaagtgagagtatagagaaaggctcttgaaaaccgtcttctgtaccacacattttggattccccacgacactccgggagacattaaaataacaaatacgtttattgtaaatcactacttgatacggtttggctgtgtccccactcagatctcaccttgaattgtaataatcatcatgcatcaaagccagggccaggtggagataatggaatcatagaggtggtttcccccatactgttcttgtgatastgaataagtctcacaagatctgatggctttatcaaagagagttttgcggcacaagctctcttgcctgccaccatgtgcatttgcttctcctttgccttctgccatgattgtgaggtctccctacccatgtggaactgtgagtccgttaaacctcttttatgaattacccagtcttgtatatgtctttattagcagcgtgacaacagagtaatactctactgactgcaaatctaggattctttgtgtatctgtctaagcagatattaggcactagaaagcccccagtttttacgtagattacagtttgaaagctattttactgaatttgtgacctaaacttcaacataaagctgcagtgcacaatattgttacca

SEQ ID NO: 336631 - DNA, 574 bp, Homo sapiens
caattatttttctcttacaactaactcttcaaaaatctccatctttttaactatagataatattgtccaactgagtataatctatgcaaatgctattacacaaatacattgaaaattatataaggaaaactttaattataaattactaagctttagataactttaaagacatctaatccattttgatgggtaatgaaaatgagccaatatattcttgctagacatggaagttgcaagacatttattacaatcaaatacttccccggataatatacaacaagataataaatgttacagattactaaccacataaaatcacaytgaaattgtgcatctttgttttccctcagcaatagaggcagtcttcactttacatagttctctaataacatatcagaactgtgtctccctttgcatgttctgacgtgcaggcagaatccacaggcatgattctgggcagagaatagcctgtatagcttagtggttaagattacacctcctgtggccaaacagttcaactccaatacttctgcatttccctcagtttattcatgtataaagtaaaagacataat

SEQ ID NO: 336632 - DNA, 576 bp, Homo sapiens
tgttgaatggaccactgccccacagaagataagaaaacgctttcaaaatttcaaaatatagttttaaaaaattaaggctgtgttgtgaaataaaagataaaagctaataccatttatttgttcacagtaaaactatattttgcataagcttctagagccagatgttttctagttgtactattcaattatggtttttcaacaaattcatcattattagtcttataattacataggaaattctgccacagaatgaagaawacttaatgtgagtatttatacatttatacagttgataattaattgagtgatgtaaacagaaaatttagtgattacagtttatacagcatcttaattatcatatttatttttaaattttagacgtgtgccaacaataaatacacaactaagcttcattagtatgatcagaggcataagttctcaaggaaatatagtggattcaatacctgtttgaaaaatttgacctgtaaaaatctgttatcattgagaaagtctcccacttcctctaatagacctttccataagaaactacctagacaatatataaatactacacta

SEQ ID NO: 336633 - DNA, 555 bp, Homo sapiens
aacacgcatagaaatgtatcaattaatacaaggcagagtatattcttttattaccttgtagtgtgaaatgatgtaatatgtcagggaagagcaattgtgaggtggaatatttctgcaaagtttagatgaggaagtaagccttctgtaagtytttggtaactatttaggaacaaggacagaaggaacatcaaataagttaatgagcatgaacaaaggaagggaaacaataattattgagcaactattctgtgtcaggtaacatattacatttgtaaatgcattatcactctagaaataattcatgtgtaatataaacagaaagataaaatatgtgctggcgaaaaaatgtgtataaggactgatagacaatgacatgcatagagtatagtctgatacaaataaaacaaaactagtcatgtgccctcatgtatcatatataagtaaatatttcacaggctgcttcttttatgtttttcacataaactacttaataatgatttgaaatgaagttccttggtggatgggggtaggctgtctttggcaaagttaccaaaa

SEQ ID NO: 336634 - DNA, 563 bp, Homo sapiens
gtaggcgcatatatttgtggggcacaagagattctgtgacataggcatacaatgcatagtaatccatcaagggaaatggaggatccatcatcttgagcatttatcctttccttttgttacaaaaggagccaatttwacacttctagctatttttaaatgtacaatgagttattgttgactgtagtcaccctgctgtgctattgaataccagatcttcttcattcttattcattgttcctaactatataaccatatatatatatatatatacacatacagattgtttgctgaattttgtatgtttgtacagatgtacagatgtttgtacagtataaactatatatagtttataccatatataaactatatatacaactataaatagtaacatagatggatatatatatctatgtatgtaactataactatatatttatagtaactatatatagttacatatatagatagatatatatatccatctatgttactatataattatttttgccttatttgacttgctagaatctccaattcaatgtttaatagaaatggtcagaatg

SEQ ID NO: 336635 - DNA, 622 bp, Homo sapiens
tattactttgagtaattttgtagcatagaagaaagcatcctaagattaacaacaatagcagataccaaattgaaatgttattttaaatgttctgctaaagaataaaatttagcgataattcttattaaatttaaaataaaattatctcagcagtagtttgtagttctccttgtagagatctttcacctccctagttagctgtgttcctaggtgytttgttgttgttgttgctgtttttttgtgtgtgtgtgtgtggcaactgtgaatgaaagtttatttctgatttgattctcggttttactgtggttggtgtataggaatgttagtgatttttatttttgcacattgattttgtatcctgagactttgctgaagttgtttatcaacttaaggagcttctgggccaagaatatggggttttctagatataggatctggtatttgtaaacatgggtaatttgactttctctcttcttatttggatgcctttatttctttatcttgcctaattgccctggccaggacttccaatactatgttaaataggagtggtgagacagtgtatcctagttttgtgccatttttcaaagggaatgcttccaccttttacccatttggtatg

SEQ ID NO: 336636 - DNA, 622 bp, Homo sapiens
tattactttgagtaattttgtagcatagaagaaagcatcctaagattaacaacaatagcagataccaaattgaaatgttattttaaatgttctgctaaagaataaaatttagcgataattcttattaaatttaaaataaaattatctcagcagtagtttgtagttctccttgtagagatctttcacctccctagttagctgtgttcctaggtgctttgttgttgttgttgctgtttttttgtgtgtgtgtgtgtggcaactgtgaatgaaagtttatttctgatttgattctcggttttactgtggttggtgtataggaatgttagtgatttttatttttgcacattgattttgtatcctgagactttgctgaagttgtttatcaacttaaggagcttctgggccaagaatatggggttttctagatataggatytggtatttgtaaacatgggtaatttgactttctctcttcttatttggatgcctttatttctttatcttgcctaattgccctggccaggacttccaatactatgttaaataggagtggtgagacagtgtatcctagttttgtgccatttttcaaagggaatgcttccaccttttacccatttggtatg

SEQ ID NO: 336637 - DNA, 537 bp, Homo sapiens
gaaggaatggtggatgcgcaacccatttgtgaattaaacaggtaaattggctttgtccacactggaagaggatcaactgcttgagcttgcaaatgacactgaccttaaaagtatgtttgagacaacttcaagtctccatacattctggattaaagtcaaggcaggggcatatcctgaagttamcacaaaagcattgaaaagcctgcttccatttccaaaattctaccttagggaagcagggttttctgcagtgacagcaactacaacaggattaagcaacacaattcgggtgtcactctctcccatcagcccaagatggcgaacatctatttccaggaaaacaagctcagggatcccactgattctacattatggtgagttgtataattattgcattatatattacaataataacagaattaaagtccaaaataaatgtattgtttttgaatcatcccccaagcatcccctgcccttgagtccatggaagaattgtcttccatgaaaccagtccctggtgccgaaaagactggggac

SEQ ID NO: 336638 - DNA, 532 bp, Homo sapiens
aaactaggggaaaggcttggtacagatgccttagtctcttttacagcctcaggaggaaccaactctggcaacacttcactgtgatttcaggcctcagcattcagagacaataaatttttgtttaaactatccagtttgtggcactcatatggtaactttagcaaactaaggcctgtgatgtggtggttgatgygtggataatagagccaggaggcctgggttcaaatctcagctctactccaacaagctgtgtcattttgggcatattaacctttctgtgtctcagtttactaacatatataaagggaaataacaatggttcagacctagtagggttgttataaggattgagtccatagatgcaaaacactgaaatagtacctgacagctagtgaccattaagttgttcttatgtattattccacaaaaacataactgaatatattttgtacatgaaccttaacttattaatcattctccatttctaaaaaatactgtaaatatcactgtaatgaacacagttgtaagcaga

SEQ ID NO: 336639 - DNA, 583 bp, Homo sapiens
tcaaaaaaaaaaaaaaaaaaaaaaaaagtactgacaattcagtgataaaacgacctgtatttttttctactcagtagttaaacaattaactgaaataaagattaaggaagaagtatcttgtgaagattcttgccgccatgaggggcaagaattttcyaggagattcatcccctcagaacacagagttgcaattcctaccccatgaggacgacatgagcactatctctttctttgtctttcagctgaccacttactataccctttcacacccccaagattccccgaaatccacccctcttcagaattattttagcccttttggatggagacccttccaaggtgtctccagacgagcttcctcttgtctggtccatgtgtgtattcactttcagccccatcttcagtgaatatgcaggttactcccaggacagtaccctcaccctggctcactaacattctcttacacacacacacacacacacacacacacacacacttctccttccctcctctaccttgggctggtctaattttagcatctcatactagttcttaagctccacaaaccctagggtcacctgtc

SEQ ID NO: 336640 - DNA, 583 bp, Homo sapiens
tcaaaaaaaaaaaaaaaaaaaaaaaaagtactgacaattcagtgataaaacgacctgtatttttttctactcagtagttaaacaattaactgaaataaagattaaggaagaagtatcttgtgaagattcttgccgccatgaggggcaagaattttctaggagattcatcccctcagaacacagagttgcaattcctaccccatgaggacgacatgagcactatctctttctttgtctttcagctgaccacttactataccctttcacacccccaagattccccgaaatccacccctcttcagaattattttagcccttttggatggagacccttccaaggtgtctccagacragcttcctcttgtctggtccatgtgtgtattcactttcagccccatcttcagtgaatatgcaggttactcccaggacagtaccctcaccctggctcactaacattctcttacacacacacacacacacacacacacacacacacttctccttccctcctctaccttgggctggtctaattttagcatctcatactagttcttaagctccacaaaccctagggtcacctgtc

SEQ ID NO: 336641 - DNA, 583 bp, Homo sapiens
tcaaaaaaaaaaaaaaaaaaaaaaaaagtactgacaattcagtgataaaacgacctgtatttttttctactcagtagttaaacaattaactgaaataaagattaaggaagaagtatcttgtgaagattcttgccgccatgaggggcaagaattttctaggagattcatcccctcagaacacagagttgcaattcctaccccatgaggacgacatgagcactatctctttctttgtctttcagctgaccacttactataccctttcacacccccaagattccccgaaatccacccctcttcagaattattttagcccttttggatggagacccttccaaggtgtctccagacgagcttcctcttgtctggtccatgtgtgtattcastttcagccccatcttcagtgaatatgcaggttactcccaggacagtaccctcaccctggctcactaacattctcttacacacacacacacacacacacacacacacacacttctccttccctcctctaccttgggctggtctaattttagcatctcatactagttcttaagctccacaaaccctagggtcacctgtc

SEQ ID NO: 336642 - DNA, 316 bp, Homo sapiens
tcaagtctctagaactatgagaaaataaatttctgttggctcaacctcctaatatgtgattttggttatgaggccctggaaaacaaatatagatgcccagtgtcagagaatggagaaggtgcttggacattgattgactaagataagaattgtatagtggcatcatatatatgtatgacagtcttggtagggagattcttgcctttccctttcyctgcttatttgtcttaagtatcatttacttatcagtcaaagttcaaataaactaatccacagttctatgctgatggaagataaggtcagaatgtattaaaca

SEQ ID NO: 336643 - DNA, 633 bp, Homo sapiens
ctccaattaataccctcagttctttctctagtttcttgaacatatggaatgcagttataacaactgtttcattgttctcgtctactgatcctatcatgtgtgtaatttttaggtcaacttcaactgacttttttgagtattgtggatgaaatttacttctttacatgctcgttaattttttactggatactatacattgcaaattttgggtgctggatatatttgtatttatgaaagtatcattgagttttattgtgggacacagtttagttactyggaaacagtttggttcttttgagtcttacccttaagctttgttaagtagacttagagccatacttattctaggattaatgtttcccggccttggtagattcctcatgtccatgctccaatcagtactcagctgatgatatgaggggcaccctcctcagaccttggtttcccctgtcttttggcagctctctcctttcttcccctctctgtgaccactagctgattttgtcagcctggattcctagcaatatcttacctgtaagtcttcccagtgtaagttctccctcactgaatcatagcctatgaaactctctttaggcactaacctggggcagttgtagggctcacattcttccc

SEQ ID NO: 336644 - DNA, 651 bp, Homo sapiens
attcagagtcaagagaggtagctgagcatctgtaactgtggcagctgtaactctaaagtaaagaattggattatacaagaaactgcttaaggactggcatcctggatattttctgcttggcatttccctgaggtccatttttcatccttttggcctctctatctgcactgataagtctatcgctatgaacttcatttcccaagaatttcttgccagctgacttccactgggaggcaccagtagtgattgaatgtggggaagagagaaaggtagggaatttcyttcccatgctttatttgggccatgtttctggaagtgaccccacttcttcataagagcagctctagttcctattagacagctcctcccctacagcttcagttgtcattagattccagggtttcaagactagagtggtaatggcttccaactgttgcttgtgttcaggggcctcaaaaccccttaccctcctagccctacctacacctctatatgttccttgaatctttcaagtcttttgaatcttctgggttgtattctgtctcctgctgggattctgactgatatagctagggaaaaaagacagaaccctagtctcaaaggatctaagataataaatggttacagagtgattaatatgtgttattttaa

SEQ ID NO: 336645 - DNA, 466 bp, Homo sapiens
cttggggtgaaattccctgggctccttcagtgtaagttataagtaggttcagttgtatataacagaaactccctaataacagttaacggatacatgcataaagggtcagcagttgtgaactgatatgattctgttttcagaaacccaggcttttactctgggtctgccttttcacctttaacactggcttctaaccctcaaggtcgctgattgtctaaattgcttttggagctgtaagaaacgggaaggagaaagtagctatttgtcctgtcttaaaagggctttcctggaactcccacctaacatgattatagctcattggccaggaccaggtcacatggtcactttgactacaagggatactgggaaatactayctttcagctgagtttctagccaccccaaacaaaattgggattgtctttctaaggcagtagggaaggaacattgcatgggcaatgaacaga

SEQ ID NO: 336646 - DNA, 518 bp, Homo sapiens
tgatcctctacagtgtaccattccagaataatttttctgaaagtcaaatctgtttctcttgcctctattcttaaaaaagttatttaataagtacccattgcctttcctttacaatctaaatcctgctayattatagaaagttcattatgacctggttcctccctccctatgtaaatcaattttagaggggaataatgtttccccacttggagtggacatgaggaaggattattcttcagcataggcctagcctctctccacactttacatagtcccgtgagaggtagagatgtgattggtaaatctggggagaataaactagaatatgcatggcaagcatcatttcttcttgatctgggaagcgagctgctcctgagcaccatgacttctacccctcctctgggtctttgtttgccatggtcccttccttctttcactgggccaagaaatcaaatccatcctgggcttcagaattaccgaatttatttggctaccaaacctaaaaccacatgctcagt

SEQ ID NO: 336647 - DNA, 600 bp, Homo sapiens
aaggcaggcaattgcaggactattagtctctcaacatggctggatagacatcaaatygattacaacccaagctaagcaaatccatgccacttcaatcagtgctattttcagtagctgtgcaaaagctgtttgatgatgatatgccaacttttagcttattaggtatgactataatttgcacaaaacaatgtatgatattgtgctgaaaacaacacatctacatggtagatctaaatttctgagattggactgagatttcttttcattcctgttattgatctaatgccaaccttcctgagtttcaagtttattttctgccagtatgttgccaaatatcaggcaggttaagaagatgatatttttccaaaattaagattcacagaaaatacgattctataaaacctcaaataataacattacaatttataatacactatttacacaaaagaagtagtgttcattcaaattaaaagaacctgtctaaatttgataagagaaaatgattttcaacggaatgtcttataaactcttgaatgtgtttgagtatattgcagctatccattaagaatagcaaaagttaaaagatattgatttgctttt

SEQ ID NO: 336648 - DNA, 483 bp, Homo sapiens
agcctgcagatatttcaaaatattctttcctcaaccttttcactgtttaccctattatttttccagggcttcgaggcattggtgtcaatgagaactgacttctattgtaattataagccagtgagatagttttctgttttttttttttttttttttttgctttttgaacagctaacattttatttaaattaaaagtggtagttgaacatataaaaatttctaaggatgcttcgtgttctatgtaaacctaatatttttatttagagaacaaggaatgaaaccaaggaaaatagaatgacatcaaagacgtcaaattacaaattagtgacaaagctaaaaaaaaagtctaatttagcaatctggactctcaattccaattatgtcttattttaccacacaattgctgtcttctctcctggctgctctgggacaaaaacaatctcataraaactgctgcaggtaaccgaacattcttttataatt

SEQ ID NO: 336649 - DNA, 468 bp, Homo sapiens
gctttattggttaattccaacacgtatttaaggaagagcatatcaagtctatacaaactcttcagtacaattgaagaagagggaacatatttcatctcattctataagattagtattactctggcactaaacccaaaagagagcattacaagaaaagcgaattatagattaatatattttgtgaataaagatgcaaaaatttctttaaacattttggaaaattgaattcaagtatatataaagaggataatatataataaccaattaaatttattccagaaaagtaatgttgtcttaacattctaaaatcaatcaatacagttaaccatattaatggactgaaaaagaaataacatgatmaactcaatataaaaaagaaaaagctggcaaactgcaacatttactcctggtaaaaagtacaagaaaactaggaatataaaagattttctccagctgattaaaggcttc

SEQ ID NO: 336650 - DNA, 618 bp, Homo sapiens
tactctggcactaaacccaaaagagagcattacaagaaaagcgaattatagattaatatattttgtgaataaagatgcaaaaatttctttaaacattttggaaaattgaattcaagtatatataaagaggataatatataataaccaattaaatttattccagaaaagtaatgttgtcttaacattctaaaatcaatcaatacagttaaccatattaatggactgaaaaagaaataacatgatcaactcaatataaaaaagaaaaagctggcaaactgcaacatttactcctggtaaaaagtacaagaaaactaggaatataaaagattttctccagctgattaaaggcttctatcaaaaacttagagtttatgtacttaataatgaaagacagtatgctgttgataaatcagtagaacagaatggtacagaaatagaactgtgtacagttggccatttaatttttgacaaagatgcaaaaccaaaactatayagaaagcacagtcttttcaataaatgctatttgaccactttgatagctacaggaaagaaaaacccacgaacaactaattttgactcatacctcacatcatacacaaaatttaacctaacatgtag

SEQ ID NO: 336651 - DNA, 618 bp, Homo sapiens
tactctggcactaaacccaaaagagagcattacaagaaaagcgaattatagattaatatattttgtgaataaagatgcaaaaatttctttaaacattttggaaaattgaattcaagtatatataaagaggataatatataataaccaattaaatttattccagaaaagtaatgttgtcttaacattctaaaatcaatcaatacagttaaccatattaatggactgaaaaagaaataacatgatcaactcaatataaaaaagaaaaagctggcaaactgcaacatttactcctggtaaaaagtacaagaaaactaggaatataaaagattttctccagctgattaaaggcttctatcaaaaacttagagtttatgtacttaataatgaaagacagtatgctgttgataaatcagtagaacagaatggtacagaaatagaactgtgtacagttggccatttaatttttgacaaagatgcaaaaccaaaactatacagaaagcacagtcttttcaataaatgctatttgaccactttgatagctacaggaaagaaaaacccacgaacaactaattttgactcatacctcacatcrtacacaaaatttaacctaacatgtag

SEQ ID NO: 336652 - DNA, 595 bp, Homo sapiens
cttttagtaagcagatgtgcaatgttaatatagaggttatgtcattttatcaaattccactattacagtggtcatatgtttattgtaataaactgtcatcaaagttttcaccagactcagctgaattatgttttttaattcagctttttccaagttgtcaaatattgaatgtgactgtgaatttttttggccagaaagggggaaataaagagaaagaagagaaactgggagtttgaattgatttattttaagaataattcatattggttctttaagtaactcatcagttaaccacatcaacacacttaatatcttctacttacatagttaaaaatgtatattttgcttatgttaacttgaaaagaggatatggagtccaaaaacattcagattataatgctttttaaataaaatttgayaatatcaaaagaaaacaagactctaggtccatcccatagtactttactaaagaacactcctgtcagtctaatctaatttaattatgttgaaagtggattggcttcgaagattgaggaaaagaaataatatttaaattatcttcatttgagtaagatattttattttgtcatacaag

SEQ ID NO: 336653 - DNA, 530 bp, Homo sapiens
ttttttttgtcatttcctaactaatagttatagctgagccaaatcaacagtatattacttagagaagtaaatttacatttttctttttctattttttctcttctgaacatcttatcctaaatatattgttttagcctgacataaagcttattttgctacccaagttattatatagaattgagctttatggtttggtttgctaaacccatagttgaaaactaaacatttctsaaaaaaaatagataggaatatcatttattgaacatggccaagaaatttatttttaataactgaaccacagatgggatgccatctgtcagcatatggcattggctcttaaagcaatgtttacatctgggggatatgacgctttctttgagagaacaagaggcattattggactaaacatgaagaggagtgattttagactcatgaatattgtaagtttgctaaggatagaatcagcatgtttatatgcatacagttttcgtacatttgggtggataaaaagagagaaaatctgttcattg

SEQ ID NO: 336654 - DNA, 530 bp, Homo sapiens
ttttttttgtcatttcctaactaatagttatagctgagccaaatcaacagtatattacttagagaagtaaatttacatttttctttttctattttttctcttctgaacatcttatcctaaatatattgttttagcctgacataaagcttattttgctacccaagttattatatagaattgagctttatggtttggtttgctaaacccatagttgaaaactaaacatttctcraaaaaaatagataggaatatcatttattgaacatggccaagaaatttatttttaataactgaaccacagatgggatgccatctgtcagcatatggcattggctcttaaagcaatgtttacatctgggggatatgacgctttctttgagagaacaagaggcattattggactaaacatgaagaggagtgattttagactcatgaatattgtaagtttgctaaggatagaatcagcatgtttatatgcatacagttttcgtacatttgggtggataaaaagagagaaaatctgttcattg

SEQ ID NO: 336655 - DNA, 596 bp, Homo sapiens
aatattaattttataaatttagtgtagcctaagtttaagcgtttataaaatctgaagtagtgtacagtaatatcataggccttcacactcactcaccattcactcgctgactcacccagaacaaccgtagtcctgcaaggtccattcatggtaagtgccataaaaggtgtgcaagtttagacaatcttttataccttatttttactgtacatgttctatgtttagatctgtttagatacagaaatatataacattgttttacaactgcctatagtattcagtatagtaacaagctgtacagatttgtagcctagaagcaatagactataacatataacttaagtgtgtagcagactataccatctaggtttgtgtaataagtgtactctatgatgtttgcacaaakaggaaatctttctaacaacacttttctcacaagatatccacatcattaaacaatacatgactgcattatgaatcacctgggtactgggcatatgtggatgttttagaaagttagagactattattctctattttttttattatactttaagttctgggatacctgtgcagaacttgcaggtttgttacat

SEQ ID NO: 336656 - DNA, 563 bp, Homo sapiens
atcgagaccatcctggccaacatggtgaaactccatttctactaaaaatacaaaatttaactgggcatggtggtgcgcacctatagtcctagctacttgggaaactgaggcaggatgatggcttgaacctgggaggcagaggttgcagtgagccaagatcgttccactgcactcaagcctggcaacagagcgagactctccgcaaaaaacaaaacaaaacaaaaaaaaaacaccaaaaaacgtatcgttatatatgcaaaccctggattcaagacagaactagtaccaacaacaaycaaccaatcaaaaatgtggagaaaggtggttgaaagaaggctttctaatctatctaattttgggatgttgcttctttgaaagaaataaaaatatatacacatacatatatacatttgtatcaatatcaaatgatatataattgatagtttggtgtataaaatatgtgcctctctaccacccctgacatggactccctggtggacttctggtcatctactgggataatttagtcccttctcagtgcagccttctctgtaaaccaaatc

SEQ ID NO: 336657 - DNA, 546 bp, Homo sapiens
ttcactatttggtcttcattaataatcttttattggtacacatccatgctcttttgtttacatatcatctatggacacttttatagttgcaaccgagattgtatgacctgtatattacaaagcaatagctctcaaccacggctaaatttgcttctaggtcttaaggaacgtttgacaaaatctggagagatttctggttgttgaaactataagaggtgaatactactgtactcttatgggaagagacttggatactgctaagattcatagagtgatcaatacagctctccccagtaaataattatctcatacaaaatgtcagtagcgctgaggttgataactctgggccttcaatgcttactatatgaacctttacagaaaatgttggctacagcytgccctagatcttaacaaaaactaaggggatcgaaagttttttctggtaattataagatatgcatgctcagctttagatacacacattaaaaaatataagtaattaaaaactcagacaattgtcctgaacttatttataggttaaatgtg

SEQ ID NO: 336658 - DNA, 536 bp, Homo sapiens
tcctttctgatttataagaatctcatatcaagtcacctgttaaaaatatatacctataatgtatggttaaacttattgtcaactgcattctgtttttacttgaccttttaaccctgctttttgattttaagcaaaagcacaggaagtatttccttccatgttagaagataggaatgagagaaggtgttctttccccttgtccattagatcatgctaatctcatatttttcctatttagaaacctgacttcgagttaatatataccattctaacrtgtcaaagatgttaatttttaatttaaaacacttgtcttaataagaatggttgagatcatgttagctttattgtgatagctgaacagtcccttaccaagtgcctaatgaaaagaaacagtgattttgcagctttgtctcatttgaagaaacaataataagaagtggccctggaaaaattgatagcacattctacattttatgtagtgttctggtttcaacatagtgcagagtcagagagaataaaggagactatagtgcatg

SEQ ID NO: 336659 - DNA, 536 bp, Homo sapiens
tcctttctgatttataagaatctcatatcaagtcacctgttaaaaatatatacctataatgtatggttaaacttattgtcaactgcattctgtttttacttgaccttttaaccctgctttttgattttaagcaaaagcacaggaagtatttccttccatgttagaagataggaatgagagaaggtgttctttccccttgtccattagatcatgctaatctcatatttttcctatttagaaacctgacttcgagttaatatataccattctaacatgtcaaagatgttaatttttaatttaaaacacttgtcttaataagaatggttgagatcatgttagctttattgtgatagctgaacagtcccttaccaagtgcctaatgaaaagaaacagtgattttgcagctttgtctcatttgaagaaacaataataagaagtggccctggaaaaattgatagcasattctacattttatgtagtgttctggtttcaacatagtgcagagtcagagagaataaaggagactatagtgcatg

SEQ ID NO: 336660 - DNA, 606 bp, Homo sapiens
tgctctcgcagcactgtgggaatggaccagaatgaagcaaaccttgagcsaggagccagagagtaatggagaagctgttgcattcccctagaaaggaaatgttgagtagctaagccatggaggttacagtggggatggacaggagagagacaatttgagaatcttccagattatcaatatatctcttcattgttattctgttgagcacacatagaaacaataaaaccccattgtatttatgtagccatgaacagtttgtaaaatattttcacagaaggatttcatcaatcagtttatacaacagtctttgaggatgggatcaaataattataatgaaagcaaaaataatgaataatacaactcccctcctccaaacagtaacacacataatctaagcccagattttgttcctgataactctaattcagattgatcacctaattaatcccagagagatctaaggcttgaaaatgcaaatattacactttttattgcagggttaatttgtatttaccgtccacagtttggcaaatgattttctgttttcaccatgaatatgtatggcttgctttcagcaaccagaaacacttgttttttttatattct

SEQ ID NO: 336661 - DNA, 604 bp, Homo sapiens
cccattttgcctggaaagtgtctccctagatgttaacaaggtttctttcctcatctccttcagatctctatttaaatggccccttccccttgatgctttcccagatggagccatttgacattgcactcaccacccccaccaccatcccctttactgctatcttttctccataccacttgtcagtgacttacacacttttcatatttgaattgctcactagagagtaagccacatgaaggcaggagtttgtctgttttgtttatcgttcttatctccagtggctggagtgatgcccagcacatttaaggtgcttaatcaactttcattaaatgaawgaaagtgttgattgatatcacattgtgtactactaagtgaatggagagacatattagcttattttatgatgggagacttataagaactaatactatatagagcagcatagtctagttcctgtggtgtgaactcagcagaatttcattttttagttaatggtcttggaaattaattttctgtgctgtgattttctttctttagagaaaaattatgtagtcttctaccacctgtgaagaaaaagataaaggattttctggttttgaaggca

SEQ ID NO: 336662 - DNA, 598 bp, Homo sapiens
agcatgaagcatcatcactagcttatgattaataaaaattcaagtattttagttaaataaacttgaaataatagatatgtatgaattgggtactctacaagaaaaacctgcatgttttcttaagtgatatcagattttataaacaataataaatttggccaaagttgccaaagctgaaaattcacagtccacatttttgatgacatagtaaaactggmaatcacatataaaaatttagggaataacaatactttgcagttgaaccatcaatttcacatcgtaaacaactatttgcttaaagaggaaatacaaatatatttagatattttaaagatttgatatttgaaaattttatattttctatttaagccagaaaaatgagacatgctaccttactcattcatacataatctaaacaaacttttaacccagttctcactatgagccatgtactattttagcactaggggtaaagtgaacaaatagacaaagcctttgccctcagagaacttctatattcccagggtgaaatagacaaaaaagcaaaacaaacaaaaaaaaaaacaggtgaataataggttgaagtatatgatattgc

SEQ ID NO: 336663 - DNA, 545 bp, Homo sapiens
tgcatgcaagccaaggagagaggactgggaaaaaaaatcaaacttgccaatacctcgatcttggacatttatatataatccagaaccatgagaaaataaatttatattgtttaagccatccaacytatggcattttttatggcagccctagcaaactaatactgaaggtacaatcaaaggtgaagcagctgttctcaatatcagccctactttttttaatctcattttgttcctcagacatttcaagtgatccaagccgactccaaatatgcagtgaaaaacacacacatacatgcagtcctactagcaaaatatatgtttactccctccattgacatactgttaaggatcattcttatgcggatgtcacaggaggtgagctcaagctttagtcagtttttagttatatcattaatctaattttaggagaggctgttgaaaaacaaggtccatgattctataccagtagtataaaattgtacctaagctctgatctatccattagagaataactgaatagttcataaaggagattttgttaccta

SEQ ID NO: 336664 - DNA, 545 bp, Homo sapiens
tgcatgcaagccaaggagagaggactgggaaaaaaaatcaaacttgccaatacctcgatcttggacatttatatataatccagaaccatgagaaaataaatttatattgtttaagccatccaacctatggcattttttatggcagccctagcaaactaatactgaaggtacaatcaaaggtgaagcagctgttctcaatatcagccctactttttttaatctcattttgttcctcagacatttcaagtgatccaagccgactccaaatatgcagtgaaaaacacacacatacatgcagtcytactagcaaaatatatgtttactccctccattgacatactgttaaggatcattcttatgcggatgtcacaggaggtgagctcaagctttagtcagtttttagttatatcattaatctaattttaggagaggctgttgaaaaacaaggtccatgattctataccagtagtataaaattgtacctaagctctgatctatccattagagaataactgaatagttcataaaggagattttgttaccta

SEQ ID NO: 336665 - DNA, 545 bp, Homo sapiens
tgcatgcaagccaaggagagaggactgggaaaaaaaatcaaacttgccaatacctcgatcttggacatttatatataatccagaaccatgagaaaataaatttatattgtttaagccatccaacctatggcattttttatggcagccctagcaaactaatactgaaggtacaatcaaaggtgaagcagctgttctcaatatcagccctactttttttaatctcattttgttcctcagacatttcaagtgatccaagccgactccaaatatgcagtgaaaaacacacacatacatgcagtcctactagcaaaatatatgtttactccctccattgacatactgttaaggatcattcttatgcggatgtcacaggaggtgagctcaagctttagtcagtttttagttatatcattaatctaattttaggagaggctgttgaaaaacaaggtccatgattctataccagtagtataaaattgtacytaagctctgatctatccattagagaataactgaatagttcataaaggagattttgttaccta

SEQ ID NO: 336666 - DNA, 326 bp, Homo sapiens
ctatggagtcacctgctggcatccttcccatttcactaggtctgtaaaattctgtccttaactgaawttttaatgttatatttcttggaaaagaatgcaagtgaaagtgtgctggagagattaaagaaattaaaaattttggtagattcataaggcacccttgggaaacctttatggcttaatgttacattttaattttaaaaatgttttatgatgtaagaaattaccagcctcaggtttaaccttataagccttaccacaagactattttaaaagagacctagaagcaattcactgcaaataaggaaagaaaagatacttacaaa

SEQ ID NO: 336667 - DNA, 570 bp, Homo sapiens
gtgaattcttctgtccttcacctcttgtgaaggagattgtaaaggaaaattcatatatgggaaataaaatgcatctcaatactcaattatgagattattatacaggtgacccagaatatgcatatattttttaagattgtcatcaagagaaaaatacaaaaattcattaattcttatagaaattgagaccatgtctgcaaactcacatgatccacaaagcacagtttaagaaatattccttatagtacaaggagtttgcatggtaaagtatgataaatagcatatggcaatattacactagattgaattgaaagagaaacattcgatttgtgaaaaagracagtcttatttaaggaaatgacatttatactagggccaatttaggaaggtagaaactgaaagggaagttaattcagctggagaaaattgcatgagcagagaatcagaaaccaaaaggaccttgatttctcaagaaatttcaaaaccattaatttactggaaaacagtttaagaaggagattaatgaagattagcatgaagagatagtctggatattagacacactaagaa

SEQ ID NO: 336668 - DNA, 583 bp, Homo sapiens
ttataactaaaagtcaattaacaagcaaattagtaaaataaatagcatatacaatggagcaaagtaaggaaaaaaaaagtgatacctggtgtccagtgagtgcagttttgaatacatagaggaaaatctcagggacaaagtgacatttgtgcaaagacctggctgtaatgaagactgaagtcatgaggatgtgccttttctatcagggagaacaaatctgggaatctaagaagtgtaactaaatttagaaaaaacattgtataatacacatttttgtcctcagactttagttccactatgtgtgggtttcacccctttgtatkgagttctgatataataatcaaaattgagactgagaatttggagggaaaattacacctgttttcaactaatttggtttttcatgttgtgttgcatatttcatgtatttgaatattggtttttcagctgtaacccaaaagatcccctctggaaatgacatagtacatctctgcagaatatatttcctgcatttaaaaaatacacaataaaaaagtgactccatagtgtctgtgttccatcaaccatagcctattttctaatt

SEQ ID NO: 336669 - DNA, 583 bp, Homo sapiens
ttataactaaaagtcaattaacaagcaaattagtaaaataaatagcatatacaatggagcaaagtaaggaaaaaaaaagtgatacctggtgtccagtgagtgcagttttgaatacatagaggaaaatctcagggacaaagtgacatttgtgcaaagacctggctgtaatgaagactgaagtcatgaggatgtgccttttctatcagggagaacaaatctgggaatctaagaagtgtaactaaatttagaaaaaacattgtataatacacatttttgtcctcagactttagttccactatgtgtgggtttcacccctttgtattgagttctgatataataatcaaaattgagactgagaatttggagggaaaattacacctgttttcaactaatttggtttttcatgttgtgttgcatatttcatgtatttgaatattggtttttcagctgtaacccaaaagakcccctctggaaatgacatagtacatctctgcagaatatatttcctgcatttaaaaaatacacaataaaaaagtgactccatagtgtctgtgttccatcaaccatagcctattttctaatt

SEQ ID NO: 336670 - DNA, 546 bp, Homo sapiens
aatacatgtatgctcattttaaagttgattttctctatatttaaacatcttaacagacttatttttagatctttgcttagcttgactttattccrtttagaagaagagtattttgatattttggagaaatttgtatgcttataattaactattaaacatgggactgtatttaaaataaaaactattttaaggggagaaaagaaagaaggaaggaagggaggaaggaagggagggaggaagggaaagaaagaaagagaaagaaagaaagaaagaagagaaagaaacagaaagggaaagagagaaagaatcctgttttcacaaactcagtttgaagaagataaacttataactctaaatttgcaagtatcttcaacgtgcctggtgtcttacatagaaggaaacaaagctcaagatgttacattggtaataataagttaactaagcaagcatgttgaattattaaatttggagaatacattgtgcttattatgttacttacccttgcagtgaactagaaaatgaatgtggtcattccagactggttaa

SEQ ID NO: 336671 - DNA, 546 bp, Homo sapiens
aatacatgtatgctcattttaaagttgattttctctatatttaaacatcttaacagacttatttttagatctttgcttagcttgactttattccatttagaagaagagtattttgatattttggagaaatttgtatgcttataattaactattaaacatgggactgtatttaaaataaaaactattttaaggggagaaaagaaagaaggaaggaagggaggaaggaaggragggaggaagggaaagaaagaaagagaaagaaagaaagaaagaagagaaagaaacagaaagggaaagagagaaagaatcctgttttcacaaactcagtttgaagaagataaacttataactctaaatttgcaagtatcttcaacgtgcctggtgtcttacatagaaggaaacaaagctcaagatgttacattggtaataataagttaactaagcaagcatgttgaattattaaatttggagaatacattgtgcttattatgttacttacccttgcagtgaactagaaaatgaatgtggtcattccagactggttaa

SEQ ID NO: 336672 - DNA, 546 bp, Homo sapiens
aatacatgtatgctcattttaaagttgattttctctatatttaaacatcttaacagacttatttttagatctttgcttagcttgactttattccatttagaagaagagtattttgatattttggagaaatttgtatgcttataattaactattaaacatgggactgtatttaaaataaaaactattttaaggggagaaaagaaagaaggaaggaagggaggaaggaagggagggaggaagggaaagaaagaaagagaaagaaagaaagaaagaagagaaagaaacagaaagggaaagagagaaagaatcctgttttcacaaactcagtttgaagaagataaacttataactctaaatttgcaagtatcttcaacgtgcctggtgtyttacatagaaggaaacaaagctcaagatgttacattggtaataataagttaactaagcaagcatgttgaattattaaatttggagaatacattgtgcttattatgttacttacccttgcagtgaactagaaaatgaatgtggtcattccagactggttaa

SEQ ID NO: 336673 - DNA, 577 bp, Homo sapiens
ggaaggctttccagaaacagtaaaaactgagtatttactatgtgttgggaactatgcaaaacactttacacatattttctctttcattattatgactacgttataaagtaggtagtagtagtgaggcagaagaatagggtctggaggcagggaacgtaaggccaatgcaagctgactttctacaactaaatcaaatggaaacacttcagctatgacaggaaatakcctctctatttacatggggcgtataccgcgtaaatgactttgtaactttacttcaccctcttcatttacatagagcatacaccaagtaaccaatagaaacctctagagggtatttaaaccccagaaaattttgtaacggaggctcttgaaccgctgtgctcaggtggctcccaccctgtggggcatactttcattttcaataaatctctgcttttgttgtttcgttctttccttgctttgtttgtgcattttgtccaattctttgttcaagatgccaagaacctggacaccctccaccggtaacagtagtgactcttgtatcgttaataaaatgcaggctaaattcaattac

SEQ ID NO: 336674 - DNA, 577 bp, Homo sapiens
ggaaggctttccagaaacagtaaaaactgagtatttactatgtgttgggaactatgcaaaacactttacacatattttctctttcattattatgactacgttataaagtaggtagtagtagtgaggcagaagaatagggtctggaggcagggaacgtaaggccaatgcaagctgactttctacaactaaatcaaatggaaacacttcagctatgacaggaaatatcctctctatttacatggggcgtataccgcgtaaatgactttgtaactttacttcaccctcttcatttacatagagcatacaccaagtaaccaatagaaacctctagagggtatttaarccccagaaaattttgtaacggaggctcttgaaccgctgtgctcaggtggctcccaccctgtggggcatactttcattttcaataaatctctgcttttgttgtttcgttctttccttgctttgtttgtgcattttgtccaattctttgttcaagatgccaagaacctggacaccctccaccggtaacagtagtgactcttgtatcgttaataaaatgcaggctaaattcaattac

SEQ ID NO: 336675 - DNA, 577 bp, Homo sapiens
ggaaggctttccagaaacagtaaaaactgagtatttactatgtgttgggaactatgcaaaacactttacacatattttctctttcattattatgactacgttataaagtaggtagtagtagtgaggcagaagaatagggtctggaggcagggaacgtaaggccaatgcaagctgactttctacaactaaatcaaatggaaacacttcagctatgacaggaaatatcctctctatttacatggggcgtataccgcgtaaatgactttgtaactttacttcaccctcttcatttacatagagcatacaccaagtaaccaatagaaacctctagagggtatttaaaccccagaaaattttgtaacggaggctcttgaaccgctgtgctcaggtggctcccaccctgtggggcatactttcattttcaataaatctctgcttttgttgtttcgttctttccttgctttgtttgtgcattttgtccaattctttgttcaagatgccaagaacctggacaccctccaccggtaacrgtagtgactcttgtatcgttaataaaatgcaggctaaattcaattac

SEQ ID NO: 336676 - DNA, 564 bp, Homo sapiens
atctgccctgtggctactggagataagggactcctttaaagatttcatagaagctttctgattttttcattcatgctctgactttcaatttttctcttctctcttgctacagtctttgtaaaaccactgttgccatagtractaagtgccacaaccacttggtctcccaaggccttcattgcatctgcacttcatcttatgccaccgccagtgattatttgactaatcatgatgtcacagcatgccagagattatcagtatccctttcttaaagtaaaaaagctatccgtgagcacctcaaatatggtagctacccaaccccagacacctattttaagggcatttcctgggaccacttatttggtctcagtcaattactgagtcacttaagatcctgacaggaaacagatggtacactccaatggaccaattagggagaatttaataaaggactatttatagaggtgtgagtagggataagagaaacctaaaagagatgctaaagcactatgcagctagtaaaggctggaagcttttatcagtcctaagtatgaactctacttt

SEQ ID NO: 336677 - DNA, 492 bp, Homo sapiens
cttacatggcaaaagggactttgcaaatgtgactaaagctatggactttgaagtgggaagattatcctggattatcagaatgggactaatgtaacctaatttaatttctcaatwttcttaatttgtttctctagccctaccctgtattgacttcttatactctatgttcaaaggtgacaactcttcatgagatgcatcaactgtgttcctcgaactcaggcaggttgttgaagatcacaaggtactagtggtataagaggatgggaggagagtaaagttaaatcatttattcctctggctcctttcctttctggctatgggtttgcagtgggtgtgtttttctctggccttctcctgaaccatttgttgaaaagactgctctttcccccattgaattattgtattcaaaatatttgaataaaactttaactctgtagaaaatcaactgtccataaatagaagaatttatttctgggctttcaattcatttcc

SEQ ID NO: 336678 - DNA, 455 bp, Homo sapiens
aaactcaggtccttctgaatgcaaaacccacaagctgacctcctagagtttgctgggcccctgctgttataaatgtacacctggctggatttyagagcagttgcaaacagtgatctgggaggtggaaaaggcctgagcacccaggtgaggggcagaagatggagcaccactaaatggaggaaaaggcaaaggacccatgtttctctaagcaccccaggtagttaacacttttgccagagggattccctaaccattttcaaagacttacttcggttttatatccatacacaatattaagttctgggttacacaagatgttattttattgggaaatgttttccaagtaatggtctctaagatatgatgatcgtcattattgtcaccagtaacaatcaacatttatgtaggattctgcaagacatgcagtctgcccagtgccttctctcactgagagg

SEQ ID NO: 336679 - DNA, 453 bp, Homo sapiens
cgcacaaatcttttgtaagcatctatctagaaggtatgtagaaaacctagcagaacacaataattaaaaaaatactaccatttgctgagaccctacaggttcaaacactccaatgcaggcactacgctagacawtttacatatgttctttctaaccttttaaaacaattcaaggtttctccatttttccagttgggaaactacagctaaggaagcttaataacttctgagggactgctattccatggaattccaaagccctggttgtctccacattatcctgctgcttcttttatcacaagagctcaagttgggagggagtgaaattcttaaaagtgaagctgtgctatcagctaagtaatattcagtaagagctatgtcaccatggaatttttatggatttgtctattttgaagagtttgtcttccaagtgaatttttaaattagtaaaata

SEQ ID NO: 336680 - DNA, 453 bp, Homo sapiens
cgcacaaatcttttgtaagcatctatctagaaggtatgtagaaaacctagcagaacacaataattaaaaaaatactaccatttgctgagaccctacaggttcaaacactccaatgcaggcactacgctagacattttacatatgttctttctaaccttttaaaacaattcaaggtttctccatttttccagttgggaaactacagctaargaagcttaataacttctgagggactgctattccatggaattccaaagccctggttgtctccacattatcctgctgcttcttttatcacaagagctcaagttgggagggagtgaaattcttaaaagtgaagctgtgctatcagctaagtaatattcagtaagagctatgtcaccatggaatttttatggatttgtctattttgaagagtttgtcttccaagtgaatttttaaattagtaaaata

SEQ ID NO: 336681 - DNA, 599 bp, Homo sapiens
ttagctttaaatattcattgrtttattttagtatttgttctagggtttatagcttacacctttagcttacagtttataaaccgtgaactatattttggagttttcattcaagtgatactataccacttcacatacagtataagaatcttacaatagtgttcttccatttattttctcctggtcttcacactactcttgccacacattttatatcgtcatatgatataaacctcacaatgcattgatattcactttacattaaaaagccatgtaactttaaaacatctttaagtgtttaaaataaatctcatttaaatataaccacataatcactatatctgggtctctctggtcctttgtaaaaatctatatttccatctgatcaaaactgtgtcagcctgaaggaagtcctttcacattttacatagttagatactactagttataactaagttgtagctgctagttatatataaatcatcagcttttgtaggtgattaaaaaattttggaatagcaattttgtttttatgacattgtaaacagtattttatattttattttttatttctttgttgatgtgtaaaaacaattaaattt

SEQ ID NO: 336682 - DNA, 599 bp, Homo sapiens
ttagctttaaatattcattgatttattttagtatttgttctagggtttatagcttacacctttagcttacagtttataaaccgtgaactatattttggagttttcattcaagtgatactataccacttcacatayagtataagaatcttacaatagtgttcttccatttattttctcctggtcttcacactactcttgccacacattttatatcgtcatatgatataaacctcacaatgcattgatattcactttacattaaaaagccatgtaactttaaaacatctttaagtgtttaaaataaatctcatttaaatataaccacataatcactatatctgggtctctctggtcctttgtaaaaatctatatttccatctgatcaaaactgtgtcagcctgaaggaagtcctttcacattttacatagttagatactactagttataactaagttgtagctgctagttatatataaatcatcagcttttgtaggtgattaaaaaattttggaatagcaattttgtttttatgacattgtaaacagtattttatattttattttttatttctttgttgatgtgtaaaaacaattaaattt

SEQ ID NO: 336683 - DNA, 619 bp, Homo sapiens
caatggtaggacaggcattgaatagacattcctatgccaaaaaggagcaataggaaagaagaagggaataacagatctcaagtccaaaacccaacaaagcaaacaatattaaatcttgaggcttcagaataaactttcgactccatatcctgccttttagacacactgaggcagggctcgggaccctaaagcccttggggtccccacacccacagcttttytgaacacagcccacacagtaactcacacaagttgaaattgggttcctgcacctctctcaggctggtgttgcacactggtggttcgacaattatgaggtcttgggtatgacactgacaaggttctcagaggcatccttagaaatctaggtagaggtaccaatgcttccatagttcttgatgtcttcatggctgcagagttagtagcacatggataccaccatgatttatggcctgtacctttcagaggggcagctgagccacacctgggcccatgagccacagctggatggtcaaggagcattgcactctggtgtaaggagcagagatgtgaggtgctacaaggcagcaaatgctgaagtcctatgggtgattgggtctttttttttgttttttttttt

SEQ ID NO: 336684 - DNA, 465 bp, Homo sapiens
gcagggcacatcagagggagttgcttttgtcatgtgaggtgacgggcaccaagagatccatcatgtctaaattctccctaatagttctccttctttagggtcagcattgcctctccagactccacagcttcaatcagctcacatttggggaaggaaattatgccctcagccccttgcttctcaaggaagggagcttgcctgagaccatagagagggccaggctgctcgagaccatagaaagagccaacccataggagatggtgagtcagggtggaggatgggaagagccttggagactaactcctcccaagactaactcctcctaatcaagcccagccttgcctcgctctcctttcctccaggtaaggtgggggctgctggcccaccccacaagcctacttatttgcttctgtatttgacaagccttgcyctgcctgctggggcagcttggggctgacaagtggc

SEQ ID NO: 336685 - DNA, 433 bp, Homo sapiens
atgcctcaaactcctcactttgaaagcctgttgtaaggttaaaggagacaatggatgttttgctattaagatgtaagttcaacttcactgaactcagcaaatgttgactctggggggcttctccatgccagatgcctgtggggtgctgtagagccagactctgcccccgaccctgtagcccaccatcatccaggaggataggggacagacagacagacagacagacasacacacacacacaaacatgtagagtcctaagcaagctgtggttgtgggagctggggtgtgcgaggagaaagccatgacttctgaccccattcctcagggaggacctgaaggacaagggcagtaggtaaggaagaggaaggccattccagactgcgagtgcagcagaggtggaggctggaggtgggaaggggcagtgtgggtgtgg

SEQ ID NO: 336686 - DNA, 558 bp, Homo sapiens
tctgagcagatcacatctgggctgagacttgaatgataagaaggagacagctgcgtaaggatccctgaggacctccaggaagagaacagcaaatgcaaaggccctgaggcaggagcgagcttggcttgttggaggaacagcaagggccatgtatttgggacccggtgagcaaggggcagatggtaggaggtgtgcacgggccagccatgcagggcctcctgagccatgaggaggagaggcttggggtgtagatggtgtgcttatggtagatgggcacagagaargggcctgtcctgaagtttctctgcaccttctcttctcagagaccagaaaacttcttgacaccaaacaacagcaaggctcttcctaccttggaccccaagatcctggataagaagctgagaaccatccaagagtcctggtccaaggacacagtgagctccacaatggacttgagcacgtccactccacgagaagcagaggaggaacctctggtgcctgagatgtcccatgacacagtgagtgtctctccccaggtgggaagggccggggcagtga

SEQ ID NO: 336687 - DNA, 546 bp, Homo sapiens
tttcttgttctgaaatgaaatacaattaagtgaagattgttatatgaaaaatgtaaggcaaaaaacactctgcagtaagctgctgtgtaaaataaaaatagaaaaaaagacccataaaatactataattggcataaaatgtctttagaaagatacacgagaaactgattaaattggttgcccctgctgargggcctagatggctggggaactgaggacaagaggaaggcatttcactatacatccatttgttccttttaaatgttgatccatgtgattgaatgactcatttttaaataaatgaaaattttaatccatcagaaccttttgggaaactatgtgttcgggcctaggttatttgaaattaatcctttccttactgaaagtgttcactgtgctacagtgatctgtcccacaaaacagggaccaagaaaaacctaatcctaccaactacacctctcctggttatagcactgtgactcagagccaagcaagaacataaccaagtacaaaagaatccctcacttcaaagacacacatgcagtgc

SEQ ID NO: 336688 - DNA, 575 bp, Homo sapiens
ctctgtgcctgaggctgccctctctttgttaaaatggagattcacatgtataaaacgaagttaaaaacaccgaggcttcaaaccgcagctttgtccttgaagtaatcaggaaactccaaagagaattaaaaaggaaaatctctatgcaattcagttttattcaatgcctcaactgggtatcacctaaaataatctctcataacatatatgccacattttggatacactgaggtaatacatttgaagcacgtggcactgggcttattctgaagtaactgaagaaatgttcatttctattacttttggtaagaaaataaaaaaaacaaaaaacagaagcatttggccctgccactacctcctactgcccacccccacaaaattgggactgacagggtggccatattattgcagaaggctccttcctgtcccttgctccttcctgtcttttaaggccacttagtcaatttcttccccayaatacatctttaagtcatccctttctgtctatctccacaccaaccacacagcatctggccttggctcttacaccaacctgccctgccatcttttccttt

SEQ ID NO: 336689 - DNA, 526 bp, Homo sapiens
taggacaaaataatctgaacaacagccttcagccctagaccttccctctgatagtgtgtccagaattggttccttccagtgggttcttggttttgctgacttcaagaatgaagccgcaggccctcacrgtgagtgttgcagttcttaaagatgctgtgtccggagtttgttccttcagatgtgtctggagtttcttccttccagtgggtttgtggtcttgcttacttcaggaatgaagctgcagacctttgcagtgagtattacagctcttaaaggtggcacatccggagttgtttattcctcctggtgggtttgtaaggtctcgctgacttcaggagtgaagctgcagaccttcactgtgagtgttacagctcataaaggtagtgcagactcaaagagtaagcagcagcaagatttattgtgaagagcgaaagaacaaagcttccacagtgtggaaggggatgcaagcaggttaccactgctggctcgggtggccggcatttattcccttatttggccccaccca

SEQ ID NO: 336690 - DNA, 550 bp, Homo sapiens
cacccatccacaaatgggtgatctaaactcaggcaatccatggaccctagcatgaggcctacatgcacacgggtatggcacaaggcctgattgttcttaatttccatcatcaggcccacctgtccacccaaccatrgaccccagattacttaccaggcctacgcagaatttctggacagactgactagtgaggggttttccctgccaaatcttgtttatgaagactgaaagaggttactgttttaaaaatgtgtacacatgaatacaaggatagaaaggtcacaaaaatcataaaaaaacagacactaccaaagaacaatataaagtattgctaaccaaccctgaaaaacaaagatccatgaactgtctggcaatgactgcaaactaataatcttaaagaagcttagtgagctacagaagaacacagataactaaacaatacctgaaggacaatacataaacaaaatgaaaaattcaataatgaggtcaaaaatatcaaaaagaaaacacagaaattctggagctgaacaatacaacaaatgaggtgaaa

SEQ ID NO: 336691 - DNA, 555 bp, Homo sapiens
ttaagttcccaggaccctcagttctttagggatggactaaatggctgcagaagcagtggtgttttaagaaacaaaacaaggaattctaatatatcctttcttactcatgttacctgayatgaataatatgattttgatatgaataatattcatatcactgcttacaaaagtgtgctgaccttgatggaggttatgttgtgaaataaagtttattatttttatttttatcttgtaatcccatttttatgtaattttgtagtcttatcatatttattctcctttcaaaggctaaatctaccactttgtgaagtagattatatttatttttgaccaacaaaaaccatcacataagcacaattttttcccactgaatctccaaaattttactttcctccaggattaaacccatcataataatctcatgctatttattttgctattgttaatttgtttttattagaatagaagaaacactacacaaaacaactcatctctttttaattacttcttgctctacaacatattttactaattctgtcttcagttcactgagga

SEQ ID NO: 336692 - DNA, 482 bp, Homo sapiens
agcgataagaagtaaaggaagggccaggtgtgttggtcttctcctttaatcttcacactttgggagtacaaggttagcagatcccttaagaccaagagtttgagaccagcctgggcaacatggcaaaatctcatctctaccaaacaaatacatataagaattaggtgggtgtggtggtgcatgtctgtaatcacagatatttgggaggctgagataagaggataatttgagcctgagaggtcgaggctgcagtgagctgtgatcatgccactgcactccagcctgggccacagagtgagagagtgtcaaaataaatraataaataaacaaacaaacaaacaaacaaataaataaattactgtgatttttatgtacatcaccgaaagtcaacctgttgcaagatctggacagcaatataaatttgtataaagtatatataaaactctaatgaagttaatgttaagatgtatgtcctatcctta

SEQ ID NO: 336693 - DNA, 529 bp, Homo sapiens
ggcatgtgtgcgagccggatgtgccaagagcacgttcaccatgatgtctcacctcgggccaagacctatgtgccttatccactgtgctttttttgctcactttctgctctctggtgtaaagatattgttaaaaatttcaaaaaggcctgctgataacctcataggtaacagcgataagaagtaaaggaagggccaggtgtgttggtcttctcctttaatcttcacactttgggagtacaaggttagcagatcccttaagaccaagagtttgagaccagcctgggcaacatggcaaaatctcatctctaccaaacaaatacatataagaattaggtgggtgtggtggtgcatgtctgtaatcacagatatttgggaggctgagataagaggataatttgagcctgagaggtcgaggctgcagtgagctgtgatcatgccactgcactccagcctgggccacagagtgagagagtgtcaaaataaataaataaataaayaaacaaacaaacaaacaaataaataaattact

SEQ ID NO: 336694 - DNA, 540 bp, Homo sapiens
aataaataaattactgtgatttttatgtacatcaccgaaagtcaacctgttgcaagatctggacagcaatataaatttgtataaagtatatataaaactctaatgaagttaatgttaagatgtatgtcctatccttatatatcacatgtgtatgcgaatrttgcaaaattcaaaaatatccaaaatccaaaatacttctggtcccaggtatttcaaacaacagatacttaacctgtattattaattatataatactattttaaatattattatattaatatgaaatataatatatagataaattaatatattaaattactgttatagtctaatctatcatattaacattagataaaatgtattatattttagtatatcgtatcatatattaataaattaaaggttattaaaattaatactataattattataaattatttttatttatccaaatgatttatacaatcttattacatatcaaagtcttgtatcagctatcatattagtaaaatatgagagagctccaagaagttaagcaga

SEQ ID NO: 336695 - DNA, 582 bp, Homo sapiens
aggattacttagcaaagcatgcccaggtccaaacaaataccaaccagtccttccacaatatgttttgaaaaaaagaattatttcccatttggataagcaaaattattacatttctcagttcctgtgtgtctagatgataccttgaagctgatttctgaccagtgaggtgctggtraaaatgattcatgccacattcctgctacacccaataatgtccttcacagtctcccatatgctctccttactcacacagctggacatgaagggctaagatatgaagagccaggagagggaaagagcacagactttgaggttactgcctggaacaaggttgccaaaaatgcacctgatcaaggaaatctgcaatagatttgcttgaactggaaataaacctttaggattatagtacatgtatggaatttgttcattccagcaagaaaaccctcactaacacaattagtataaacttagtgttaaagaaagataattctgacacttgttaaaaaccgtaaagactttattcagtattattgcaatgcgagttgcaataagggagagcgatagggctcaactatgaatata

SEQ ID NO: 336696 - DNA, 594 bp, Homo sapiens
ctagcataagaaattagaaaaaaattataaagattctatgcaagtagaaaaagagggaacatgggcagaaatcaacaaaactgagcatagataaaaaatgtacaaaaatcaatgaaaccaaaygctggttctttgacaagataaataaaatcagaaacttccagccagactgcccaagttaacagtgaaggagctttcaagtataaataatagcacagaatatgaattattcttgcataccttcaagattaaataaataaaattaaaatattttatgagcagttatatgcctataaattgacagcttatgagaaatagacaaattccttgaaagacacaaattgccaaagttcgctcaagaacaactgataaactgaaagatcctgtatttattaaacaaatagcattcatatgtaaaactctgcactgaaactggaacccttccttacaccttatacaaaaattaactcaaaatggattaaatatttaaacctaagacataaaaccataaaaaccctagaagaaatcctaggcaataccattcaggacataggcatgggcaaagacttcatgaccaaaacacaaaaagtaatg

SEQ ID NO: 336697 - DNA, 615 bp, Homo sapiens
taatgtggtactagaagtcctagccagagcagtcaggcaagagaaaaaaatgaaaggcatccagctaggaataaaggaagtcaaattatctctcttcactgactatatgattatatgcctagaaaaccgaaaataatctaccaaagtctcttaaaactgatacatgactttggtaaagtttcaaaatcaatgtataaaaatcagtagcatttgtatacaccaataatattcaaactttgagccaaatcaagaccacaatcccatttacaatagscacacacacacaaataaaatatacctaggaatacatctaaacaaggaggtgaatgatctctacaaggagaattacaaaacactgcaaaaataaatcagagacataaacaaatggaaaaagaaattccatggtcatagattggaagattaaatatcattaaaatggccatactgcctaaagcaatctacagattcaatgctatttctttcaaactaccaatgtcatttttcactgaataagaaaattattctaaaatttatatggaataaagagcctgaaaagtcaaagaaacccttagcaaaaacaacaaagctggaggcatcacattacctgacttttaa

SEQ ID NO: 336698 - DNA, 568 bp, Homo sapiens
tatagtcatattttaggtctacttttgttatgtattagttatgagatgactgagtatatttcccatatattaaatggtgatatttttctccttcacagaaaaggaagaagggaaatagagtaagggagaaaaaaatgacaaattaaacagaacccaaaatttggaaagtaactgtaccatgcctcacaaaacagttaaactgaaaaacaatamcatgcagtgtagcttgagtgaaaattattttaacgagtgttatggccatatttttccacaataagaccatagatagattaactaaactcagattttacacagactaatattccaaagataaactcatcacttttccagtaactggtttattttaccaagtttcaccaattctgctggacctccctctttgaaacattcctgagatggtcgatggctggtgttctgccttgcaagtttaagaaaacaaactttgtctagtcagcaagtattcctaggtgcccttctatggaaacttcaacagaaaaagacaagtggaagtcacagaatacctatgagagcgtgggttgtatacaaa

SEQ ID NO: 336699 - DNA, 566 bp, Homo sapiens
gaaagcacctggataagaacctgactgactgtactcaactaaccccacaattaagggaacaccagctctcccagaaagagaatcagcacaagaattctggcaattcaaaaagccaaagcattcctttgtctctaaatgagcccactagctttccagcaatgattcttaaccagaytgaaatgacagaaatgacagacatagagtttagaatctgtacggtaagtaagctcatcgatattcaggagtaacataaaatgcaatccaaagaagccaggaaacccagtataatgatctccaggagctgatgacaaaataggcatttaaagaaagaactgaaaaattcactacaagaatttcataatataatcacaagtattaattgcaggaaaaaaaaactgaggaaagaatctcagagattgaagaactgttctttaaatcaactcagtcagataaaaataaaaaagaaagaatattgaaaaataaacaacatctctgagaaatacgggattatgcaaagagataagacctatgactcactggcattcctgagagagaaggagagagag

SEQ ID NO: 336700 - DNA, 566 bp, Homo sapiens
gaaagcacctggataagaacctgactgactgtactcaactaaccccacaattaagggaacaccagctctcccagaaagagaatcagcacaagaattctggcaattcaaaaagccaaagcattcctttgtctctaaatgagcccactagctttccagcaatgattcttaaccagactgaaatgacagaaatgacagacatagagtttagaatctgtayggtaagtaagctcatcgatattcaggagtaacataaaatgcaatccaaagaagccaggaaacccagtataatgatctccaggagctgatgacaaaataggcatttaaagaaagaactgaaaaattcactacaagaatttcataatataatcacaagtattaattgcaggaaaaaaaaactgaggaaagaatctcagagattgaagaactgttctttaaatcaactcagtcagataaaaataaaaaagaaagaatattgaaaaataaacaacatctctgagaaatacgggattatgcaaagagataagacctatgactcactggcattcctgagagagaaggagagagag

SEQ ID NO: 336701 - DNA, 566 bp, Homo sapiens
gaaagcacctggataagaacctgactgactgtactcaactaaccccacaattaagggaacaccagctctcccagaaagagaatcagcacaagaattctggcaattcaaaaagccaaagcattcctttgtctctaaatgagcccactagctttccagcaatgattcttaaccagactgaaatgacagaaatgacagacatagagtttagaatctgtacggtaagtaagctcatcgatattcaggagtaacataaaatgcaatccaaagaagccaggaaacccagtataatgatctccaggagctgatgacaaaataggcatttaaagaaagaactgaaaaattcactacaagaatttcataatataatcacaagtattaattgcaggaaaaaaaaactgaggaaagwatctcagagattgaagaactgttctttaaatcaactcagtcagataaaaataaaaaagaaagaatattgaaaaataaacaacatctctgagaaatacgggattatgcaaagagataagacctatgactcactggcattcctgagagagaaggagagagag

SEQ ID NO: 336702 - DNA, 627 bp, Homo sapiens
atttatattagtatgtcttactttcacataaacaaaattataaagactgaatttctctcatagtctgttagtttttttggttactgttttttctttctttttaagtttgataaagatagaattctcacaatagttagaagtcacttaawatttgaggaatgccagttgcttttattatccttccttttaaagatgaaatgaagaagcaaaattcttgttatatgatggccattccagaaaaaatgaagagaggtttatacataaaagacattttaacagttgtactcttctgaatttgagcttgaatgcagtaaaagcaacattttaaaagaattaactggaagtaatagttattgggaaaaataatagcattgggaataataattagaaatatatttttcaaagaataacaaattttgtatcaaaataaataacaaaatttatatctcttggtagagaataactttattttatagaaaggaatacaaattatactctttcttaacttcacaaatcataattttagctttaacatataagtaacattttaaacattaaaaatgcaaattcatattaaaattacattaataaactataacaatttttaaaaataaatcatatccatta

SEQ ID NO: 336703 - DNA, 659 bp, Homo sapiens
gactgtaaactaaataaatgtacagcttctttctgtgtatgccaaaaacttactaagagaagtcagtgtttacatgagcakaaaaagtacattctacgtaatgttattctaacatcaactatgttacgaactgaaaattaatttagctaatccctacagtaatacactgacatgttataaatttcaagttcaaacagttaaatctatttatgattacaaattttttaagtctaatgcataaaccctctcaatgctaaattaacagtttgataagcctaagatgaaaatgtttgcatcatattttgatctatttgcaaggtagggacttcatggtctaaattacttgagaatttatgaaaaaaaaatgttgaatcacagctcttatctcttgccattaattcttaagaacttattaaaattattccaaagcttctttgcatggtaaattatacttttttccatgtaagagcacctgattgataagcttttacttgttaattatgtaaaggaaccaattaaaaatattattttgatgcacaattgtctctgaaggtgttagggttctaatggtaatgcaaggacttctcaaattgttatttataaatagttgatacacaagtaatataactacaaaaagcatctgataatgtggccatgtg

SEQ ID NO: 336704 - DNA, 619 bp, Homo sapiens
ctatgttttggctttctttgggaatggctatccaaatgatcccaggaactagataaatagacttttaagagcatccttaggaaaaatgccagcattactgagtggctccrggaacatagtgactgtgtgatcagtattagcaagagtaagcttgctccacctatccacagagaaacatgtgactagttattttcaccttggccatgtggcctgcctgaagttttggaacactagcaactttagactcatgcttggggccacatatgtaaagtgcaacctaagaagaatacttcttaaaatctaatattggcacacatgtgtgaggaaatcatctctgggggcaaaaacatgagcatgttctttttccagtcctcccaggagctcttctaccttctttgcctccaacctgaagacctcttcttagctttcgctgtaactgtagatgtcattccaagactctgtcctccacctatgagggattttattactcgtgatttcaacctcaccatgctgatggttcctaaaactctatctgtcctgaccttcctcccaagtgttacacttcaaatgcttgctggacttttccatcagaaactttaggacctacatgtgaaaatct

SEQ ID NO: 336705 - DNA, 588 bp, Homo sapiens
ttagtcaacaactacataaaaaaacttttctaatttggatttatacttctgttttaaaccgtatttgggaaaaaaaaaaaaaaaaaaaaaaagctttttagattcattgaccaattgaccaatcagcgaaggcatatgagtgaaacaggtytgggacataaacaaaactcctatttctttaattcttaatcctattttaattgtgtaaaagattgttgtattcacatagcacaggggtttggagataagcagagtggtcagtttgacctgggatagctcgtttaggagctatgtagattcaagcaggaagggtttttttaaacccatctggacatcagtgtcatctttaatatggaatcataaactatctactcatcacgttattgtgaagataaaattagataatctatgtagaactctatgtagactggcatgtagatatactaatctctcaatgaatattaactactatttattattatcattgaaaaatgcaattccaatgggatgaactattttttctaataaataatttttctataaataaattgttccatttatttaacaaaacatcatgtgttcaaacgg

SEQ ID NO: 336706 - DNA, 498 bp, Homo sapiens
attggtagctatgtgaaatgtatccgtgtaagacagctttgagcctactctaaatcccagacaactctataaagatttttatattttttgaggcagggtcttattctgtcacccaggctggagtacagtggtgtgatcatggctcactgcagcatcaacccacctggctcaagcgatcttcctgcctcagcctcccttgtagctgggactgcaggcatgtgccaccacagctggctatttttgtttttttaactttttgtagagacagtctccctaaggaacccaggctggtcttgaactcctggtctcaagcaattctctctcatcctctcaaaatgctggcattacaggcatgagactataaaacttattccactattccactattttgacagattagattaaaataatmcaagaccatatttttgtgtgcagctccacacactttccaattttgtagcaataacatagcagtggatttatactaaaaggggctgt

SEQ ID NO: 336707 - DNA, 528 bp, Homo sapiens
tcgtcagaattaagcagtggttgtcagattgatgtgggcatgatcagagcaactgtctgtgaatgaagctgcatatgtgcaagtgtagagcctcatgtggcagttgtttttagtccccatactcagttcattttttacctttttcctcagaaatgaaaggtcttcagggtaggataaaagagaccaagatgcagatgagcaagagcccataaaggcacaccttggggcataaggacacttccccattccacaccccaccccaccccctaaactgtcattacttaaaaaaaaaaaagaaagctctttatgcaggctggmgtgggcagaggggacagtttgaaataaatctctgcacctcagtgggtatgcagtcattgctgcagtcagtgaaggctgttactgcccttgggaaaaagagaatttgcaatgtgatatttcctttgaggaataaaggaagacagcaacagtgcctatgggagttagaggagggaagcaggcagagaaaaccatttatcagaaagttgagaa

SEQ ID NO: 336708 - DNA, 599 bp, Homo sapiens
tgcatattgtctgattagaacccttcttccccatggtgctctgatgaggggctgccaaagtagtgyagctgtgctccagcgtcttacaaagttcatcccgattcttcctatagggttcaaatataaggagcactcagaagctgaccaggagttcagtgcctgtgacagcagccagcctttcctattttatgaaggacaccttgtcactgcatgggtctccttatgaattgctccatcttccgtttgaatgagctgtttacaaaagtctcccagtctcctcatcaatcaggattaattgatttgttaaataactgattaatcactggaaccaatgaaaccccaaaatcacagtgacttaaataagatagtagttcatttctctcccacataaaataaatccagacgttggtaacctggggctggtaaggcgctccatgggctcaggaatccagggtccttctatcttgcttctctgccatccttaccatgaggcttccacctcacagcctgagctgatggttcaagctgtaaccatcatgtccagcagaatcacaaaaagtggatagcagtatttatgctttatctttaaggccacttcc

SEQ ID NO: 336709 - DNA, 599 bp, Homo sapiens
tgcatattgtctgattagaacccttcttccccatggtgctctgatgaggggctgccaaagtagtgcagctgtgctccagcgtcttacaaagttcatcccgattcttcctatagggttcaaatataaggagcactcagaagctgaccaggagttcagtgcctgtgacagcarccagcctttcctattttatgaaggacaccttgtcactgcatgggtctccttatgaattgctccatcttccgtttgaatgagctgtttacaaaagtctcccagtctcctcatcaatcaggattaattgatttgttaaataactgattaatcactggaaccaatgaaaccccaaaatcacagtgacttaaataagatagtagttcatttctctcccacataaaataaatccagacgttggtaacctggggctggtaaggcgctccatgggctcaggaatccagggtccttctatcttgcttctctgccatccttaccatgaggcttccacctcacagcctgagctgatggttcaagctgtaaccatcatgtccagcagaatcacaaaaagtggatagcagtatttatgctttatctttaaggccacttcc

SEQ ID NO: 336710 - DNA, 577 bp, Homo sapiens
aattgttttaaaaataagtttttcattattttatacccaattaataccagttggagatcctaaagcaataattgagaactatttagaattcagtcatatatagatgctgtgggtattattaaatatccaatgtggagctgtaagatttgattatttctattgctggcctgaagaagtacagatttccatgttactttggttattaaaaatattagggcaaattatctggaaaccataatagtcaacataggacttgtataatrttttgatttcctttacattgtcagcattttgaacataaaacagtaagcagaacttttcaaatatatctgttcaaacagtatggttagaggttgtatgtggaattcaactatgatgttttaagatacctccacaccaagaggaaccagtaacaaaaatgagggaatcatattcttctagttcttatgttattctctagaagtatgatagactctttgggaaggaatattaacttttgctacagagtttaatggctaaagaaactaaggtgcttacctgactgaagcagtaatgtcttaaatctgtgtagctgagg

SEQ ID NO: 336711 - DNA, 607 bp, Homo sapiens
ttttatacccagctttgataaacaacattcctttgtaggttggtcaaaactaacttcttattttatttttattttttgagagaattaccagatgggcagcatgctatagaagtggtgagtttgatctcaaccaaatcatttagaatgctttcagaggtgggcagtcatgtgagtaaggactccagaaatcatatcaaatttgaagaacctgacartattgaatgtggagaaaaatagactattttagatattcgaaggactgtgttgaatgagcagtgttgatcagaaggaaaatttattatattgggagcaaatttatcaaggttaattataaaaaaaaatgtgttgctagtgtatccagagcaacacacataggttatcaagaccttggagcaacaccagataagaagggtaactgtaggatgtttccattcttggggccacagaggtgaagtgagccaaaaaaacacagtgggaattaaacaaagtagggttaagttttcattaaaggctgtgcctgcattcaccactcctggttgccctggcaacggggctcccttgcatgctaatgacattataatgtgaaaaaacacatgcaaatgcagta

SEQ ID NO: 336712 - DNA, 512 bp, Homo sapiens
aggacacacctgctggattgtgtgagggatttagaataggggcatataagggaacacagggcagtcaataattctacacaggcagcaaatttgatgctgaaggatgaccaatgtggatgccatgccacttaacgctactgttgcagccgcagatcctaktatttgaaatatgcctcaagaaggaaacacttaagaagtgctgaataagaattccaatcctggcttcatcgctaacttgctttgggaacttgggctttaatttgctcaaagcctcagtttgctcatctgtaaattggggcaaataacatctgttcaacttacctaccagaaatgttgtgtggctaaaaagaaatagaagatatgaaaatgctttggctatattcaaagttctatatacatggaagatattcaggatcctcccaccttcaaagttcatatctaagaaaacccctactaaatcctttagaatggaactgctcaatatagtagccactagccacattgactactga

SEQ ID NO: 336713 - DNA, 583 bp, Homo sapiens
ctggtcttgaactcctgagctgaaggatctaccaccttggcctcccaaaatgttgggattatagctgtgagccacagaacccagccgccacatttaaaatcttttgataattcaagtcatcaatgtgaatatcagttattaaacctataggtctacctaaccataaaagtgacctggcttcattcaaataccctaatattgttgttctttctaattacctgttgtttgttactgttctctctctatttttattgttggctcataatttctcatatctctgaggatactcgtctataatatgccctgtgcttgcccttaattggtggtgctactgtgtataagtgatgatgataatgatagccacaactatgccaggcattatggcaggcagtgtactatatatatacataaactctgtatcttacttaatcttcacaagaatactatcagtaaagataactygaccctttttttatatatgaaaaaaatgatactcacagaacttaagtaatacacctacacccacgtagccagtaagtaacacctagaatacgaatatgggttatttcattccaaaatcctt

SEQ ID NO: 336714 - DNA, 583 bp, Homo sapiens
ctggtcttgaactcctgagctgaaggatctaccaccttggcctcccaaaatgttgggattatagctgtgagccacagaacccagccgccacatttaaaatcttttgataattcaagtcatcaatgtgaatatcagttattaaacctataggtctacctaaccataaaagtgacctggcttcattcaaataccctaatattgttgttctttctaattacctgttgtttgttactgttctctctctatttttattgttggctcataatttctcatatctctgaggatactcgtctataatatgccctgtgcttgcccttaattggtggtgctactgtgtataagtgatgatgataatgatagccacaactatgccaggcattatggcaggcagtgtactatatatatacataaactctgtatcttacttaatcttcacaagaatactatcagtaaagataactcgaccctttttttatakatgaaaaaaatgatactcacagaacttaagtaatacacctacacccacgtagccagtaagtaacacctagaatacgaatatgggttatttcattccaaaatcctt

SEQ ID NO: 336715 - DNA, 583 bp, Homo sapiens
ctggtcttgaactcctgagctgaaggatctaccaccttggcctcccaaaatgttgggattatagctgtgagccacagaacccagccgccacatttaaaatcttttgataattcaagtcatcaatgtgaatatcagttattaaacctataggtctacctaaccataaaagtgacctggcttcattcaaataccctaatattgttgttctttctaattacctgttgtttgttactgttctctctctatttttattgttggctcataatttctcatatctctgaggatactcgtctataatatgccctgtgcttgcccttaattggtggtgctactgtgtataagtgatgatgataatgatagccacaactatgccaggcattatggcaggcagtgtactatatatatacataaactctgtatcttacttaatcttcacaagaatactatcagtaaagataactcgaccctttttttatatatgaaraaaatgatactcacagaacttaagtaatacacctacacccacgtagccagtaagtaacacctagaatacgaatatgggttatttcattccaaaatcctt

SEQ ID NO: 336716 - DNA, 583 bp, Homo sapiens
ctggtcttgaactcctgagctgaaggatctaccaccttggcctcccaaaatgttgggattatagctgtgagccacagaacccagccgccacatttaaaatcttttgataattcaagtcatcaatgtgaatatcagttattaaacctataggtctacctaaccataaaagtgacctggcttcattcaaataccctaatattgttgttctttctaattacctgttgtttgttactgttctctctctatttttattgttggctcataatttctcatatctctgaggatactcgtctataatatgccctgtgcttgcccttaattggtggtgctactgtgtataagtgatgatgataatgatagccacaactatgccaggcattatggcaggcagtgtactatatatatacataaactctgtatcttacttaatcttcacaagaatactatcagtaaagataactcgaccctttttttatatatgaaaaaaatgatactcacagaacttaagtaatacacctacacccacgtagccagtaagtaacasctagaatacgaatatgggttatttcattccaaaatcctt

SEQ ID NO: 336717 - DNA, 578 bp, Homo sapiens
ggagatacaattcaatctatgacaaagtacataatccaatgggaaagatgttttagtagagcagttttgagtaatctgtccttgagggaggcatctaaaataggtccccatttcacagtaaagtaccttcaatctctgaaacttcaagaatgtagtttggaaacaacaacctaggaggagagtttggagaagagggatggaaaatagcaccctgaagaagccagsattgatggggtaaagacaagaggaggcactcatgaaggaaatagagaataggtagccagagaagttaaaagggaactgggtgagggtgatgtcaaagaagccacaggcaaagagggtttcatagaggcagaagtggtaaggaaagccaaaagccacagagaggtcagggaagaagaggacgaagaagcaactgttggatttgcaaattaggaggttagtagtggcctagaattaaaatgttttcaatggagtgggagggaaagaagccagagagaactgaagcatgagttagaaaatgcggataacatgtgtagtctattctttacagagacttggccatgtaaggaaagaaa

SEQ ID NO: 336718 - DNA, 501 bp, Homo sapiens
actgtgcatgcctcaggaccttttagacctcctctcctcttccatcaatcacctactaatcccagaatccacccctgagccttttctaataaaattactgccttaaagccagcacagggagacagatttgagctgggctcctgtgtccttgttagacgatttacaagaaaaagctttgcttttctcaaaatctggggtcatagtgttggattctatcacataaggctgtgagcccttttgatcatawcacacaatctattattttggagctatcttacacgagccagttggctagcctaaaacacacacacacttttaaaaacatacaaagaactgaaaagcctcatttgtccaacagtcctcaactcttccctgaatcagaatatttactttgcctacactgctataagatactgggtgtgattttccctctcctatccccattctagtcaagtttctcaaacgttgacagcaagaggaaggaggtaaatgaaagaacat

SEQ ID NO: 336719 - DNA, 501 bp, Homo sapiens
actgtgcatgcctcaggaccttttagacctcctctcctcttccatcaatcacctactaatcccagaatccacccctgagccttttctaataaaattactgccttaaagccagcacagggagacagatttgagctgggctcctgtgtccttgttagacgatttacaagaaaaagctttgcttttctcaaaatctggggtcatagtgttggattctatcacataaggctgtgagcccttttgatcatatcacamaatctattattttggagctatcttacacgagccagttggctagcctaaaacacacacacacttttaaaaacatacaaagaactgaaaagcctcatttgtccaacagtcctcaactcttccctgaatcagaatatttactttgcctacactgctataagatactgggtgtgattttccctctcctatccccattctagtcaagtttctcaaacgttgacagcaagaggaaggaggtaaatgaaagaacat

SEQ ID NO: 336720 - DNA, 574 bp, Homo sapiens
tcccaaatccagggaactcttttatcgtatttaatcttgtcatttgaaacttttgtccactgtctcggcacktcctcatttttgtagtgtctatcataccatgctttctgtccatctttacacacctcctcctgtctatggttcccttttttactcccacctgtccccattcattttttttcctagattcaggccaaattgccaatctgaagaagtctttcctgacatactccaccaccaggtagatttaaccccttctttttgttctcccactgtcctttgttaaatcttctgtcatagcagtctaaaaacttagcgcccctatttgttagcatgtccctctccatctgctagatggtaggtcttcaaggcagagactgggtctttatacccgttccatgttggctggctagttaactggtacttaaatattttaacaagcgggtaaagaaaattgtcacctttacacttcttcatattcccactcctcctaaatagaggtcaaaatgggagggaagctttgaaagggaaagagattttttgcagatttgccaagtatctggaggaaatgcaa

SEQ ID NO: 336721 - DNA, 656 bp, Homo sapiens
caaaggatggctgccttggctttctggacatgagtaaactcttgtcattttctgtgcctggttctcccaataccagtggattctgaaagttgcttttatccttccagtaaatgcccttttctactgatgattgcaggttagtctcatgcttgcagccaataatcttgacttgtgcagatgtgagacctgtctttaaggttggaccctggagccaggagagctcttatttctgtctgtgtcaagtgttagaattatacacagacgccacagaccgtaattgaaccagtgagtcatgggaggggtgctcatcaccaaagccaaaggtaataagaacatcaacaacagcaaccaagagcctttcttatgtgagtgctttgctgtttctcttgcattattccatctgattatgatgaccttctgtggttggtagccccattttgtaaatgatggaacagaaagattaaggaatctgcctcagttcatattgtcctaagtggcagttgcaattcaaactcagaactatctgagtctatagtctgtggtacaaaagtgtaactaggtggcaggtgmagagaaactgctgagtccagtttggaaagattggaggagcatacagaggcaggaggtagagaatcaggcaagaagcacaagggcca

SEQ ID NO: 336722 - DNA, 550 bp, Homo sapiens
cacctgccagggccgaatccgactctcctgcacaaactcaaggagcaacacagrcagcattcacatcactttggtgagcacagagcagcctccaagtcccctttctcacggtgcctttccttctgctcagcatgcgggtcacaggctctctgctttggtccagactacctgatcgggctggttaccccagacacaaaccatcccattcacctctgaacacatgcacaggctgggtctctccccaccaagcctggctctaagccattttctaaatactacttgagctgcttctcctccaagaagccttcccaggttaaccccattcaattccaactgcttctttaatagtcttttccttgggtacccatatatagttttaattgaattaagtaagccacttgtcatttaacaagaaagtactgggttcttacactcagccctgagggaaaatacaagagaaagtcaaatgtgggtcacaagccattcctgagccattgggaggactctacaagatagaatatgactcaggatataactcggggatacagag

SEQ ID NO: 336723 - DNA, 550 bp, Homo sapiens
cacctgccagggccgaatccgactctcctgcacaaactcaaggagcaacacagacagcattcacatcactttggtgagcacagagcarcctccaagtcccctttctcacggtgcctttccttctgctcagcatgcgggtcacaggctctctgctttggtccagactacctgatcgggctggttaccccagacacaaaccatcccattcacctctgaacacatgcacaggctgggtctctccccaccaagcctggctctaagccattttctaaatactacttgagctgcttctcctccaagaagccttcccaggttaaccccattcaattccaactgcttctttaatagtcttttccttgggtacccatatatagttttaattgaattaagtaagccacttgtcatttaacaagaaagtactgggttcttacactcagccctgagggaaaatacaagagaaagtcaaatgtgggtcacaagccattcctgagccattgggaggactctacaagatagaatatgactcaggatataactcggggatacagag

SEQ ID NO: 336724 - DNA, 550 bp, Homo sapiens
cacctgccagggccgaatccgactctcctgcacaaactcaaggagcaacacagacagcattcacatcactttggtgagcacagagcagcctccaagtcccctttctcacggtgcctttccttctgctcagcatgcgggtcacaggctctctgctttggtccagactacctgatcgggctggttaccccagacacaaaccatcccattcacctctgaacacatgcacaggctgggtctctccccaccaagcctggctctaagccattttctaaatactacttgagctgcttctcctccaagaagccttcccaggttaaccccattcaattccaactgcttctttaatagtcttttccttgggtacccatatatagttttaattgaattaagtaagccactkgtcatttaacaagaaagtactgggttcttacactcagccctgagggaaaatacaagagaaagtcaaatgtgggtcacaagccattcctgagccattgggaggactctacaagatagaatatgactcaggatataactcggggatacagag

SEQ ID NO: 336725 - DNA, 529 bp, Homo sapiens
ctttgtccttcaaaggactggacaggaataacaaattcaaatcttaatggggccatacaggtaagtcagagagcaaactgggctgctgtaagatgatagggtgtggtagggtctttgacaaaacagtgtgcatcctcacctgcagccaattgccaccaagtgaaaatgcaggcttaaggctgccagaccttccgatgcttccagagaagacagatatcacatttgtctgtaaatatccagatttctaagtctacgcaattaatttaaatttttaaaaaacaaaaacatgtgtagtcactcgtgcacagtatgtgaaccatggacttcyagtttaggtccactgggtgaataagccaggacgctagggaagagaagggttttaaaggcttaggacttcagtgttgaaaaggggaaggcctgatctaggagacatagaaactaggaagagaggaggagttgcaggtttcagagtgatgaagacctgaaccaacacaaatgcagcacccatggaggcggcatctaggaacaa

SEQ ID NO: 336726 - DNA, 506 bp, Homo sapiens
ggaaactgggggtgggtggaaagaaagagagagagagagcacacaaaaataagtcgctattgggagacagaaaaagggtmtaggtccctgactttccagtcctcagttctaatggctgcaaaacccaactgtacctctttttctccagaagccctgaggtggccatgatgtgtctacagttatccctcccaccccattggctttctagtagtgcacctctcagctcactgtgacactcagggtcttgggatttctctaaggctcacatgtccactggtgctcgtggcaatgctggaggagcatctgtatgctctctggtttgtagttgcatcagtgactagagcagcaaaagggagccacacaatggtcattctgttgacacacagttcgtttgctttggggccttttagaacgagaccctacctggtttgggaggccaaggagtgttttcttcacatttgattacaagattttttcccctttcccttagaaaccatattttttcc

SEQ ID NO: 336727 - DNA, 640 bp, Homo sapiens
ccctcattcaagtaagatgcactgtactcaaatatgccctcaattttatgaaaattactttagatgggatttaggatcagaagaatggatttcatttcataggacttattagttgaaaagaggttatccctggctctgaacagaaatctgtttcctatatttatccaaggctttaaaagcccccctcatgaggtaccaaaagctaaggaactctggytttggaaacttgttgggcagaaagtctaacatcatggaatgacagaaagataaggcagtgtgtcctgtgtcctcttaccaagtgccaactgtgccctgttaaagtcctgacaggctcaagttgctttaattgtcacctttctcctcccacttctggcctacaaactgctctggcaaatctccattggaacaacacccctataaacacgcacacgtgcatgcatgcacacacacgcacacacttaccagcactgtggctcttgccctcttctttctaagcattacagtaataatgacatgaagtgtttgcctgagctgagttataacagagtgactatggcttggcaaagcttcagtgaaaagggcactgtcatacccagctggcaggagtgcaaattgatacagactttctgcagggcatcgg

SEQ ID NO: 336728 - DNA, 502 bp, Homo sapiens
cagtatagcccactttgtccaatagaactttctggagtgacagaaatattgtgccctttccaatacagtagccaccagccacatggggctatgagtacttgaaatatggtcagtatgactcagraagtgagttttaaattttatttaattttaattaatttaaatactcacacacagtagctatttaataccatattgaacagtgcaggtgtagacaaagttttcttaaattttagtgtgcatagcaatgatctgggtacttatcataaaaattgattcccaggcccctccccaaggagtcagattcagtagacacgagtggggccaaggaatttgccttttgaaccaccaccccgaacttctcatacaggttgaaatttggaccacatttagagttactattaaatgggtttagggtatcttggaggagttagtcttaggccattttttgactttgaatattttggtccctaagctacaacttcctatccaaacacccacc

SEQ ID NO: 336729 - DNA, 475 bp, Homo sapiens
cagcccagatattacactttcccactatcttcgcaacccacagaccaggagattccccggggtgcctataccaccaggaccctgagtttcaagcacaaaactgggtggttatttgggcagacaccaagctagctgaaggagttgtttttcataccccattggtgcctggaatgccagtgaggcagaaccattcactcccctggaaagggggctgaagccagggagccaagtggtctagctcagcggatcccacccccacagagcccagcaagctaagatccactggcttgaaattctcactgctggcacaacagtctgaagttgacctgggactcttgagcttggagggggaagggcgtctgccattmctgaggcttgagtaggcggttttcccctcacagtgaaaacaaagccacatggaagtttgaactgggcagagcccaccacagcttggcaaagccactgtagccagact

SEQ ID NO: 336730 - DNA, 548 bp, Homo sapiens
gtgtgaaggactgtgacaaaatcctttggctagatgactcctttccttgttcttcaggagcctcctccagccccttcttgcccctagatggcacctccatakcagggtgacttcagttacttctgtttggaatgccaaaccctggagaccaaaagtccttttcagtattccacaaagaggatttcatctcatctgcgacctggaaacaggaggtgtcaggggagcacggatgaatctacaaaggggccgtgtgctgttgtctcctctaccttgctgcgtagggcctgagcctccactggtttcaaaattaaatattccttctcactcaatggaaggaaactgaaaccactgcatcgttagcactgggtttgtaaaaatacttctccccggagtatctttaacattcattttattttgttgaaacccagcttgtccttttttatccagagcagcagagaccttctgagcagaggctttagccaaaaaaggaagatattctggcaaatttctatagatagaaaaattcccttttcaagcagcttattttg

SEQ ID NO: 336731 - DNA, 548 bp, Homo sapiens
gtgtgaaggactgtgacaaaatcctttggctagatgactcctttccttgttcttcaggagcctcctccagccccttcttgcccctagatggcacctccatagcagggtgacttcagttacttctgtttggaatgccaaaccctggagaccaaaagtccttttcagtattccacaaagaggatttcatctcatctgcgacctggaaacaggaggtgtcaggggagcacggatgaatctacaaaggggccgtgtgctgttgtctcctctaccttgctgygtagggcctgagcctccactggtttcaaaattaaatattccttctcactcaatggaaggaaactgaaaccactgcatcgttagcactgggtttgtaaaaatacttctccccggagtatctttaacattcattttattttgttgaaacccagcttgtccttttttatccagagcagcagagaccttctgagcagaggctttagccaaaaaaggaagatattctggcaaatttctatagatagaaaaattcccttttcaagcagcttattttg

SEQ ID NO: 336732 - DNA, 548 bp, Homo sapiens
gtgtgaaggactgtgacaaaatcctttggctagatgactcctttccttgttcttcaggagcctcctccagccccttcttgcccctagatggcacctccatagcagggtgacttcagttacttctgtttggaatgccaaaccctggagaccaaaagtccttttcagtattccacaaagaggatttcatctcatctgcgacctggaaacaggaggtgtcaggggagcacggatgaatctacaaaggggccgtgtgctgttgtctcctctaccttgctgcgtagggcctgagcctccactggtttcaaaattaaatattccttctcactcaatggaaggaaactgaaaccactgcatcgttagcactgggtttgtaaaaatrcttctccccggagtatctttaacattcattttattttgttgaaacccagcttgtccttttttatccagagcagcagagaccttctgagcagaggctttagccaaaaaaggaagatattctggcaaatttctatagatagaaaaattcccttttcaagcagcttattttg

SEQ ID NO: 336733 - DNA, 471 bp, Homo sapiens
tctcccagttaggccatccacagccaagtccaagtgactccctgagcacctgtgcattggtgctatccatcccactctgtccttccatcagcttggatgcttgaaaactattccctcttgcctagaggtgtcaagtttgagttgtttgagttactaatactcagctatttcaaccattgaaacattgccaagtggcagtaaaggtggtagatcacagtggttaagatcttgggctcctgattcagtytatgtttggatcctggctagaacactgggcctatcgaccctgagcctaaggtctctcatgtataaaatggatagtaggattcacttcatagagaaggtggagaggagtaaatgaggtgatgcacagtgcctggcgcatagcgaggctgcaataaatggcagctactattattatgaaggcctccaaaatacctgatggatgagttcattgttctagaacgtttt

SEQ ID NO: 336734 - DNA, 471 bp, Homo sapiens
tctcccagttaggccatccacagccaagtccaagtgactccctgagcacctgtgcattggtgctatccatcccactctgtccttccatcagcttggatgcttgaaaactattccctcttgcctagaggtgtcaagtttgagttgtttgagttactaatactcagctatttcaaccattgaaacattgccaagtggcagtaaaggtggtagatcacagtggttaagatcttgggctcctgattcagtttatgtttggatcctggctagaacactgggcctatcgaccctgagcctaaggtstctcatgtataaaatggatagtaggattcacttcatagagaaggtggagaggagtaaatgaggtgatgcacagtgcctggcgcatagcgaggctgcaataaatggcagctactattattatgaaggcctccaaaatacctgatggatgagttcattgttctagaacgtttt

SEQ ID NO: 336735 - DNA, 606 bp, Homo sapiens
gtaaattattattatacacttggctaaaaaagcctgtgctgttgtaatttgtaaaggccacattaagcasaacaataaaattcgaagtaataataatgacatcttgcatttccacggtacatttatttttcaagtacatagtatgtcagcaagctgctctctgacctcccctggccaacaaatcctggcgtggtgccttttattctgtttggaaccctaagttttcaggtcacatgccccttggaaatctctgtgcactgcatcctcaggctccggtgacagctgtgccaggcagagccagacctggtgggaggaggtgtagggggaactgtttttctgcaaacaggcacccctgaccccaaagaagcagcttctttattgtggccatttattatttacaaagcactgcaggtgtacacgcactttatgagacacaaagacaaggtccctgccctgtgtactgaaaggttttatcctgcatttcatctgtctgagctgagggatgggaatgcaaggcaagcgggcggaagatccaagagcgatgtctgggacatcagagtggaaggaaggatttctaacgaggaattttaaatggggaaagtcaga

SEQ ID NO: 336736 - DNA, 606 bp, Homo sapiens
gtaaattattattatacacttggctaaaaaagcctgtgctgttgtaatttgtaaaggccacattaagcacaacaataaaattcgaagtaataataatgacatcttgcatttccacggtacatttatttttcaagtacatagtatgtcagcaagctgctctctgacctcccctggccaasaaatcctggcgtggtgccttttattctgtttggaaccctaagttttcaggtcacatgccccttggaaatctctgtgcactgcatcctcaggctccggtgacagctgtgccaggcagagccagacctggtgggaggaggtgtagggggaactgtttttctgcaaacaggcacccctgaccccaaagaagcagcttctttattgtggccatttattatttacaaagcactgcaggtgtacacgcactttatgagacacaaagacaaggtccctgccctgtgtactgaaaggttttatcctgcatttcatctgtctgagctgagggatgggaatgcaaggcaagcgggcggaagatccaagagcgatgtctgggacatcagagtggaaggaaggatttctaacgaggaattttaaatggggaaagtcaga

SEQ ID NO: 336737 - DNA, 518 bp, Homo sapiens
aagttttcctgagctaacaactagaactcatcttctgatgcagcctgcagggaaggcatagtaattcatctgggcctgccgactctcacccctcaggcttttctcaccctcaacctggccatccaggcacctgtcattccagattatgggtatctctgtggagtcagaacacctgtgcctccccctaccaagatgtgctgcacacatacagccctgccccacttccagcaacttccaccgtcacccccagcatttctgccctgaacagacaggagagtcagcttccatcccagatggaactccacaggtatgttctcmccgtctaggctctgagggtcaggaccagcattaaggctccactggagatggatcattggtggaaaagacggaagggagctggggagtagggagaggcaggaagaggctccctgatagggaaaattctgtgtctggtgtgtatgcgtggtgtaggaggggatggcaccagagaaccagagtcttataataataacttgtta

SEQ ID NO: 336738 - DNA, 661 bp, Homo sapiens
cctttgtctcacatacaccccacatctaacctattggcaaattcttttcagttctgtctttaaaatatacyttcaaatccactaaatctcaccacctctaccaccaccatctgatcctggccactaccatctgtcttggattattgtagcagtctcctagttggtctcttcacttccacccttgtccccctaaaaagtattctccacacagccagaatgatcctttaaaatgtaaatcagacccctcccagagttttccatctctcttagagaataaaatcctaagtcctcactgaggtctacaaggctttataccaactctgtccaatagagctttctgcagtggcatccaatatctgtgctgtccaatatggtagccactggccatgtgtggctatgagcacttgaaatgaggctacaccaactgagaaattaaatttcaaattgtaacccattctaattaatttaaatttaaatagtcacatgtggcaactcccacactggacaacacagcctacataacctctccgactttgccttctacccctttcccttctctcacttggctcaagccacattggtcatccagatgctccttgaacatttcaagcacattctcatctcatagcctttgcatttgctcttctctctatctagaatt

SEQ ID NO: 336739 - DNA, 576 bp, Homo sapiens
gttttcttgtcgtagtttcatagtttgaggtcttagatttaagtctttaacycattttgattttatttttgtatatggtgagagataggaatctaatttcattcttctgcatgtggatatccagttttcccagcactatttatggaagagactgtcatttccacagtgtatattcttggtacctttgtcgaaaataagtttactgtacgtgtgtggatttgtttccaggttctcttttctgttctattggtctatgtgtctgtttttatgccagtaccatgctgttttggttactatagctctctagcataatttgaagtcaggtaaagtgattcctccagttttgttctttttgctcaggctagcttcagctattcggggtctcttgtggttcaatgttaattttaggattgttttttctatttctgtgaagaatgtcattgggattttaatagagattgcactgaatttgtagattgcactgagtgttgtggacattttaacaatattgattcttccagtccatgaacatggactatctttccgtttttttgtgtgtcctcttcaagtttcttt

SEQ ID NO: 336740 - DNA, 546 bp, Homo sapiens
actcactatcacgagaacagcacgggggaacccctgccccatgatcaaatcacctccctccctcaacacatgggaattacaattcaagatgagatgtgggtggggacacagagctaaatcatatcagatgggtagtttgcagatattttctctcattctgtgggttgttctctcttcattttgttgagtgcttcctttgctgtgcagaagctttttaacttgatgtgatcccatctgtccatttttgctttggttgcctgcccttgttgggtagtactcaagaaatttgtgcccatatcaatgtcttggagagtttccccagtgttttcttgtcgtagtttcatagtttgaggtcttagatttaagtctttaacccaytttgattttatttttgtatatggtgagagataggaatctaatttcattcttctgcatgtggatatccagttttcccagcactatttatggaagagactgtcatttccacagtgtatattcttggtacctttgtcgaaaataagtttactgtacgtgtgtggatttgtt

SEQ ID NO: 336741 - DNA, 546 bp, Homo sapiens
actcactatcacgagaacagcacgggggaacccctgccccatgatcaaatcacctccctccctcaacacatgggaattacaattcaagatgagatgtgggtggggacacagagctaaatcatatcagatgggtagtttgcagatattttctctcattctgtgggttgttctctcttcattttgttgagtgcttcctttgctgtgcagaagctttttaacttgatgtgatcccatctgtccatttttgctttggttgcctgcccttgttgggtagtactcaagaaatttgtgcccatatcaatgtcttggagagtttccccagtgttttcttgtcgtagtttcatagtttgaggtcttagatttaagtctttaacccattttgattttatttttgtatatggtgagagataggaatctaatttcattcttctgcatgtggatatccagttttcccagcactatttatggaagagactgtcatttccacagtgtatattcttggtacctttgtcgaaaataagtttrctgtacgtgtgtggatttgtt

SEQ ID NO: 336742 - DNA, 576 bp, Homo sapiens
gttttcttgtcgtagtttcatagtttgaggtcttagatttaagtctttaacccattttgattttatttttgtatatggtgagagataggaatctaatttcattcttctgcatgtggatatccagttttcccagcactatttatggaagagactgtcatttccacagtgtatattcttggtacctttgtcgaaaataagtttactgtacgtgtgtggatttgtttccaggttctcttttctgttctattggtctatgtgtctgtttttatgccagtaccatgctgttttggttactatagctctstagcataatttgaagtcaggtaaagtgattcctccagttttgttctttttgctcaggctagcttcagctattcggggtctcttgtggttcaatgttaattttaggattgttttttctatttctgtgaagaatgtcattgggattttaatagagattgcactgaatttgtagattgcactgagtgttgtggacattttaacaatattgattcttccagtccatgaacatggactatctttccgtttttttgtgtgtcctcttcaagtttcttt

SEQ ID NO: 336743 - DNA, 576 bp, Homo sapiens
gttttcttgtcgtagtttcatagtttgaggtcttagatttaagtctttaacccattttgattttatttttgtatatggtgagagataggaatctaatttcattcttctgcatgtggatatccagttttcccagcactatttatggaagagactgtcatttccacagtgtatattcttggtacctttgtcgaaaataagtttactgtacgtgtgtggatttgtttccaggttctcttttctgttctattggtctatgtgtctgtttttatgccagtaccatgctgttttggttactatagctctctagcayaatttgaagtcaggtaaagtgattcctccagttttgttctttttgctcaggctagcttcagctattcggggtctcttgtggttcaatgttaattttaggattgttttttctatttctgtgaagaatgtcattgggattttaatagagattgcactgaatttgtagattgcactgagtgttgtggacattttaacaatattgattcttccagtccatgaacatggactatctttccgtttttttgtgtgtcctcttcaagtttcttt

SEQ ID NO: 336744 - DNA, 576 bp, Homo sapiens
gttttcttgtcgtagtttcatagtttgaggtcttagatttaagtctttaacccattttgattttatttttgtatatggtgagagataggaatctaatttcattcttctgcatgtggatatccagttttcccagcactatttatggaagagactgtcatttccacagtgtatattcttggtacctttgtcgaaaataagtttactgtacgtgtgtggatttgtttccaggttctcttttctgttctattggtctatgtgtctgtttttatgccagtaccatgctgttttggttactatagctctctagcataatttgaagtcaggtaaagtgattcctccagttttgttctttttgctcaggctagcttcagctattcggggtctcttgtgkttcaatgttaattttaggattgttttttctatttctgtgaagaatgtcattgggattttaatagagattgcactgaatttgtagattgcactgagtgttgtggacattttaacaatattgattcttccagtccatgaacatggactatctttccgtttttttgtgtgtcctcttcaagtttcttt

SEQ ID NO: 336745 - DNA, 548 bp, Homo sapiens
aggtattattactaatcccattttgtagatgggaaaactgaacttcagagaagctaagccagatttgaaccctcagcccatgccctcatcactacactccagcatctttctctccttccaagtgtcatctaggtaatgtcacacagtggtccacactgagaggcaaaggccagagctaggaaccattaacagccatcttctaatgcagaatttcccaagctatgttctgtagaacaaatccttgagatgctgggcagagaagtagttcccaggtcatatacacacaagayaggctttattttctgtctgtctcctggaggtttacaatgtgcagcagctctgataatgactaggcaatttattgagattatattttgcattttgttctcactgtagtttttgttccccaatattttctctctgagaaagtttcctgtctttttttggtgccctcttgattgagagatttgttttgtaggatctacgtagtcactttttgacacacccttcttgtctttgattgggagaaattctgctcgatcctccca

SEQ ID NO: 336746 - DNA, 548 bp, Homo sapiens
aggtattattactaatcccattttgtagatgggaaaactgaacttcagagaagctaagccagatttgaaccctcagcccatgccctcatcactacactccagcatctttctctccttccaagtgtcatctaggtaatgtcacacagtggtccacactgagaggcaaaggccagagctaggaaccattaacagccatcttctaatgcagaatttcccaagctatgttctgtagaacaaatccttgagatgctgggcagagaagtagttcccaggtcatatacacacaagataggytttattttctgtctgtctcctggaggtttacaatgtgcagcagctctgataatgactaggcaatttattgagattatattttgcattttgttctcactgtagtttttgttccccaatattttctctctgagaaagtttcctgtctttttttggtgccctcttgattgagagatttgttttgtaggatctacgtagtcactttttgacacacccttcttgtctttgattgggagaaattctgctcgatcctccca

SEQ ID NO: 336747 - DNA, 561 bp, Homo sapiens
tcatatacacacaagataggctttattttctgtctgtctcctggaggtttacaatgtgcagcagctctgataatgactaggcaatttattgagattatattttgcattttgttctcactgtagtttttgttccccaatattttctctctgagaaagtttcctgtctttttttggtgccctcttgattgagagatttgttttgtaggatctacgtagtcactttttgacacacccttcytgtctttgattgggagaaattctgctcgatcctcccagaggggggaggaaatgggcaagtgcttttgcctggtagagagtgggttcggaaggcaaaagcagacagaggagttagaaattctccaagatgaaaagggagaagaagttggggggttctgggagaagttggcaccagaaagggcccctgtggagctgtcaggacctgatggggcatgtgaagaagctgggcaccaggtactgagtctctggcctcagcaaagctccccaaacccaaccctggcacaagctcagcagaaccattccccgtcacacagtcacgcaggc

SEQ ID NO: 336748 - DNA, 616 bp, Homo sapiens
tgctgccagcctatggagtgtgtaaattcaaaaaggatactccttgtgtggacacagcttcaccagcacatgggttggtgggagctgttgcctttgtgcaaagaaaaggcattccttcctgcaggactggaattcagccccacttgcctccttggctgggcacctttgcacagtgtataaactcgtgtccttacatagtggtcttctagtcaaattctttctagtcatcatctgtaaacataaaatacctatagagtaaagctctaaaaccagccagggccaaaggtgtatgttgaatggggttgtgccagaagttmtaggatgtatttctagatttccaaagcgagaagatgagattcactcctgaagtaattcttgctaccaaaaggagccagtttccagcccagcccaccagcagaggcaattgagcagaggcaagcagatgctgatgatggaggagatcagcacattccaagtagagaaaggagccatttttgggttataagtaactgacagcaggcattttgcagagcactttggacgaggcaacctccctagacagcaattgatgtggcctttgttatttaaaaatctgaactttgataaattacagttg

SEQ ID NO: 336749 - DNA, 523 bp, Homo sapiens
gcctggttaaggcctgtagcatctgtgatatctctagagaacataagccaggctgggggcctttctcagtatgtcaactcctcataaataatgggtggaggcccagtggrggccactgtccttattaacctactccccattgtcactcatggcacaataaagaaacatattccaaactaagaaactgaaataatgagagatctaaatatgagatcaatattcctcaaagcacttgggaagagagaggcaacaatggccttgtgattggaccaagagattggggagtgccttggtcatacgtaagtccccagttttggtttctgattgcagacctcagagagaagccttttaaaaatcaggtgccccttctgctccccatattttgcagacagtgcctttgactcctatctgcagccctccctccacctgtcagcaaaggagttcattagcacttgcttgcaagacccacatcaaagatggctctagttgcagtttgtaggaatcaggtcgcctttaattatcc

SEQ ID NO: 336750 - DNA, 523 bp, Homo sapiens
gcctggttaaggcctgtagcatctgtgatatctctagagaacataagccaggctgggggcctttctcagtatgtcaactcctcataaataatgggtggaggcccagtgggggccactgtccttattaacctactccccattgtcactcatggcacaataaagaaacatattccaaactaagaaactgaaataatgagagatctaaatatgagatcaatattcctcaaagcacttgggaagagagaggcaacaatggccttgtgattrgaccaagagattggggagtgccttggtcatacgtaagtccccagttttggtttctgattgcagacctcagagagaagccttttaaaaatcaggtgccccttctgctccccatattttgcagacagtgcctttgactcctatctgcagccctccctccacctgtcagcaaaggagttcattagcacttgcttgcaagacccacatcaaagatggctctagttgcagtttgtaggaatcaggtcgcctttaattatcc

SEQ ID NO: 336751 - DNA, 523 bp, Homo sapiens
gcctggttaaggcctgtagcatctgtgatatctctagagaacataagccaggctgggggcctttctcagtatgtcaactcctcataaataatgggtggaggcccagtgggggccactgtccttattaacctactccccattgtcactcatggcacaataaagaaacatattccaaactaagaaactgaaataatgagagatctaaatatgagatcaatattcctcaaagcacttgggaagagagaggcaacaatggccttgtgattggaccaagagattggggagtgccttggtcatacgtaagtccccagttttggtttctgattgcagacctcagagagaagccttttaaaaakcaggtgccccttctgctccccatattttgcagacagtgcctttgactcctatctgcagccctccctccacctgtcagcaaaggagttcattagcacttgcttgcaagacccacatcaaagatggctctagttgcagtttgtaggaatcaggtcgcctttaattatcc

SEQ ID NO: 336752 - DNA, 621 bp, Homo sapiens
gcaagatgcctgtgatgtggcacctgctctttctgtctagagtgtgacgattcttggatatccaaaaactatttatatgaaaggtaattccttcctcagtcattcttaaggttctttttcaattgccagcctgccatggcatccgaggagaaatgaagaagaggattttgtcttcacttgggtgggagcagcaagagaggtagcaatgcccyggaagaacatgaaggaggcagcaggagtagtcagctgctccccggcgaatgggagggagtgaggccactggttcaaggaagaggacttccagagcatggagtcaatcaggcagcacctgcctggaggttctctggaggcgccgagtaccagcaccgcagaggtcagagaaaggagagcaaggcctcccaggagggtggctcctggtgcaggagattgagctctacgggaagatcttgaagctttacctggtagatctttacagcagttgttctcaccctgcggcccaggttttaggaactccaggtgagaaggaagacatgcccctctcctcctctgtggtcagcacaccttctctttgctttgagacacttagtggtttttccctcctctcctttgcaagcaggaatt

SEQ ID NO: 336753 - DNA, 465 bp, Homo sapiens
aacattactatttacctttggataaattcccttaaaaaaaacaaattactgtgccacatgtataagcccatttaaagctcttgatacatattgccgatgccctgcagaaagtctgtatcaatttgcactcctgccagctgggtatgacagtgcccttttyactgaagctttgccaagccatagtcactctgttataactcagctcaggcgaacacttcatgtcattattactgtaatgcttagaaagaagagggcaagagccacagtgctggtaagtgtgtgcgtgtgtgtgcatgcatgcacgtgtgcgtgtttataggggtgttgttccaatggagatttgccacagcagtttgtaggccacaagtgggaggagaaaggtgacaattaaagcaacttgagcctgtcaggactttaacagggcacagttggcacttggtaagaggacacacgacacactgcctt

SEQ ID NO: 336754 - DNA, 566 bp, Homo sapiens
atagagaatggaatctgtggaaaccagagcctcatgccggttctcaaaactcttacttccattttactgaaaatccctaagagagggtcctttcaaatgtgtagtttgagacagcaggttgattaaacacctcatggtctctccataaacccaacctcatctccccatggttaaggcatagctactgctgccacatggattagtcggcagctcatttaggtgtctacaaaaatgcctttcaggcttggagtttctgatcaggtgtcacagttctccctaatttccaccagggatgtgtgcctcatctgccatctgaatgatgccagggagtacatggccctagtgggtgctcgatgtccaggagatagaaccatatgcctatgaatcacasagctggggagcagctgcttggctggcacctcctgacacattcacaggagccctggcttctgggcaacaaggtgtctcagcacatcagcgtctcgaaagctattattacctgtgagccgccctcccatttcttgagctgtgcagcataaataacaattatgatggtgaccgagaca

SEQ ID NO: 336755 - DNA, 566 bp, Homo sapiens
atagagaatggaatctgtggaaaccagagcctcatgccggttctcaaaactcttacttccattttactgaaaatccctaagagagggtcctttcaaatgtgtagtttgagacagcaggttgattaaacacctcatggtctctccataaacccaacctcatctccccatggttaaggcatagctactgctgccacatggattagtcggcagctcatttaggtgtctacaaaaatgcctttcaggcttggagtttctgatcaggtgtcacagttctccctaatttccaccagggatgtgtgcctcatctgccatctgaatgatgccagggagtacatggccctagtgggtgctcgatgtccaggagatagaaccatatgcctatgaatcacacagctggggagcagctgcttggctggcacctcctgacasattcacaggagccctggcttctgggcaacaaggtgtctcagcacatcagcgtctcgaaagctattattacctgtgagccgccctcccatttcttgagctgtgcagcataaataacaattatgatggtgaccgagaca

SEQ ID NO: 336756 - DNA, 501 bp, Homo sapiens
aagtaaagaagaagacagggaagaagcatccaaatacctaggaggtactttctctttttcagtgctgggctgagccctctctcccttactggaggcttacttctagcttttcctgaagtgaacgtgtggtgtaaattggaagagcactggatcaggactcagaaactggcagagttrcccatcaaagttctagctgcctcaaggggtcaaagttcaaacaagatgtgaatgggaaaagggttttgaaggctatttgtgcacctgtgatttcctaggggacatgtcccagtgggttggccccagcaagcccagagtgggaaggcatacagcttaggttatctgggcctttatgcagcccttaggctgtacagaagcctacagccctttctaatctcaatgtaacttaaactaggagatgagggatgtctgagttcaaggccacatacagtgattttaaatgagctgaatcttctacagtcacctcctccctgctgcctgctt

SEQ ID NO: 336757 - DNA, 336 bp, Homo sapiens
agatgtgaagggctagagatggccagatatgtagaataaggacacatatagctgtggtgacttccctggtgagcccactaggataaagacctgaagaaagagtctccaaattatttagatcatgaactcataacaggtaaaaaaaaaamaaaaaaaaaaaacttaatacctccaatatatgtttttttgttcccaagttacatacatgttccacagaggtgatacttcagaaccagactggctgggttgtagcccagtttcaccacccactagttgtgtgacctgggaaatctatttaaccttctgtgcctcagtttccacatctgcaaaatgagg

SEQ ID NO: 336758 - DNA, 582 bp, Homo sapiens
cctaagtgctcatcaaccaacgagtggataaagaaaacgtggtatgtatataccatggaatactactcagccataaaaaggaatgaaataatgtcttttgcagcaacttggatggagctggaggttgttattctaaatgaagtaactcaggaatggaaagccaaatgttgtattttctcacttctaagtgggagctaagctatgaggatgcaaaggcatggacttcagggatttggtgggtgggaggggaagattgggagagggtgagggataaaaactacatattgggtatggtgtacatttcttgggtggtaggtgcaccaaaatctcagaaatcatcattaaagaacttatccatgtaaccaagaaccacctgtacctcaaaaactattgaaataaaaatwaaaaaagtacaaatatctatttcttgttatatttgtcctcaatgctactgtcatttagtacccaatatttatgttacttgatcaaattagggttctcttggatacaaagaatgtctgttttaaaacctaggatgaactaaaagtgattcttttgttagtggcacatactaaaatattt

SEQ ID NO: 336759 - DNA, 548 bp, Homo sapiens
agggtgactatggttaacaataatttagtgtatattttcaaaaagctagaagggagaattgtaaaagtttacaacacaaggaaatggtaaatgtttgagatgatggatatgctaattatcctaatttgatcattacctattgtatacatgtattaaaagatcactgtatcccatacatatgcacaattatcatatgttaactaaaaatagaaggaaaaataataaacgtggataaacgttaaaaaaaagaaggaaattatctagggctgggataaacagataatccaaagaaggtaaatgagatcatacatggcttccatccccacgttctggccattgactatggaaggcatagttttgcaactggaggtttgtagagatttatagagtaagaagttggatgcacttttctgcaactgactttgaagggaaagagatgccctgtgtgccccccatgcatgccrggagaaaatatgacatcaaaggagaccatcagagacccaggcgggcatgaagccaaatgaggtatctacaaagtcaaagcagca

SEQ ID NO: 336760 - DNA, 542 bp, Homo sapiens
gatagtctccccagcagttccaarcacagataaaaactcactattaggagaaaaagaaagaagaggttaagattaaaatattgtaatgatttcaaaaattattctggggactataaagccctttgtattgaaggttaatggtgataagagaatttactgtgattttagaggttgactctcaactctgaacttttaaagactaattaaaaagtcaggatactttcttttcaccattgatttttttaagcttttttttgtgtgtaggttgcttttcatgttaacttcttcataaagatgaaattgttaaaattttaatataacctctcattctgtaatttctctccctctcttcctcccaaacctcttctctctctccctcatgtctctctctcatgcacacctgtgtatgcttttacttttatatcttcattcagaatagctttcatccagcctaatctatttttactgaaagaaatattagcattgcactttaaaatcgattgtttaaagctcctgcccatttggagggtaccaatgtatga

SEQ ID NO: 336761 - DNA, 587 bp, Homo sapiens
attgcttctttacaaatgaaatgaaaacatgtatcttaaagataaatgcctgaaaagcatttttaaagtgaaatgattgttattctgcatattgaaaattatgtataagtctcttccaaggtgaactactggagtcacagttaatttcctaggcctttctccgtatttatctatgtaacattgggacttcagatagttttctgtataaatatgcatatttaaagtcaatttaaaaaatattttgactatattttgcagcataattatgaaatcagatttttccatttatattatagttttacagagtttacatcttctcattgtatatggagtcttgtctttagtgacctcttctttaggttacaaaattaacagataaatgaggtgttgctagaagaaagggaacaaggatcatctttttgttcaatgtaaatattgggtgctagatagtccatgatttatttggagtgagaaaatgggccttgttttttcagacactatccccagtgacacataggccaaacataaaggagattgcctayccttagttctggaattctgatggagcaaggccttctctctggtgc

SEQ ID NO: 336762 - DNA, 551 bp, Homo sapiens
tcctgtcatttaagtgttataaataatatagtcctttgcaaattagatatatttaagatctttcattatggagatggagaaatatcaaggaatatatcaccatttaaatatctcctcatttagggccaggcatggtggctcatggctgtaatcccagcactttgggaggctgaggcaggtggatcacaaggtcaggagttcaagaccagtctggccaacatggtgaaaccccgtctctaccaaaaatacaaaaaattagccaggcatggtggcacccacctataatcccagctacttgggaggctgaggcaggagaatggcttgaacccaggaggcagaggttgcagtgagccaagatctcsccattgcacaccagcctggatgacagagcaagactccatctcaaggaaaaatatatatatatgtgtatatatgtatatatatatataaaataaataaataaatatatttatattgctgctcttatagaacacacaggctaatgtaagagataaacactaaagagatatatagaaaggaatttaattgta

SEQ ID NO: 336763 - DNA, 642 bp, Homo sapiens
attgtatttcagcatctaatccatacacatgtaataagaggagccaaataatttattaatttaacaatagtgatggagatttctgcactcattagcatgtaacaatattcatatttgttaggttgaaaatgacctttgccctatgaaaagttttgttaagctaattagtaacaaaaaatatgttgcaaatggacattgttagcctccttaaaaagcaaacttcttttaacttctcttaattaaatagcaaaattatgtgtaaatactgtatttgtggaatgattgatacttgttgctgaccaaaaaagccctaaattatagtctagttttcagaattctgagccaataaaaaaaatgcctctagctagttcttttaaagaacacaagcccacactgaacagagggctagctgcttatatgtcattaaaaagcaaaacctaattgtactatcatgtatttattgcgtctataaagcaccttccaagaacttaagtaagaacattaatttgtacctgtattttaatgcagaagtagaattccatctctttcagtgcttatgagtytggtgttttaattccaccccaaattacctaaattctacaaatatttattaacacacagggagtagtattattctaagag

SEQ ID NO: 336764 - DNA, 612 bp, Homo sapiens
tgaaaacatttttggaaggaataaaacgataaaacagaaggggtttttcactgtttttaaaattttataaatatgtagagattggcttaaagtttgggatacaacaaatcagtgaagaaaaaatcgtaccattatatgttagcatcagctaacatttgtatacactttttactttttagagtactttggtaaggagtatctcattcagtgtttttagaaaagatggaatgttttccttttttatgtaacacttttcaactagtcaaaggaaaatgtttaattttaagtacagctactcttgctttcctttgcttatggcttactgaatgatctttccttttgctaaaataattaatactatataattctgmtttgaggctagaaaataagaaactcaaagatcattacaactggtaagcaaagttgtgcatggggctgaataaaacaactcaaaaagaatgattattcaaaatattgttacctaattctgcaacattaagggaattataagcagtagttgctatttccttgttctctactgactttcggggtccatgatagatgtttggtaaataatagtctctgatgcttgaaaagccttaaagctactta

SEQ ID NO: 336765 - DNA, 395 bp, Homo sapiens
caacgttgaaaaatgtgcagaatttttagggattgctgtgaagagtgaagacgttacttgatgaaaagaacataaggctctggctcatttatttattggctcacagcagaaggggtgggacattagaatcagagagaagacgatggttctgtgctttacttcctttatattctatttacgtgaccacttggaagagtagtagacagtgggcaggaatcaaataggtaccccgggaaacagcaatgtctgtatatcttggtaaattgtgaagaatggaagtatccaattgcagatgtaaacattttaaaagtgggtcacttatcaaytgaaagataagactgggatgttgctattatagagtacattgttttaggcggggaagagagtgctattgc

SEQ ID NO: 336766 - DNA, 504 bp, Homo sapiens
gtacattgttttaggcggggaagagagtgctattgcagcccatactgctcttaagtgagttgaaaattagcaattaaggtctggaagaaaagggaatttgttgagcccaaagacactttctccttcctaacattttattttttgaacttacagagcaagtgtacataagaagaaaaaaaaatggcctgctagtatttccatatgggtatacataatatacacataacctaatatatagttatacacatatggaattatatacatatgtgtgtgtgtgtgtgcatatatattcttytagttaaaaaccattggtgtttgcaatcagcgtgggcaacatagtgagtacccatgttgacaaatacttttttaaaattaactgggtgtggtggcatgtgcccatagtcccagctgttggggaagctgaggcaggaggatcccacaagtttgaggctgcagtgagctatgatcgtgctagtaccctctagcctgggtgacagagtgaga

SEQ ID NO: 336767 - DNA, 504 bp, Homo sapiens
gtacattgttttaggcggggaagagagtgctattgcagcccatactgctcttaagtgagttgaaaattagcaattaaggtctggaagaaaagggaatttgttgagcccaaagacactttctccttcctaacattttattttttgaacttacagagcaagtgtacataagaagaaaaaaaaatggcctgctagtatttccatatgggtatacataatatacacataacctaatatatagttatacacatatggaattatatacatatgtgtgtgtgtgtgtgcatatatattcttctagttaaaaaccattggtgtttgcaatcagcgtgggcaacatagtgagtacccatgttgacaaatacttttttaaaattaactgggtgtggtggcatgtgcccatagtcccagctgttggggaagctgaggcaggaggatcccacaagtttgaggctgcagtgagctatgatcgtgcyagtaccctctagcctgggtgacagagtgaga

SEQ ID NO: 336768 - DNA, 609 bp, Homo sapiens
tggacacccattcttgggagatcagcgtgttaagtgtaggataatggatagtataaatatggacaccatatacttgggaaaccagtgtgtcaagtgtaggataatgagaacctgaactatgtcagtgacagtagaaatgtcaagaagagatgccagagtatcaacacagcaatgatttggagtcaargaattttagaaagtgaagggattgtggatggtgaaggcctatatttatacattaggaaacaatagcccagaaagtgatgcatacatataatctaagtcttagtcaaaggggatattatgacttcaatattctcagtgatgaacatgcagtaacttcagaaatgttttgtgccttaagattaatataataataatttctgtaatggtcataaattctaaaaatatatgttttattttatgtatatttgacttttaaccttgaacaaatcagaaactaaaaagataagcctggttttttaatcaaagctgattaaatcatataaattatttgagccaaaggttgcctcttaagtaacctaatatttttcagaaaaatatttttatggttcatttccaacataaatttataaaatcattttatgt

SEQ ID NO: 336769 - DNA, 518 bp, Homo sapiens
tttagttaaacactgcatttgaaagaatttgctcttctgatctcattagataatggatttctctcagagtaagagtaaagttcatcacagcaggcctctccattagtaacttaatctccattaaaggtgaagtcaagatttttgtgtgtgtgataacgtgaatttttgtgtggwattattacattttccttttggaccttgaataaaatatacttttaaatcttaaacacagctaaaagcattaatgcataaggtaacataaagataaacctttaagctatctagtatatattttatgcgtggttatcataaaaacaaaggacagataataattcagtcttctaaggctgcaagagagcagcttagtaactggatgctttctgctaagattattccatgttaattttaacaggaagcagaaacatattcaaaaattgatacgacaaaacgctatgcacattctaatttttaaagaaattaacaataaatggcggaagtagcatgatagaagcaaacac

SEQ ID NO: 336770 - DNA, 522 bp, Homo sapiens
ggctctgcagtccccgcagccacccrtctgcgggtgtaggtcacagttaggcactgcagcctggctgacactccaatcactggccatattcatcagccctttctttagtgctctatgtggctagaagcctggtttttctccaacatgaaagcccggtgtttagttagtggagagagcacagcatgtttgagggcggcagctggaagactaccttccccaccagaaacagatcaaatggtcatttgagatatttccaggtttccttgtttaaaaggcagacagatcaaagacactgtcaccctcaaagatttgaagactagcagagcagcctcaaggccatcaccccctcatgacccctaactgttcactgtttgtggtgactttgcactatgtgatctgcctgtctaccttaatcaaaggatctagagaatcaaatactagtacacttagtattctgtcttgaatatcaacaagaatagggccatttgttagttatttgaatacactggaagaaagtaatct

SEQ ID NO: 336771 - DNA, 567 bp, Homo sapiens
gcctcacaatcgtggcagaagacaaaaggcatgacttacatggtggcaggcaagagagaatgagagccaagtgaaaggggtttcccctgataaaaccgtcagatctcgtgggacttattcactaccatgagaacagtatgggggaaaccgcccccagtattcagttatctcccagcaggtccatcccacagcatgtaagaattatgggagctacaattcaagatgacttttcggtgtggacacagccaaaccacatcactgtgttggacaaaaggaagataagcatgttgctaactatttaagttattgcttagagaaaagttatattagaatggctatttaaaatttagtattatgaattcatacatatacatggatagacttcttgaaaattcaagtyataaagaaatacgaaaaacaccaaaaaaaaaaaaaaaaaacaccacatggacagttccatccaccaacaagagcataaaatgcagttacccacagacaatcccagtggaggtacttgctggtaacttgtgactcctactcctttttaaaagtgctgttttcttctat

SEQ ID NO: 336772 - DNA, 558 bp, Homo sapiens
atatgaaaatacttgaattccagatgtacttgactatgctccacataggaagcgatgagcaatttgaaaagaaatttaagagttgcttatatttggaaccactgtagtacttttgcctctaatcaaagaaaatatacagtgggattcagagttccytgtaactttatgttctttctaaaaatagatgtagtggacaaataacccaggaaaattcctaaaaggataacaggggtgtaaatcaaaagatactagtaatatccacatatacctagttcagaatttcaagataagagtaactagaaatctttttagagcaatcaccaataaattataattctatacttcatttatttatatgttaagggataaggcttggggtaagttaaagtgatatatataaattcccatcataccatttaaaatatgggattactatgaagttcaatattctattaaataatagtaataacagcacttactcattggatcattatggggattaaaagagtaggcatatgcaaagctataggaagtactcaattacaatataattattat

SEQ ID NO: 336773 - DNA, 558 bp, Homo sapiens
atatgaaaatacttgaattccagatgtacttgactatgctccacataggaagcgatgagcaatttgaaaagaaatttaagagttgcttatatttggaaccactgtagtacttttgcctctaatcaaagaaaatatacagtgggattcagagttccttgtaactttatgttctttctaaaaatagatgtagtggacaaataacccaggaaaattcctaaaaggataacaggggtgtaaatcaaaagatactagtaatatccacatatacctagttcagaatttcaagataagagtaactagaaatctttttagagcaatcaccaataaattataattctatacttcatttatttatatgttaagggataaggcttggggtaagttaaagtgatatatataaattcccatcataccatttaaaatatgggattactatgaagttcaatattctattaaataatagtaataacagcacttactcattggatcattatggggattaaaagagtaggcatatgcaaagctrtaggaagtactcaattacaatataattattat

SEQ ID NO: 336774 - DNA, 550 bp, Homo sapiens
gaaaataacaggaaatagggatattgctaatgtttctcaattcaaattgaaatgaattcagaaaacaacattgaataacatattatattgacataaaatattaatgtgtgtaaacatataggtaaaggtattgtgggaaatttctgattagcttttaacttggtcattgaaacattatgtcagttgattcacttaagagtatctaataagttctgcaaatgcacagaattttctgggaacattgaacttagaaatgaacatagtattaacatcttattgcccatgttacttaaaatattaaaagtcagtcatttcttcagtgaaaataattrtagtcatagaaaatgttctaatttgcttttaattttctaaacaaataaatctcaacctcatatttgcatagggaactgaatcttttaatagtatttgtataagtctcatcaatgaatgtgttctatgcatgaagtatggaatatctaattatatttttaaaaagaaaaactttcatttttacacattggtacataacttcaccttcttcaacttccca

SEQ ID NO: 336775 - DNA, 615 bp, Homo sapiens
atttcaggcaactacaggggttcttggaacatagttcctgcagataaggaaggactgctatatgattatttccattctgcatctgatgaatctaagcacacattctatgaaatgtaccagaatataaaatrttgtgtgtgcattcctaaacagctgattttattgattgatttatttgtaaactttgcagagagcattgctgctttctgtagatatttagttttccagaaatgagcctctagatacctatcttctccttttccagttatccataatcattgaggaaacccatcaataaacggaggataggacgaggtcttccctaaatgctaagggtctttccttctccccaagtgaagatggtacaaggtagctttgttttcaatctttaaatctcccaaaactctatcagtgatttcagtctctttctaccctgtcatgtagcaggaaaaattataccctggtgcatatccaagttcacaggccacattgagcttatttttcttttacaggcccttgcagtaagcagttccattataaacaatctgctttatcaaggctggccccaacaaatacagataaataataaaacatctcaagcttctagaatggaaa

SEQ ID NO: 336776 - DNA, 615 bp, Homo sapiens
atttcaggcaactacaggggttcttggaacatagttcctgcagataaggaaggactgctatatgattatttccattctgcatctgatgaatctaagcacacattctatgaaatgtaccagaatataaaataytgtgtgtgcattcctaaacagctgattttattgattgatttatttgtaaactttgcagagagcattgctgctttctgtagatatttagttttccagaaatgagcctctagatacctatcttctccttttccagttatccataatcattgaggaaacccatcaataaacggaggataggacgaggtcttccctaaatgctaagggtctttccttctccccaagtgaagatggtacaaggtagctttgttttcaatctttaaatctcccaaaactctatcagtgatttcagtctctttctaccctgtcatgtagcaggaaaaattataccctggtgcatatccaagttcacaggccacattgagcttatttttcttttacaggcccttgcagtaagcagttccattataaacaatctgctttatcaaggctggccccaacaaatacagataaataataaaacatctcaagcttctagaatggaaa

SEQ ID NO: 336777 - DNA, 613 bp, Homo sapiens
tgtcagggcgtgtattgaccccacaggcactaagaaattgaatgtcagtctttttcttctaatttcatggcaccactctgtcaccaactccttcctagaggttgaaatgttagaaaaggagaggaaaaaaagagagaatacaggaagagaggacaagctaagagctgacctactcaatcatgctgtttattttcccttaygcactaggagacatttctctcctgcattttgtgcaaaatcggccacctgttgctgcttctgctttccattggtggttctgcctctgctgttctctggcaatgcagcgaccctcagatacctttgttggttttcctgcagagattataaaatcacagagaggctattgttctgcacggataggaaagccagaagtacacgtaatggagaaagggagacagtagattgttttcagtaggaggtggcttacctgtgtttgctgcctttgttctgtttgtttccctatgtgctagtattagagaagggaataaatgtggaaaagagacaacccagatgaatttagtcacatcttaaaaaatattttgctctccaaatgtaagaaattcaaacaaaacagaccaattttttcaacctt

SEQ ID NO: 336778 - DNA, 595 bp, Homo sapiens
tagttgaagaatttaacgttactctgggtttcaggtattayttatgctagatggttttgtatgtagggcacacagtttaaaagggtgcaccctgtaatattaaatgatatgacaaatgaatgctgagaagagaatttaaatttgaaaaaacatgctgacaattgacaaatgatccaattaacattacagatgttttaccaagttgaaaaattagaagcaaacaaactaacatgtacttgtattagaagcaaagtttagaagtttataaaaatcatttttttcctatttcaggaaaatgacttagaattatttttctcaattgcttacttatggtgctctgaagaaagagcagtaatgtatgattaagtgcctaatgatttagatgttattgaaaaggttttgtacaaagtggatatttatgatttggatcactgtgctattgaatcagccccttaagtacctgaaagcaagggttcctgggtcattgctgtaaccccatgggctagacaagtgtgggcacataacagcctgcgacactcaagaaatttttgttgaatgtgtgaatgagggccctaaaagacagcgaatgcggcat

SEQ ID NO: 336779 - DNA, 595 bp, Homo sapiens
tagttgaagaatttaacgttactctgggtttcaggtattatttatgctagatggttttgtatgtagggcacacagtttaaaagggtgcaccctgtaatattaaatgatatgacaaatgaatgctgagaagagaatttaaatttgaaaaaacatgctgacaattgayaaatgatccaattaacattacagatgttttaccaagttgaaaaattagaagcaaacaaactaacatgtacttgtattagaagcaaagtttagaagtttataaaaatcatttttttcctatttcaggaaaatgacttagaattatttttctcaattgcttacttatggtgctctgaagaaagagcagtaatgtatgattaagtgcctaatgatttagatgttattgaaaaggttttgtacaaagtggatatttatgatttggatcactgtgctattgaatcagccccttaagtacctgaaagcaagggttcctgggtcattgctgtaaccccatgggctagacaagtgtgggcacataacagcctgcgacactcaagaaatttttgttgaatgtgtgaatgagggccctaaaagacagcgaatgcggcat

SEQ ID NO: 336780 - DNA, 583 bp, Homo sapiens
acaaaaaaacctcctgggttgagatttaagatgctaatgagacatccaatgtatgaacaaatatgtacagctactatgcatgtgtacccagcggaacacccagaacatgcttactagtaacacccctttcccacctccttatgaataatcatgtaagactcccacaaagggagtctccctgatgccactctttgctgtcttgtccttgtgcacagcctgccttgaattctctctctcaaggtgtactgtctattctgcacctaacttacaaaatatttttcctttgcaataaattactcgatgctgcacttcttttgctgtgtgtctctttttaaaattattttaaactaagaagaactaaggtattacatcagctgtcaacagaaccactttgggacaaaacaaagtatatttayattaaaaggcttgaggcacataggaaatgttactggttctgttgtctcaaaggagacagaatacaataaagagtgactggtgatcaatctgggaaagtgggcaaggaattgtccaagatgagacttaagtacaacaccatgggtttaagcagaatacttacatgcat

SEQ ID NO: 336781 - DNA, 533 bp, Homo sapiens
cccaaacatattttttgaatattcaaaattattgatttttttcttggtgctctgatgtactcacatcaatgcagaatgaaaaaaaaaaagatcaagggtcacccaaggggtaggagacataacattgattaaaaaagattagttgatgacagccatatttttgttaaatataaacactttaaacctgttggcaaacaaaaaacaaattctacatattttttggacacatttagtagcctaataatttgctttatctttgatttgtggaaagaaattgtggggtctttatgagaacaggaaaaygaatagtcctatgcctgagcaaaagacgaggggccatatcttggtgtgcttgctttgaagggactatattaaaaatagagctccctcatctatttgcaaagggcatgagaaacgtccatctctcctgtgagtcatgacattcaaagccaagcttattctttctcatatttgcaagattaggtcaatctgagccattcatctagaaatgacccaagtaagagaaagaaagc

SEQ ID NO: 336782 - DNA, 572 bp, Homo sapiens
aaaaataatccattagaactaacaaacaaattcagtaaaattgtaggatacaaaatcgacgtatggaaattagtagtgtttctacacactaacaatraacaatccaaaaaagaaatcaaggaaacaatttctcattacatctatttagtcctatttaatgcaacagaatcaaaaaattcttaggaataaatttaacgaaggaggtagaagatctgtacactggaaactataaaatatttgcaaaatccattgaagaagatataaataaatggaaatatatctgatgtttatgaatcctagaattaatattgttaaaatattcataatgtccaaacagatctacagattcaatgtaatttctatcaaaactccaatggcatttttcagaagatgctcgaaaattatcacaagcatcattatttggttaaatattcactaagtatcttctctgtgctaagttttggaaaataaggcaatgtaaaatggggtatcttctgtgacggaactgaaaatctggttgaacaaacattgcacatacataaagatattaattacaatgcaagaaactggat

SEQ ID NO: 336783 - DNA, 572 bp, Homo sapiens
aaaaataatccattagaactaacaaacaaattcagtaaaattgtaggatacaaaatcgacgtatggaaattagtagtgtttctacacactaacaataaacaatccaaaaaagaaatcaaggaaacaatytctcattacatctatttagtcctatttaatgcaacagaatcaaaaaattcttaggaataaatttaacgaaggaggtagaagatctgtacactggaaactataaaatatttgcaaaatccattgaagaagatataaataaatggaaatatatctgatgtttatgaatcctagaattaatattgttaaaatattcataatgtccaaacagatctacagattcaatgtaatttctatcaaaactccaatggcatttttcagaagatgctcgaaaattatcacaagcatcattatttggttaaatattcactaagtatcttctctgtgctaagttttggaaaataaggcaatgtaaaatggggtatcttctgtgacggaactgaaaatctggttgaacaaacattgcacatacataaagatattaattacaatgcaagaaactggat

SEQ ID NO: 336784 - DNA, 540 bp, Homo sapiens
tctgttgcagcttcccttggctaggaaagggaattccccaaccccttgtgcttccmagatgaggcaattccctgccctgcttcggctcacactctgtgggctgaacccactctctaaccagtcccaatgagatgaaccctgtatctcagttggaaatgcagaaatcacccgtcttctgcatcactcatgctgggagctgtagactggagctcttcctatttggccatcttggctgccttttgattttcttttttttcttaaatgttctccagattgttgcaaccctttggtaatttttaatgatagttgaaaaatttggccatagctcttactttctgtttatacagagccttaagctcagtcaggggtaagactttaggtcattctcagatctaccctggatatgctggatgtcttgtggatatcctggatatttctgggtgtgcatatagccccatacatacacatggccttttagtttctgaaggatatgttagagaatttggaaggcccctgtaggcatctcattttctaagtttt

SEQ ID NO: 336785 - DNA, 540 bp, Homo sapiens
tctgttgcagcttcccttggctaggaaagggaattccccaaccccttgtgcttccaagatgaggcaattccctgccctgcttcggctcacactctgtgggctgaacccactctctaaccagtcccartgagatgaaccctgtatctcagttggaaatgcagaaatcacccgtcttctgcatcactcatgctgggagctgtagactggagctcttcctatttggccatcttggctgccttttgattttcttttttttcttaaatgttctccagattgttgcaaccctttggtaatttttaatgatagttgaaaaatttggccatagctcttactttctgtttatacagagccttaagctcagtcaggggtaagactttaggtcattctcagatctaccctggatatgctggatgtcttgtggatatcctggatatttctgggtgtgcatatagccccatacatacacatggccttttagtttctgaaggatatgttagagaatttggaaggcccctgtaggcatctcattttctaagtttt

SEQ ID NO: 336786 - DNA, 540 bp, Homo sapiens
tctgttgcagcttcccttggctaggaaagggaattccccaaccccttgtgcttccaagatgaggcaattccctgccctgcttcggctcacactctgtgggctgaacccactctctaaccagtcccaatgagatgaaccctgtatctcagttggaaatgcagaaatcacccrtcttctgcatcactcatgctgggagctgtagactggagctcttcctatttggccatcttggctgccttttgattttcttttttttcttaaatgttctccagattgttgcaaccctttggtaatttttaatgatagttgaaaaatttggccatagctcttactttctgtttatacagagccttaagctcagtcaggggtaagactttaggtcattctcagatctaccctggatatgctggatgtcttgtggatatcctggatatttctgggtgtgcatatagccccatacatacacatggccttttagtttctgaaggatatgttagagaatttggaaggcccctgtaggcatctcattttctaagtttt

SEQ ID NO: 336787 - DNA, 540 bp, Homo sapiens
tctgttgcagcttcccttggctaggaaagggaattccccaaccccttgtgcttccaagatgaggcaattccctgccctgcttcggctcacactctgtgggctgaacccactctctaaccagtcccaatgagatgaaccctgtatctcagttggaaatgcagaaatcacccgtcttctgcatcactcatgctgggagctgtagactggagctcttcctatttggccatcttggctgccttttgattttctkttttttcttaaatgttctccagattgttgcaaccctttggtaatttttaatgatagttgaaaaatttggccatagctcttactttctgtttatacagagccttaagctcagtcaggggtaagactttaggtcattctcagatctaccctggatatgctggatgtcttgtggatatcctggatatttctgggtgtgcatatagccccatacatacacatggccttttagtttctgaaggatatgttagagaatttggaaggcccctgtaggcatctcattttctaagtttt

SEQ ID NO: 336788 - DNA, 457 bp, Homo sapiens
gtgtaaatactcttagacacatgatgaaagtgttagcacgtccaggatttagtaacgtggttatatattctttggtgtcattgagatagaaatataattagaaattttgtaactgaaagtaaagagtgttagctgaatgcaatattacagtatttaggtatatacagagaagattaggagactgcctacgatatgtctcaactttctatctctctcagtaattaaaatctagttattcagcaatcacactaaaggyacaagttactttgagcccttagtataatcaatgtatgtagaatatagtatattccaagaataaaactctattacatactattcagtttaacctttctaaagaaatgacttcagaaatgtgagcataattcttaaattaagtgaacacattttgtccctgtttcagtagttgagtaaaagtatgatcatggccagcaattca

SEQ ID NO: 336789 - DNA, 595 bp, Homo sapiens
tggggtctcattttttcttatgtttcttgcttccaagatttttcccataaatttctggctgctcttccagttctaaattctgttccattctacctcaatctggtaaagttactgttttatctacactatggctatgtggttttggagctccctccgataagagaagttcagacttgcagttcttgtcctttgcaggtacagttttttttttttcttaagagaaaactctcctcttactttgttctgcttttgtttgctctccagtaccttttaaatgtggcttcttactgttygtccagattttatcacgactatctgcacactacctcttcaacccattttcattatgaaaattatttctaagaaataattttccagaaaaaactttgtgtataaacaacctcattgtagcattttatattagtaaaattttaatagtaaagtaacttaggacaaatcatatcagtgcaatattgtgcataaataagatgattatgaaggctgtgcattaacataaaatgtgtactttataatattaggtgattagagaagaatacaaaattatatcttcaggcacacatattgacaatagtta

SEQ ID NO: 336790 - DNA, 550 bp, Homo sapiens
tttatggattatgttaaattttttataactgagcaatacaacgtttaagtcatttcacaataatatgcagattatatgctacaaccctagcatatggcaaaatagacctcacattcatggcttgtgccttctggttgtttacaaactgatagtactcatttgagttaaagttatgtgagggatagcttacagaaaatatagtatttggaagccaaaatatacatacatagatgtatacacacacacacacacacacacacacacacacacacagtctattaaatttatcattttatttgacctaaaccttcaactatggcttcaataaagaagacatacctaaaaataagctgattctcaaagtatgaacttagaagsaaagtagtattctacagcttgtattgtacctgatagcatacatcttttgttatttcactcctttttccatgttaagcttcttgagggagtggaccatactggattgatatccttactctctacatagtatttgcataatgacttacatataaagtccattaaataaatattt

SEQ ID NO: 336791 - DNA, 638 bp, Homo sapiens
ttttaaaaagtacaaataaacaaaaataaattatctcaaccttcactataggctagggaaattttattctagcaagaggatagtagctgttcaaatataccatgcaaacatttctaaacaccaccaggtttcccaaagtcactgtgaaaaatgtatttgtcaaacttccaaaacaaaatctttcatagtagagctgaaaattgacttatttagtaactcatttaatagaggtgcatattctttataattacattaacagatgttattaacaagtttattgagtatgggtgttctaatatctcatgaggtgcttgacaatcccatctgctgatgggtgccaaataaagaaactaaaagagacacaggtgcctttggactcactrtaaacataacattacccacaaatcatgcagcctaatgctatctgcctattatctctgtctctaaaaatacatcatactagagaatatactttatgcattacattgttgcataaaattcctacttggaaaagagaaatccatatcaccaaactaattttccataactaatgtgtgtattaccccatgcaatttaagaatattctccttcttgaaaagattaaaatcatatctcatgagtgattgcatagccccttt

SEQ ID NO: 336792 - DNA, 605 bp, Homo sapiens
ttaacagatatattaataaaaagttttgtataaaaactttgcttattttaaacattgaacaacttcagtaggtctcctttccattgaacttgtcagaacttttaatatgtactgtaaattttcaaaagaaaagggattccttcactttatttgtcatcttttcttttatttctttctatgaaacaatttgttctcagtgtacacattagcatgcatttgttcttaaagtacaattttggaaagcacagtaatttaaggtgtaatatttccttttgtcagttttaatgtaatagtcaaactctcctcaattcctgatttgctagtgtattacaaaaccgaactacataattgtgaagaaacayagacatgggaatatagacaatatcacagtggattgcttcactcatctaatttatcctgcataatatagtgttttttgtttaattttacccaagaatacctctggcatttcttattctgcatgtagttgtcatatagtatttccagattatttctcaggaagattttgaagctctaaaggaggaagaagccatgagagtcttgtatcaggatctaagtttgtagtttggcaattgctgggatcc

SEQ ID NO: 336793 - DNA, 592 bp, Homo sapiens
agtacctctttatacttttatatttttattattattaaacagaggacaaaaattgtcacagccctgcttgtttaaggcaattcaaaacctgtggtcgagtgtagacagaagaaagagccaatataaaataacatcctgtaaatctaatcacccatggcactgaagaagagtgcactgaaatagctgttatctttctgttgtacgttttttatgggtattgagtcaggtgtgttcaatgtctcaatttatcagacttcccagtgggatcaagaacattagattatcaacttttttctcctgattgatttagcattctacacactttgaataatttacgtaaatgttgtccatgaggtcttccatctttcaatagaaatggaggtcaaatatataaaatctcaagaaatctcaaaatgcatacrttaatagcaaggagtcataaagaacagacattttatgtaggcaaaagtagaattaaaaaaatatatacacatgaaatagacctagggacttttctgaatgatctgcaaggttcaaggtagccataaagtctgaaaatacagattgatattattttcctttatttgtttaa

SEQ ID NO: 336794 - DNA, 533 bp, Homo sapiens
tcaggtataattacacgttaaaatgccaaaactcattgatggtacggtttagacaaaaataaaaatttaacaaaaggataaagaagctctgttatgggcattgcaattttccaaatcaaaacagtctgtaaacaaatatcagtagggaaataatcataactagcagatgtatgaagagattcaacctctagttcttaaattatagctgcttccagattaaagcaacactactgatggagcagtgtgcttgatatcctctggcaacatccttttttattgcagtagaaaccaatgttgaatttcctgaataattacataaataaaccatgcatttcacttatttgtgtgcccatatttaataatgtattgtgcatgtaactttcaggaacatgatttatggcattttatattgccacagmggggtgtttacttgaaatatgtacttgaaaatatcatataaaattatgttatttgatatatattcagaaataatctgatttttcaagaaaatgtaagctgaaaaacctacctgc

SEQ ID NO: 336795 - DNA, 378 bp, Homo sapiens
aaagttaaactacgatggctcagggtagggggagagagatggttgtaatgatgttcttttcatattttatgtcaactgtttcctgtgtccaggaaaaaaaatatgatttaattttaatttgaactttagcacctgttttcaaatgagttcacctgtcttcaaatgacttctctcagcaaaacacaagaaactaacacaaaattcaaacactttgcttgctttcgagttgtttataaagatttttcagtgaaactaaaatgatttcttatyttttgtgaaaactttattaatatttaggtttaagcctcccaagaaggttccaacaacactttggtaccagacacaactggttttaattactaacctcacttactttaa

SEQ ID NO: 336796 - DNA, 640 bp, Homo sapiens
gatttacttttgtatgttgaaccaactttacattcttggaataaataccatgtgtttcttcatgggatatatttctttttatatgttgctggatttgttttgttagtgttttcttagaattgttatatttatatttatgaaagacattggtctataaatgtgttatcttgtaatgtgtttgtctgattttgatatctgagtaatactgactttatataatgactcgagatgtggtcctacctgttctattttctgaaacaagtttgaaaagagctggagttaattttttgcttaccgcttagtagaatttactaataaaagcctctggtcctgggcttttctttgtgggaagtgttgtgactactattttaatttaattgcttgttattctattcaaatgttcttgctcttcttgagtcagtattagtagtttgtgtttgtgtaggaatttttacatttcattaaggctaacttattggcatacaattcttcatagtattctacataatactgttatgtatataaragctgtaggaatgtcattgccttcactgctgattttatgaatttgagcccttactctttctttcttgttaatcaggctaaagacttgtcagttttgttgatcttttcaaagaac

SEQ ID NO: 336797 - DNA, 614 bp, Homo sapiens
agcacaagtgacaaagggtatgagtcgggttgcattaaacaagcacaatgcctagaaatctgtgatagactgaaagaagaaatcacaaattatcagcaagaaacagttggaactaggcttgaggtaaacagaaacacaaacaacacgtcagccatgataaagagtgtaaatttgaacagatgtcacttctagagcagcagcagccagattatacaaaattggctttggatgaaatacaaaggaggggaagaaaatatgawgcctgtaggagcactgtgtccagcagctcttccattgtaatcatacctcagctgagtaaaaacaaataaacacctattgggtagaaaaaaaaaaaaacagcaacaaaagccatactgattaaatgaactaccagtatgaggatttatttttgaaagaagaagatcagctaaaatatgaaacaaatagtgtaaataactaggaagatgtaagtgagatgcccatttgtcaacctgcatcatatatcataacatttattccattaatagatatgctactattgtgtcaatagacaaaaaaacttagagaaaagtccccataaacacatatacatttcaaaataaaacttagggatt

SEQ ID NO: 336798 - DNA, 561 bp, Homo sapiens
gaaaagtagagtagccaaactttttactttacctaaaaaacagctccaattgctttcagtatcactaaaatataagtttttcaatgcaaaaatgtcattctttccatttattgaataaagtcccaaaggggccctagcagactatacatacatttggccctctgcatccgtcggttttgcatctgtggattaaatcaactgcaaattgaaaatatttgagaaacattacatctttattgaacaygtactgacatttttcttgtcattattccctaaacaatactctataacaactatttacatacaatttatgttgtattaactattataggtaatctagatattatttaaagtacacagaataatgtgtgtaggttatatgtaaatactatactattttataccagggaattgagcattcttggattttggtaacctcagaaggtcttaaaaccaatttttcatggatcctgagagaccattgtacttgattaacagttatcttggcctagtaagtctgaacacttagaaaattaaactaaggagggagcagagcaagaa

SEQ ID NO: 336799 - DNA, 572 bp, Homo sapiens
attaaatctctgaattatttttgtaatctttgagaaactatggctactggaggaagaagagggagaaggtgaactccataaactataaataggtaagctatatatcaaatctcaaaatagattatgaaaataattgtaagtatttagaaaaacatactaatttgttagatagttttctttatgttcctcagagaaaagcccatcaacagaatgtgataaacacgacataagtactttgttagcaaaaattctgtaaagatctactatggtatcattataaacaaaaaagaggggtaarttctcagctaatgaaatgacaattcttaaactatgtggaataattgattgctctcaatctaaagtgatatttgcactgaaaagctgaagccattttttgtcactgtctgatgggcacatttgtgtttctgatttttatttttctaatgaaaagaagttaagatcttttgacaaatatattggatgaaataattttttttgagacagagtgttgctccaaacatcacaatttagcctagcctaccttatatgtgttcagaatacttacattagcc

SEQ ID NO: 336800 - DNA, 572 bp, Homo sapiens
attaaatctctgaattatttttgtaatctttgagaaactatggctactggaggaagaagagggagaaggtgaactccataaactataaataggtaagctatatatcaaatctcaaaatagattatgaaaataattgtaagtatttagaaaaacatactaatttgttagatagttttctttatgttcctcagagaaaagcccatcaacagaatgtgataaacacgacataagtactttgttagcaaaaattctgtaaagatctactatggtatcattataaacaaaaaagaggggtaaattctcagctaatgaaatgacaattcttaaactatgtggaataattgattgctctcaatctaaagtgatatttgcactgaaaagctgaagccattttttgtcactgtctgatgggcacatttgtgtttctgatttttatttttctaatgaaaagaagttaagatcttttgacaaatatattggatgaaataattttttttgagacagagtgtygctccaaacatcacaatttagcctagcctaccttatatgtgttcagaatacttacattagcc

SEQ ID NO: 336801 - DNA, 557 bp, Homo sapiens
gctgcaaatttcagactcagacaggataacactattctttcaaagtaaccctcacatcgcacactcttatttatagccacaggaaggggctgatggcaggagttgcttcagttctggttggctataaagaggagcaaggcagggccgtgtgtggtggctgatgcctgtaataccagcactttgggaggctgaggcagatggatcatttgagttccggagttcaagaccagcttggcaaacatggtgaaaccctgcctctactaaaaatacaaaaattagctgagcatggtggtacactcctgtagtcccagctactcgggaggccraggcaggagaatcgttcaaacccaggaggtggaggttgcagtgagctgagatcttgccagtgctctccagcctgggcaacagggcaagactccatcacaaaaaaggaaaaaagagaaatgaggagagaggcagaaggctgagtggggagttggagatgcgtgccaggggagaagagactctctgtattgtggacagcactttagctgctgcctctgacaaatgagaacatg

SEQ ID NO: 336802 - DNA, 557 bp, Homo sapiens
gctgcaaatttcagactcagacaggataacactattctttcaaagtaaccctcacatcgcacactcttatttatagccacaggaaggggctgatggcaggagttgcttcagttctggttggctataaagaggagcaaggcagggccgtgtgtggtggctgatgcctgtaataccagcactttgggaggctgaggcagatggatcatttgagttccggagttcaagaccagcttggcaaacatggtgaaaccctgcctctactaaaaatacaaaaattagctgagcatggtggtacactcctgtagtcccagctactcgggaggccaaggcaggagaatcgttcaaacccakgaggtggaggttgcagtgagctgagatcttgccagtgctctccagcctgggcaacagggcaagactccatcacaaaaaaggaaaaaagagaaatgaggagagaggcagaaggctgagtggggagttggagatgcgtgccaggggagaagagactctctgtattgtggacagcactttagctgctgcctctgacaaatgagaacatg

SEQ ID NO: 336803 - DNA, 592 bp, Homo sapiens
tttaaaaagtaataaaaatgaaatgaacaaagaactgaaagggataacagagaaaataatcggtaatgatagataatgaaagactgacaaagaaaatccaacacataaataattggtacccctgtcccaaaaggagaggctccrtaaactttctataattcatctaagaagtggtgtactatgtcttagaagcaaaaagatgaagaactgtcacaaataggacatacccagataacaatactggatttcaaagatcaacaaaggaaggagattgaatgctgaaataaaaattttaaatttcaaaatgtgagaatcacattattattgtaagatcaatgaaaaactatatttgtgtctgcattgtcacaaagagagtaaacttataatgttacagaatttgccatatgctgaaccaagaaaatcttaaaggatcatgaggtggttcctttctagccctttgctctatagacaataaaaacacaagctcactccggtggaaaattagagttggaacaagggctggagccaactgttggtcactagtcatgttatgttcaaatatctgaaatcctaaggtccctcaccagaggat

SEQ ID NO: 336804 - DNA, 592 bp, Homo sapiens
tttaaaaagtaataaaaatgaaatgaacaaagaactgaaagggataacagagaaaataatcggtaatgatagataatgaaagactgacaaagaaaatccaacacataaataattggtacccctgtcccaaaaggagaggctccgtaaactttctataattcatctaagaagtggtgtactatgtcttagaagcaaaaagatgaagaactgtcacaaataggacatacccagataacaatactggatttcaaagatcaacaaaggaaggagattgaatgctgaaataaaaattttaaatttcaaaatgtgagaatcacattattattgtaagatcaatgaaaaactatatttgtgtctgcattgtcacaaagagagtaaacttataatgttacagaatttgccatatgctgaaccaagaaaatcttaaaggatcatgaggtggttcctttctagccctttgctctatagacaataaaaacacaagctcactcyggtggaaaattagagttggaacaagggctggagccaactgttggtcactagtcatgttatgttcaaatatctgaaatcctaaggtccctcaccagaggat

SEQ ID NO: 336805 - DNA, 522 bp, Homo sapiens
aaatcgtaaggaaaggcactgatggatttaacgattcaaaatcgagaatgtctgttaaatgaaagatgccgtatacaaattttatagactagaggcagattcagacaagatatttgcaatagtgaaacctgtttataatacaaggaactcctacaattcaacaacaaaaagataaaaaaaaattcaatggaaaattgggctaaggttatgaactagttattcagaggggaaattaatcagttaagtgaaaattaaaaagtaggatagtaccaaattagcaagagtgtggcagtctaagaatcttcatgcactgttggtgtaaattgttacaactcctgcaaagtccttggtgaaattaagtatacatggccactgtgtcccagatcccactcctggytgtgtgtctcagagtaacccttacccaggcccataaaaaggcacggacagcaatgttcatcctgatgtcatatgatgtagtggataatttgagacaactcacatgttgaacactagagcaatgat

SEQ ID NO: 336806 - DNA, 547 bp, Homo sapiens
ttgcagtgagccaaggtcgtgccactgcactccatcctgggcaacagaggagatcctgtctcaaaataaataaataaataaaaatacaaaataacagatgtttgcctttaaatgtcaaaaatgttctccaacaatattcttcttttcaacatactcttaaacctttcctttctgagaaaaagtctgaccttggggaagaatttccgtggatttcatttccatggtagygtgcacattttattgagtggttggattttgttcttagggattccgctgctcctacaggcatgttcacacaggctggagaactgagacaacttgagagataattcaatattgaaaataattcttcttcccttccactccccttagatgatacttttctcttaattatgtaattaattgcctcagttcttcatttctttctgattataaacaccacagcctcagagaacaaaaatactatgatttttatatccaccaaaaatctgggcggtaaacaaaataaaaaacctatgacaaaataaacgcattgccaaggtcctca

SEQ ID NO: 336807 - DNA, 547 bp, Homo sapiens
ttgcagtgagccaaggtcgtgccactgcactccatcctgggcaacagaggagatcctgtctcaaaataaataaataaataaaaatacaaaataacagatgtttgcctttaaatgtcaaaaatgttctccaacaatattcttcttttcaacatactcttaaacctttcctttctgagaaaaagtctgaccttggggaagaatttccgtggatttcatttccatggtagcgtgcacattttattgagtggttggattttgttcttagggattccgctgctcctacaggcatgttcacacaggctggagaactgagacaacttgagagataattcaatattgaaaataattcttcttcccttccactccccttagatgatacttttctcttaattatgtaattaattgcctcagttcttcatttctttctgattataaacaccrcagcctcagagaacaaaaatactatgatttttatatccaccaaaaatctgggcggtaaacaaaataaaaaacctatgacaaaataaacgcattgccaaggtcctca

SEQ ID NO: 336808 - DNA, 551 bp, Homo sapiens
tttaaaataactaatcttaacaaacaactccttaaataatgtaaaaaacaaactgtagactagaagaaaatatttttaatgtatacatcccattttactgtaagaaattagaatataggccgggcatggtagcttgcacctgtaatcctaggaggccaaggcagaaggatcgcttgaggtcagaagttcgagaccagtctggccaacatggtgaaaacctgtccctactaaaaatacaaaaattagctggagtggtagtgcactcttgtaatcccagctacttgggtagctgaggcaggagaattgcctgaacccagggattggaggttgcagtgaggcaagattgcaccactgcactccagcctgggtgacagagcgagactccatctcaraaaaaaaaaaaaagaaaaagaaaaaagaaaaaaaagaaagaaattagaatatagaatatgttacaaattaatgaaaaaagaaaaagaaaaacagcccaatagaagaaaagtggtcaaaaattgtgaatatgctgctattcatggaaaagaaaaaagaag

SEQ ID NO: 336809 - DNA, 458 bp, Homo sapiens
ctattttttgtcttctttttcctctatatttttccctacccaggattccagcaggcagctattgctctgggagcctttgcctgaggaagctgtgcaaggctagaaaatagaagctgcttcttaaagctctgattttcatttgcagaagtgtaagtatgtgcagagcgagactgccccgattgcacctggtgggcttcggagagcaggcagagagcccagctgaaggaaaaagctgttcccagagtcaggggaggaaggagttctttggtcctcgacttgcaggaacctgcgccctggctacgtggaggtggctgagcctccagacctgcaargaccacatgagacctggaaagatctccacaagccctggggacagaggatgacacagtagtatctaagattgcattccccaaaatgctggtgccctggggtgggggtcaaagccagggaagccagtt

SEQ ID NO: 336810 - DNA, 521 bp, Homo sapiens
agttgaaaataatcaagttaagaagttgctagattagaagcaatgcccccaaatcaaccaatgtgttttcggtactcttaggatatagtcctagaaaaatctaattttttaagctatccttaacaaaagctttgaaaatgatatttgtcatgtctctatactggatttaatatgctgtctgagtttcctctcttcaagggatacgtgccattcactatgtttctactacactccatgcattttatatataacacatcatttaatcmtcataataaatctaaaaagtagccagtgccatccttccttagaagtgaagaaactgaaaatcagaggagttagtaaacacctcagaccacacagccaggaaatgaacaagacaagcctgaaatcaaattttttttatttccaagtctatgcactttctattatatactgaaatccctcagtattatctacataataaatgtgtcccactacattacataagttatgtggtctttttgctttgttttggaagtgcc

SEQ ID NO: 336811 - DNA, 552 bp, Homo sapiens
ataatcatttattttaccattattaaattatttctctgatataaaattgaatttcamcagtaaaacaaataattgaagactaataaacagataaatgaataagtgccaaagaaaagaaaacggatacacaatagcttcaaatcatttaaaaaattgcctttttaaatagaaaggctctaaaagataattcaatgcttatgctacattgtacaactttggacacccagaagcaaagaaggacagtagctaactcagggtcctggaactcttctaggttaggagaggcaggttgggagaggtcactgactcaagtttcctaatctctagttcatttctactccacgacactaatcccctttataatccttattccataggttagctaagttaaacttagctttccagagatgtcatttaacttgccatattaataaatatggtacataggtcttcctgttactggatccgttcatgtgtgtatatggaaatctataagttaagtgcacaagtgtatatgttgtgtatattttctgttctttaataggtgagaca

SEQ ID NO: 336812 - DNA, 587 bp, Homo sapiens
tggggaattgaaatcacagaaagcaaaactgcagataagtgggggctgctatagtggtttgcactattatatttggaagaggaaaggtctaaacatttggcttttgttgcaaatgaagaaatttttttgggtaggagtaatcacctaaaaaccttaataagttgtgatcttgctcgaaaacccaagaagtgtttctttttttgtttttgttttgcatatgtagcattatttgtgtttgtttgcctgattatagatgaaagtgcttgatgaaattcccaatatttattctatctctaggataatgtgaacatagcaattaaagcttataaacagtggagtttcatgcccagataattatggcaagaatttttcaggtgcacgctttctaaaatttatatgcttaaggaagcacttatgattgaaagcaygaggacgattctttttcactgccccattcataaccatttttttctcccattttacatagaaaggctttctgcttatctatttaggatctttatatgattgatgatctcaccatgtaaaaatttctcagattcaaaataaagggacactagaaatattac

SEQ ID NO: 336813 - DNA, 560 bp, Homo sapiens
ttgggaggctgaggcaggtggatcatccaaagtcaggagtttgagaccagcctgccaacgtggtgaaaccctgtctttactaaaaaatacaaaaattatccgggagtggtggygcatgcctgtaatcccagttacttgggaggctgaggcaggagaatcacttaaatctgggaagcagaagttgcagttcaccaaggtcacaccattgcactccagcctgggcaaagtctcaaaaaaaaaaatgtgcatgcgtagtggcagtggcatctgtatggtaatagaaaagcttgaatctttatttaatatgcagactttggcacttggttttactgtttaccattgatttttacattttaaacaaatcttactttttctgtcttcctatttttattgttatttatactcaccaaatcacatatttatgtcagaatgtgcataattgggtatgtttatttatacagggatgtaacagtgtaacatctgtgctagaaaagactagtttacaagtatgagaaataaagaggaggaaattatgtatttaagaatctactatttgataa

SEQ ID NO: 336814 - DNA, 560 bp, Homo sapiens
ttgggaggctgaggcaggtggatcatccaaagtcaggagtttgagaccagcctgccaacgtggtgaaaccctgtctttactaaaaaatacaaaaattatccgggagtggtggcgcatgcctgtaatcccagttacttgggaggctgaggcaggagaatcrcttaaatctgggaagcagaagttgcagttcaccaaggtcacaccattgcactccagcctgggcaaagtctcaaaaaaaaaaatgtgcatgcgtagtggcagtggcatctgtatggtaatagaaaagcttgaatctttatttaatatgcagactttggcacttggttttactgtttaccattgatttttacattttaaacaaatcttactttttctgtcttcctatttttattgttatttatactcaccaaatcacatatttatgtcagaatgtgcataattgggtatgtttatttatacagggatgtaacagtgtaacatctgtgctagaaaagactagtttacaagtatgagaaataaagaggaggaaattatgtatttaagaatctactatttgataa

SEQ ID NO: 336815 - DNA, 444 bp, Homo sapiens
gatgatgggttgatgggtgcagcaaaccagcatggcacatgtatatctatgtaacaaacctgcatgtcctgcatatgtatcccaaaacttaaagtatattttaaaaaaaagaaaaatgtttttatactggattgataggaagatgttaaattaatagaaaatatacataatattgtattagtttcttatttctgctgtaataaattaccacaaacttaatggcttaaaacaacacacatttatcctcttacaattctggaagtcagaaatccaagatgaattttacaaggctgacatcaaggtttctaaagagtcagtttcttctggatgctccagggaagaatccatctcttgcttctcttgcttcttcccacttctagatgctgcctgcattccttatcttatgacygcactattgggtctcttgcttctgtcctcatatct

SEQ ID NO: 336816 - DNA, 560 bp, Homo sapiens
ttgggaggctgaggcaggtggatcatccaaagtcaggagtttgagaccagcctgccaacgtggtgaaaccctgtctttactaaaaaatacaaaaattatccgggagtggtggcgcatgcctgtaatcccagttacttgggaggctgaggcaggagaatcacttaaatctgggaagcagargttgcagttcaccaaggtcacaccattgcactccagcctgggcaaagtctcaaaaaaaaaaatgtgcatgcgtagtggcagtggcatctgtatggtaatagaaaagcttgaatctttatttaatatgcagactttggcacttggttttactgtttaccattgatttttacattttaaacaaatcttactttttctgtcttcctatttttattgttatttatactcaccaaatcacatatttatgtcagaatgtgcataattgggtatgtttatttatacagggatgtaacagtgtaacatctgtgctagaaaagactagtttacaagtatgagaaataaagaggaggaaattatgtatttaagaatctactatttgataa

SEQ ID NO: 336817 - DNA, 560 bp, Homo sapiens
ttgggaggctgaggcaggtggatcatccaaagtcaggagtttgagaccagcctgccaacgtggtgaaaccctgtctttactaaaaaatacaaaaattatccgggagtggtggcgcatgcctgtaatcccagttacttgggaggctgaggcaggagaatcacttaaatctgggaagcagaagttgcagttcaccaaggtcacaccattgcactccagcctgggcaaagtctcaaaaaaaaaaatgtgcatgcgtagtggcagtggcatctgtatggtaatagaaaagcttgaatctttatttaatatgcagmctttggcacttggttttactgtttaccattgatttttacattttaaacaaatcttactttttctgtcttcctatttttattgttatttatactcaccaaatcacatatttatgtcagaatgtgcataattgggtatgtttatttatacagggatgtaacagtgtaacatctgtgctagaaaagactagtttacaagtatgagaaataaagaggaggaaattatgtatttaagaatctactatttgataa

SEQ ID NO: 336818 - DNA, 497 bp, Homo sapiens
agagtggatttcttgagtgctttagcaccattcccttggtactgtcctcatgagagtgagtgagttctcacaagatctggttgtttaaaagtgtgtggcaccacccccaccaccttgctcctgctgtggccatgtgaagtgcctgctccccgctcaccttccaccatgattgtaagtttcctgaagcatccccagaggtcaagcagatgctagcattatgtttcctgtacagcctgagaaccatgagccaattaaacctcttttcattataaattacccagtttcaggtatttctttakagagatgcaagagtggactaatacattctcaaagtgttgcccccagaccagcaacatcagcatcacctgggaacttgttagaaatgtaaattcccaggctgcgttcaagacctactgaatcagaaacactggaggggaggcctggtgacctgtgtttcaaacccctctccccaccccagggattctgatgaatgctga

SEQ ID NO: 336819 - DNA, 614 bp, Homo sapiens
cattcagtagggaagccttgacttaggccctcatcatcacctgtctaggcattctaccaattctagatcaaacacttcactctttccactakccaaagttatttacttttaattactgtataagataaccaaatagtctaagaccaaccatgttatttctccttgtgcacttcaaaatgaacttcaaattcatttagctttgcatacactctgtatcagtcactaattccaacaggatacacatgtcatacttaaaatacgataattcaaggaaagtgtatttacaaaagtgagagattatggcactgcttctcaagtaacagtagttttactcttgggacatctgttgatgtctggagacattatcaagactaatgggggttgagcgtacccctggcatctagtgagtgaatgccaggaatattgctaaacatcctacaatgtgcaggacagcacagcacagcatagaattagacaacaaaatgtcaaggcaaaatgtcaagagtggcaaggttgagaaaccttgctacagagtaaggtgttgttaaatgcttgtcaaactgaattaaatgagaagtgcaaacaaacttcccaggtgcaactaactctgcttg

SEQ ID NO: 336820 - DNA, 614 bp, Homo sapiens
cattcagtagggaagccttgacttaggccctcatcatcacctgtctaggcattctaccaattctagatcaaacacttcactctttccactatccaaagttatttacttttaattactgtataagataaccaaatagtctaagaccaaccatgttatttctccttgtgcacttcaaaatgaacttcaaattcatttagctttgcatacactctgtatcagtcactaattccaacaggatacasatgtcatacttaaaatacgataattcaaggaaagtgtatttacaaaagtgagagattatggcactgcttctcaagtaacagtagttttactcttgggacatctgttgatgtctggagacattatcaagactaatgggggttgagcgtacccctggcatctagtgagtgaatgccaggaatattgctaaacatcctacaatgtgcaggacagcacagcacagcatagaattagacaacaaaatgtcaaggcaaaatgtcaagagtggcaaggttgagaaaccttgctacagagtaaggtgttgttaaatgcttgtcaaactgaattaaatgagaagtgcaaacaaacttcccaggtgcaactaactctgcttg

SEQ ID NO: 336821 - DNA, 614 bp, Homo sapiens
cattcagtagggaagccttgacttaggccctcatcatcacctgtctaggcattctaccaattctagatcaaacacttcactctttccactatccaaagttatttacttttaattactgtataagataaccaaatagtctaagaccaaccatgttatttctccttgtgcacttcaaaatgaacttcaaattcatttagctttgcatacactctgtatcagtcactaattccaacaggatacacatgtcatacttaaaatacgataattcaaggaaagtgtatttacaaaagtgagagattatggcactgcttctcaagtaacagtagttttactcttgggacatctgttgatgtctggagacattatcaagactaakgggggttgagcgtacccctggcatctagtgagtgaatgccaggaatattgctaaacatcctacaatgtgcaggacagcacagcacagcatagaattagacaacaaaatgtcaaggcaaaatgtcaagagtggcaaggttgagaaaccttgctacagagtaaggtgttgttaaatgcttgtcaaactgaattaaatgagaagtgcaaacaaacttcccaggtgcaactaactctgcttg

SEQ ID NO: 336822 - DNA, 575 bp, Homo sapiens
tttcttccattctgtaggttttctctccgctttgtttagtatttttttgtttgttttttttgttgttgttgttgttgtgaagaggttttcaacttgatatagtcctatttgtccatttttgctttggttgcctgtgcatttgaggtcttactaaaaaatctgtatcaaaccaatgtcctgaagtatttcaccaatgttttctggtagtagtttcatagtttcaggtcttatatataagtctatgattcattttaattggattttcacacacagtgagagataggggtctagtttcattattctgcatgtggttatccastttttccaacaccatttgttgaagagaccgtcctttccacagtgtatattcttggcacctttgttgaaaataagttgtctgtaaatataaaaactttttctgtgtactctattcagttctattggtctatgtgtctgtttttatgccagtactatgcactttttgttactatagctttttagtatcttttgaagtcaggtaatgtgatgcttccatgtgttctttttgctttgttctttttacttaggataacttt

SEQ ID NO: 336823 - DNA, 502 bp, Homo sapiens
agttacttaaactatattttttttaaaagaaaggaatgatagaagggggcaagatgacatatyagaagcagctgcagtccacagttatcacggagagaaatgaaagtggtgagtgaattcagtaccttcaactgaaatattcaggttctcacattgggactgactaggcaaacagctagacccacagagaacaaagaaaagcaggtggggcaaagacctgccagaaagtgacaatggagccaaaggaacccctacccccagccaagagaagtggtgaatgattgtgtgaccctacctgggaagccacacttctcccagggatctttgcaacccatgaatcaggagatcctcttgtgagcccacaccaccagggccttgggtctgatacacagagctgtgcagagtctcagcagagcagtcactcatgttcacatagagataacccaggagttttagactcccaccttgggaatcctggcaaatcaggagatccttctgtata

SEQ ID NO: 336824 - DNA, 584 bp, Homo sapiens
atgtgaatacagtttaggctgaaactggaatttctactatattattcaaaatcaatactgcactaagttacttaaactatattttttttaaaagaaaggaatgatagaagggggcaagatgacatattagaagcagctgcagtccacagttatcacggagagaaatgaaagtggtgagtgaattcagtaccttcaactgaaatattcaggttctcacattgggactgactaggcaaacagctagacccacagaraacaaagaaaagcaggtggggcaaagacctgccagaaagtgacaatggagccaaaggaacccctacccccagccaagagaagtggtgaatgattgtgtgaccctacctgggaagccacacttctcccagggatctttgcaacccatgaatcaggagatcctcttgtgagcccacaccaccagggccttgggtctgatacacagagctgtgcagagtctcagcagagcagtcactcatgttcacatagagataacccaggagttttagactcccaccttgggaatcctggcaaatcaggagatccttctgtatattcccctaggaaggggg

SEQ ID NO: 336825 - DNA, 613 bp, Homo sapiens
gatgtgaatacagtttaggctgaaactggaatttctactatattattcaaaatcaatactgcactaagttacttaaactatattttttttaaaagaaaggaatgatagaagggggcaagatgacatattagaagcagctgcagtccacagttatcacggagagaaatgaaagtggtgagtgaattcagtaccttcaactgaaatattcaggttctcacattgggactgactaggcaaacagctagacccacagagaacaaagaaaagcaggtggggcaaagacctgccagaaagtgacaatggagccaaaggaacccctacccccagccaagagaagtggtgaatgattgtgtgaccctacctgggaagccacacttctcccagggatctttgcaacccatgaatcaggagatcctcttgtgagcccacaccaccagggccttgggtctgatacacagagctgtgcagagtctcagcagagcagtcactcatgttcacatagagataacccaggagttttagactcccaccttgggaatcctgrcaaatcaggagatccttctgtatattcccctaggaagggggctgaatgcagggatccaagcagcattgt

SEQ ID NO: 336826 - DNA, 576 bp, Homo sapiens
ggacttcccagcctgtggaactgttaagaaataaaagtttgctgtttaagccacmtagtccatggcatttttgttatagcagccccaactgactaagatcccagttaacttcaagtttctgaaagctaaagtcatttctatttgttatgtagagcacaaacagatgcttatagattcagtctgtcagatagcatagtggcactgtgatagcaacaagaattctaaccctgccagtaaacttcccggtcaccagtgatggtgaagatactactctttctcttctctaatacaaagagcataaggctcccctgcttgccttgctacctgaaatcccaaagtaatctcttttaaacgggtagtcctcttcataccctcatttgtcttagtccattttgtgctgctataaaaaaattcctaagatcagttaatttatcatgatcagaaatgtattggttcacacttctggaggctggaaaatttgagatcaaagtgccaacatctggtgagggccttcttgctgtattatcaaaatggtggaaggtggaagggcaagagtacaaaagagggaatccactc

SEQ ID NO: 336827 - DNA, 576 bp, Homo sapiens
ggacttcccagcctgtggaactgttaagaaataaaagtttgctgtttaagccacatagtccatggcatttttgttatagcagccccaactgactaagatcccagttaacttcaagtttctgaaagctaaagtcatttctatttgttatgtagagcacaaacagatgcttatagattcagtctgtcagatagcmtagtggcactgtgatagcaacaagaattctaaccctgccagtaaacttcccggtcaccagtgatggtgaagatactactctttctcttctctaatacaaagagcataaggctcccctgcttgccttgctacctgaaatcccaaagtaatctcttttaaacgggtagtcctcttcataccctcatttgtcttagtccattttgtgctgctataaaaaaattcctaagatcagttaatttatcatgatcagaaatgtattggttcacacttctggaggctggaaaatttgagatcaaagtgccaacatctggtgagggccttcttgctgtattatcaaaatggtggaaggtggaagggcaagagtacaaaagagggaatccactc

SEQ ID NO: 336828 - DNA, 576 bp, Homo sapiens
ggacttcccagcctgtggaactgttaagaaataaaagtttgctgtttaagccacatagtccatggcatttttgttatagcagccccaactgactaagatcccagttaacttcaagtttctgaaagctaaagtcatttctatttgttatgtagagcacaaacagatgcttatagattcagtctgtcagatagcatagtggcactgtgatagcaacaagaattctaaccctgccagtaaacttcccggtcaccagtgatggtgaagatactactcttyctcttctctaatacaaagagcataaggctcccctgcttgccttgctacctgaaatcccaaagtaatctcttttaaacgggtagtcctcttcataccctcatttgtcttagtccattttgtgctgctataaaaaaattcctaagatcagttaatttatcatgatcagaaatgtattggttcacacttctggaggctggaaaatttgagatcaaagtgccaacatctggtgagggccttcttgctgtattatcaaaatggtggaaggtggaagggcaagagtacaaaagagggaatccactc

SEQ ID NO: 336829 - DNA, 547 bp, Homo sapiens
agacaacccaaattccttcctctctttatgaactgcacattcaaaaagatctggcacctgacctgctcctgtgaggagaaagatgagaaacatctactgggatagatcttaatgggaagatcacggcctgagtggaggaacacaaggtatgtttggccagtgcgagtatttcatcaagactggcaaatgcatgagagcagtggggaattaaaacttcccascattttatgaggccaaggcgggcacatcacgaggtcaggagatcaagaccatcctggctaacacggtgaaaccccgtctctactaaaaatacaaaaaattatccgggcatggtggcgggcgcctgtattcccacctactctgcaggctgaggcacgagaatggcgtgaacccgggaggtggagcttgcactgagcccagattgtgctgctgcactccagcctgggcaacacagtgagactccgtctcaaagaaaaaaaaaatgttgggattaaactaaagaaagcactgaatgaggattggagagtgtgtatccactttggtaagt

SEQ ID NO: 336830 - DNA, 581 bp, Homo sapiens
tactagttatttctgtagaataactcataagcatatattcccagccccaaattagttaataacacaaattcatgttggatttttttctagcacaatgtggttggaaaatagaacctctccttatgcaactcataggtggttgtagtgtgacaggtccctcaccaggatacctaaagggcatatgtctgccacctgaaccctgaaggctgggtggtgagccaaggccatagcgcccaacccaggtgtscctgagaaaccaaacatcctggagaatatctgagaacataccaagaaaaacagtctcattgttcaaacacagtcagcaaagagccaaaaaattagcttaatagcatgccgccatccaggaatgccctgtatgtaagtcaaaataaatcacctactcatcaatctggacttgtctgaaccattctttggtctcttggcaccttcctattttgaaaggggggaacgttacagccccaagtttttctcttaacagaggcttcattcaatatattggagggtgttggcaacacgcaaaggaaatctcttctctctctttttcatgtgatagggcttat

SEQ ID NO: 336831 - DNA, 547 bp, Homo sapiens
agacaacccaaattccttcctctctttatgaactgcacattcaaaaagatctggcacctgacctgctcctgtgaggagaaagatgagaaacatctactgggatagatcttaatgggaagatcacggcctgagtggaggaacacaaggtatgtttggccagtgcgagtatttcatcaagactggcaaatgcatgagagcagtggggaattaaaacttcccaccattttatgaggccaaggcgggcasatcacgaggtcaggagatcaagaccatcctggctaacacggtgaaaccccgtctctactaaaaatacaaaaaattatccgggcatggtggcgggcgcctgtattcccacctactctgcaggctgaggcacgagaatggcgtgaacccgggaggtggagcttgcactgagcccagattgtgctgctgcactccagcctgggcaacacagtgagactccgtctcaaagaaaaaaaaaatgttgggattaaactaaagaaagcactgaatgaggattggagagtgtgtatccactttggtaagt

SEQ ID NO: 336832 - DNA, 547 bp, Homo sapiens
agacaacccaaattccttcctctctttatgaactgcacattcaaaaagatctggcacctgacctgctcctgtgaggagaaagatgagaaacatctactgggatagatcttaatgggaagatcacggcctgagtggaggaacacaaggtatgtttggccagtgcgagtatttcatcaagactggcaaatgcatgagagcagtggggaattaaaacttcccaccattttatgaggccaaggcgggcacatcacgaggtcaggagatcaagaccatcctggctaacacggtgaaaccccgtctctactaaaaatacaaaaaattatccgggcatggtggcgggcgcctgtattcccacctactckgcaggctgaggcacgagaatggcgtgaacccgggaggtggagcttgcactgagcccagattgtgctgctgcactccagcctgggcaacacagtgagactccgtctcaaagaaaaaaaaaatgttgggattaaactaaagaaagcactgaatgaggattggagagtgtgtatccactttggtaagt

SEQ ID NO: 336833 - DNA, 496 bp, Homo sapiens
attttcaaatttaacctcatagaaaccctatcagacaagttaagaggtcttccactgtgtatgttaacagtcamcttgcaggaaaacattatctcatacctcaggaagcagttatctagatgctctcacgattcaagttcaaagcaaacgaaacaattctaccaaaataaaactttgagatagaaaatatttttaaacttttaagagacagaattggggaagagggacagaactaaatagttatgtttgagttcacagataaataaagctaactttaacctggaagtctcataaatcttgctttgacatgaattttaataaaaatctgattagttaatgaggaaccatgtactaatcttttacaaagctgcaaagcattcatttaagttataatagtgatatatcactattatatattcattttctcatttctagcattttgcagtttttattatatcaattttggccactattatatatcaaaattgtttgattt

SEQ ID NO: 336834 - DNA, 496 bp, Homo sapiens
attttcaaatttaacctcatagaaaccctatcagacaagttaagaggtcttccactgtgtatgttaacagtcaccttgcaggaaaacattatctcatacctcaggaagcagttatctagatgctctcacgattcaagttcaaagcaaaygaaacaattctaccaaaataaaactttgagatagaaaatatttttaaacttttaagagacagaattggggaagagggacagaactaaatagttatgtttgagttcacagataaataaagctaactttaacctggaagtctcataaatcttgctttgacatgaattttaataaaaatctgattagttaatgaggaaccatgtactaatcttttacaaagctgcaaagcattcatttaagttataatagtgatatatcactattatatattcattttctcatttctagcattttgcagtttttattatatcaattttggccactattatatatcaaaattgtttgattt

SEQ ID NO: 336835 - DNA, 572 bp, Homo sapiens
ttgtatttctatataacagtaacaaactaatagtaaaattaaagggaagacaacattttcagtagtctcagggaacctcatttatctaagaataaatcttaaaaaatatgtakaaaagccctgcaggggaaattataaaacattattatgcaatattaatgactacatatgtaaaaaagtatatcattttcatgactaggaagtcaatatcatagaagtatcaattcttccagatcaatatataaaatagatatgattccaatgtaaaaacataattttttatggatgataataaaatgatagtaccatatatacatatattaagggccataaataggatatttctgaagaagagtaacaaattgggagacttgcttttccggttattaggactgtcatgaggctataaaaattgacagcttagcaatgttagaaggttacaaacctaattgattagtggaattaaagagggttcagagaaatatattaaaatacatagaggacttcggtaaatcacagagatggtattccatttaggtggtgaaatgttcaataagtggattggaaaaaat

SEQ ID NO: 336836 - DNA, 570 bp, Homo sapiens
aattataaaacattattatgcaatattaatgactacatatgtaaaaaagtatatcattttcatgactaggaagtcaatatcatagaagtatcaattcttccagatcaatatataaaatagatatgattccaatgtaaaaacataattttttatggatgataataaaatgatagtaccatatatacatatattaagggccataaataggatatttctgaagaagagtaacaaattgggagacttgcttttccggttattaggactgtcatgaggctataaaaattgacagcttagcaatgttagaaggttacaaacctaattgattagtggaattaaagagggttcagagaaatatattaaaatacatagaggacttcggtaaatcacagagatggtattccatttaggtggtgaaatgttcaataagtggaktggaaaaaattattatctacatattcaaaagtgaatttaaaaccctacttcttatgatatacaaaaatctactccagcaagttaacggttcaaatgttaaaactttaaatcacttggtggccaggcatagtggctaat

SEQ ID NO: 336837 - DNA, 570 bp, Homo sapiens
aattataaaacattattatgcaatattaatgactacatatgtaaaaaagtatatcattttcatgactaggaagtcaatatcatagaagtatcaattcttccagatcaatatataaaatagatatgattccaatgtaaaaacataattttttatggatgataataaaatgatagtaccatatatacatatattaagggccataaataggatatttctgaagaagagtaacaaattgggagacttgcttttccggttattaggactgtcatgaggctataaaaattgacagcttagcaatgttagaaggttacaaacctaattgattagtggaattaaagagggttcagagaaatatattaaaatacatagaggacttcggtaaatcacagagatggtattccatttaggtggtgaaatgttcaataagtggattggaaaaaattattatctacatattcaaaartgaatttaaaaccctacttcttatgatatacaaaaatctactccagcaagttaacggttcaaatgttaaaactttaaatcacttggtggccaggcatagtggctaat

SEQ ID NO: 336838 - DNA, 580 bp, Homo sapiens
ggaccttgggtaggtggtttccttaaataagacatgaaacatattgacaatgacataaaatattaataaatttggcaatattaaaaataagaacttttggtcataagaagctactttaaagaaagtgaaagtaagytacaaactggaagaatatattcatgactcccacactacaaaaattaggatcaacaatacaaaataagaaaaacacaactaacctacaggcaaatgggcaggagaacagacatttcacagaggtagaaatcatagaccattaaacatatgaaaatatgttcacttcattcatgattaggaaaatacaagtcaagaaaaaattagatgtcattgtatatgcatctgattggtcaccattgaaactctgtcaatattaagcattggggaatatgttgatccactggtgagagtataaattggtgagtccactttagaaaacaatttggcataaccttctaaaactgaagattaacctatgaccaatcaatgatccatcaatttcaattcaaactatgtgcccaaaataaactattgcacatgtaaaaaagttaattcctagcatatt

SEQ ID NO: 336839 - DNA, 580 bp, Homo sapiens
ggaccttgggtaggtggtttccttaaataagacatgaaacatattgacaatgacataaaatattaataaatttggcaatattaaaaataagaacttttggtcataagaagctactttaaagaaagtgaaagtaagttacaaactggaagaatatattcatgactcccacactacaaaaattaggatcaacaatacaaaataagaaaaacacaactaacctacaggcaaatgggcaggagaacagacatttcacagaggtagaaatcatagaccattaaacatatgaaaatatgttcacttcattcatgattaggaaaatacaagtcaagaaaaaattagatgtcattgtatatgcatctgattggtcaccattgaaactctgtcaatattaagcrttggggaatatgttgatccactggtgagagtataaattggtgagtccactttagaaaacaatttggcataaccttctaaaactgaagattaacctatgaccaatcaatgatccatcaatttcaattcaaactatgtgcccaaaataaactattgcacatgtaaaaaagttaattcctagcatatt

SEQ ID NO: 336840 - DNA, 521 bp, Homo sapiens
agtcttgaactaaagtcaatttttttctgaaataggaatagctatccctgtctcttttggtttccatttgcatggaataatctttttatcccttaactttcagcctgtgagtatcatttaaggtgaattagtgagtcttttataagaataggcagcatgtagttgagtcttttttccttaagccattcagccactctctttttattgaaaagtttaatttatttacattcaaaataattattgataggtaaatgacttactagtatctttttgycaattgtttctggttgtttgtagattctttgtttctttcttcctctcttgtttccttcttttgcagtttgatggctttctttcgtagtatgctttgaatcactctttttgtcttttgtgtatacattatagacttttgtgattaccccgggataaagcatcttatccttataacagattattttcacttgatatcaacttaattttaatcacatacacaaagtctatgcttatacaccacatcctcc

SEQ ID NO: 336841 - DNA, 368 bp, Homo sapiens
tactagtatctttttgtcaattgyttctggttgtttgtagattctttgtttctttcttcctctcttgtttccttcttttgcagtttgatggctttctttcgtagtatgctttgaatcactctttttgtcttttgtgtatacattatagacttttgtgattaccccgggataaagcatcttatccttataacagattattttcacttgatatcaacttaattttaatcacatacacaaagtctatgcttatacaccacatcctcccattttttatttcttatgtcaaaacttacatctttttatattttgtatctcttaacaaataattgtagctttcactgtttttaatatttttgcattttaacatt

SEQ ID NO: 336842 - DNA, 491 bp, Homo sapiens
cttgtctaatatttttattttcactattcaaaaygtctctgcattctgaaagttctcttcaaacaatggcattctattcattactgtctcctatgttgatctgattccttctatttaattattaattttctttaattttttcattacctcattttattttttaattttagcctccccacctccctttcatctggctcatttttaaaatttcaatctgttctcttcttaggaatccttgctcctgtgtcatagaagccacttctacctactgatatgccaaagagacttttttttcttctttttgctttgatcattttctgagaatatactcttattctctgtcttcaagataatgtggcctctactactttattgtttttatagctctgcccacagatttcatgctggatttgattatattttgcttctcttattcaagcaaagagaaatatttatcaagacctgaaattttgttacaaacaacaggaaag

SEQ ID NO: 336843 - DNA, 491 bp, Homo sapiens
cttgtctaatatttttattttcactattcaaaatgtctctgcattctgaaagttctcttcaaacaatggcattctrttcattactgtctcctatgttgatctgattccttctatttaattattaattttctttaattttttcattacctcattttattttttaattttagcctccccacctccctttcatctggctcatttttaaaatttcaatctgttctcttcttaggaatccttgctcctgtgtcatagaagccacttctacctactgatatgccaaagagacttttttttcttctttttgctttgatcattttctgagaatatactcttattctctgtcttcaagataatgtggcctctactactttattgtttttatagctctgcccacagatttcatgctggatttgattatattttgcttctcttattcaagcaaagagaaatatttatcaagacctgaaattttgttacaaacaacaggaaag

SEQ ID NO: 336844 - DNA, 302 bp, Homo sapiens
atcactacagagagtgagcaaagtaaggatgctggctagaggaattcactttctagcacccatattaacaaagacacttggatcctcaggagaattagcagggagctttcagcacccagtgacacttttggcatcastggtaccaccaacaatggtggtgataagtagtggcagcaaggatgtttttaatagagcagtccccaagggagtcagtcaaacaccattcgtggtttgtggcagttacacatggctctgtgttttcctcaagctatatagtatactttaattaattgattttctac

SEQ ID NO: 336845 - DNA, 397 bp, Homo sapiens
tttggcatcagtggtaccaccaacaatggtggtgmtaagtagtggcagcaaggatgtttttaatagagcagtccccaagggagtcagtcaaacaccattcgtggtttgtggcagttacacatggctctgtgttttcctcaagctatatagtatactttaattaattgattttctacttaagctatccaaatcagatttattttttgcaacaaagaatcctgcctaatattaagtgaagtaggcagaaagattaaaagttggagtgcaagagtggaacagttctgagtgatgattcggtccagaacatggacatgaaaatgtgtgactgagaagttgaagatgtcattagagatgaggctcccaaggaatggggcagccaggatgcaagatatttatc

SEQ ID NO: 336846 - DNA, 397 bp, Homo sapiens
tttggcatcagtggtaccaccaacaatggtggtgataagtagtggcagcaaggatgtttttaatagagcagtccccaagggagtcagtcaaacaccattcstggtttgtggcagttacacatggctctgtgttttcctcaagctatatagtatactttaattaattgattttctacttaagctatccaaatcagatttattttttgcaacaaagaatcctgcctaatattaagtgaagtaggcagaaagattaaaagttggagtgcaagagtggaacagttctgagtgatgattcggtccagaacatggacatgaaaatgtgtgactgagaagttgaagatgtcattagagatgaggctcccaaggaatggggcagccaggatgcaagatatttatc

SEQ ID NO: 336847 - DNA, 397 bp, Homo sapiens
tttggcatcagtggtaccaccaacaatggtggtgataagtagtggcagcaaggatgtttttaatagagcagtccccaagggagtcagtcaaacaccattcgtggtttstggcagttacacatggctctgtgttttcctcaagctatatagtatactttaattaattgattttctacttaagctatccaaatcagatttattttttgcaacaaagaatcctgcctaatattaagtgaagtaggcagaaagattaaaagttggagtgcaagagtggaacagttctgagtgatgattcggtccagaacatggacatgaaaatgtgtgactgagaagttgaagatgtcattagagatgaggctcccaaggaatggggcagccaggatgcaagatatttatc

SEQ ID NO: 336848 - DNA, 472 bp, Homo sapiens
aactgtgtttaacagtgcataacaaaaaggtgtgaagaggaaagaaaagttaaagttgagtctggagaaagaaaatawagaggagaattcagatgagagaataaaaacggcatgtgatccagaaccatagggactttcatttcaggcagtgaccaacgacaaagtggttgagagtgatgtgtatttaggtgaccataagtatgcatgataattaattttcacttctgtcatcttttgatatatgagaacccttagctctcatggaatacaactgaagtctaaacagatgaccattcagaagggtaactgtctaaagttgtgcacacttacactgtaaaatactgtgcaggcatatgtactgaacttgggtctctggaaaatagaggcatctccaaaatccttggaaagtgtctgaattcaagaaaagaggagagaagaagagagactaaaggctcaaggctgctggcaccct

SEQ ID NO: 336849 - DNA, 472 bp, Homo sapiens
aactgtgtttaacagtgcataacaaaaaggtgtgaagaggaaagaaaagttaaagttgagtctggagaaagaaaatataraggagaattcagatgagagaataaaaacggcatgtgatccagaaccatagggactttcatttcaggcagtgaccaacgacaaagtggttgagagtgatgtgtatttaggtgaccataagtatgcatgataattaattttcacttctgtcatcttttgatatatgagaacccttagctctcatggaatacaactgaagtctaaacagatgaccattcagaagggtaactgtctaaagttgtgcacacttacactgtaaaatactgtgcaggcatatgtactgaacttgggtctctggaaaatagaggcatctccaaaatccttggaaagtgtctgaattcaagaaaagaggagagaagaagagagactaaaggctcaaggctgctggcaccct

SEQ ID NO: 336850 - DNA, 536 bp, Homo sapiens
aggcaattatggcccactgccaattcctatagtttggtatcagttgagatttccaagtcttttttacaaatgttcctaatggtaaatgagacagtgtgcatgtttattcatgtaatagaccaaaagaacagggccttatatttattctttcatttgacaaatatttatctagcaatctctgtacatttggaacttttctaggtgctagggatacaagaaaaatcagaacaatccaaaacctcttcttttgaagcttaccttccacctgagggtcactaaaaacaaataaggtaaacatatgtctgtattatgttagataattagtgatgctgtaaaaacaagacatgaaaaagagatactactaagatggagaggcacaatttcaaatggggagttaaagaacaatcacactgaaaygtatatcttcattgagttgaaggtatggatcatgaagaagtgtaaggatggagttgccatcacccaagctgtggacatggatcatgtttggggtcaggggccaggaatttaattttgga

SEQ ID NO: 336851 - DNA, 585 bp, Homo sapiens
ggtaaggggcactggtatgcttataaataaaagtctttttctttaaatttcctgttttctataataagtttaaagtcaaatttgagctcttacttggcagtggaagagtaagccaacattccagtagatcagtcaatttcagacttctgttcttgagccctaggaaaaagttttaaaggcatgaaatagcagtgagggcattgcctccagataatgatttwtgcaaatgttatattcatttgtataagaaatggaattgttgtaccatcttcctcaatttatgatcttccgcctcagcatgagaggactaggaagacaaatattaagtggttaaaataatgaatggaggatattaaatgtcatcatagaaaaaacagaaaaagaatattatacctatagcttgcaacactgtagaaagcccatatttgactgctgataatgcttcccaagtggcaacttagtcacttttaaatcttttaactgtttcttccctgactgtctttacatctctaaataatatgctcatatagttagcttaaactttattaattttgtgccctctaaatggatttcttactatgctgg

SEQ ID NO: 336852 - DNA, 617 bp, Homo sapiens
tcccgcatttattcattcaagaaatatttactgagtgcacacaatgagtgaggtcatggggttacaaaaattaatgagacaaagtccctgctctcaaagagcatatggcccactgatgggagagatcagcatgcaaatgaattaatgagaaaattcaaatgttgatgaatgaaatgaagacagtaaagcgtggtaatgttaaagaaaaaatggagttttcaacaaaaaagtaaytgctttccatctttctgtcctactatcctcagcatactgtctttgtccagctgtgtttctgttgacagtgtggaaaaatagccttcacgattctaggctcacacactcacgggaatatctagagttttatttttatttctctgtttttgtactaaaaattttttccctggaagccattttgcagacttcctgttctttgtcttcctcctaaaccaattattagcaagagcaatggaattactgtgattggtttcaataatcaaaatttaccttcaaagtaggaaataagatcaccattcctagatcatctatgagagaggtaaaaacttaaatagaaaaagcaggttggcttttaaaaacgtgtcagctgcagttttttcatt

SEQ ID NO: 336853 - DNA, 523 bp, Homo sapiens
gaattactgtgattggtttcaataatcaaaatttaccttcaaagtaggaaataagatcaccattcctagatcatctatgagagaggtaaaaacttaaatagaaaaagcaggttggcttttaaaaacgtgtcagctgcagttttttcatttgtttgtctggagcacattgccataagtagtgtcttaaaaagaattgtgtgagggtaaattttctgggcttctgcatgtgtgaacatgtctcaattttactttccaaagtcttgataattgtctagttaatggacctctaggatgaaaaagtgtttcttcagaacttgaagcaattgctctatgtctacaggttgcagtggtaaacattttcttctgcatttttaagtgatcatttaattctggacactttygcatctaggttcttatgaccttcttccactctgagatattttttgttgttctgcttaaataataacttcctctcatctctttcttggctctttctttctagaatttatattaattgcatgtt

SEQ ID NO: 336854 - DNA, 496 bp, Homo sapiens
aaaaagtatcacaaaaggatgtgacttggtattgttgaagtcttttaagaagagggaggtgatgacagaggtaaatacagtgaagaaattagtgagctccttggtgagtgctgaatgggtagaaagatgcatacgtagggatggggagcaagtgtagagacgaggttaatagataagtaaagagaaaaggctcagatctcagggccacattaagtcagagctggtatattcttgtacaatccatttgtgagatctccaatgatgtcattgtaattaatttataaaggattaactaaccgtctgcccagggagaacagatgtattatagttaatccatattttagatatcatttgatgatctttagtcactgttaccatttttaaagtgtttccaaacaaaagtcatttgtrctttcaagaaatgactcttcctactgcttacattaaaaaataaatgacatgcaaactatatgtaaactataaattcacaaaaatt

SEQ ID NO: 336855 - DNA, 626 bp, Homo sapiens
actgactactacgttaggcatctagagatgcaaggatgattattagatagacttcatcttcaaggaattataacttagttggagtgtgggggataaaatgtcccctattctatataagacaatgtggtgggcactacccagaggtccggggagcctagaagcaagaacaatcaagtgtagccaagggccaggtgcagtggctcatgcatataatcccagcactttgggaggccaaggcaggyggatcacttgaggtcagaagttcaagaagtgtctggccaatatggtgaaaccccatctctactacaaacacaaaaattacccaggcatggtggtgagcacccataatcatagctacttgggaggctgaggcaggaaaatcactggaatccgtgaggcgaaggttgcagtgagccaagatcgcaccactgcacttcagcctgggcaactgagtgaggctctggctcaaaaaacaaaaaaacaaacaaacaaacaaacaaaaaaggtgtagcccagggaattagagagtgaagagactatttaagccaggccttaaataaggactttatcaacttaacaaaagggcatcaaagcaaatgcaatggcccagatacaaacataggcat

SEQ ID NO: 336856 - DNA, 526 bp, Homo sapiens
atatcttggcatgtccagaactgtgagaaatttgtcttgtttaaaccacccagtccatggcattttattgtggtgccaggcagactaatacacttccttacctatttgtcaagcactgtgttagacagtagggatacaaaatcgagtaaagcagagcccttatttgctcagaattaatggcggtgaggaagatagagaagaggaggtgtgatcagtggmactactgattgtaagtaaagtgctacgatggcctcgagaagaaaagattaattctacctaaaaacgttagataagtcttaacaatagaggtaaattttatgttgggtcttctagaaaaaaatagtagtttgggagaggaagaaataaggtagtttagactgggaaaaggaataatatgagaaaaggtaaagatatgggtattgcatttgtgtttagaaactgacaatctgtttcaattaattagaatatgggtggtgatgggagatgaaggaatctgcattgaaaaagaaaaaaaaagctacagaaa

SEQ ID NO: 336857 - DNA, 591 bp, Homo sapiens
  misc_feature (1)...(591): n = A,T,C or G
tcgcaacaacatagatgaaagtggaggacattatgttaagtgaaacaagtcaggcagagaaagacaaatacagcatgttcccactcatatgtgagagctaaaaaaattggaattcgtggaggtggggagtagaatgatggttaccacaggctgggaaatgtagttggtggggtgggacasaatgaagagggtacaaaattttgtacccattttgtttatgggtacaaaaatacagttggatagaagaaatgagatctattgtgtgggagcaaaatagggcaactctagttgataatagtttgtggtgtgtttccgaataactaaaagagtagaagtggaatgtgcctaacacaaagaaataatacctgcttaaagtgatgggggtcccacttaccctgatctgatcattacacattgtgtgcttgcattacactatcacatgtactctataactgttatgtatccataataattaaaattaaaacaaattttaaaaacacaaacatcttatctgtgctttcctttatctcctcagcatttgtctagcgtggtttatgcagtnnnnnnnnnnnnnnnnnnnnnnnnnnnnnn

SEQ ID NO: 336858 - DNA, 591 bp, Homo sapiens
  misc_feature (1)...(591): n = A,T,C or G
tcgcaacaacatagatgaaagtggaggacattatgttaagtgaaacaagtcaggcagagaaagacaaatacagcatgttcccactcatatgtgagagctaaaaaaattggaattcgtggaggtggggagtagaatgatggttaccacaggctgggaaatgtagttggtggggtgggacacaatgaagagggtacaaaattttgtacccattttgtttatgggtacaaaaatacagttggatagaagaaatgagatctattgtgtggkagcaaaatagggcaactctagttgataatagtttgtggtgtgtttccgaataactaaaagagtagaagtggaatgtgcctaacacaaagaaataatacctgcttaaagtgatgggggtcccacttaccctgatctgatcattacacattgtgtgcttgcattacactatcacatgtactctataactgttatgtatccataataattaaaattaaaacaaattttaaaaacacaaacatcttatctgtgctttcctttatctcctcagcatttgtctagcgtggtttatgcagtnnnnnnnnnnnnnnnnnnnnnnnnnnnnnn

SEQ ID NO: 336859 - DNA, 591 bp, Homo sapiens
  misc_feature (1)...(591): n = A,T,C or G
tcgcaacaacatagatgaaagtggaggacattatgttaagtgaaacaagtcaggcagagaaagacaaatacagcatgttcccactcatatgtgagagctaaaaaaattggaattcgtggaggtggggagtagaatgatggttaccacaggctgggaaatgtagttggtggggtgggacacaatgaagagggtacaaaattttgtacccattttgtttatgggtacaaaaatacagttggatagaagaaatgagatctattgtgtgggagcaaaatagggcaactctagttgataatagtttgtggtgtgtttccgaataactaaaagagtagaagtggaatgtgcctaacacaaagaaataatacctgcttaaagtgatgggggtcccacttaccctgatctgatcattacacattgtstgcttgcattacactatcacatgtactctataactgttatgtatccataataattaaaattaaaacaaattttaaaaacacaaacatcttatctgtgctttcctttatctcctcagcatttgtctagcgtggtttatgcagtnnnnnnnnnnnnnnnnnnnnnnnnnnnnnn

SEQ ID NO: 336860 - DNA, 560 bp, Homo sapiens
acaataaagcatataggtctggaaaggataacaagtgttatctattggcagttctgtgtgaaagagtttatcagctcctgttcagctgatggcagctcactgcagaagttacttacaggtggactatctctatacaaaatgcttgggaccagtttttcagatttcggattttctctaaacacaaaatttccttatgttttaattacatgaaacaaagttttgactgccttttgactgtgagccatcacatgaggtcaagtgtagaattttccacttgtggcattcaaggcgacagactttccatcccacaaccattggcgccaatttttccgtaaccttgtggaaaagaccctggtgctggtgaacgctgctgtgacttactcaaagccttgattgggcacattttggtactacaccaagtttgagctggttcctcccacccctgctgwgatccctagagctattcagagtctgaaaaaaatagtcaatagtgctcagagtggtagcttcaaacaactcacagttaaagactctgtgctgaatggtttggtggccactga

SEQ ID NO: 336861 - DNA, 418 bp, Homo sapiens
aaacaaactccaaacaattcttaagcttattttcaataatcatattatgggtagtaatgttggtatttatttcttgtttatatctgtgtctccagcacctaggaccatgtaggcaatttaaaactgacgcactggagatccaataaaaagcttatcaaaatgatcacctaatacacacgtacacytaatttccacatctaagtgctccatgtctttctcacacacacacatacatacacagggcaaaatgcaaatgtggtttaagtttttccaaattaaatgtttaaaattgatatgtgtccttacccaaatgtactttttgaatttggatgagaatgaggttgaaaagttgacaaatcctcatgccactccctcagtgacacctaggtctctgaacatccccagcagttctgtgacc

SEQ ID NO: 336862 - DNA, 418 bp, Homo sapiens
aaacaaactccaaacaattcttaagcttattttcaataatcatattatgggtagtaatgttggtatttatttcttgtttatatctgtgtctccagcacctaggaccatgtaggcaatttaaaactgacgcactggagatccaataaaaagcttatcaaaatgatcacctaatacacacgtacacctaatttccacatctaagtgctccatgtctttctcacacacacacatacatacacagggcaaaatgcaaatgtggtttaagtttttccaaattaaatgtttaaaattgatatgtgtccttacccaaatgtactttttgaatttggatgagaatgaggttgaaaagttgacaaatcctcatgccactccctcagtgacacytaggtctctgaacatccccagcagttctgtgacc

SEQ ID NO: 336863 - DNA, 422 bp, Homo sapiens
tgtcaggtgaatgaattaatgaatgaacaaacagatacatcaatgaactggatcttctttaatgagtcaaagtaaagaactgagaccatctttgtcgctatgacttaaatgttactacagactgctatgtcaacatcttagttgtttgttccagcaaatctttgcccagaaaaaaaaaaatcattatttgctccaggaaattcccattgatagacttattggagaaaataatctgctcactttggcaaaccattgtcttaycaatcacagtttattcatcgcaactctcttcaagaccctcactttgctgtgtacaacaaccctacattatcacatcacagactttgaacaattccaattagttctgcctgaaaggcccatcttaaaccacttgaggccaaaccccaaagacctataaacat

SEQ ID NO: 336864 - DNA, 574 bp, Homo sapiens
agctgcatcatcaaaaactggctctacggatgagggtgtgcccatctcttaccctatgcttggttacatcctcctgctctttaacttctgcagctattttaatttcagatttctctcctgtctgtagttaacctttttataagcagtaaccagaatcacttcttcattcattcaataaatatgaagaatcaattttgtgccaggcaacattctagtgttagggatatagccttttaacaagacagtcaggtttgtgatttattgaaacatacggttgtaaggttggaggtagtggaggtagaacaaataagtattatgtcaatatcatttaataaatacaagttttagcataagagtggagtaaaacagatataaactctaagaacttaaatacttaaataaaagccttgtaatactaaattcaaattggaaatattatgaatacatgatatattttcatattttcttttttttttttttagatctgggtttgttacgtaatggtgaggtttgggtcttctagmgtacgcatcacccaaatagtgaacattgtgcccgataggtgatttttcaa

SEQ ID NO: 336865 - DNA, 537 bp, Homo sapiens
taaaacatctgacctttacagagtcacaaacctggatgcaaatcctagttcaggcttttacaataagactatgctcctgagtatgttaagaaaattacaagtgaggtataatgcatacaaagtgcctatcacagagcctaccctaagagagtgaaaagttgtcattattatcataagccaaaaacaatgtagtaagtccctactaattccccagttgttacttacacaattagaagacagcttccatttttatttcatcctgttaaactttctgagcatgttcctaaccttgctaatcctataacctaagtttactacaagaattaaatgagtggctacatggaagtttccagaataacagctaaaacacagtagtgctcaataaatgttagcgtccctcttgtttccagctatckcacatatctattacttttttggtctgcccagcttcctttccttttgggaactgcatcttcgcaacatccccatggttttaatagagttttaaattgtgtggccctgcccagagacaggtac

SEQ ID NO: 336866 - DNA, 641 bp, Homo sapiens
tgttttttttcaaaataataattcctgatcatttctatgtttagaaaaaagcacattattgaaaacatgaaaatttaggggagtgatatggtttggatccgtgtccccacccaaatctcatgttcaattgtaatccccaatgttggaggtggggcctgcaaggaggtgactggatcatggaggcagtttctcatgaatggtttagcaccatatgctggatgctgtcctcacaatagtgagtgaattctcatgagatcgagtcatttaaaagtgtgtggcacccccccaccccacctgttttgtgcttttactctggccatctgactgtgactcctccctcttcaacttccaccataattgtaagtttcctgaggcctccycagaagccaagcaaatgccagcatcatgcttcctctacagcctgcaaaactgtgagccaattaaaccttttttctttataaattagccagtctttggtatttcattatagaaatgtgagaatggaataatatgggaggaaagaagaggaaaaaaatcctttataatctctcttcccagaacaaatgtcaacattttagtacattttccccgaagttgttattctacattgataaatataacctttttacacattaagaata

SEQ ID NO: 336867 - DNA, 618 bp, Homo sapiens
caatgtgaggacagcctattacaattgctttggctattcaagttcttttttggttccatatgaagtttagaaaagttttttctagttctgagaaaactgacattggtagtttgataggaatagcattgaatctgcaaattgctttaggcagtatggccattttaataatgatttgtccactctatgagcatggaatgttttttccatttgtttatgtcatctgtgatttctttgagcagtgttttgcagttcttctcatagagatctttcacctccttggttagatgtattcctaggtattttgtgtgtgtgtrtggctattataaatgagactgcattcttgattttgctctcagcttgaacactattggtgtatagaaatgttactgattttattacattgattttgtatcctgaaactttactgaaggtttcagaagtcttttggcagtcgttagggttttctaggtatagaatcataccgtcagtgaagagatatagcttgacttcttttcctgtttagttgccttttatttctttctcttgcctaattgctctggctagcacttccagtactatgttgaatacgagtaatgagagtgagcatccttgtcttgt

SEQ ID NO: 336868 - DNA, 618 bp, Homo sapiens
caatgtgaggacagcctattacaattgctttggctattcaagttcttttttggttccatatgaagtttagaaaagttttttctagttctgagaaaactgacattggtagtttgataggaatagcattgaatctgcaaattgctttaggcagtatggccattttaataatgatttgtccactctatgagcatggaatgttttttccatttgtttatgtcatctgtgatttctttgagcagtgttttgcagttcttctcatagagatctttcacctccttggttagatgtattcctaggtattttgtgtgtgtgtgtggctattataaatgagaytgcattcttgattttgctctcagcttgaacactattggtgtatagaaatgttactgattttattacattgattttgtatcctgaaactttactgaaggtttcagaagtcttttggcagtcgttagggttttctaggtatagaatcataccgtcagtgaagagatatagcttgacttcttttcctgtttagttgccttttatttctttctcttgcctaattgctctggctagcacttccagtactatgttgaatacgagtaatgagagtgagcatccttgtcttgt

SEQ ID NO: 336869 - DNA, 613 bp, Homo sapiens
taccctctaatggaacaattaaagagagtcagggaagcctgcccattcattcatccattcattcagcatctacaggcactgtcttcacatagctccatttttcttcctttgggctctagtgtacacaacccaatattatttgattttaaaagacatgtaactttggttatgctgatgaagcctggacagtcttgaagacaggaagacatgagacaacagtaaacctggaagagacttgatggagcctcctagtccaacctcttcatttctccactcaagatatagagtacctgagggatgatgtgacttatgtagggtcatggagctaattagtgacagagcctgggctgyactcaagtgtctgaatctgattacacttttcctttccttctttccatgtccctatggcatatgaggccttgggcaccattgccctactctggcctgtttgtttgcctgccctcctgctgtccagccatccaatagtccacattcagcatcggtaatgagctggctgcctcaaaggtactggggatacatatattattgaagaagttgtaatttctgcccactgggaactcagactcatggagaaaattactaaataggcaag

SEQ ID NO: 336870 - DNA, 562 bp, Homo sapiens
attttaaaagacatgtaactttggttatgctgatgaagcctggacagtcttgaagacaggaagacatgagacaacagtaaacctggaagagacttgatggagcctcctagtccaacctcttcatttctccactcaagatatagagtacctgagggatgatgtgacttatgtagggtcatggagctaattagtgacagagcctgggctgtactcaagtgtctgaatctgattacacttttcctttycttctttccatgtccctatggcatatgaggccttgggcaccattgccctactctggcctgtttgtttgcctgccctcctgctgtccagccatccaatagtccacattcagcatcggtaatgagctggctgcctcaaaggtactggggatacatatattattgaagaagttgtaatttctgcccactgggaactcagactcatggagaaaattactaaataggcaagttacaggactgtagatgatgtgtgctctatcagccaggtatactacacataggaggggcacctcacctagccaggggagtgggatgaataa

SEQ ID NO: 336871 - DNA, 562 bp, Homo sapiens
attttaaaagacatgtaactttggttatgctgatgaagcctggacagtcttgaagacaggaagacatgagacaacagtaaacctggaagagacttgatggagcctcctagtccaacctcttcatttctccactcaagatatagagtacctgagggatgatgtgacttatgtagggtcatggagctaattagtgacagagcctgggctgtactcaagtgtctgaatctgattacacttttcctttccttctttccatgtccctatggcatatgaggccttgggcaccattgccctactctggcctgtttgtttgcctgccctcctgctgtccagccatccaatagtccacattcagcatckgtaatgagctggctgcctcaaaggtactggggatacatatattattgaagaagttgtaatttctgcccactgggaactcagactcatggagaaaattactaaataggcaagttacaggactgtagatgatgtgtgctctatcagccaggtatactacacataggaggggcacctcacctagccaggggagtgggatgaataa

SEQ ID NO: 336872 - DNA, 562 bp, Homo sapiens
attttaaaagacatgtaactttggttatgctgatgaagcctggacagtcttgaagacaggaagacatgagacaacagtaaacctggaagagacttgatggagcctcctagtccaacctcttcatttctccactcaagatatagagtacctgagggatgatgtgacttatgtagggtcatggagctaattagtgacagagcctgggctgtactcaagtgtctgaatctgattacacttttcctttccttctttccatgtccctatggcatatgaggccttgggcaccattgccctactctggcctgtttgtttgcctgccctcctgctgtccagccatccaatagtccacattcagcatcggtaatgagctggctgcctcaaaggtactggggatacatatattattgaagaakttgtaatttctgcccactgggaactcagactcatggagaaaattactaaataggcaagttacaggactgtagatgatgtgtgctctatcagccaggtatactacacataggaggggcacctcacctagccaggggagtgggatgaataa

SEQ ID NO: 336873 - DNA, 553 bp, Homo sapiens
ttataattgttcctatgagcaatcgagtctcatttggtaacttagagaaaatacttccagcccacatgcaagaagactgcttctgtttgattgtttttaattaatcctctgcaaggaaccragttttgtttgccatcatctccccagcacctagcaccatgcctagtggtgctagaaatataacagaggctcaaaatatttgctaacgttctgtagttgtacaaaattaaaagtgcacgaaaagtggttattaaaagacagggaagatactcaggaggctgaggccggagaaaggcctgagtccaggagttcaaaactgcagtgtgctatgacattgtcaccgcactccagcctgggcaacagagtgagacctcatctctctctgtctctctctctatatatatacataaaaagacaggaaagagatgtgaaaaggtgaagttttagaggtatgatgagatagtacaaggcactacgggaatgacaaatgggtctccaccctactcccaggctacactctcaactggtggccagggagaaagagcatataaac

SEQ ID NO: 336874 - DNA, 553 bp, Homo sapiens
ttataattgttcctatgagcaatcgagtctcatttggtaacttagagaaaatacttccagcccacatgcaagaagactgcttctgtttgattgtttttaattaatcctctgcaaggaaccgagttttgtttgccatcatctccccagcacctagcaccatgcctagtggtgctagaaatataacagaggctcaaaatatttgctaacgttctgtagttgtacaaaattaaaagtgcacgaaaagtsgttattaaaagacagggaagatactcaggaggctgaggccggagaaaggcctgagtccaggagttcaaaactgcagtgtgctatgacattgtcaccgcactccagcctgggcaacagagtgagacctcatctctctctgtctctctctctatatatatacataaaaagacaggaaagagatgtgaaaaggtgaagttttagaggtatgatgagatagtacaaggcactacgggaatgacaaatgggtctccaccctactcccaggctacactctcaactggtggccagggagaaagagcatataaac

SEQ ID NO: 336875 - DNA, 553 bp, Homo sapiens
ttataattgttcctatgagcaatcgagtctcatttggtaacttagagaaaatacttccagcccacatgcaagaagactgcttctgtttgattgtttttaattaatcctctgcaaggaaccgagttttgtttgccatcatctccccagcacctagcaccatgcctagtggtgctagaaatataacagaggctcaaaatatttgctaacgttctgtagttgtacaaaattaaaagtgcacgaaaagtggttattaaaagacagggaagatactcaggaggctgaggccrgagaaaggcctgagtccaggagttcaaaactgcagtgtgctatgacattgtcaccgcactccagcctgggcaacagagtgagacctcatctctctctgtctctctctctatatatatacataaaaagacaggaaagagatgtgaaaaggtgaagttttagaggtatgatgagatagtacaaggcactacgggaatgacaaatgggtctccaccctactcccaggctacactctcaactggtggccagggagaaagagcatataaac

SEQ ID NO: 336876 - DNA, 607 bp, Homo sapiens
ggttcaacaggaagaaccacagtgaagagagccaagctccgcctggcagcacctccagagatacaatagaattacactggccccatggaaaaaggaaaatagatagaagttcacctgtaagcagaatgatccagttatgtattagagctcccttcgtggaggtctgcaactgggaagaaggaaccaaaagtattaatgtttaacgaggacacaacaataagtgtgtttattcttcactgtcctgttgtcmtagtgttgaagggggaggggcctttaacttggggttgtctttagggcctttctggactctggggacaaagaaaatagaggaaacataaaaatagcccagaggttaggtacatgttttgttttctggtttacttatttatttttttaaatttgtaatgctgaaaaaatggagagcaaggcagagagaaaagccactttggtcaaagactagccatgagggagtaacagcagccctggggtgttctttgaaaatgggacaagtgttgctagtgtttataaactggcttatatttatcagcattcttgtgctagcaagtcactggaaatatttccagttagtttaagaagaaaagaggat

SEQ ID NO: 336877 - DNA, 607 bp, Homo sapiens
ggttcaacaggaagaaccacagtgaagagagccaagctccgcctggcagcacctccagagatacaatagaattacactggccccatggaaaaaggaaaatagatagaagttcacctgtaagcagaatgatccagttatgtattagagctcccttcgtggaggtctgcaactgggaagaaggaaccaaaagtattaatgtttaacgaggacacaacaataagtgtgtttattcttcactgtcctgttgtcatagtgttgaagggggaggggcctttaacttggggttgtctttagggcctttctggactctggggacaaagaaaatagaggaaacataaaaatagcccagaggttaggtacatgttttgttttctggtttacttatttatttttttaaatttgtaatgytgaaaaaatggagagcaaggcagagagaaaagccactttggtcaaagactagccatgagggagtaacagcagccctggggtgttctttgaaaatgggacaagtgttgctagtgtttataaactggcttatatttatcagcattcttgtgctagcaagtcactggaaatatttccagttagtttaagaagaaaagaggat

SEQ ID NO: 336878 - DNA, 556 bp, Homo sapiens
atgatttagcactgccttaaatatttttttaaacagggtcatttactttaggtattttagtttttacatttacatttactcagcaacttactagacatgaagattctgagcacatttttaaacaaaaattgaaaatgcttttttaaaaaattactatcttcagtcctgactgagattagttattttacacatctcagttaatgttctgttaaataaacttctcccatcaagcatgacttttcatgtacacttttgatggttttggcttgtttcacagatttccttcttaaaggtaaaatgtggattgaaatttcagagatacaattctgtggcctggtgaagaagctggtcattgttcttcgtgtccattacttataactttccctttgttagaagcacaggatttaagaacaggtgttagaatatgtgtgttttcccctaatttatctcatttttatytcattgctcttggattttccaaaactatgaagctctttatgcaggactggcctaattaggcaaactcgggaaggtttgtaaaaggtttaatgttccc

SEQ ID NO: 336879 - DNA, 591 bp, Homo sapiens
ctccagcagatctgcagcagaggtgcctgactattagaaggaaaactaacaaacagaaaggaatagtatcaamgtcaagaaaaaggacatctactcagagaccccatccgaaggtcatcaacatcaaagaccaaaagaatagtatcaacatcaacaaaaagtacatccacacagaaaccctatcctaaggtcatcaacatcaaagaccaaaggtagataaatccacaaagatggggagaaaccagcgcaaaaaggctgaaaattccaaaaaccagaactcctcttctcctccaaaggatcacaactcctcaccagcaagggaacaaaactggacagagaatgagtttgaagaattgacagaagtaggcttcagaaggtgggtaataacaaactccttcaagctaaaggagcatgttctaaccaaatgcaaggaagctaagaaccttgaaaaaatgttagaggaattgctaactagaataaccagtttggagaagaacataaatgacctgatgaagtgaaaaacacagcacgagaacttcatgagtcatacacaagtatcaatatacaaatcgaccaagcagaagaaaggat

SEQ ID NO: 336880 - DNA, 607 bp, Homo sapiens
tgagcctaaacagcagttaagttgtctctaaatgaactagcaaaaaaaaaaaatgtagtttttgtttgtaaggaaggggaggtatttcctgagaatgaatttttttttttttggattactgtttttctctccatataccttgacttggattttgacaggagggagcctgggaaaataattttttcctccaagattctcagatccaggttaggaaaggattcagcactacagcatacccctctacaacatacagccctgtcacattgagatcataatccctcctgtcccactcctctctaccaaccccaccctactagctaggtcttcagtgttttacattgaatattggtacattttaattattttttctcataaatgggttatttatagarattttgttaactcttgagccatatgcatgtgtagatactggcagggctatgtttgtttatgatgctctgcaaacatttcatattggccaataaacagaaatatatccaaaaaccttgtttattcctctactttcagagaacctggtgaatcattgttgctcatgtgtcttttcttagtgagcacagcaaaaaaatgtgtttctgatcattggaca

SEQ ID NO: 336881 - DNA, 598 bp, Homo sapiens
tacatcttaatttctatcacaccataactgaaaaccgactccagatatatacagatctaaagtaaagggcaaaacaatacatctttttaaaaacatgtaaaacatttttatgaccttggagtaggcaaagatttctaaaacaggacacaaaagccccattcttaaaggtaaaatttatcacacaaactaaattaaaatcaggaacttctactctttaaaagatgttatgccaagagagaaaaggcaactcaccaacttggagaggatatttgcaatacatccagcaaaggactcatatgcagaatatataaataacttatacaaattagtacaaaagacaacttattaggaaaatagamaagagacttgaagatatttgacttaaatgtattcaaatacccaataagcatatgaagtgcccagtttcattagtaatcaaagaaatacaaattgaaaccacagtaatgtaacactgacactcatcagaatgactaaaatttgaaaagttggaaaatatcaagttttggtgaggatgtggaacagctgaaactcccatacagttttggtaggaatgcaaacaggtatgactacataggaa

SEQ ID NO: 336882 - DNA, 598 bp, Homo sapiens
tacatcttaatttctatcacaccataactgaaaaccgactccagatatatacagatctaaagtaaagggcaaaacaatacatctttttaaaaacatgtaaaacatttttatgaccttggagtaggcaaagatttctaaaacaggacacaaaagccccattcttaaaggtaaaatttatcacacaaactaaattaaaatcaggaacttctactctttaaaagatgttatgccaagagagaaaaggcaactcaccaacttggagaggatatttgcaatacatccagcaaaggactcatatgcagaatatataaataacttatacaaattagtacaaaagacaacttattaggaaaatagacaagagacttgaagatatttgacttaaatgtattcaaatacccaataagcatatgaagtgcccagtttcattagtaatcaaagaaatacaaattgaaaccacagtaatgtaacactgacactcatcagaatgactaaaatttraaaagttggaaaatatcaagttttggtgaggatgtggaacagctgaaactcccatacagttttggtaggaatgcaaacaggtatgactacataggaa

SEQ ID NO: 336883 - DNA, 560 bp, Homo sapiens
agtggggttaaagaattttggctaatggtgttcccaggagaaataaagaataggttaagtgaacaaccagccagcttctgctacaactagcatacaattaatatgctttcacaactagaattgtttctttgagaaagagctgtgactggtgtcaggcaggagccttgttcctgttgaagttaggctgtcagatctaagaatctctagagagcatttatttcaatttcctcagtgttgggacttctgatgcccasaaactgggggtcggggggaaggaatatggccaaagttagtaccagagctgagacaagagccagctagagtgtttgcctctcatctataccattggcattcaaacattttttaccatgacctatagtaagaaataactttttatcacaacccaatatatactttcatgcattttatctgtaaaacttttataaaacagtacttatgtgggtagtgcttatgactatttgtcaaatatttcagctccccacattctgtcacattgtagaattgcattttcttgtacctgttgtagttattaatgatca

SEQ ID NO: 336884 - DNA, 651 bp, Homo sapiens
agacttgcttagtgttgcctcaggtaaaggaaggaggacagttgtttagaatgtatagagataagactacccacatggtctccaccagtaacacagtctccactggtaacacagtgggtggtgttaaaagttcagtctccccatctagcgttctagaactaaataaagtatactcatggtggaggaggggagttagggggcaccttgmtagagcctggcaagggtgaaagtatatgctccgcatccggccattgccacagttgttgtttttcctctggtgtttggttgtagtggagctgtcatttaaaaattttgtgtgttgctgagctgctactttggatggctttttggggggctttttctatgtcctttggcattaccacattgtcagattctccagtatccagtctgggataggtgacgcaaaaagaaaacacaaagaactcactgtgctgtcactccttagatctcaaagatgctagtcattcttcctttctttctccacctttcagtcttcttatccttgttttatatataatgtccagagtatttagctgtactcagtgggaggaatagagaaaagtatgtctacttatctaacctttcacaaaactgtccattgatcaaatgggcaaatgagagagataacaa

SEQ ID NO: 336885 - DNA, 651 bp, Homo sapiens
agacttgcttagtgttgcctcaggtaaaggaaggaggacagttgtttagaatgtatagagataagactacccacatggtctccaccagtaacacagtctccactggtaacacagtgggtggtgttaaaagttcagtctccccatctagcgttctagaactaaataaagtatactcatggtggaggaggggagttagggggcaccttgatagagcctggcaagggtgaaagtmtatgctccgcatccggccattgccacagttgttgtttttcctctggtgtttggttgtagtggagctgtcatttaaaaattttgtgtgttgctgagctgctactttggatggctttttggggggctttttctatgtcctttggcattaccacattgtcagattctccagtatccagtctgggataggtgacgcaaaaagaaaacacaaagaactcactgtgctgtcactccttagatctcaaagatgctagtcattcttcctttctttctccacctttcagtcttcttatccttgttttatatataatgtccagagtatttagctgtactcagtgggaggaatagagaaaagtatgtctacttatctaacctttcacaaaactgtccattgatcaaatgggcaaatgagagagataacaa

SEQ ID NO: 336886 - DNA, 562 bp, Homo sapiens
ttctaattcttatgccttttatttttcttatcatattgcactggctataactacagcataatgttgagtggaaatgctgatagtaggcatttgtcatttattcttgatttcaaggggaaggcttttgatacttcatgactaagtgtgatgtttgctgtagatttctgtagatagtctttatgagatcaagaaagttcccttttatatctactctgctaatagtttttatcttgtatgggtgtttaattttttcaaatgtttttctgcatctccttakatgatcacataatttccaccttttaatgttaatgattttgaatgctaaaccacactttcattcatagaacaaaccccacttgcttgtgatgcattttcctttatataaagctagattcgatttgataatacttttagtgtctcagcatctatgttcatgagagggcactttgtagatgtgttttcttgtaatgtccttactgctttgttttccatgttgatccaatggcacaataactaagtcaatgaagcataccctaagaaaggctgtgtcatccttggaatg

SEQ ID NO: 336887 - DNA, 562 bp, Homo sapiens
ttctaattcttatgccttttatttttcttatcatattgcactggctataactacagcataatgttgagtggaaatgctgatagtaggcatttgtcatttattcttgatttcaaggggaaggcttttgatacttcatgactaagtgtgatgtttgctgtagatttctgtagatagtctttatgagatcaagaaagttcccttttatatctactctgctaatagtttttatcttgtatgggtgtttaattttttcaaatgtttttctgcatctccttatatgatcacataatttccaccttttaatgttaatgattttgaatgctaaaccacactttcattcmtagaacaaaccccacttgcttgtgatgcattttcctttatataaagctagattcgatttgataatacttttagtgtctcagcatctatgttcatgagagggcactttgtagatgtgttttcttgtaatgtccttactgctttgttttccatgttgatccaatggcacaataactaagtcaatgaagcataccctaagaaaggctgtgtcatccttggaatg

SEQ ID NO: 336888 - DNA, 556 bp, Homo sapiens
aaggcgagtggtaagaggtgagatcagagatagaggggcaggttagtgaggatgggatggcgtgggatagattgtagactattatagaccatagttaaggattttgggttttctgctgaataagaagccaaccagtagaattgcttggacagacttagactgatgtacttttaaaaggatcattctggttgctctgctgagaattgactggagtggggtaagcatgagagcaaggagagctattggaggatatggcaataattcaggtgaaaagtaatcgtggcttgcaccasagtggttgcagtgaaggtgctaagaagttggtgaaattcagagtttatctctgaggcaggaggcagagctgataggatgtgctgatgggttgaatgtgaggtgtgagcaaaaggagaggggaggataattctaatgattgtggcttcatagattatgaagataaaatgaattaattcatgaaaaaaatttgagcagtgcctggcaagtgcttagtgagggccagctaactgttatagtattattggacaagttatggtggagg

SEQ ID NO: 336889 - DNA, 534 bp, Homo sapiens
gtatcgagatgtttggtatttcatttatcttgctatttgttgcctgtataccttggttttttaattgtattattgttttgtaggtactgtgagatttatgctttatggagattctgttttggtgtgtttccaggattcgttccaagatttagagctccttttagcagttcttctagtgctgacttggtagtggcgaattctcttagcatttgtttgtctgaaaaagatgrtatctttcttgcatttatgaagcttagactcactggatacgaaaatcttggctgatcattgttttgtttaaggaggctaatgataggtccccaatttctcccagcttgtagggtttctgctgagaagtctgctgttaatctgataggttttcctttataggttatgtggtgcttttgccttacaactcttaaatttctttactttgtcttgactttatttatttattttattttttgtgacagggtctggctctatcacccaggctagagtgcagtggcttgatttcagctcacagtaacctct

SEQ ID NO: 336890 - DNA, 553 bp, Homo sapiens
accaccactatgaatgtgctgggtcagacatgaagccagtatggtgctgggtctttacctaggcctgctctaaccactccctggctactgcctatgttcacttaagttgctagggctctacaatcagcaaaaggcaatgccagtcagtattatgtttttcctttcagggtgacaaggtccaccaggccctgggtggttccagaagtgcaatcagggagtcagtgactagagtcaaaaaccttagaattctatctggtatcctattgtactgtggctaagctggcactcaaactacaaaaggcagttcttcccactctttcctctactttgcaaaatcagaagagcctcaccaagtagycaccaccccagtcaatgaggactacttccagactaccactgatgttcccttaatgcccaagatttcttaagtcaacttgagtgactgctgccttatctgggactcatacttcagggcagtgagcagccctctagcccagggtaggtccagaaatgccatccaaaagtcaagttctggaatgggggaatgtaagtt

SEQ ID NO: 336891 - DNA, 597 bp, Homo sapiens
ctttcgacctagaagttttctatttttataatttaagtgggaatgcagtagacttacggcattcaatttcacttataggaacaccatgattaattagccaatgccagagctctacacaagtcagactattctgattgtcactttgcctgtgctgttcattatggtagctacacccaccttgcctttgactgttgagtgctgccacttggtccttgccaccttgggatcgaattattctcattgtatttaaattttgtagctgaatgactgcagttccacccttagatctgacatacaaagaagagcaattacagggtttttcaaagaggaagatgatttcctcacaaatctatttcataagtcacaggtcaagcatatgtcttctggaccctcccagctgggatgagtaggtctaaattgactaatccatttcacyatcccaatctccctaagcctttggatccctttctctacattaaactaagggagatcaggcatttccagcttattcacagttgaccatcttttaatccatattttagctaactaagcaaattaactattagaacatttttaactccctgagctgcaaattta

SEQ ID NO: 336892 - DNA, 570 bp, Homo sapiens
gcacagtcaaatgatgtaggaaggcctttgcatagtaaaaaaaaaataaacttttattgtataaagtcactgagattttgcagtttgtttgttactttagcatagcctaccaacagaatacatacaatttcaggatagtggttgtatctgaggaggtagggaggtaataggactctgagagaatctagaagagaattccattatatcygtggaatctttattcttttaaaacatctgaagcaaatatgcaaaatgctatgatttattaactttggatagatgctgggtgattgcattttaattttatatttttctgcacttaaaaatatttctacatgtttgaaaactttcatgatttaaaaaatatgtcaataattttaaaataggaagtaagtaaatagatggtagacaaaaaagatagacgattagataaatggatagtggtataggcatagattggaccctagttcttcattcagcctcttacaagtcctcagccctaggggctcctatatacttcatataataataatatctcataggtttacaaatattataatttgtgaagtg

SEQ ID NO: 336893 - DNA, 636 bp, Homo sapiens
cctgtcttcaagctcattaattctataatctgtttgatcaattcagcttttaaaagactatgatgaattatttagtatgtcaatttcatttttcaactccaaaatttctctttgattccatttaactcaattttttgttaaatttatctcatagaattctgaatttcttctctatgttatcttgaatttttttgagttcctcaagagagttattttgatttctctgttgaaaatgtcacatatttctgtttctctagaattggtccctggtgctttatttagttcattttgtgaggtcatgttttcctggagggtcctgatgctggtggatattttttagtgtccagacttgaagaattgggtatttattgtagactttgcagtgtgtgtatttttatactcatccttcgtgggtaggctttccaggtatttatagggatgggcattgtgatcgaagctctatctgtattargcttagatcacaacacccaagtccttcaaattttattataagctcattactgctgtggttcctgtagtcttgtagaggtatcacctttgtggtcttggataagatagagaaaactctttggattatcaagaagagatgattgttctcttctgttactgtttccc

SEQ ID NO: 336894 - DNA, 574 bp, Homo sapiens
gtcagtagccttaaaaattgacttctactctattttactgcagctatcctggtgcaagatacaggttttttttactctttcttttcttttccactagtagagggacttcccccttttgccaccatcaccacaggcccatagggagtactgccaggctactgccaatgtttacttaagggccaaaagttcttcagtcagcttgtggtgagtgctgccaggactatgagtcaaacttcaaggtattggactacactatgaacagaatagtccagaaatgccatttaagagccaactcctggaattagggaccccaagagtcaacttrttgctttacctttctgtggccaagctggtacctaaggtgcaagatgaagtcccctttacttttccctctgcttttctcaaactgaaggtatctctcaccataacctccacaactggaaatgtactgggtttcactggaagtcaacacatctcagagtctcacccaagacccatggcatgctacctgtgtattgttgctggttattcagggctttttagttaacaggtgataaagcttgtcataactgaa

SEQ ID NO: 336895 - DNA, 584 bp, Homo sapiens
caggggatgagagttgggtgtcactggcaattcaagattatcttttctaccctctttagtgtctctttcagtgaaatgaagttaaaacaatgtacaatgattatttgcctgatttttgtttctcatgtaggtaattttttgartagatcattgttgaattggatatttcttaggggaggacaagacgtgaaggcctctattctgccatcttgctctgcctccactctaaacgaacttttcaatttcaggaactttttgtgaattccttagggggttatatacagatgaccactatggctgcaaatagaggtaatatgtttctttaattcccatccttttctttttgtttcatttattgttttatggctctggctaggactgccagtataataataaacagttggggagattggaaatctttgcattttttttttttatctaagggaaaaagctttctatcttttgccattaagtgcaatcttagttatacctttttttagatatgctttaatagaacactgaagtttccttctattcccagtatgtttagaatttcttttataaatatatgttgtttttttcca

SEQ ID NO: 336896 - DNA, 584 bp, Homo sapiens
caggggatgagagttgggtgtcactggcaattcaagattatcttttctaccctctttagtgtctctttcagtgaaatgaagttaaaacaatgtacaatgattatttgcctgatttttgtttctcatgtaggtaattttttgagtagatcattgttgaattggatatttcttaggggaggacaagaygtgaaggcctctattctgccatcttgctctgcctccactctaaacgaacttttcaatttcaggaactttttgtgaattccttagggggttatatacagatgaccactatggctgcaaatagaggtaatatgtttctttaattcccatccttttctttttgtttcatttattgttttatggctctggctaggactgccagtataataataaacagttggggagattggaaatctttgcattttttttttttatctaagggaaaaagctttctatcttttgccattaagtgcaatcttagttatacctttttttagatatgctttaatagaacactgaagtttccttctattcccagtatgtttagaatttcttttataaatatatgttgtttttttcca

SEQ ID NO: 336897 - DNA, 540 bp, Homo sapiens
caaactgtactacaagggtacagtaatatatatatatatatgtgtgtgtgtatatatatatgtgtgtgtgtatatatatatatggacacagaggtcaatggaagggaattcatacctctgaaaataaagtcatacaccyacaaccaactgatctttgacaaagttggcaaaagtaaacaatggggaaagaaaatcctattcaataaatggtatcatgggaaaaatggctaaccaaatgcagaagaatgaaaccgaatccctccctctcacaatatacaagaattaacaaaagatgaattaaagacttaaatgtaagtcttcaatctataaaaattctagaataaaatataggaaatactcttctagacattggtctaagtaatgaatttacaatgaagacaacaaaagcaaatgcagctaaataaaaaatacacaaacaggactttattaaactaaagagcttctgctcagcaaaagaaacaactaatgtgataagcaaaaaacctacagattaggggaatatatttgcaaactatgcat

SEQ ID NO: 336898 - DNA, 486 bp, Homo sapiens
ttaatgctgaaaaacatttgataaaatttggcatgtcttcatgataaaaaccctaaaaaaactgggtttaaaaagaatatacctcaacacataaaagctatatatgacagacccaatgctggtattatactaaatagaaaaaaaaatgaaagcctttcctataagagctggaacacatcaaggatgcaaagtttcacctctattattcaatatattattggaagtcttagctagatcaattggacaagagaaagaaataaaggacatccaaattagaaagaaagaactcaaataatccttgcttgcatatgatgtggtcttatatttggacaaacttaaagacttcaccaaaacactattagaactgataaacaaattcagtaaagttgcacgatgcaaaatcagcatgcaaaaaatcagtarcatttctatatgtgaacaatgagcacatacacaaaaaataaaaagcagtaatctcgtttaaaa

SEQ ID NO: 336899 - DNA, 591 bp, Homo sapiens
taccagttggtgtctggagagttggaggcttagctagtacgggagggaaaatctacacatttggtgtcagatgtatgtgcaggcatggtggctgatgcctgtaatcccagcactttgggaggtcaaggcaggtggatcacctgaggccaggagttcgagaccagactagccaacatgatgaaaccccatttctactaaaaatacaaaaattagccaggcagggtggagcacgcctataatcctagctacttgggaagctgaggcaggagaatcacttgaatctgygaaatggaggtggcaggaaaccgagatcatgccacaaaactccagcctgggcaacagggtgagattctatcaaaaaaaaaagaagaaatatgtgcaaagaaaaagttttctttggaagctttgtttctgcttactctctgctttctgctctttagtgacttccttactggatcagcagccaggctgtgttctcagctgacctttttctctgtcttcctccatcagagggtcccctctctgatcctggctcactaagctccagccatggggaggtaggatgaaggcaagatgaatagttcttaaaag

SEQ ID NO: 336900 - DNA, 591 bp, Homo sapiens
taccagttggtgtctggagagttggaggcttagctagtacgggagggaaaatctacacatttggtgtcagatgtatgtgcaggcatggtggctgatgcctgtaatcccagcactttgggaggtcaaggcaggtggatcacctgaggccaggagttcgagaccagactagccaacatgatgaaaccccatttctactaaaaatacaaaaattagccaggcagggtggagcacgcctataatcctagctacttgggaagctgaggcaggagaatcacttgaatctgcgaartggaggtggcaggaaaccgagatcatgccacaaaactccagcctgggcaacagggtgagattctatcaaaaaaaaaagaagaaatatgtgcaaagaaaaagttttctttggaagctttgtttctgcttactctctgctttctgctctttagtgacttccttactggatcagcagccaggctgtgttctcagctgacctttttctctgtcttcctccatcagagggtcccctctctgatcctggctcactaagctccagccatggggaggtaggatgaaggcaagatgaatagttcttaaaag

SEQ ID NO: 336901 - DNA, 591 bp, Homo sapiens
taccagttggtgtctggagagttggaggcttagctagtacgggagggaaaatctacacatttggtgtcagatgtatgtgcaggcatggtggctgatgcctgtaatcccagcactttgggaggtcaaggcaggtggatcacctgaggccaggagttcgagaccagactagccaacatgatgaaaccccatttctactaaaaatacaaaaattagccaggcagggtggagcacgcctataatcctagctacttgggaagctgaggcaggagaatcacttgaatctgcgaaatggaggtggcaggaarccgagatcatgccacaaaactccagcctgggcaacagggtgagattctatcaaaaaaaaaagaagaaatatgtgcaaagaaaaagttttctttggaagctttgtttctgcttactctctgctttctgctctttagtgacttccttactggatcagcagccaggctgtgttctcagctgacctttttctctgtcttcctccatcagagggtcccctctctgatcctggctcactaagctccagccatggggaggtaggatgaaggcaagatgaatagttcttaaaag

SEQ ID NO: 336902 - DNA, 545 bp, Homo sapiens
aattacttactgttttgcaattaaattcactcaggaaaataggatcattactgtcaggagtagctaaccagcaaagggtgaaactgtgctttccagccatatggcaggcaactcccaatgatgtcaacagaaaattgcacatgagtaacggcgaggcaagacacatccctggaagaggctctgaagttttattgtcataaacggaagtggtaaaatgcaggaaccaagcatggctgtgtaaagccatcattttcatgcaaacatggacagactttctgaatcaagttgaccgataccasacaggtatggcttattcctccattcttttttaatcaatacattaataatttgtggggaaatttttaaagattaaaaataaaaactaaagttgaaataaagaataagagcattgttttcagctatctaataaaatatctactgtctggaattaaaatcgagctgagggcgtgtttcctacaccctccctccacacacatgcacacgctctcaacataccatcagaaaagatttccatcatcaatttc

SEQ ID NO: 336903 - DNA, 545 bp, Homo sapiens
aattacttactgttttgcaattaaattcactcaggaaaataggatcattactgtcaggagtagctaaccagcaaagggtgaaactgtgctttccagccatatggcaggcaactcccaatgatgtcaacagaaaattgcacatgagtaacggcgaggcaagacacatccctggaagaggctctgaagttttattgtcataaacggaagtggtaaaatgcaggaaccaagcatggctgtgtaaagccatcattttcatgcaaacatggacagactttctgaatcaagttgaccgataccacacaggtatggcttattcctccattcttttttaatcaatacattaataatttgtggggaaatttttaaagattaaaaataaaaactaaagttgaaataaagaataagagcattgttttcagctatctaataaaatatctactgtctggaattaaaatcgagctgagggcgtgttycctacaccctccctccacacacatgcacacgctctcaacataccatcagaaaagatttccatcatcaatttc

SEQ ID NO: 336904 - DNA, 640 bp, Homo sapiens
acccactcgacttattgccttgctgtgcaggtttttactgagtattgaagtgaaccagaagagatttgtgtcttgcattagtgaactctctatctttgctggaagaagcaagaaaatgcatttcatttgccactggtcatgctgtgatgacagataattagaaactttaatcaatcttgttttgtcagcatgactctcatatcaaaaagagactgtgtttcaaaaagaagctgcaaataaatataaaatttaggactgtgaagcatctgttatgaactataatgacgttaagtaatgatatcccacaaccctgtgcccaatctcttgtgtgtatcraattctttccctccacacctttctgcctttacatttgcacctaattttcatttatttatttgccttcatttcttacaaagcactcctctaacttccatggacacagatggaagagggacggggcaatgtgacttccaccttctcaggccacctaatccgcctcagcatttaatgctttcagaagaggcttttgagccaaacaagcctaacttcaaattccaattttatcattttccagctttgtgatcttcagcaagttacctcatctccataagtggaatatctttcaatacttgtaaattaa

SEQ ID NO: 336905 - DNA, 640 bp, Homo sapiens
acccactcgacttattgccttgctgtgcaggtttttactgagtattgaagtgaaccagaagagatttgtgtcttgcattagtgaactctctatctttgctggaagaagcaagaaaatgcatttcatttgccactggtcatgctgtgatgacagataattagaaactttaatcaatcttgttttgtcagcatgactctcatatcaaaaagagactgtgtttcaaaaagaagctgcaaataaatataaaatttaggactgtgaagcatctgttatgaactataatgacgttaagtaatgatatcccacaaccctgtgcccaatctcttgtgtgtatcgaattctttccctccacacctttctgcctttmcatttgcacctaattttcatttatttatttgccttcatttcttacaaagcactcctctaacttccatggacacagatggaagagggacggggcaatgtgacttccaccttctcaggccacctaatccgcctcagcatttaatgctttcagaagaggcttttgagccaaacaagcctaacttcaaattccaattttatcattttccagctttgtgatcttcagcaagttacctcatctccataagtggaatatctttcaatacttgtaaattaa

SEQ ID NO: 336906 - DNA, 569 bp, Homo sapiens
acaaagaagaaaatagagaagacaaattaatatcaggaataaataagggcagattgtgggtaactatatacctataaacactacaacttagataaaatgcaccaattcctcaaaaaatcacaaactagcaacactcaaccaagawgtaagagataactagaaattttaattattacagagattgaattcatgatttaaaatctcccgaaaaagaaatattctaagccattatccttcctgagtacagatgtaaaagtccttctaaaatattagtgaatcagatctagtaatatactaaaagtacagaatgatcaagtggagtttttccttggaatgcaaagctagttcaatactcagaatctatcaatgcaatccaccacattaatagtgtaaaaaggaaaaaaaaaaaacacatgatgccagttaatacagagagagattttgacaaaattcaacttctgtttataataaaaattttcagcaaactaaaaataagagagaacttccttaatctgacaaaggatacctacaaaaattagcttacttcatacttaatggggaaagactaa

SEQ ID NO: 336907 - DNA, 569 bp, Homo sapiens
acaaagaagaaaatagagaagacaaattaatatcaggaataaataagggcagattgtgggtaactatatacctataaacactacaacttagataaaatgcaccaattcctcaaaaaatcacaaactagcaacactcaaccaagaagtaagagataactagaaattttaattattacagagattgaattcatgatttaaaatctccygaaaaagaaatattctaagccattatccttcctgagtacagatgtaaaagtccttctaaaatattagtgaatcagatctagtaatatactaaaagtacagaatgatcaagtggagtttttccttggaatgcaaagctagttcaatactcagaatctatcaatgcaatccaccacattaatagtgtaaaaaggaaaaaaaaaaaacacatgatgccagttaatacagagagagattttgacaaaattcaacttctgtttataataaaaattttcagcaaactaaaaataagagagaacttccttaatctgacaaaggatacctacaaaaattagcttacttcatacttaatggggaaagactaa

SEQ ID NO: 336908 - DNA, 569 bp, Homo sapiens
acaaagaagaaaatagagaagacaaattaatatcaggaataaataagggcagattgtgggtaactatatacctataaacactacaacttagataaaatgcaccaattcctcaaaaaatcacaaactagcaacactcaaccaagaagtaagagataactagaaattttaattattacagagattgaattcatgatttaaaatctcccgaaaaagaaatattctaagccattatccttcctgagtacrgatgtaaaagtccttctaaaatattagtgaatcagatctagtaatatactaaaagtacagaatgatcaagtggagtttttccttggaatgcaaagctagttcaatactcagaatctatcaatgcaatccaccacattaatagtgtaaaaaggaaaaaaaaaaaacacatgatgccagttaatacagagagagattttgacaaaattcaacttctgtttataataaaaattttcagcaaactaaaaataagagagaacttccttaatctgacaaaggatacctacaaaaattagcttacttcatacttaatggggaaagactaa

SEQ ID NO: 336909 - DNA, 569 bp, Homo sapiens
acaaagaagaaaatagagaagacaaattaatatcaggaataaataagggcagattgtgggtaactatatacctataaacactacaacttagataaaatgcaccaattcctcaaaaaatcacaaactagcaacactcaaccaagaagtaagagataactagaaattttaattattacagagattgaattcatgatttaaaatctcccgaaaaagaaatattctaagccattatccttcctgagtacagatgtaaaagtccttctaaaatattagtgaatcagatctagtaatatactaaaagtacagaatgatcaagtggagtttttccttggaatgcaaagctagttcaatactcagaatctatcaatgcaatccaccacattaatastgtaaaaaggaaaaaaaaaaaacacatgatgccagttaatacagagagagattttgacaaaattcaacttctgtttataataaaaattttcagcaaactaaaaataagagagaacttccttaatctgacaaaggatacctacaaaaattagcttacttcatacttaatggggaaagactaa

SEQ ID NO: 336910 - DNA, 623 bp, Homo sapiens
ttacttggtggtgtatgtacctatatataggaatgaattctccttttcttgaggtccccccaatttacaaaggtctctggcctakaagtaggtgggcttctctaccaactctgacactggaatactgcaagccagataccaagctagtttccttaggaggaatttgtaggcattagcttcacataaatggtcagaattttattagtcaggattctccagaaaaacagaaccaataggatatattatgaggaatcggctcacatgattaaggaggctgagaaagcccaccatttgccatctgcaaaccggagaccagggaaaacatagtggtctaattcaagctgagctcaaagccctgagaactaggggagctgatggtgtaaatcccagcaggcagaagaataccaatgtccaagttcaagcaggcaggcaggagcataaggggcaaattcctttctccacattttattctatttaggccctcaaagaatggcatgatgtctacccacactggggagggacattagtttaatgcatccacagacccaaatgttaatctcttctggaaatacctttccagacacatctagaaataatgtttaatctgggcactgcctgggaca

SEQ ID NO: 336911 - DNA, 623 bp, Homo sapiens
ttacttggtggtgtatgtacctatatataggaatgaattctccttttcttgaggtccccccaatttacaaaggtctctggcctataagtaggtgggcttctctaccaactctgacactggaatactgcaagccagataccaagctagtttccttaggaggaatttgtaggcattagcttcacataaatggtcagaattttattagtcaggattctccagaaaaacagaaccaataggatatattatgaggaatcggctcacatgattaaggaggctgagaaagcccaccatttgccatctgcaaaccggagaccagggaaaacatagtggtctaattcaagctgagctcaaagccctgagaactaggggagctgatggtrtaaatcccagcaggcagaagaataccaatgtccaagttcaagcaggcaggcaggagcataaggggcaaattcctttctccacattttattctatttaggccctcaaagaatggcatgatgtctacccacactggggagggacattagtttaatgcatccacagacccaaatgttaatctcttctggaaatacctttccagacacatctagaaataatgtttaatctgggcactgcctgggaca

SEQ ID NO: 336912 - DNA, 562 bp, Homo sapiens
aggttttgtgagattttttctcttttttttacgtaatcttgtgaaaaagtccatcaaatccagcaaactttgccaaaatgttaacrcattttgtatcttctttgcagactctggtgttatgaacccaaacgaataagtttcatttccttcaaagcctctgtatcctgttgtacgtactcgctaagcccttgtattttggaacaaatacatttcaggacaaatcaactctatttttcttgaaaaacaaaacctaatcccatcatcttgcatatgttcttgtatttcttcatcactatagctcctcatatatctttaaaacccaatattattttattgaggtataatttacatatggttaaattcacccatttttagtgtacggtcctggagttttggcacacgcattcaatctgggtaccccccaccacaatgaaggcataaaacattctttagactacaacttcaaaatcccttaattcagcggtccccaacttttttggcaccaggaaccagtttgtggaagacaatttttccacaaaccacgagttgggggatggttttg

SEQ ID NO: 336913 - DNA, 562 bp, Homo sapiens
aggttttgtgagattttttctcttttttttacgtaatcttgtgaaaaagtccatcaaatccagcaaactttgccaaaatgttaacacattttgtatcttctttgcagactctggtgttatgaacccaaacgaataagtttcatttccttcaaagcctctgtatcctgttgtacgtactcgctaagcccttgtattttggaacaaatacatttcaggacaaatcaactctatttttcttgaaaaacaaaacctaatcccatcatcttgcatatgttcttgtatttcttcatcactatagctcctcatatatctttaaaamccaatattattttattgaggtataatttacatatggttaaattcacccatttttagtgtacggtcctggagttttggcacacgcattcaatctgggtaccccccaccacaatgaaggcataaaacattctttagactacaacttcaaaatcccttaattcagcggtccccaacttttttggcaccaggaaccagtttgtggaagacaatttttccacaaaccacgagttgggggatggttttg

SEQ ID NO: 336914 - DNA, 509 bp, Homo sapiens
gtgcaggcattgagtaaaacattaccattccaaaagaaagaaactggccaaaaggaaaggggcaataagccccatgcaagtctgaaacccagcagggcagtcgttcaatcttaaacctcaaaaataatctcctttgactccaggtcttgcatacagggcagtggtgcaagcagttagctcccaagaccttgggcagctccgccctgtggctttgctgagtatagcccctgtggctgctgtcgtgggttgaagctgagtgcctgcagcttttccagttgcaaggtgcaagctgctgctgggtctgatattctgaggtstggagggcagcaggtgcctttcccacagctccaatagacagtgccccagtgagaattatatatggggctccaacaccacattttcccttggcactaccagaataaaggttctctgtgaggactccacctctgcagcaggcttctgcctcagcacataggcttttccataaaccctcggaaatctaggtggaa

SEQ ID NO: 336915 - DNA, 509 bp, Homo sapiens
gtgcaggcattgagtaaaacattaccattccaaaagaaagaaactggccaaaaggaaaggggcaataagccccatgcaagtctgaaacccagcagggcagtcgttcaatcttaaacctcaaaaataatctcctttgactccaggtcttgcatacagggcagtggtgcaagcagttagctcccaagaccttgggcagctccgccctgtggctttgctgagtatagcccctgtggctgctgtcgtgggttgaagctgagtgcctgcagcttttccagttgcaaggtgcaagctgctgctgggtctgatattctgaggtgtggagggcagcaggtgcctttcccacagctccamtagacagtgccccagtgagaattatatatggggctccaacaccacattttcccttggcactaccagaataaaggttctctgtgaggactccacctctgcagcaggcttctgcctcagcacataggcttttccataaaccctcggaaatctaggtggaa

SEQ ID NO: 336916 - DNA, 509 bp, Homo sapiens
gtgcaggcattgagtaaaacattaccattccaaaagaaagaaactggccaaaaggaaaggggcaataagccccatgcaagtctgaaacccagcagggcagtcgttcaatcttaaacctcaaaaataatctcctttgactccaggtcttgcatacagggcagtggtgcaagcagttagctcccaagaccttgggcagctccgccctgtggctttgctgagtatagcccctgtggctgctgtcgtgggttgaagctgagtgcctgcagcttttccagttgcaaggtgcaagctgctgctgggtctgatattctgaggtgtggagggcagcaggtgcctttcccacagctccaatagrcagtgccccagtgagaattatatatggggctccaacaccacattttcccttggcactaccagaataaaggttctctgtgaggactccacctctgcagcaggcttctgcctcagcacataggcttttccataaaccctcggaaatctaggtggaa

SEQ ID NO: 336917 - DNA, 528 bp, Homo sapiens
taatgaacagcaaacagcacaaagatcatagctggcaatatcaccattggcctgtgttactctgagtgtggctggaggggttgaatgaaaaagtcagagggagcagcatcttcctgctctctctagtctctgggacagttcatctccctgtttccacatgttcatatctagtttccccttatttaatttccacgatcgcactccctgacatggactctgttttctggactgcacgcasctgagagatcgcagaagggattcagtagttggtaagtgcccaataaatgtcagctatttttattatcaatataactggctgctctatttctataaagttacagtcactctaatttgcgtgtcagttacagagtgggcatgcaagctttatagctaaagggaagcagatccacactggatggaatcttttcattgtaatccccatgaaaatctctttgtggtgttgacacatgaacatctttcctcctgacaacttgtcttgagggaactgtagcttctgtcttgctgggc

SEQ ID NO: 336918 - DNA, 528 bp, Homo sapiens
taatgaacagcaaacagcacaaagatcatagctggcaatatcaccattggcctgtgttactctgagtgtggctggaggggttgaatgaaaaagtcagagggagcagcatcttcctgctctctctagtctctgggacagttcatctccctgtttccacatgttcatatctagtttccccttatttaatttccacgatcgcactccctgacatggactctgttttctggactgcacgcacctgagagatcgcagaagggattcagtagttggtaagtgcccaataaatgtcagctatttttattatcaatataactggctgctctatttctataaagttacagtcactcyaatttgcgtgtcagttacagagtgggcatgcaagctttatagctaaagggaagcagatccacactggatggaatcttttcattgtaatccccatgaaaatctctttgtggtgttgacacatgaacatctttcctcctgacaacttgtcttgagggaactgtagcttctgtcttgctgggc

SEQ ID NO: 336919 - DNA, 511 bp, Homo sapiens
agtattgcagggggtttggaaatcatttttaaaaaattggtgccgctgttgtatgcagaacaaaatcygctgcggttttgaccacaatgagatcgagttcttgttgtcttactgtcactgatcaactcacagagccagggactggattcttttttttttttttgagatggagttttgctcttgttgcccaggctggagtgcaatggtgtgatctctgctcatggcaatctccgcctcccgggttcaagtgattctcctgcctcagcctcctgagtagctgagattacaggcatgcaccaccatacctggctaattatgtatttttagtagagatggggtttctccatgttggtcaggctggtcttgaactcctgacctcgggtgatccacccaccttgacctcccaaagttatagagttataggcttgagccactgcgcctggctgggactggattcttttgcttggtctggtttctgtcttagcaaaatgcaggagtttctgccttggtt

SEQ ID NO: 336920 - DNA, 511 bp, Homo sapiens
agtattgcagggggtttggaaatcatttttaaaaaattggtgccgctgttgtatgcagaacaaaatctgctgcgkttttgaccacaatgagatcgagttcttgttgtcttactgtcactgatcaactcacagagccagggactggattcttttttttttttttgagatggagttttgctcttgttgcccaggctggagtgcaatggtgtgatctctgctcatggcaatctccgcctcccgggttcaagtgattctcctgcctcagcctcctgagtagctgagattacaggcatgcaccaccatacctggctaattatgtatttttagtagagatggggtttctccatgttggtcaggctggtcttgaactcctgacctcgggtgatccacccaccttgacctcccaaagttatagagttataggcttgagccactgcgcctggctgggactggattcttttgcttggtctggtttctgtcttagcaaaatgcaggagtttctgccttggtt

SEQ ID NO: 336921 - DNA, 511 bp, Homo sapiens
agtattgcagggggtttggaaatcatttttaaaaaattggtgccgctgttgtatgcagaacaaaatctgctgcggttttgaccacaatgagatcgagttcttgttgtcttactgtcactgatcaactcacagagccagggactggattcttttttttttttttgagatggagttttgctcttgttgcccaggctggagtgcaatggtgtgatctckgctcatggcaatctccgcctcccgggttcaagtgattctcctgcctcagcctcctgagtagctgagattacaggcatgcaccaccatacctggctaattatgtatttttagtagagatggggtttctccatgttggtcaggctggtcttgaactcctgacctcgggtgatccacccaccttgacctcccaaagttatagagttataggcttgagccactgcgcctggctgggactggattcttttgcttggtctggtttctgtcttagcaaaatgcaggagtttctgccttggtt

SEQ ID NO: 336922 - DNA, 511 bp, Homo sapiens
agtattgcagggggtttggaaatcatttttaaaaaattggtgccgctgttgtatgcagaacaaaatctgctgcggttttgaccacaatgagatcgagttcttgttgtcttactgtcactgatcaactcacagagccagggactggattcttttttttttttttgagatggagttttgctcttgttgcccaggctggagtgcaatggtgtgatctctgctcatggcaatctccgcctcccgggttcaagtgattctcctgcctcagcctcctgagtagctgagattacaggcatgcaccaccatacctggctaattatgtatttttagtagagatggggtttctccatgttggtcaggctggtcttgaactcctgacctcgggtgatccacccaccttgacctcccaaagttmtagagttataggcttgagccactgcgcctggctgggactggattcttttgcttggtctggtttctgtcttagcaaaatgcaggagtttctgccttggtt

SEQ ID NO: 336923 - DNA, 536 bp, Homo sapiens
ctgagaaaggtaaaaacaccttcaaataaggaagaggaacaggctatgacctaatgcttacttggaccagtttaagcatgtagggtaaatatttaggctaaattgtgggagctaagaatataaagtatattgatttctttattacagctagcagatatttaakaatgttagcacaggtctttgaataaattttgctttctaagagaagttactatttattcctaattagatgggaaggaaagtctttgaagaggaacctctactttactttttacacttagaacacgtttcctcccatcacggcactttgatgtggctgaagatatgaggatagaatacacaaggtccagtggctgaagaaattacagtgcatttgtagaaatgataatgactcacagtggatggagcacaaggcttggggagacatatacccagaatgaacagagccaggaggtctttgcgcagccggtgaggagcctgggctcagttttgggaagaatgggaagctctgcagggcttcaagcaggcaatgacac

SEQ ID NO: 336924 - DNA, 536 bp, Homo sapiens
ctgagaaaggtaaaaacaccttcaaataaggaagaggaacaggctatgacctaatgcttacttggaccagtttaagcatgtagggtaaatatttaggctaaattgtgggagctaagaatataaagtatattgatttctttattacagctagcagatatttaataatgttagcacaggtctttgaataaattttgctttctaagagaagttactatttattcctaattagatgggaaggaaagtctttgaagaggaacctctactttactttttacacttagaacacgtttcctcccatcacggcactttgatstggctgaagatatgaggatagaatacacaaggtccagtggctgaagaaattacagtgcatttgtagaaatgataatgactcacagtggatggagcacaaggcttggggagacatatacccagaatgaacagagccaggaggtctttgcgcagccggtgaggagcctgggctcagttttgggaagaatgggaagctctgcagggcttcaagcaggcaatgacac

SEQ ID NO: 336925 - DNA, 536 bp, Homo sapiens
ctgagaaaggtaaaaacaccttcaaataaggaagaggaacaggctatgacctaatgcttacttggaccagtttaagcatgtagggtaaatatttaggctaaattgtgggagctaagaatataaagtatattgatttctttattacagctagcagatatttaataatgttagcacaggtctttgaataaattttgctttctaagagaagttactatttattcctaattagatgggaaggaaagtctttgaagaggaacctctactttactttttacacttagaacacgtttcctcccatcacggcactttgatgtggctgaagatatgaggatagaatacacaakgtccagtggctgaagaaattacagtgcatttgtagaaatgataatgactcacagtggatggagcacaaggcttggggagacatatacccagaatgaacagagccaggaggtctttgcgcagccggtgaggagcctgggctcagttttgggaagaatgggaagctctgcagggcttcaagcaggcaatgacac

SEQ ID NO: 336926 - DNA, 536 bp, Homo sapiens
ctgagaaaggtaaaaacaccttcaaataaggaagaggaacaggctatgacctaatgcttacttggaccagtttaagcatgtagggtaaatatttaggctaaattgtgggagctaagaatataaagtatattgatttctttattacagctagcagatatttaataatgttagcacaggtctttgaataaattttgctttctaagagaagttactatttattcctaattagatgggaaggaaagtctttgaagaggaacctctactttactttttacacttagaacacgtttcctcccatcacggcactttgatgtggctgaagatatgaggatagaatacacaaggtccagtggctgaagaaattacagtgcatttgtagaaatgataatgactcacagtggatggagcacaaggcttggggagacatatacccagaatgaacagagccaggaggtctttgcgcagcyggtgaggagcctgggctcagttttgggaagaatgggaagctctgcagggcttcaagcaggcaatgacac

SEQ ID NO: 336927 - DNA, 538 bp, Homo sapiens
aagaagctgcactgtgggtagaaagggaggagctctgggccaggcgccatggctcatgcctgtaatcccagcactttgggagggcacagagggtggatcacttgaggtcaggagttcaagaccagcctggccaacatggtgaaaccccctctctactaaaaatacaaaaattagctgagcatgatggcgtatgccggtaattctagctattcagggggctgaggcacgagaattgctggaacccgggaggcagaagttgtagtgagccaagatggcaccactgcactccagcctgggcaataaagcgagactccatctcaaaaatggcaggcaggcaggcaggaaggaaggagctctgtataatgccagaaatcagggcaacaagtggttgctcacacctgtaatcccagccctttgggaggctgaggcaggagattggattgaggccaggaattcgagaccaccctakgcaacaaagggagatcccatctgtacaaaattttctctaaaaattagctggatatgggggcatgtaccc

SEQ ID NO: 336928 - DNA, 646 bp, Homo sapiens
ccattattccagaaatcacaagatattgcaacttgcccagttattcctgcagataacatcactattgtagaaaccaagattggccttttgagatgacttttcaggtttttgcatttctgatgactgatggctccacctggactcaccaaccagtactgtggctcccacccaggtaccaactcagtgcaagaggacagatttggctgcctatgatttcatctctgacccaacaaatcagcatgccccactgyctggctccctgcccaccaaactatctttgagagaccctattctccaaattttcaaggcgactgatttgagtaataaaactccaggctcctgttcagccccctctgcatgaatcaaactctttctctattgcaattctcctgtcatgataaattggctttatgtgggcagcaggcaaatgaacccattgggtgattataggtatctggattgcgtccagggtccccacatttctgcccatggatccaacgtgaattgtggcaaacctaatcaagagtttaaatagcaatttattgatgatttggaaactcagaaattagtcatttggtgacttggcatttggtggactaatgtaaagtgcattgattttcatcgaactgacttagtgaagtggttt

SEQ ID NO: 336929 - DNA, 646 bp, Homo sapiens
ccattattccagaaatcacaagatattgcaacttgcccagttattcctgcagataacatcactattgtagaaaccaagattggccttttgagatgacttttcaggtttttgcatttctgatgactgatggctccacctggactcaccaaccagtactgtggctcccacccaggtaccaactcagtgcaagaggacagatttggctgcctatgatttcatctctgacccaacaaatcagcatgccccactgtctggctccctgcccaccaaactatctttgagagaccctattctccaaattttcaaggcractgatttgagtaataaaactccaggctcctgttcagccccctctgcatgaatcaaactctttctctattgcaattctcctgtcatgataaattggctttatgtgggcagcaggcaaatgaacccattgggtgattataggtatctggattgcgtccagggtccccacatttctgcccatggatccaacgtgaattgtggcaaacctaatcaagagtttaaatagcaatttattgatgatttggaaactcagaaattagtcatttggtgacttggcatttggtggactaatgtaaagtgcattgattttcatcgaactgacttagtgaagtggttt

SEQ ID NO: 336930 - DNA, 646 bp, Homo sapiens
ccattattccagaaatcacaagatattgcaacttgcccagttattcctgcagataacatcactattgtagaaaccaagattggccttttgagatgacttttcaggtttttgcatttctgatgactgatggctccacctggactcaccaaccagtactgtggctcccacccaggtaccaactcagtgcaagaggacagatttggctgcctatgatttcatctctgacccaacaaatcagcatgccccactgtctggctccctgcccaccaaactatctttgagagaccctattctccaaattttcaaggcgactgatttgagtaataaaactccaggctcctgttcagccccctctgcatgaatcaaactctttctctattgcaattctcctgtcatgataaattggctttatgtgggcagcaggcaaatgaacccattgggtgattataggtatctggattgygtccagggtccccacatttctgcccatggatccaacgtgaattgtggcaaacctaatcaagagtttaaatagcaatttattgatgatttggaaactcagaaattagtcatttggtgacttggcatttggtggactaatgtaaagtgcattgattttcatcgaactgacttagtgaagtggttt

SEQ ID NO: 336931 - DNA, 577 bp, Homo sapiens
tgtggcaaacctaatcaagagtttaaatagcaatttattgatgatttggaaactcagaaattagtcatttggtgacttggcatttggtggamtaatgtaaagtgcattgattttcatcgaactgacttagtgaagtggttttttgttgaactggtggttcagaaaccagacttagtcccagaagaagaggctacaagatgtggctctagccaagtcatcctcctctatgggcctccccagtggaggagctagaccaggtcagaagaccactgaaaggcccttctccagggaggctccttgagggtgttgatggagaatctaaactccatgaaacatttaaagaggtttattctgagccaatatgagtgaccatggctccagggaagagtctcaaaaggtcctgagaaagtgtgtccaaggcagttgggagacagaagttttagggagacagaagttacaggaaaatacataaatcaatacatggaaggtttacattggttcaggcctgaaaaggcaggacatctcgaagcagaggcttgcaggttataggtagattccaagatattgtttgatgagt

SEQ ID NO: 336932 - DNA, 577 bp, Homo sapiens
tgtggcaaacctaatcaagagtttaaatagcaatttattgatgatttggaaactcagaaattagtcatttggtgacttggcatttggtggactaatgtaaagtgcattgattttcatcgaactgacttagtgaagtggttttttgttgaactggtggttcagaaaccagacttagtcccagawgaagaggctacaagatgtggctctagccaagtcatcctcctctatgggcctccccagtggaggagctagaccaggtcagaagaccactgaaaggcccttctccagggaggctccttgagggtgttgatggagaatctaaactccatgaaacatttaaagaggtttattctgagccaatatgagtgaccatggctccagggaagagtctcaaaaggtcctgagaaagtgtgtccaaggcagttgggagacagaagttttagggagacagaagttacaggaaaatacataaatcaatacatggaaggtttacattggttcaggcctgaaaaggcaggacatctcgaagcagaggcttgcaggttataggtagattccaagatattgtttgatgagt

SEQ ID NO: 336933 - DNA, 606 bp, Homo sapiens
tggcctgtggtctctcttttgatcccattcatttggagactctctgggggatttttaggcagccgttagaaccactgtataatctgaccccagcctcctggttcaacagaagccctgaggctcctccacatatgccagctgggctgttcttgcacctaaatgcacctcacgccttgtcgtgacctttgctttcgtccctgcctggccaaccctttaagtcgtagcttcaaggccactctttccacaaagccttcagcgtcctcagagtgacaacagcagcctaaaagctgacatggagtatgcttaacacgttcctggcactgtgcacagggcttgcatcacagctatcatctgmgagtcctaacatcattgcctttccacagagagggaaactgaggcacgagaggttaagtcacttgtcctgagtcacacagctggtgagtacagagcctacccccaatgccttattgctttctcacctgtctctgctgacctctctccctctctccccaggccacagggacccctgccttcttccaaactcctctagctttttaaaaagcatctcgcattgggaggctgaggcaggattgcttcagcccagga

SEQ ID NO: 336934 - DNA, 606 bp, Homo sapiens
tggcctgtggtctctcttttgatcccattcatttggagactctctgggggatttttaggcagccgttagaaccactgtataatctgaccccagcctcctggttcaacagaagccctgaggctcctccacatatgccagctgggctgttcttgcacctaaatgcacctcacgccttgtcgtgacctttgctttcgtccctgcctggccaaccctttaagtcgtagcttcaaggccactctttccacaaagccttcagcgtcctcagagtgacaacagcagcctaaaagctgacatggagtatgcttaacacgttcctggcactgtgcacagggcttgcatcacagctatcatctgcgagtcctaacatcattgcctttccacagagagggaaactgaggcacgagaggttaagtcacttgtcctgagtcacacagctggtgagtrcagagcctacccccaatgccttattgctttctcacctgtctctgctgacctctctccctctctccccaggccacagggacccctgccttcttccaaactcctctagctttttaaaaagcatctcgcattgggaggctgaggcaggattgcttcagcccagga

SEQ ID NO: 336935 - DNA, 623 bp, Homo sapiens
ggattatccttttaaatctaaaagaaacatcctaaagaaagttgtccagagctttcaaagatgtcccttakcagtgaggtgtgctccatgatgaaccaatcccaactcgtccaatttagccaacatggggatcttcttggtgtcttccttgatatctcagaacagccaccttcacgctctgctttcactatagaaattattcaaaatcttacatggtataactgagggagaaattagcgggagtcttgccctccttctcacccaatctccattctcttcccctcagggctaggaatagaaacagggtttgggtttccagtagaggtggaaacttaggcccatgacttcatagtgcgtggagtagtcaggacctgggtagagcatggctgcaaggaggctcatggaggcttggggctgtagccttgggaccatcagcaacacccctgctgccaagcctgtctttggaagcagactaaaggacattactgggaagtgctgggcattgctccaaaggcatcatagctacccccagtgggtatggcatcccaccctgatctttctgggactatgtaagcctttgtgttcctgtatagtccaatgggggaaaaaactccaaatatcgg

SEQ ID NO: 336936 - DNA, 595 bp, Homo sapiens
tgttttaacaagccctccaggtgattgggaaggtagctaaagtctgaaaatcactgagctagcgctggaaacagactaattttcttgacacctgcaacagctgcagcacatttgctcagacagttcacacaagaggcacatatgcgatgttaaaatgagctagaatgctcagacaagagaggcaagcttttcttctcaatacatttgtccaaatccttaacttttatgggtaaaagctttgaggctaaaggaaaaacaggaagagggaccaacctaagttcacatagttggttgcagaaatcagaatcaatgttagctctttcatttgccgcttcactgttctttttttcatcctaagtactcaagatgaatttgcaagggtgaatggagggtaaggataagggtagatgttggcggtagatagtgtattgtgttgggattagcatttcatccaaattctggccattttctaggcatggccaagggacaaccactatacttttccctcccaggtctcagtttcctcatctgaaaaaacrggagcaatgactcatgttctgtctacctccactgatctgcaaactgtaacatgaaa

SEQ ID NO: 336937 - DNA, 578 bp, Homo sapiens
ttgctttgttctctgaatgtcttatttttttttttctttttgaacatacctttcatattcttttcttttgatatagggtcttgttctgttgtccaggttggagtgcagtggcacgactgcagctcactgcagcctckacctcccaggctcaggtgatcctcccttctcaacctcctgagtagctggttatgtcctttttggacaatacctttgtcctctgaatgtcttatttttttttttctttttgaacatacctttcatattcttttcttttgatatagggtcttgttctgttgtccaggttggagtgcagtggcacgactgcagctcactgcagcctcgacctcccaggctcaggtgatcctcccttctcaacctcctgagtagctggttatgtcctttttggacaatacctttgtcctctctgtgagttcagaatccattacagggaatctcgtgaaatgttgatatgataaatgttaaagatgatttgattggggcagcaggataatgagcatattaagctggtctaaaaatgggtctggtttcaagagccgtaagcagttggtaaataataa

SEQ ID NO: 336938 - DNA, 560 bp, Homo sapiens
agcttgtctttctgacttcttcctcttggcgctccagtatacttaacccattccccctcccctcctccatcttttttggcaccactttttttccctaatcaccttgcttaatgattcagtgagggccaggtgcggcggctcatgcctatacgcccagctacttgggaggctacggcaggaggatggattgcttgagcccaggagtttgagacgagcctgggcaacatagcaagatcctgtctctacaaaatattttttaaaaaattagctggatgttctgcatgcctgtagtactagctactcaggaggctgaggtgggaggatcgcttgagcccaggatcgagatcagcctgggcaacatagcaagatcctgtctctacaaaatatttttttcaattagctggatgttstgcacgcctgtagtactagctgctcaggaggctgaggtgggaggatcacttgagcccaggagatggagttgagtcttggagtccaggagttagaggttacagtgggctgtaatcacgccactgtactccagtctgtgcaacagagcgaga

SEQ ID NO: 336939 - DNA, 560 bp, Homo sapiens
agcttgtctttctgacttcttcctcttggcgctccagtatacttaacccattccccctcccctcctccatcttttttggcaccactttttttccctaatcaccttgcttaatgattcagtgagggccaggtgcggcggctcatgcctatacgcccagctacttgggaggctacggcaggaggatggattgcttgagcccaggagtttgagacgagcctgggcaacatagcaagatcctgtctctacaaaatattttttaaaaaattagctggatgttctgcatgcctgtagtactagctactcaggaggctgaggtgggaggatcgcttgagcccaggatcgagatcagcctgggcaacatagcaagatcctgtctctacaaaatatttttttcaattagctggatgttgtgcaygcctgtagtactagctgctcaggaggctgaggtgggaggatcacttgagcccaggagatggagttgagtcttggagtccaggagttagaggttacagtgggctgtaatcacgccactgtactccagtctgtgcaacagagcgaga

SEQ ID NO: 336940 - DNA, 551 bp, Homo sapiens
tggagttacaccctgtatcaagaaagagagaaaaagatgtcagctggtactattattacccacattttagaggaagggaaatgaatgaataaggaaaagagcaacatgtacaaggtcacttgagcagttgcagagcaggaattcacagccaaaattgtctgaaccaaagcctgtgtttcttaatgwctcacgcaatctggtctcaagattttagctacaggccaggtgcagtggctcacacctgtaatcccagcactttgaaaggctgaggtgggcagatcacttgaggtcagaagttcaagaccagcctcgccaacatggtgaaaccctgtctctactaaaaatacaaacattagctgggcatggaggcatgcacctataatctcagttacttgggaggctgaggcaggagaatcacttgaacccaggaggcagaggctgcagtgagctgagatcacaccactgcactccagcctgggagactaagtgagactccatctcaaaagaaaaaaaaaaggccaggcgcagtggcttacgcctgtaatgccagt

SEQ ID NO: 336941 - DNA, 586 bp, Homo sapiens
ttgattttcatgatgcatgatgcagtagatagggaaccctcaaatatctaagcttattccatagacataaaacaacttgtgttttgcttggtactaatgccactgaattaaaacagcttttctgagaaaagcaaagtctaacaaaatacttttttttatcccatacttcaaaaataaatgagtgggctcatctatttacaaggaaagtaaacgaatttacaaataaacttatgactctgtgactgccttttttttgttttgttttgttttgttttgagacggaatctcactgactctgtcacccgagtgcagtggcgcgatctcagctcactgcaaccaatgcctcctgggttcaagcaattctgccgcaatctcccaagtagctgggattacaggtgcacgccaccacatctgactaatttttgtgtttttaggagagatggggttttgccatgttgtccaaggtggtcgggaactcctgacctcaaatgattctgcccatctcrgcctcctaaagtgctgagattacacgcgtgagccactgtgcccggcctcatttcatttattttctaatcgcaaaccgttt

SEQ ID NO: 336942 - DNA, 633 bp, Homo sapiens
ctgcaaccaatgcctcctgggttcaagcaattctgccgcaatctcccaagtagctgggattacaggtgcacgccaccacatctgactaatttttgtgtttttaggagagatggggttttgccatgttgtccaaggtggtcgggaactcctgacctcaaatgattctgcccatctcggcctcctaaagtgctgagattacasgcgtgagccactgtgcccggcctcatttcatttattttctaatcgcaaaccgtttgcgggagtgccattttttggaggaaaatattgggatgcagaggggttacacttcttgcctgaatcatgcaataaaagtggcagaggtgacactgaaactccaacctgcttttcctcctcctgaggcagccaaatgtctaatggagtgctattaggcagtggtggccaaaatgccaatcaagcctgggctaacctaaggcaacagaataaactcgaggagggtagcatgttaagaagcaggctggacatggtagctcacacctgtaatatcgatgctttgggaggctgaggctggaggttcccttgaggccaggagtttgagaccagcctaggcaacataatgagacccaatctctacaaaaataaaatgatcagcca

SEQ ID NO: 336943 - DNA, 633 bp, Homo sapiens
ctgcaaccaatgcctcctgggttcaagcaattctgccgcaatctcccaagtagctgggattacaggtgcacgccaccacatctgactaatttttgtgtttttaggagagatggggttttgccatgttgtccaaggtggtcgggaactcctgacctcaaatgattctgcccatctcggcctcctaaagtgctgagattacacgcgtgagccactgtrcccggcctcatttcatttattttctaatcgcaaaccgtttgcgggagtgccattttttggaggaaaatattgggatgcagaggggttacacttcttgcctgaatcatgcaataaaagtggcagaggtgacactgaaactccaacctgcttttcctcctcctgaggcagccaaatgtctaatggagtgctattaggcagtggtggccaaaatgccaatcaagcctgggctaacctaaggcaacagaataaactcgaggagggtagcatgttaagaagcaggctggacatggtagctcacacctgtaatatcgatgctttgggaggctgaggctggaggttcccttgaggccaggagtttgagaccagcctaggcaacataatgagacccaatctctacaaaaataaaatgatcagcca

SEQ ID NO: 336944 - DNA, 633 bp, Homo sapiens
ctgcaaccaatgcctcctgggttcaagcaattctgccgcaatctcccaagtagctgggattacaggtgcacgccaccacatctgactaatttttgtgtttttaggagagatggggttttgccatgttgtccaaggtggtcgggaactcctgacctcaaatgattctgcccatctcggcctcctaaagtgctgagattacacgcgtgagccactgtgcccggcctcatttcatttattttctaatcgcaaaccgtttgcgggagtgccattttttggaggaaaataktgggatgcagaggggttacacttcttgcctgaatcatgcaataaaagtggcagaggtgacactgaaactccaacctgcttttcctcctcctgaggcagccaaatgtctaatggagtgctattaggcagtggtggccaaaatgccaatcaagcctgggctaacctaaggcaacagaataaactcgaggagggtagcatgttaagaagcaggctggacatggtagctcacacctgtaatatcgatgctttgggaggctgaggctggaggttcccttgaggccaggagtttgagaccagcctaggcaacataatgagacccaatctctacaaaaataaaatgatcagcca

SEQ ID NO: 336945 - DNA, 573 bp, Homo sapiens
gcctttttctaagggaaattggcttaaccaacattagcattggttcagtgtaaggaggactttctttaaggtagtttataatacaattttatttgtattatattctagtttataayacaaatgattatatttatattatatcatagaggcctagcatagaaaacaaaatagatatataatttatcttctaatcctctctgaagcacttagaggagaatttgtagccatcttgaggtatctgtgttttagatcaagctgctataagagaatataaactaaacgggttaaacagaaacatttatttctcatggctctggaggctggaagtccaatatcagggcgctaacatggtcggggtgttggttaggaccctgcttctggttcaccttcttgaggtatcctcacatggtggagagaaagagctctggtccttcatgtccttataagggcacaaatccatcctggggctccaccttcatgacctcatctaaccctaatcacctctgcgaaggccctactaacaaatatcttaactggattgtggtgttaatgaattttggggaagtggtgggg

SEQ ID NO: 336946 - DNA, 573 bp, Homo sapiens
gcctttttctaagggaaattggcttaaccaacattagcattggttcagtgtaaggaggactttctttaaggtagtttataatacaattttatttgtattatattctagtttataacacaaatgattatatttatattatatcatagaggcctagcatagaaaacaaaatagatatataatttatcttctaatcctctctgaagcacttagaggagaatttgtagccatcttgaggtatctgtgttttagatcaagctgctataagagaatataaactaaacgggttaaacagaaacatttatttctyatggctctggaggctggaagtccaatatcagggcgctaacatggtcggggtgttggttaggaccctgcttctggttcaccttcttgaggtatcctcacatggtggagagaaagagctctggtccttcatgtccttataagggcacaaatccatcctggggctccaccttcatgacctcatctaaccctaatcacctctgcgaaggccctactaacaaatatcttaactggattgtggtgttaatgaattttggggaagtggtgggg

SEQ ID NO: 336947 - DNA, 573 bp, Homo sapiens
gcctttttctaagggaaattggcttaaccaacattagcattggttcagtgtaaggaggactttctttaaggtagtttataatacaattttatttgtattatattctagtttataacacaaatgattatatttatattatatcatagaggcctagcatagaaaacaaaatagatatataatttatcttctaatcctctctgaagcacttagaggagaatttgtagccatcttgaggtatctgtgttttagatcaagctgctataagagaatataaactaaacgggttaaacagaaacatttatttctcatggctctggaggctggaagtccaatatcagggcgctaacatggtcggggtgttggttaggaccctgcttctggttcaccttcttgaggtatcctcacatggtggagagaaagagctctggtccttcatgtccttataagggcacaaatccatcctggggctccaccttcatgacytcatctaaccctaatcacctctgcgaaggccctactaacaaatatcttaactggattgtggtgttaatgaattttggggaagtggtgggg

SEQ ID NO: 336948 - DNA, 573 bp, Homo sapiens
gcctttttctaagggaaattggcttaaccaacattagcattggttcagtgtaaggaggactttctttaaggtagtttataatacaattttatttgtattatattctagtttataacacaaatgattatatttatattatatcatagaggcctagcatagaaaacaaaatagatatataatttatcttctaatcctctctgaagcacttagaggagaatttgtagccatcttgaggtatctgtgttttagatcaagctgctataagagaatataaactaaacgggttaaacagaaacatttatttctcatggctctggaggctggaagtccaatatcagggcgctaacatggtcggggtgttggttaggaccctgcttctggttcaccttcttgaggtatcctcacatggtggagagaaagagctctggtccttcatgtccttataagggcacaaatccatcctggggctccaccttcatgacctcatctaaccctaatcacctcygcgaaggccctactaacaaatatcttaactggattgtggtgttaatgaattttggggaagtggtgggg

SEQ ID NO: 336949 - DNA, 542 bp, Homo sapiens
ataagagaatataaactaaacgggttaaacagaaacatttatttctcatggctctggaggctggaagtccaatatcagggcgctaacatggtcggggtgttggttaggaccctgcttctggttcaccttcttgaggtatcctcacatggtggagagaaagagctctggtccttcatgtccttataagggcacaaatccatcctggggctccaccttcatgacctcatctaaccctaatcacctctgcgaaggccctactaacaaatatcttaactggattgtggtgttaatgaattttggggaagtggtgggggcacacacattcagtccataccaccctggaactccagggattaaagctgagaagtcagagtggaagaaggtagagccagagtgctctcctgattcaytcctgtacatagagaaggaaccagacacatggaatgcaaattccagttgcaacacattttgtagcttggactgttcactgtaatccactgacattctacttcttcatctgtaacaagaacaaagcaatccta

SEQ ID NO: 336950 - DNA, 584 bp, Homo sapiens
ctgctcttcccaaccaggtggtctcattcaaggccatggctttaaatactatctcctatgactcccacatttatgtttctagcctggaacgtttaatgagttccaaccatgcgtgtttaatggctcatctaatctttcctctcgcatgtgtagtgggcacctatatttatcacccaaagataaaaaaaaaacccctgacttgtaactctcctaccctacttcagtctgtaaagtaaatagcactatcatccagctggttactcgagccaaaaaccagcaattcttcttagcttctgagcctttgcacccaatccatgaacaaattctacctgcttccaaggcacatcccaaagggcctatttctctccacctccactatatcatctctgatataaaccactgtgataattttgcttgcacttttacctctctttaatccagccagggartgacccttttaaaagttaaatcagatcatgtcattcccttgcctaataccttctaactctaatgtcatgctaggccctgaagacctctaggccaccgtctgcctctttaaccacaactcctctagcctgctcacc

SEQ ID NO: 336951 - DNA, 589 bp, Homo sapiens
tgtacgcacgtggtgggcactgaaggctagtattgaacaaatgagtatatatattaaagataatgggaaccaagtttctgtcacagaaggtgtttatatatgtggaagggggaaaagacttakatttgaattgaagatactgatatgaattcatgtggcttatgtgtaaacatatacacatacccagatatggaaataataataagtgtgtgtttgtgtggacttatatgtacatatttcctatctctgtgttgactgggtctcaaagcattgacatcacacgaacactaagcatgctaagcacccacatcttgatttctaaaatcattctacatggacaggaaccacagctgcttggagaagtggctgattccaaggctggacacggacactataagatgatcctggagcatcttttttgtaccacaatataaagaaatgctcaaagaatgatggggagatctggcaagtaccaactggaccaggtgatcaagtggggatatggtcagtgtggttgccttctgatgtgatatgctgagaagagctcagcagcgtttttgtggaattcctgccaagatggcatggaaga

SEQ ID NO: 336952 - DNA, 589 bp, Homo sapiens
tgtacgcacgtggtgggcactgaaggctagtattgaacaaatgagtatatatattaaagataatgggaaccaagtttctgtcacagaaggtgtttatatatgtggaagggggaaaagacttatatttgaattgaagatactgatatgaattcatgtggcttatgtgtaaacatatacacatacccagatatggaaataataataagtgtgtgtttgtgtggacttatatgtacatatttcctakctctgtgttgactgggtctcaaagcattgacatcacacgaacactaagcatgctaagcacccacatcttgatttctaaaatcattctacatggacaggaaccacagctgcttggagaagtggctgattccaaggctggacacggacactataagatgatcctggagcatcttttttgtaccacaatataaagaaatgctcaaagaatgatggggagatctggcaagtaccaactggaccaggtgatcaagtggggatatggtcagtgtggttgccttctgatgtgatatgctgagaagagctcagcagcgtttttgtggaattcctgccaagatggcatggaaga

SEQ ID NO: 336953 - DNA, 589 bp, Homo sapiens
tgtacgcacgtggtgggcactgaaggctagtattgaacaaatgagtatatatattaaagataatgggaaccaagtttctgtcacagaaggtgtttatatatgtggaagggggaaaagacttatatttgaattgaagatactgatatgaattcatgtggcttatgtgtaaacatatacacatacccagatatggaaataataataagtgtgtgtttgtgtggacttatatgtacatatttcctatctctgtgttgactgggtctcaaagcattgacatcacacgaacactaagcatgctaagcacccacatcttgatttctaaaatcattctacatggacaggaaccacagctgcttggagaagtggctgattccaaggctggacasggacactataagatgatcctggagcatcttttttgtaccacaatataaagaaatgctcaaagaatgatggggagatctggcaagtaccaactggaccaggtgatcaagtggggatatggtcagtgtggttgccttctgatgtgatatgctgagaagagctcagcagcgtttttgtggaattcctgccaagatggcatggaaga

SEQ ID NO: 336954 - DNA, 594 bp, Homo sapiens
cagcatctgcttgctgtgacttgtaaactctgagtccccttatcctctagatttgaagcttctttggttaggttccaatctctcaaaactgacgtatcccctaktaaccaccagagggatcccatataatgtgataaaaattataatcaacatggaggaatcacagctcagccagcgtgtgcttgcttccaaggccccaggtctctcagcctggaaaaggagagcggggaacaaaggaggaacactgtgagggaaggttctccttggcagcttcggggaagggatcctcaaaggagaggcacacgtctgaagacggaagtgtctgaggccaatcttctcttctcctggaaacaagcaaacaaataaaacaaaccccagtcattacaaagaaagccctttgaaaatcagtgaaatcagaccctatttgtttctaaacccgtgttcagaagttgaactccaaatataatgagatttttttgtgagaactaagagccttttccatgtttcaaatagggttgtacaattgtataaaagaagagggaattgggagtgtattatgttagcttcctaggactgctgtaacaaattggcaca

SEQ ID NO: 336955 - DNA, 594 bp, Homo sapiens
cagcatctgcttgctgtgacttgtaaactctgagtccccttatcctctagatttgaagcttctttggttaggttccaatctctcaaaactgacgtatcccctattaaccaccagagggatcccatataatgtgataaaaattataatcaacatggaggaatcacagctcagccagcgtgtgcttgcttccaaggccccaggtctctcagcctggaaaaggagagcggggaacaaaggaggaacamtgtgagggaaggttctccttggcagcttcggggaagggatcctcaaaggagaggcacacgtctgaagacggaagtgtctgaggccaatcttctcttctcctggaaacaagcaaacaaataaaacaaaccccagtcattacaaagaaagccctttgaaaatcagtgaaatcagaccctatttgtttctaaacccgtgttcagaagttgaactccaaatataatgagatttttttgtgagaactaagagccttttccatgtttcaaatagggttgtacaattgtataaaagaagagggaattgggagtgtattatgttagcttcctaggactgctgtaacaaattggcaca

SEQ ID NO: 336956 - DNA, 594 bp, Homo sapiens
cagcatctgcttgctgtgacttgtaaactctgagtccccttatcctctagatttgaagcttctttggttaggttccaatctctcaaaactgacgtatcccctattaaccaccagagggatcccatataatgtgataaaaattataatcaacatggaggaatcacagctcagccagcgtgtgcttgcttccaaggccccaggtctctcagcctggaaaaggagagcggggaacaaaggaggaacactgtgagggaaggttctccttggcagcttcggggaagggatcctcaaaggagaggcacasgtctgaagacggaagtgtctgaggccaatcttctcttctcctggaaacaagcaaacaaataaaacaaaccccagtcattacaaagaaagccctttgaaaatcagtgaaatcagaccctatttgtttctaaacccgtgttcagaagttgaactccaaatataatgagatttttttgtgagaactaagagccttttccatgtttcaaatagggttgtacaattgtataaaagaagagggaattgggagtgtattatgttagcttcctaggactgctgtaacaaattggcaca

SEQ ID NO: 336957 - DNA, 577 bp, Homo sapiens
tttagtcttcaagtcacctggatggatcttctaggacacaagtcttgcccaccagggcctttcccaggctccctatttctgcagagattaaaaacattcaaaggctgctgaactgcatccgcatgttagtgttgctaagacaagccttgtrggccagacatcccatggacagagcataaacagaagaaaagcagttatagggcaaggtttgcaaaggacagcagtagtactgttgataggatcacaagcaatgtgcttaaaggcaagcggattctttctatatgtgtgtgggctctatctacacacttttcccaaaaagcagtgattctcaacagtaagtgcaccttagaattggctgagaagttttgttttaaatccccaaacccagggctgccccagaccaattaaatcagaatccctggggtgggttttattttttagagcttcatagatgattacagtgggcaaccaaccagggttgagtgccgctgttctaaacagaaccacatgcttccatctggggcttttaggagggaaatctcataacttttaaaagctaggtacaacagagtttttg

SEQ ID NO: 336958 - DNA, 564 bp, Homo sapiens
gtgttccccaaattgcattcattcccattttgtcatgatttttcttatctttgtggaccacctagagcattatttacttgattcactttttgaattttagtatatatatcttaaactttatatttcagcctcaaagaaaaacaagtactacctgtaattagaagttaagcataaaaataaacataagagaaaaacaatgctgatgatttccagctctgcatagttgcttgccttagcaactaggagtgagattcagtctctgtgttaaaaagtgaggctagccaccattagaggggcatttaattctagcaccaaaccgaaactctccatttggcatattcagaaggattaaagagaataacctactgagagattcaatgtagatcacttaagattatcttaaacaggaatatgactgactcccaactttggagaaacagcagtggaggccagatcttaaacccagagcaagctggctttagacttgcttcaaccctaaaccagtactcctttccacccacccacctccccscaacccctgcaggcatatcaagaagacaaggt

SEQ ID NO: 336959 - DNA, 521 bp, Homo sapiens
gtattgtgctccttctaattccatattctcagactacatggaatgaatgggtattggtctttaagcctctttgagcaatgccaataaatacagtcacttccaatttgagggcacttggaatagcagtgctattgttcctttgacatctcaacagcacttgaaagtgaaagaraaaaaaatagattaatggatgtattccctaaagcaacaaacatgtttgatgtataaacatatgttatgggcaatgacgctgtacctttggtgccacgtctcaacaattctcttttcatctatcccctaatcatgcaactgaatgcttccagtaggccacacagtagggacaaaatgatagtaagaccacctggctatagatacctgcttctagagaggccaggttccaacccattacaagctgataaccatatgtatgatttttgctacactggccaagtatttggatcttttttaaacatatttgattatttaccctttgattagaatttgtgaataaaaatgtcttt

SEQ ID NO: 336960 - DNA, 586 bp, Homo sapiens
accagtgatatggcttgtccaacatgacctttagaaagactcagagtttggctttgtgtttctcatctgtcttagtctgcttttgctgctttaacagaatacctgagactggaagatttataataaacagaaatttatttggctcatggttctggaggctgggaagtcccagatcaaggggcaagctgcatccagtgagggccttcttgctatgtcataacatggtgaaaggcatcacatagccagaagagagggtgagaagggctgagctagtgtttacaagaaacctactcccatgataacaacatcaattcattcatgacagcagggccctcataacctaatcacctcttcaagttcccatctgtcaatactgttgttctggggattaygtttctaacacataaactttggaaacacattcaaaccagagcaccatcctattctcagtaataccctttgtcttaatttttccctactaacctgggatgatattcaaagatattcaacaatgcttgggcactggccaataaaaatgggactagacaccaggcatcaagaggcagtccagcctttctaattcata

SEQ ID NO: 336961 - DNA, 587 bp, Homo sapiens
ataaattccctcattatctgtgggccaggtcaaccacagcacagccagccacctagcagacccatgagcagggccttttgcaaaggtgtagcactggccctcaaaaagacttacagttaagcactccaggaggctgcaattgtgcacagcagccaacctgtctaattgggtcattttttcactgggtgatttatatagaatgtggactcaaggctgactgctcttcgaacagtatgactgcttttgtctgactgtaccaatgaagcaggatggggttgctggtatttaagaccaggcattctggtcccaaagaaacaytgctttgggctgtagttctgtgttattgcaagaagcatagtatccgatgttaccagtgtgggctcagttacttcatctgtaaaatgggaggctataaccccacctacctcttagggttctcgtgaagatgtgcttgagaagagctgaaacagtgtgcctgacacagagaaagcattcaatgaatgtgaaccatttatgctatacagcattattactgatatgaagtattagtgatacattattgatataattatcatcaacattatctg

SEQ ID NO: 336962 - DNA, 608 bp, Homo sapiens
ctagtctccagaactatgaaacaataaatttctaattttttaagacacctagtttgtaatattttgttatggtggccctatgaaactaatacaaagcccatcaggtgaatttttaccaacagatcccatggaaaacttctgatggaaatcactattatactcatgaaggtcattgacagggtttggctctgtgtccccacccaatctcatctcgaattgtaatctccacatgttgagggagagacctggtgggaggtgattggatcagggggacagtttcctccatgctgttcttgtgatagtgagttctcaagagatctgatggcttaagtgtatggcacttcccactttgtgctctctctcctgccaccttgtgaagaaggtgcctgcatctcctttgccttccaccatgactataagtttcctgaggcctccccagccatgaggaatggtgagtccactaaacctctttacttataaactattccagtctcacatarttctttatagcagtgtgaaaatgaactaatacagctatattgccatatctatgtccacacaatatccagagacacagaaaggaaaaaggaggcagcacaatgcaatgg

SEQ ID NO: 336963 - DNA, 615 bp, Homo sapiens
tgtcacaagcacatgaaggacactttctttttggcctttgccagcttgccagagttcttctaatgggctcaaaaaaaacttgtctgttcttacatactttgctaagacctgmaggaaattaggtgcctccagcagacattcatgttgctgctatagtccttcattattctctttgcaaagctgtgtactaccagaattctggatggaaaaagctgaatgcacattcaatctactcttagagtctcaaattcaaagggatggcttgcagtgagtcagctgtggaagaccaaataatagcctcccaaatggtgcctatgtaccaatctttcagaacctgcaaatatgttagatggtaaaagagaattaaagtagaagattcaattagaggctagtcagccaactttaagataaggagatgaccttggattatccaagtggactcaatataatcacagaggtggaagagagaggcaaaataagtagtgtcagagtgatgcaatatgagaaagattcaactggccatcaatggccttaaagatggaattgagccataagccagggaattcaggcagcctctagaagctggaaaaggcaaagagcctccaaaaaggaatg

SEQ ID NO: 336964 - DNA, 534 bp, Homo sapiens
acagtggttgaaacaaaaccattttttaaaatctgagtttattgttaccatcatttgttcatatttaattaaattttatatgcctcatccctcctgcacacacctataaaaggcttactacgtgagaggcactaggttaggtttatacagacatacgaattcaagggatgagttgctcaaacttaatttatctgataacagagtgcatgcccttctaccataaaatgttcccctattctgacccctggtcttactggtatcacccccattctgaaaaatccaggctagaaactttgggtcatctccagtttattcttgaagttcgtcctctgtatgctgtcattctctagttctatcaattcttttttcctgycaagcccctgtcataattattgctattcttggctgggctgaagttctgggattgtactccccagggttttctggggcttcaccaaggtttccaaattgatagcaacaggaggcaggcaaatgcctaggcagataggggtgggtccccagtgaaaccccacc

SEQ ID NO: 336965 - DNA, 574 bp, Homo sapiens
tatttgtatgtccccttcggaaaaatatccatgcgggtccgttgctcattttttaattgggttattttacaggggagggtactattgagttgaatgggtttcttatgtattttggaayttaatcccctgtctgatatatggtttccaaatatgctctcccattttgtaaattgtctcttcactatgttgcttgttttctttgctcttcacaaacttctttttattgctaaataatattccattgtatggctaggccatattttacttatctgttcatcatttgatagacagttgagttgtttctactttttgcttcttatgaataatcgttctgtgaatgctgctgttaatattacaagtgtttgtgtggatatatgttttcatttctctagggtatataactaggaatagaatttctgggtcataaggtaaccctatgtttaatttttgaaggtacttccagaccattttcaaagcagcgttgccattttacattcttaccaatagtgtaagaagattctagtttcttcataccttcactagtacttgttattttgtaactttttattatagt

SEQ ID NO: 336966 - DNA, 596 bp, Homo sapiens
ggtgttgggattgttcttatccccaagttttctaatttcactaggaatattaaaggcaatttaatgcaatctgcattttaaagataaaagtgatggagttcaggacatgcttccccaaaatatggcaccttggcatagtgaatattttcagctaaaggaatgtgagaaggtaacagaagtaggaaggtctttctgactgttcgctccctgtttgtccttgcggcaggttagaagaccctcattggagaggtgccctgaagaaaggaatgttcttatctctgaagacaaggggtcacagrgaagaatctgaacaaaactctgtgctaagtgtccccagtttattgccattagactacatcctttttgacctagaagctccaccttcaaagtttttaggtagccatgaccagtctaactgtagaaatggaatggaacattggaaagactgtaaacttggagctctaagaactaggttcagtttcctccacttatcagctttgtggccagagtcaaattttgcctctctgtgcctcagttaccttactacaaaattaggactattctgaggcttcaatgagggttaaccatgtactgag

SEQ ID NO: 336967 - DNA, 526 bp, Homo sapiens
cagtggggagccctgggttcattattgcctatctggattgttccgtgatgaatggaaacagcarcatcttgtcacacctgcctcactctgtaggaaatgaaagctgcccaagaaatgtatggtctttagggaagcagctcactggagctgaggcccattctcaagtagctaatggctgaacagtgcttgctaatcactatccaccttacagttgggaggccaagtccctccttgaagggcaacctggatggtacatatctgtgcctaccacaatatgggtgtagacttcagccccaccccacacacatacctagatctagtttagcatacagctgtgatcttccagaatgacaggtaacccaggcaagatcatctgaccttttcatttatatcattttctaccatcaaaggggctatggactctgccaagaatgtagcaagccaacttgaccttcagaggtaaaaatgaaacccgaagacatggagaaaattaaaccaactctttagcaaaatctagagatgaagt

SEQ ID NO: 336968 - DNA, 526 bp, Homo sapiens
cagtggggagccctgggttcattattgcctatctggattgttccgtgatgaatggaaacagcaacatcttgtcacacctgcctcactctgtaggaaatgaaagctgcccaagaaatgtatggtctttagggaagcagctcactggagctgaggcccattctcaagtagctaatggctgaacagtgcttgctaatcactatccaccttacagttgggaggccaagtccctccttgaagggcaacctggrtggtacatatctgtgcctaccacaatatgggtgtagacttcagccccaccccacacacatacctagatctagtttagcatacagctgtgatcttccagaatgacaggtaacccaggcaagatcatctgaccttttcatttatatcattttctaccatcaaaggggctatggactctgccaagaatgtagcaagccaacttgaccttcagaggtaaaaatgaaacccgaagacatggagaaaattaaaccaactctttagcaaaatctagagatgaagt

SEQ ID NO: 336969 - DNA, 526 bp, Homo sapiens
cagtggggagccctgggttcattattgcctatctggattgttccgtgatgaatggaaacagcaacatcttgtcacacctgcctcactctgtaggaaatgaaagctgcccaagaaatgtatggtctttagggaagcagctcactggagctgaggcccattctcaagtagctaatggctgaacagtgcttgctaatcactatccaccttacagttgggaggccaagtccctccttgaagggcaacctggatggtacatatctgtgcctaccacaatatgggtgtagacttcagccccaccccacacacatacctagatctagtttagcatacagctgtgatcttccagaatgacaggtaacccaggcaagatcatctgaccttttcatttatatcattttctaccatcaaaggggctatggactctgccaagaatgtagcaagccaacttgaccttcagaggtaaaaatgaaacccgaagacatggmgaaaattaaaccaactctttagcaaaatctagagatgaagt

SEQ ID NO: 336970 - DNA, 502 bp, Homo sapiens
ggcttttcaaaagcaggagtgggacagcgagagtgaatgactgtggagagcagtgaggaaaatggagacaraatgacttctggaatctgattctgagagagaggatgggagatgatggcaagatgatggtgatggtggcaatgactgcagctaacatttgccccaggcttacagggtactaggcactgttctaggctctttacaaaggctgtctgacttcatctgtccacaaccttctggggcagatattactattattcccacaccacccccccacaccaccaccattttacattgcagaaaacagtgcagagaggttttgtaacttgcccagagtcctataggtaatggatgctggaggcagtattccaacccaagcagtccaagtccaaacccattcccttcaccactgtgctatagtgctcctcatagaaaaacgtatccacataatgacaagggcagagaagacctttgcccaatttgatagagaaaaccagttctc

SEQ ID NO: 336971 - DNA, 502 bp, Homo sapiens
ggcttttcaaaagcaggagtgggacagcgagagtgaatgactgtggagagcagtgaggaaaatggagacaaaatgacttctggaatctgattctgagagagaggatgggagatgatggcaagatgatggtgatggtggcaatgactgcagctaacatttgccccaggcttacagggtactaggcactgttctaggctctttacaaaggctgtctgacttcatctgtccacaaccttctggggcagatattactattattcccacaccaccccccsacaccaccaccattttacattgcagaaaacagtgcagagaggttttgtaacttgcccagagtcctataggtaatggatgctggaggcagtattccaacccaagcagtccaagtccaaacccattcccttcaccactgtgctatagtgctcctcatagaaaaacgtatccacataatgacaagggcagagaagacctttgcccaatttgatagagaaaaccagttctc

SEQ ID NO: 336972 - DNA, 714 bp, Homo sapiens
tgtgcataggttatatgcaaatactatgacattttatatcagcgacctgaacatccgtgcattttggcatctgagggaggtcctggaaccaatttcccatagataccaagggatgactgtattggttcagggaaaggtgacttaaaattaatcaggcttctatactccaggactactcagscatttttagataatagaataatgtgttctgagaattgccagatggagcctgtacaaagaagtgtctcctaagcaaatccaaaaaactgaactcttttttttctcacagaaaattaactgtgtttctccaaatactagtgttgaatggaatataatttagaaatgatagcatagacgtatagtgagtttaggactagaaatagcactataacaagtcaaatcttaccatgcgaaggtaagaaagtgtcttaattacaatcctgggccattctgcctttgcaggggcctcatttagtcatcactcagacttgcatcactgttcgggcccctccagcccagtgtctgcatttctcttgacaggtggcttccttctgaggccatgtgtaacacacatggcaggcattctttctccctagtaggaagtggctgcacctgttaacagcctgggcccaattactctcaaaaatttggacttcagctgccacactaaagcagcagtccttgagcctgttcagcccatactgatttgatttc

SEQ ID NO: 336973 - DNA, 604 bp, Homo sapiens
tcttgtctcttgagaacacgaatgaatgtaataagcctgactgaggggtgaaatgagctttgcaacaatgactaagaacaaagctaagtattacataggttgggtgtgtatcaagtgataattgaatgggcttggagttggctaaacctgggtttgaagctcaagtctaccactccattagctgtttaacttaagacaagttacttagtttttcacactttgccttcttctctgttaaattgagataaacataggtcccttgcatgggagttgtaaggatcaagtacaataatggatatgaaatacttagcataggtctggcacataagaaatgctctgcatatttctaatcttaacattttctattaaatattacattttacctgacatttaaccagtagctaatgagccataaaagttctagttagttaataattaatgagctctgatcgtttttgagctatgaggattaccaccactctactaccaccatcttcatcaactttagattcctcatatgagaccatcagctgactgtstggaactcagccagattgaccttgttagaagatccaggaggagccattgagtcctggatcagaat

SEQ ID NO: 336974 - DNA, 556 bp, Homo sapiens
agaccctttgcaagttatataaacccaactcaacctgccttaagagccttaagagaatgagaacgagtttattagctcatgtaactgaaaagtctaatagtattgttgattcaggcgcggctggatccaggggcacaagcaatgtcattaggggctttgtgtctctctgcttctctcaggcaacctctcctcagggaaggtaatgcgaacaccagcagccggaggctcacatcctactagcttatggtagaaagattgtgggtttcccccaccccacccccgctgcttcagtaatgcctataaaaactttgcacagaccaygctggcccaagttaagctacaggatcattgctgagccaataaccatggccagaaggatagggttccctgagaggccagatctggattatgaacccatcccaaggccagttagaaatggagtcaaccccatccaaagcctgaggaacaggataattacccacatgaaagagtagttccgtgaagagaaggaagcaaaagaaacaacacacaacaggcctaagtacgaagcattaat

SEQ ID NO: 336975 - DNA, 514 bp, Homo sapiens
atgggactaatagtagtgcctacatcattgggttataaatattatgttatccttcttgcaaagtgcttcccttgattcctggcatgtagtaagtacctaatccatggtaactattatcatctcagaacaattgagctaatcaagagatccgtgaatgaattatcttgttccctttgtagaaaaagaaaatggcattttacttttcataaagagggagaagcctttgacgtgagtgtgtgtgtgtgtgtgtgtgtgtgtgtgtgtgtgtgtgtgttttgccccttgtgcttctggtatgcatgagaaatttcacatttaggctactggctcttcatgaggacgtgacttcccattggttcatgtatcctgatagttatgggtacgtgaaaaccaacaaataatgcttaaaggccacagataawgaaagtttaaccacaactcaaagagaaaaatgctggctttagtttaacattatttgtcatggaaataattcaagatttagagtcatacagac

SEQ ID NO: 336976 - DNA, 645 bp, Homo sapiens
gccagtggctatcaatccaaatcccctacaacaagttatgtcattagtcagaatcaatacattatggagacaattttctcttttgtctcttggcccagggaattttccaagttgagtttcatcaccagattgcaaggtcctcgcattacaaagtggctgacaggaatcacaaccactaactccctcatgtgctcttctggaggggcaggggaaaagtttaaggaataaatccaattagacatgggagtctccaaataacaagtccaaggcctttgttgkcaggtttatgttgaacttgtgtatcccgttcctgttgttgatatccctttcaagggcatcagtttggactctcagatatggaagcaacacagtgaagaggtccttagtgccaggtccaccccaggaattacctggtcaccttggcttagccaaggcacagggaaaatgactcattgataatggccaacttctagcctttggcctctgcatctcatttttctcctccctgataccagacagccccatttagctgcaagatcttcatgtacctgccctcttctttaatccctaaagaatggccatggcatttttaacataaaggcagttctgtaaaattcttcccgagtgccagcaggtgcacaatac

SEQ ID NO: 336977 - DNA, 636 bp, Homo sapiens
tattacaatgaagggtccctctttcatgctggagagtggagtctcaaagaaaagtatgcatctgtgcactgaaaaatgtgaaaactatagagttttccaaccaagcatcaagcttcattttgactcccaaaaataaaccaggatcagcagagctcaaggtttgggtaggtcacttgttagaaaattcagagcagggtgggaatctggaagggcaagggaagcttagtggtcatgcaagttgaggaagactccagaaagaaagtaggaaatgcatgttctggcaaggagaagtcagtcaaccttcaaagagaggagaaatataattttagagcaaatagagagctccctggcccttccactcagcraagtcactatactatcagtggccaaaagattaagtcaaaaagatgaagccatttgaaatgtgtttagctttctattaattcagttttttatagtgagtctataaaaagaaatttctgaagaatggaaaccattttcccaggctcattactgtcttaaatacaccttctcaataccaggcagccaaaaaaaaatttttttttaaacaaagctacaagataagctagcttgggagttgagaaagttgaaaagtacaccagcacctcggaggct

SEQ ID NO: 336978 - DNA, 636 bp, Homo sapiens
tattacaatgaagggtccctctttcatgctggagagtggagtctcaaagaaaagtatgcatctgtgcactgaaaaatgtgaaaactatagagttttccaaccaagcatcaagcttcattttgactcccaaaaataaaccaggatcagcagagctcaaggtttgggtaggtcacttgttagaaaattcagagcagggtgggaatctggaagggcaagggaagcttagtggtcatgcaagttgaggaagactccagaaagaaagtaggaaatgcatgttctggcaaggagaagtcagtcaaccttcaaagagaggagaaatataattttagagcaaatagagagctccctggcccttccactcagcaaagtcactatactatcagtggccaaaagattaagtcaaaaagatgaagccatttgaaatgtgtttagctttctattaattcagttttttatagtgagtctataaaaagaaatttctgaagaatggaaaccattttcccaggctcattactgtcttaaatacaccttctcaataccaggcagccaaaaaaaaattttyttttaaacaaagctacaagataagctagcttgggagttgagaaagttgaaaagtacaccagcacctcggaggct

SEQ ID NO: 336979 - DNA, 626 bp, Homo sapiens
cctggaagtaaaacatctcagcccttcactcagaggccacagagmctgttctgctttctcagggagttgccaggactcaagtgagcagcaggacagggtccggaagcatgggaaagagacagccacaggtccctcgggaaggcgcaccgtggagtcgccccagccacgctgggagaaaggccactctgtgcagggatctgacatcaggctctccctggcaagcccataggcaggataaccactcccagaaatggcccagagagtcctgtggcccaacaccatgataaggaaatcatctagtttcatacatgagtcagaatttatgagctcctcattcaacccaaattgaagctacaattccaccattcctcctggtagaactctgccttgaattaagacagaacctgaaaaatcaggcccggtatttttgttttctttaccatctctcagcttgccagggtgatcacatcaaaatcatgcagaacacacaaccaggcaatgattctattgtaaatgtatacacatatatgtctataaaaaagcagatttcgtcactcctagtgataagcctgcttcaagttttgttttttttgttgttgtttgttttgcaatacaagttctaaact

SEQ ID NO: 336980 - DNA, 505 bp, Homo sapiens
ggggcgctatttaaaagataccccaaaataactgttcaatgactgcttcccaaaaaattacaactaagcatttctttagcagtggatagcagcattccctcaacattggccaccctgccatgtgcggggctttctcctttaacagcacatagctgcgggtaccaacgtcaaagacaggaaagagtaaaccaaaaggtgtgtacctttgtgtgattccatgtgtacttgtgtgtaaactagaatccaaataaattatttccggaatgcgaaaccgagaaggagctgggtctcccaaatttgggaagattgtaacaactcargcatttcacagagcactgtgaaccactgttttactgaaacaatattggctgacttaatgtgagtgtcagattagcacacagttgcatcaactatataattaagagcatatgtaaatatacccccaaaacccaggttttccaacatttacaaggcacagagcctgaaaaaaaatccataagaccca

SEQ ID NO: 336981 - DNA, 616 bp, Homo sapiens
tttgttgggtttatctcccaccctctagaacatgtgtctcatgaaggccttcaactcacttgccacatcttgttcatctgtctgatgaatgtgaagtcattaatatagttggccaatgtgatatttgcagggatgtctagattgtccaggtctcttcagcctacatatgacagagagtgagaaacataaccctggagcactactgttaatgratatactgcttgtcccatatgaatgtgaattgttcctgatcctcctttctaatggcaatggagaaaagagtatttgccagattaatagctacatactagggctgaggctatcttaaagtgctctagcaaagacattatactctgtccagtgcagcagctggaactggggctactcttttagtgtgtgattgcccatattcatcccaaagggtgtctggtttctgtaggagctgggctgatgcaattatctagggatgcaatggggaccaccatccttttatcctttagctctttaaggatggcattactctctcctcccaacccaggatgtgatctttgtttagatttgctctcttggccagaggaaatgtgggacttcagaggctgctgtttggctttttccc

SEQ ID NO: 336982 - DNA, 616 bp, Homo sapiens
tttgttgggtttatctcccaccctctagaacatgtgtctcatgaaggccttcaactcacttgccacatcttgttcatctgtctgatgaatgtgaagtcattaatatagttggccaatgtgatatttgcagggatgtctagattgtccaggtctcttcagcctacatatgacagagagtgagaaacataaccctggagcactactgttaatggatatactgcttgtcccatatgaatgtgaattgttcctgatcctcctttctaatggcaatggagaaaagagtatttgccagattaatagctacatactagggctgaggctatcttaaagtgctctagcaaagacattatactctgtccagtgcagcagctggaactggggctactcttttagtgtgtgattgcccatattcatcccaaagggtgtctggtttctgtagragctgggctgatgcaattatctagggatgcaatggggaccaccatccttttatcctttagctctttaaggatggcattactctctcctcccaacccaggatgtgatctttgtttagatttgctctcttggccagaggaaatgtgggacttcagaggctgctgtttggctttttccc

SEQ ID NO: 336983 - DNA, 376 bp, Homo sapiens
gaggcagcctcctttcatggaggtcagttccctcctagggaggcagctgcagaccttcaacagccaacacacccagcacctggagcaatgagtgctagggtcccaaaggagcattgggagggcctactaaagtatccactacagtccaccccttgtgctgctcaattacctctctcatggagcaagttccccccaattctgggattcagaatggtctccttttcaagggaaacatagaaagaagaggaatgagtcaaacgataggcctgctgctatggctggtctcaaggcwacaactgacacacatcatctccctccattctaggctccctccaccctcaaataacatttctaatcccatcactttgggaggcca

SEQ ID NO: 336984 - DNA, 453 bp, Homo sapiens
ggcctgctgctatggctggtctcaaggctacaactgacacacatcatctccctccattctaggctccctccaccctcaaataacatttctaatcccatcactttgggaggccaaggcaggtggatcacttgaggtcaggagtttgagaccagcctgaccatggtgaaaccccatttctactaaaaatataaaattagccagacatggtggcacatgcttgtaatcccagcttcttgggaggctgaggcaggagaatcacttgaacctgggaggcagagattgcaatgagccgagattgcaccattgcactctagtctgggcaacaagagcaaaactccrtctcaaaaaaaaaaaaagaaaaaaaatttctgcaggtcagagttgcccacttacctagtgagtgactcagaatgtcatccatgagaagtttgagcctctggagaccatgctctc

SEQ ID NO: 336985 - DNA, 582 bp, Homo sapiens
acttacctagtgagtgactcagaatgtcatccatgagaagtttgagcctctggagaccatgctctcagactgtggctgctgcacttttccagttgccatcagaattgggcagggaggtaccaagaaatcacccccatttatcacctgggagccaatacattcctccttctccgttacataacagcaaacccacgtgctcccagtgatcaggggcaaccatgcaggtcaggatgatgacacctttatttggctggtggtctcttagcacaagaagcctagaatagtctcacagtagcaatagcttaaagtttaaagggattcttgctatgtctcttggtggaagtatttccttctctagaaaccaggacctctaggcccacctagagtttcagagaaaagaagcttaagttcctcacaggggtcactgggaatgaagaccatggggccactcctgcttccatgccatgttttccagccccatgtgttctatctattgggaacgtagcacyacataatggtcattgattagagggcatactgagtcctggaggatggcaccttaatcactctataaggccagca

SEQ ID NO: 336986 - DNA, 584 bp, Homo sapiens
atttctgtttcagacttggtraaaattattggagctaccatccaacagctccttgcttcattttcctcgtattttaaaatgtataccatagttctggtcttcctacatcatctgaaaaatgatggaaataagtgaatgaataaatgtttataaagtatagcaagatctctggagaaagatgttatgtaaataaggtttatagtaatcctggcagccacttgcagtctattttacatattttccttcctctcgtttctttaattatttactgagccacaaatatctaaaatatcataaaatcattgaatatcaatctggaagtgaccttatccatcttaatatccaaccttccgtggttccgattacaaatatgactcatgggaaagttgtgatttgctgagaattagccagcttctaagtcacagagtgagaatttgagtatattttggcttcaggttcagtgttttttattttttattttataaaacatggtcataaatcctgccctcaagtagcttatagttgggaagctaccttagacagattcatttttttttcttcaacttttattttaagttcagggg

SEQ ID NO: 336987 - DNA, 584 bp, Homo sapiens
atttctgtttcagacttggtaaaaattattggagctaccatccaacagctccttgcttcattttcctcgtattttaaaatgtataccrtagttctggtcttcctacatcatctgaaaaatgatggaaataagtgaatgaataaatgtttataaagtatagcaagatctctggagaaagatgttatgtaaataaggtttatagtaatcctggcagccacttgcagtctattttacatattttccttcctctcgtttctttaattatttactgagccacaaatatctaaaatatcataaaatcattgaatatcaatctggaagtgaccttatccatcttaatatccaaccttccgtggttccgattacaaatatgactcatgggaaagttgtgatttgctgagaattagccagcttctaagtcacagagtgagaatttgagtatattttggcttcaggttcagtgttttttattttttattttataaaacatggtcataaatcctgccctcaagtagcttatagttgggaagctaccttagacagattcatttttttttcttcaacttttattttaagttcagggg

SEQ ID NO: 336988 - DNA, 584 bp, Homo sapiens
atttctgtttcagacttggtaaaaattattggagctaccatccaacagctccttgcttcattttcctcgtattttaaaatgtataccatagttctggtcttcctacwtcatctgaaaaatgatggaaataagtgaatgaataaatgtttataaagtatagcaagatctctggagaaagatgttatgtaaataaggtttatagtaatcctggcagccacttgcagtctattttacatattttccttcctctcgtttctttaattatttactgagccacaaatatctaaaatatcataaaatcattgaatatcaatctggaagtgaccttatccatcttaatatccaaccttccgtggttccgattacaaatatgactcatgggaaagttgtgatttgctgagaattagccagcttctaagtcacagagtgagaatttgagtatattttggcttcaggttcagtgttttttattttttattttataaaacatggtcataaatcctgccctcaagtagcttatagttgggaagctaccttagacagattcatttttttttcttcaacttttattttaagttcagggg

SEQ ID NO: 336989 - DNA, 584 bp, Homo sapiens
atttctgtttcagacttggtaaaaattattggagctaccatccaacagctccttgcttcattttcctcgtattttaaaatgtataccatagttctggtcttcctacatcatctgaaaaatgatggaaataagtgaatgaataaatgtttataaagtatagcaagatctctggagaaagatgttatgtaaataaggtttatagtaatcctggcagccacttgcagtctattttacatattttccttcctctcgtttctttaattatttactgagccacaaatatctaaaatmtcataaaatcattgaatatcaatctggaagtgaccttatccatcttaatatccaaccttccgtggttccgattacaaatatgactcatgggaaagttgtgatttgctgagaattagccagcttctaagtcacagagtgagaatttgagtatattttggcttcaggttcagtgttttttattttttattttataaaacatggtcataaatcctgccctcaagtagcttatagttgggaagctaccttagacagattcatttttttttcttcaacttttattttaagttcagggg

SEQ ID NO: 336990 - DNA, 463 bp, Homo sapiens
aagctctgattctttaaataaatatccatgtaaacaaggggtttcagagactatagacattttacatttgtcctcatatgccggaggcgcttgggaatcarcatgattcagatacatgacaacgcaaatggcttgcagacaactctcccacatttacaagtagtttaaatttctgaccctgtctctttccagtatgcctgcaattgaaagacattgtgtattccatgtaaataacaggaagatgggcacatgagtctcccgttccgtaagctaagtggatttggctttctggataagagagccatgggtggccttgctcctatactcaccagtgagtaaacatcagaagcaacagcagcagcaaggcagcctcaccaggaagccttacactgagagctaatggctttcctctctaccagttcacttggcctaggggtcaacttctagagcctaaagctgcatt

SEQ ID NO: 336991 - DNA, 572 bp, Homo sapiens
agacacatttctacaccagcacatccttcctctgagtttaaaataccctatttatatgtggattgttatattacataataataagaaaggtctgttaagtcaaaactttacaagatcatatgtaaygttgttttaaacagaaagcttaaaatgagcaatgttcagtataatccaagaaccctcctcaatgtcaatctgggatgaaaaattaaaagccagatttagccagcttggggccaagcactcatgttcagattctacaactgtgctgtaagaaaacagcctgtctctcttatcccaacaaaatctactagctccagcacagaatccaagtcctctgtcctttcaagccaagaaaaggggcagtccttaccaccacaatggaccagcctggaaatattaaattgactcagcccatgtcttcttagatacaacttaacaactctgagtttacaaaactcagccaaatggcatcaggcttcagcataaacttttgctaactagcccacatagttcccatatgctacgcgatgttgtttgagccaactcagtaccttataattataaacaca

SEQ ID NO: 336992 - DNA, 614 bp, Homo sapiens
cttagcttttccactaatggacagagttaccattttatgcatgtatgcattctctgcctctaagacattttccatatttgcggtgtttgccagatttcaaacaggtgatcctagcraggcacacagacgaagaaaatgctgtccctgtctccttgctcacagcatgtgccatgtacactcagcagccccataccgttgaccttttctgtgaagcatcaaacaaagtcttccatggtgcaggccttctgttatccattcattaaacaaatactcatcgatacctactaggtgttaggcattattctagatgccaaggataaacaaagataaaaatccctgcccacctgtagcagagtagtgggagttggtgggggattggaaatatagacaatcaacaagtaaatgagtcaaatatatggcatcctagttgatgaagagtgttaggaagaaaattaagtctggaagggggttaagaagtgctggttttgggaggagtatctcactaaagggacattaaaatccaaaggacgtctgaccccaaacttcacactgaaatatacagttccagttaatagatgtgaattaactgatgacgatgacgtccccattagttt

SEQ ID NO: 336993 - DNA, 412 bp, Homo sapiens
acaggaggtctctggggtcccaaaacaaacgcagaaccatgctgacagttgggtctgagttctagggcatgttctgtcctctcacagggccatgtgggcagccagccctcatcctttttatagtccgcttgcttttaccggccacagcatacccatacaaccaaaaaatctcctgtgccaaaggatgcttggaaactccagcaaggccactgcaagactcaagttccaagtattgctcattgccagtgacaattagaacaatctgaaaatgttcctcccagaaaaatacactcttttttgttgtaacaggggtgtaaaygccagccaatctcttttggcacctagagctataagaaggggtttcactgtgccacctctcgacaaaaacgccctcaatgagcatcctccaagg

SEQ ID NO: 336994 - DNA, 533 bp, Homo sapiens
gtttatagattttaaaggataaaaaataaaatctctgtatagctttctccccaaatgaaactcaaaaatagatgctgcttccctaatccttctgatttgaaaattatttggcatttttagaaattaatttttccaggcaattaaattagccagtaatttgatatcaccatcttatttcattatagagaacacatgctgaaatgacacacaacctcattttcatgtattatttttgcaaatttagtactcataaataggtgttggatcgacagtgccagcaactagaatcttccctgctggctagacgggagcctgaggagtggttatgtgagctggagcccaggcctgtcccagctgagattaccagctgggagagcaaaaccaagtcccacaacgtacagtccttttttctctgctccagaatgctagttggcccacccaaytgaacatgataaatggtggcaccactggatggaatccaccccctcacttcccaatggccacctggtattttcatgatggctctgtccaaa

SEQ ID NO: 336995 - DNA, 607 bp, Homo sapiens
acaattatttctcatggttctggagggtggaagtctgagatcagggtgccagcatggtccgtgtctagtgagggctccttttttggtttacagatggctgccttcttgctgtgtcctcacatagtggtggtgagagaagcactctctggcttctttttataagaaaactaatcctaccacgaggactccactcacatgattccctgtaaacctcattatctccccaaagccccatctccaaataccatcgcattgggaattagggcttcaacataygaatttaggagtgggtagtgggacacaaatattcagtccataacagtgagtccattacaaggtctgcagaagtggatcactgttgctgagggcaaaagaggccttagagaagaccatgaaagcctgagggaaattcatcaccagctaaaggctaagtgcagaagccagagggcctctggcagcaaatcaagagacactcatatcctgcagatgcccaggacagatccagatgtccagggccctgattggctgaaatgacaccttgagagatggaatgacaatgtcttcacttgaatgtcttgaatatccagagccccttgaacattctggg

SEQ ID NO: 336996 - DNA, 624 bp, Homo sapiens
ggagtcatcagtaataaggccatgcaccagaatcccagaaggtgctcatgaaatgtaaactttcctaggcctcagacctaatggataaaatcttcaggcrtaggacctgggcatctgcatttttaaaagccaacaggtcattctgtccattcaaggctgataccagtaggccaccacgttgctaataggggtatacaggatcttgagtgaggttaaattctttatggatgttgacattgtttcaatgcaccttggaatgtcactgttttgctgacaaatgatgatgattaagaaattctttgtttagatcttgtgactgtttttctttcatgcagaaaagttgtgcagcgaccaacctaagaaatagctacagagaacttggaaaaggtctggggaatgcccagaatttgtaatacttgtctatggggagagactggagggggcagagtgtccagtgttggaaatccttcaaagtattatttatccagaatgaaggattcacctagaaagcttggtgtgaaaggctaggatctgtctgggtgctcagcaacatggcagaactagagatgcaactggtgcacctgaaataacctaactcttcacactgcatccttgattacaagc

SEQ ID NO: 336997 - DNA, 520 bp, Homo sapiens
atttaatttaattgtaaagagtaatcttatttgttggttgtaatggaaatgtatttcctcattattgactgtagtcaactgcaaaccctttgctaatggtgggcctatgctttctttattttttaaaaattgtttttgtagaaatggggatgggagtggtctccctatgttgcccaggctagtctcaaatttctggcctcaatccatcttcccacctcaacctcccaaagtcctggkattacaggtctgagccataacaccgagcacttatgttttgtgaactgaacttctttgatggttaactaatgtccttaaggtattttaatcaagacagtatattcgatataaataataacttgataaataacttgcttattttttcttaggtgtagacattctgctaattagatatgagcctaatatggtttttacccagcatctgtggtaatttgttctcaacatagactttttgataaacaaaagcatttggtcgaacattttttgttttaaaaagatatga

SEQ ID NO: 336998 - DNA, 607 bp, Homo sapiens
cgaccaaaacaggcagatgttgccttttcaattagcaagaccctagatctgtttcagaagcccatctgtatgcgtaattgtaacctcagtgtcattcaggactgctctgtactgcctcctaggttgttttcttctttcctttctccatgtgagcctttaaaccgggtgttattattctctgcaaatggccaaactcatatatgtttttgtcattttttatgcagatttcagcaacgtccctgatatcacaacaggtctgaaaaggagtcagacagatggcactctggatcaggtttcccacagggagaaaatggagcagacattcagggtaagatactggcccaaatcgcaaaccaagaaccaggcaggcgagtgttagttcccacctttacctaaggtggggaaaggagatggagttacctatctctaggtccagcagttgatacaaacatacatatatatgttaaggatacagcttccttatttatgtatttttttgaagtgaagtactactaatcggaaccatttgctctagccagaactcctccatgacttctggtatgccatcaaagagcrgtgcacactctgctgttcatatattgtgctg

SEQ ID NO: 336999 - DNA, 546 bp, Homo sapiens
agatgtggccattaaaaaaaaaaacaactttgtgatgtagttgaaggtctggattatattcagctttcragtaggacatggggcagaatccctagcactgtaaaaataaaaccacttttcatcacaaagctcaagggaaaagaatgtaaggtgtgttcatgttaaattaaaattacactgatgtcatggtgcaaacaggcagctccaaggctgcgggactggctggttttcatgctgataaaagcatgagccatcagtcttgattgatgactctgtccacacgtggcacctatgtgctgtgagagatacaagcactctttgtgtaagcaaaagcatagcattgcttgagttttattatagatatagtttacctagcaccaccttggatctcatagactcacatactcaaggtgccctgtttgatctttctgtggtcacaagatattgcagtcccggcccactgcaaattctcccttaaaatgggactttccctggcagcgaagcccagtctccactgttgaaagaatagccacttgctggattgca

SEQ ID NO: 337000 - DNA, 459 bp, Homo sapiens
agtggggctccataatctctatttgtctgtggccttgccacatggtctttccagcatggtggcttcaggagagcagggcctcttaggtgccccctcagggctgccaagacgtgtgccccacagcagctttgtttctaatcgagcctcacaacattctaataaaagtgggtcacaaaggcttgtccatmttcagaagacatttagacgccaccttgtgtgagaggattgtctgagaatttgcagacatgttttaaagccacacagtaagagaggcagatgacatttcccagaagatcagccacatgttatgaatccaaaccattaggctttatacttgtcagtttctgggcacatgggaatgatgtgttttcactcacttgtagtcaggtggggccatgtgactgcttctggccaagggattgtgagcagaagcaacttgtgccaccttttgaccaaagc

SEQ ID NO: 337001 - DNA, 459 bp, Homo sapiens
agtggggctccataatctctatttgtctgtggccttgccacatggtctttccagcatggtggcttcaggagagcagggcctcttaggtgccccctcagggctgccaagacgtgtgccccacagcagctttgtttctaatcgagcctcacaacattctaataaaagtgggtcacaaaggcttgtccatcttcagaagacatttagacgccaccttgtgtgagaggattgtctgagaatttgcagacatgttttaaagccacacagtaagagaggcagatgacatttcccagaagatcagccacatgttatgaatccaaaccattaggctttatacttgtcagtttctgggcacatgggaatgatgtgtyttcactcacttgtagtcaggtggggccatgtgactgcttctggccaagggattgtgagcagaagcaacttgtgccaccttttgaccaaagc

SEQ ID NO: 337002 - DNA, 588 bp, Homo sapiens
taataataataatacactcttcattcaagattaactattgaggaggcctcatgctgaaatcaaaaggccaaagaatatagcaggtggccattgtcctgactcagagtagatttagaaatcttcttttgctgtatgaagcgaacagagatttgggggaagtttgttattggcgcataagccaagactatcttgayagcatccatatacaattattcatttccagaaatgtgtttttatttggctttgaactacatctaattttgtaaaggtgaaattcatgtgcattttgaaaccaagtggtaacacgggtgatggtacctgagtacttaggcactaaaaatatgtaaaaatatctactgaaagtgggtagctataaaatatgatgatatatttattttcagacattccataagtgggggaaatagaacaaagggcattaatagttaaaatggatcctttttttaatgtatatatatcgatttataattatagacatcaagaagtaatgaaacattacctataatgtaatctaaattacacattacaacgcaagatttctgtagagtgaatcctgtatgtttactgaac

SEQ ID NO: 337003 - DNA, 530 bp, Homo sapiens
tacttgaggccaagatgctgaatgaaaaatatctgaacagtcaattatgcggttgtttgtaattatctcaattttgagtttatataagcaatgttttgaatttaatgtcaactttggtatgcaataccctagacataaaaatgcactgacacattaagaggaaactaagaatgaagatgaaaagggtagcattaaaccagctcaaatattttctaaaactgtgacttagagtctaactttgatgaggactatcttttggaatagatagtttcaacaatgaacagactcgttctcatgatttttcaccatctgtttgcagtcacaaatctgtgaaaaaaattccactcttatgacattttcatatgaattgattgtgtcttttttttcaatagttgtatacttcagggtcacgaaaagyggtaatttaaggaagatataggatttcttcattctatatacaaagcggtaacaatgagtgttttttgatcatgtcaacatcctacaaatctaaacaaacataagggtcctta

SEQ ID NO: 337004 - DNA, 556 bp, Homo sapiens
tttatgtcaaacctgcctacctgccttgcctgactgtatcagagaagccagtgcatcttctcacctcctggcaacatcaccagtccagaggaatctcaggaactctgtttctctggatttgaaaaggcaggtgacaacttgaggtcaggagttcgagaccagcctgaccaacaggatgaaaccctgtatctactaaaaatacaaaaattagggggacatggtggtgggtgcctgtaatctcagctactygggagcctgaggcaggagaatcgcttgaacctgggagatggaggctgcagtgatccgagatggcacgcaccgctgcattccagcctgagtgatagagcgagtctccatctcaaaaaaaaaaaaaagaaagaaaagaaaagaaaagaaagaaaaagaaaaagaaaactcattccctctttcacatcatcattattgaatgaagaggacctcctggatctccatgtcctcctgacaagagcttcactctccttccatccagcaatccaggcctcactatcactctctgccataaaatattgagaaatca

SEQ ID NO: 337005 - DNA, 606 bp, Homo sapiens
gatctctataaatttattttcctctgacaagagaaagaataaaaattaaattcaaatataccagaaatgtggtgagaattcccagcatagctattgctgagttagagtatttttttccaacagctgcttaatagttacatataactttataagcaagttatatgttaaggacatggtgttacccctttgttcagtttgaagtacaggaacatttcgcattgcttagtgacattttccagatcatgctgcctttaaaaaatgcagtaacaattccctcatagttaatgtttgaaaagttctgatttaaactgagtttataagatttaagaaaaaagygttttttattaaaaatgaaaaaaattcctactgaaatgtgagaaattcttaatcaagtagaaatttgaataaaaattcaaattttattttcaaagtttattttcaactttttgttattaatattcaggtacatttaattttttcatattcatttcttttctgtttctttcgtttcaaaaacattttttatgcagtcaaaactgcctctcattcttggaatatttatcttgatctttcacagcaaacttccagtctctgtgtgctgtttta

SEQ ID NO: 337006 - DNA, 577 bp, Homo sapiens
ggttttagttggttgaatacatggtaggtgaaagaggtgaaaacaaatgcctcgtttttgagcagctttgaagagaacagacctgggttgctaaagtttgctcaacttcacagtaagaggctaataaaatagaagaaatttgggaacttttataaactraggggaaaaaaagtagagttgaagatgttcaagttacagaagaaagaaggaatggcatgaagcaatgttgaaggaatgtggagaaaatgtcaaacggacaggtctggcttaaatagtaggatcaatttattctctgagattaaagaggaagaggtttcgggattaacactgaatgtgcttgagtcgaataacttcattttttttttcttgatgcagaagagtcaaaaccaagtttaagacatgagtcttgggtacctttaacaacatattcatttatttctctaattctatcaaatacttagctatgtattttcatttccagatataattctataccagtggtactctcctgtcctttgtttgtaagttttgcataaaaattgtctgcatttagaacagttgtcctaaattatgtctg

SEQ ID NO: 337007 - DNA, 577 bp, Homo sapiens
ggttttagttggttgaatacatggtaggtgaaagaggtgaaaacaaatgcctcgtttttgagcagctttgaagagaacagacctgggttgctaaagtttgctcaacttcacagtaagaggctaataaaatagaagaaatttgggaacttttataaactaaggggaaaaaaagtagagttgaagatgttcaagttacagaagaaagaaggaatggcatgaagcaatgttgaaggaatgtggagaaaatgtcaaacggacaggtctggcttaaatagtaggatcaayttattctctgagattaaagaggaagaggtttcgggattaacactgaatgtgcttgagtcgaataacttcattttttttttcttgatgcagaagagtcaaaaccaagtttaagacatgagtcttgggtacctttaacaacatattcatttatttctctaattctatcaaatacttagctatgtattttcatttccagatataattctataccagtggtactctcctgtcctttgtttgtaagttttgcataaaaattgtctgcatttagaacagttgtcctaaattatgtctg

SEQ ID NO: 337008 - DNA, 577 bp, Homo sapiens
ggttttagttggttgaatacatggtaggtgaaagaggtgaaaacaaatgcctcgtttttgagcagctttgaagagaacagacctgggttgctaaagtttgctcaacttcacagtaagaggctaataaaatagaagaaatttgggaacttttataaactaaggggaaaaaaagtagagttgaagatgttcaagttacagaagaaagaaggaatggcatgaagcaatgttgaaggaatgtggagaaaatgtcaaacggacaggtctggcttaaatagtaggatcaatttattctctgagattaaagaggaagaggtttcgggattaacaytgaatgtgcttgagtcgaataacttcattttttttttcttgatgcagaagagtcaaaaccaagtttaagacatgagtcttgggtacctttaacaacatattcatttatttctctaattctatcaaatacttagctatgtattttcatttccagatataattctataccagtggtactctcctgtcctttgtttgtaagttttgcataaaaattgtctgcatttagaacagttgtcctaaattatgtctg

SEQ ID NO: 337009 - DNA, 519 bp, Homo sapiens
taaattatacaaatataaaaaataagtaattttataaatttattaaaaattgctttttaaaaccactttgtatgtcttctgtagtgctagttcttaatatagattccatagatgtcttaaaagatagaaaaattgtagctyatgaagacactgcagaattctctcttaaaataggtatatatagtgcaaaggattactgccattgcaatatttcacctaatcaaagattttatccaacgtgtataaacgggtatctttttagataagaaactggtcaaaatcataatagtggcatatgttgaggtcacatagtgaagttatctatgcagatcagacagtattgtggagaatacctagaatcttgagaatttacacaaatagtaataacttagatctgtatagcaaataatatacatatcagattcatttagtttatgtaatctttataatctgagaataatgagtcaagtgttatccttagtttactgattatcaaagaaaaatacagcttggagaagt

SEQ ID NO: 337010 - DNA, 519 bp, Homo sapiens
taaattatacaaatataaaaaataagtaattttataaatttattaaaaattgctttttaaaaccactttgtatgtcttctgtagtgctagttcttaatatagattccatagatgtcttaaaagatagaaaaattgtagcttatgaagwcactgcagaattctctcttaaaataggtatatatagtgcaaaggattactgccattgcaatatttcacctaatcaaagattttatccaacgtgtataaacgggtatctttttagataagaaactggtcaaaatcataatagtggcatatgttgaggtcacatagtgaagttatctatgcagatcagacagtattgtggagaatacctagaatcttgagaatttacacaaatagtaataacttagatctgtatagcaaataatatacatatcagattcatttagtttatgtaatctttataatctgagaataatgagtcaagtgttatccttagtttactgattatcaaagaaaaatacagcttggagaagt

SEQ ID NO: 337011 - DNA, 548 bp, Homo sapiens
gtttcctttccatcctatttttttggaggggcaaatggcagcatatacctcatgtgatcatataggagaacttatcacgttctcctgtatgatcatgttctgaccctgtgaatagctgataatgaattaatatgcattactgcctaagatctgagagttttctgccccaaagtagggatgcaaccctttgttccttaggatatccggtgcatatggatgaaacttacataactctagcatttgtaacaaatgtataaataaattgatcaaaatacatatatattacaaaaaagaaaaccttacatttttaaaagactcaacaataaatgtaatatgcaaaccatggtyttccccactgaatcacgttgtactactctgcttagtgtggcagatagggggaccccttgtttgtccagggacagtttaggaaaacctggaagatagcctaatttgagtgacagagatctgtccccttttatgtgagaaagcaaagatcttacagacatttgtgaataaatgtatgctaatacaagcaagagaccactacc

SEQ ID NO: 337012 - DNA, 557 bp, Homo sapiens
attgttcaatcatttttcaaaacagttgacagtttcttatgaatttaacatgtacatatttccacacaataacttgtgtacaaatgttctttattagtcaataactggaaacaactcaaatgcccatgaaagatgagtggattaacacatcttagtatatgcatacagtggaacattgctgagcaatgtaaaaagaatgaactactgatacacacaagaacataaaaggatctcagagacattaagttgagtgaaataagcttggctaaaaagagtacattctctatgatttgatttacatgaggcccttaaaagacgcaaatgtactctagagtgagagaacgcaattcagtgtttgtttgaggatttggatcaggattgactgacaatgggcaagagagacattgtgaggtgttagaaacattctttattttgattgtgacagtagttaatgtggatacataaacttacraaaagatgataaattcaaaataggagcatgttattgtatgcaaattattccccaataaaattgatttttgaaaagcctagaaaag

SEQ ID NO: 337013 - DNA, 573 bp, Homo sapiens
ccttactgtgttgtgacatatcagtaattatgactatgtggatttatcaaactcacatattagtgataatcaaattagatttttataaaactacatgatgattacaagaataacctaaaacaaaactatatttgytttgaaagtttaaaatagagactgaagaaaatatactatatagatactaacttgaaaaaaatttatatatgtagtaatactaatgccagtaagaaaaaaatgtaaaacaatgcatcaaagggttcacaatacagtaaaagacgtagagtccactgagaagccatttcaattataaacctaacattactacctttagatttctaaaggacttgcatacctaaacccttcgggggaagcaggaatttagtaaaatagaaaagatctaacataaatttaacaagtttcttctcataggtatacatataaaatcctgtctggattgacatctttttcagatacacaaaaactatttatgaaaactgaccaccagctgggttccaaaagatcacaaacaatttcaaagaattggtatcttacagaaccaatgtttttttacca

SEQ ID NO: 337014 - DNA, 583 bp, Homo sapiens
acatacatgtttgacattctcaaaagtaagaacatagaagtacataatatatgcaggataaagcaaataacagtttatgtgaagattgttagaagccaaggttttcatggaagttattagtatgaagtcaaagtagtacattaaaatccagtaatgttaattggatttggaagtaacagtatgaaattttttctctaaaaatgtgtgcaggaatctcttgcttaagatcagtaatctattcccaaaaatagattttgagagcacatttctgttctaaatgggaacaattatagtgaatggaaggtaaaccaaaacatagctatttcctacaaaataattgatacctaataatgcctgtagaaaagcatagaaaagtgacaaactctcttgataaaatctaaaatgtatattgtttcctaatcagcaattattgatgttgctaacatacagttgctttgtatctagttacatggaccgtgtatatgctgtatgagaaattgtcactttgtggtatagcatagcaaataacacmgcaatcaaaaagttaaaagtcaaaattaaaataaataaaagacccataata

SEQ ID NO: 337015 - DNA, 598 bp, Homo sapiens
aaatacaacatcaattgtttattttatattgtcatgattatcccagcttttaaatataaatatgtaagtaaatactttggacactggttctcaaagtttagtcgaataaragtcaatgaactaactgtcagaaatgcaggtaactgtcccccacctctccatggtttcttgggtggatcaagaacctacattttaacagattatagttttcctgtctaatttttgagcacaaaatgaacatatttgccttaaaattgaaatcttatttaatctgaaaagtatttttcacttctatttttaataatcgaagttattctatgtaagtgatttttgtaccatatattgagaaacataatctaatctcattttttaattcattataacagagcctcctaaaaataaaagtcaattattaatatgaaatgtgttgttccctattagataatgaagttggctgtgaatgttgagtttaccctttcactaccatttatggtatgatttgagtatatcacttaatctctgtaggtctatgttagaaaaatatttatattattccattactttctgaagtatatgggatgattcctgatacaccata

SEQ ID NO: 337016 - DNA, 563 bp, Homo sapiens
aataaaatgaatatttgaataaaaagaaacaaatttggggtcaaaggtcaaattttgaatatgctgatttgaaagagtctgaatggtgtttaggtggagataccagaaggtttgatgtacaattctaaaattttagaacaataaytgggtctttaaatatagatttgggaggaagcatcattctgataaatgtcatttgaagcctggtgtgcttattaattcttagggtattgatgtatcacaagagaagagcaaacatcagtaccaagggaaagccaacattcatcattagctgtgccctgcatttccctctttgattttgtattatcatgcccttttcctatccaaaggattcgcttatatttttgtttatagtataaggaatttttttttttttgaaacggagtctcactcttgtcacccaggctggagtgcaatggtgtgatcttggctcactgcaacctccacctcctgggttcaagcgattctcctgcctcagcctcccgagtagctgggattacaggtgtccaccaccacgcccagctgattttgtattttaatag

SEQ ID NO: 337017 - DNA, 589 bp, Homo sapiens
aaggaaaagtacaaaggcttatggaagtgcatatccaggatgtttataaaccaagggaggtcgaggcataaaatttctgaaagcaagaatgcagtgttcctacatttttactaatattccaagttctgaaaacgtgtacttaagtagcagcttttcctgagtttattcaatttattgcattatcagtgtagtatgaatgggagtgtgtgatgatttccttcaaatataaaaggaaatttcttaatgctgtgttttcttaaggtaaaaaaaacaaaaaaaagacttttcgttttgttaaaagagttccaggcayattttgtagcaaagccaccaattggcatgatgtaaattgtaaggacaatgtaccttaggtaatgttaaactcaagttttttatagatacttcatagaaatgcttttttaaaatgggactcaatgaaggggaggttatcagggcgtgtgaggaagccagctgttcattgaaaagtaaaagcatatgcactgtgcattccaaagtatactaatggataaaaactgcttcaaagttctccacacaagtatctaagtggctttgaaaagttaagtagatt

SEQ ID NO: 337018 - DNA, 419 bp, Homo sapiens
tagtttaagacacttcaaatgattgacaaaatgaagaaatttggtattttttaatcatgtgcagcattaaataagttgcaataatggtcacaaatattcatctatctttgcattttaaacattacaccccaaaccatctacaaagttgaagagcatgagagcagaatgccagaatgcttagtataagaacatttccaaaatacatacaatttccacagaagcaccyagcaccagtttttgcacatggtcagacgcacacaatgttaattactctgatgtcaattatgaagaatatatttttgcccaatagattgatgtacttttaaatcaaactggaattgaaatgttttacacaatataccctttattctattcagtgctttcaccccaaaggcctatattttctggtattaatagct

SEQ ID NO: 337019 - DNA, 559 bp, Homo sapiens
attccatgatcctgattatgttgtaaatatgagattatgtttcatctttgactggaaactttgctttgcagctggatgaacccacctgaattcagtccacgaataggagggagatagttgaggaatatttgaaagagatttggctcaggggtcaaacatttgactagaaaaatgatttcttctactaattggcgttgtaaccttgcatatgtcactttatcattttgcttcagtttcctcactgtatatttgtctttgttttcttattttctttctgtaatagtttttaactcacagcgttgatgttaggattaaagagatagcatgtgtaaacaagaggcacatgattaatcttcaagaggcagtcaagtgcactagctaataacacagattttagagcaaacatacctaratatggatcctagatctgcctcttattggctctgtccctagacaagttattgaacctgtgtctcagctcgctgacctgtgaaagaggaatgacagtcatgcctaggattgttgtgcagattaaatgagtggctgtatgtgaagtact

SEQ ID NO: 337020 - DNA, 518 bp, Homo sapiens
gctgctggcccatattcaggtctcactttaacatagtttcacttctttaccaaggatttctctgtcatacgctgcccagaataaatcagggaacaccaccttctccttcataacacttatcacagtgtgattaattattaggtttgggcaaaagtaattgcagcttttgattactttcgatgacaaaaactgcaattacttttgcatcaacctaatacactcctttaagccaagtcccatagtctcttttgcttarcattatgtctctggtatctaatagagtagctggcatctaattctaactcaataattacttgtcaaatgagagaataaaatgggtgctatataatctgctaaaaaagagagaaaaaaatcctaattcccagagagattatagacaatgaaaagattagaaaaaaagccctttgaatttgttattcaaagtttgttgagacagaaattctagaaatagaagattgataaatccagctggaatcaatggagcttatgctcatccc

SEQ ID NO: 337021 - DNA, 518 bp, Homo sapiens
gctgctggcccatattcaggtctcactttaacatagtttcacttctttaccaaggatttctctgtcatacgctgcccagaataaatcagggaacaccaccttctccttcataacacttatcacagtgtgattaattattaggtttgggcaaaagtaattgcagcttttgattactttcgatgacaaaaactgcaattacttttgcatcaacctaatacactcctttaagccaagtcccatagtctcttttgcttagcattatgtctctggtatctaatagagtagctggcatctaattctaactcartaattacttgtcaaatgagagaataaaatgggtgctatataatctgctaaaaaagagagaaaaaaatcctaattcccagagagattatagacaatgaaaagattagaaaaaaagccctttgaatttgttattcaaagtttgttgagacagaaattctagaaatagaagattgataaatccagctggaatcaatggagcttatgctcatccc

SEQ ID NO: 337022 - DNA, 671 bp, Homo sapiens
agctaaacaatggctcagaattaaaattttggtacaacccaaaatataagatttatgaaaactcccactttttaaagaattgtttcttgaaagcatgttaagaatgtaaacttacattttttttttgttttgttttttgtttttgagacagagtcagtgacatgatttcggctcactgtaacttctgccrctctgggttcaagtgattctcctgcctcagcctcccgagtagctgggactacaggtgcctgccaccacacctggctaatttttttgtatttttagcagagacaaggtttcactgtgttagccaggatggtctcgatctcctgaacttgtgatctgcctgcctcagcctcccaaagtgctgggattacaggcatgagccactgtgcccggcctaatgtaaacttacttttaaagtgtgaataattgttacctagttatctctttcatgttaaagaaatgtgctttttgaaaagtcatcttcattgttcaacataaattaatttataaatatctattgaatattctcctttttttctggtcatgaagaatctttcagtatgtttataatcatctattagaacaatatattttattcatgacaggtaaagcctaaataattaattttcagtatttttctggaattgctcaaatctaattaaaac

SEQ ID NO: 337023 - DNA, 347 bp, Homo sapiens
gtataacatcttttttatacccagctgtccwtctcttatggatttggatatactgttcttgatatcagttggaatagcatttttgtgttcttctgatttaacatgtttagcttaaaaaaaaaagaatatgtgaattctgtggtcaacactggtaagataaaggcatggtgggtgatgtgttggaacttcagtgtcacctggctttccagattgctccacaaaattacaagttgaattttagaacgtacagctgtttgattacgtttaacaggagagttccaccatatttttctgagcaggacacacttagatttttagagaattattggcgtggcctaatgctttac

SEQ ID NO: 337024 - DNA, 347 bp, Homo sapiens
gtataacatcttttttatacccagctgtccatctcttatggatttggatatactgttcttgatatcagttggaayagcatttttgtgttcttctgatttaacatgtttagcttaaaaaaaaaagaatatgtgaattctgtggtcaacactggtaagataaaggcatggtgggtgatgtgttggaacttcagtgtcacctggctttccagattgctccacaaaattacaagttgaattttagaacgtacagctgtttgattacgtttaacaggagagttccaccatatttttctgagcaggacacacttagatttttagagaattattggcgtggcctaatgctttac

SEQ ID NO: 337025 - DNA, 347 bp, Homo sapiens
gtataacatcttttttatacccagctgtccatctcttatggatttggatatactgttcttgatatcagttggaatagcatttttgtgttcttctgatttaacatgtttagcttaaaaaaaaaagaatatgtgaattctgtggtcaacactggtaagataaaggcatggtgggtgatgtgttggaacttcagtgtcacctggctttccagattgctccacaaaattacaagttgaattttagaacgtacagctgtttgattacgtttaacaggagagttccaccatattttkctgagcaggacacacttagatttttagagaattattggcgtggcctaatgctttac

SEQ ID NO: 337026 - DNA, 443 bp, Homo sapiens
tagaacatttctactttctcattagaatttaggggaagggggggatatatgtgaaagtaagggctaccacatgtagacaagctataatgtgggtatcttattcatttgatggaggctcacatagagcatctgccacccaaaggagatgtggttactattatgctaatacgagaaacaaagatactcatgcacagagaggttaagtaatttacccaatgcctacagcgcctagtaagtagctgagcaatgttttgatagagacccaattggccctgyggagatgggaggggtactttgtctactttagcaagaacagagagtagatgcttaataacagtacttgtttaatgactgaacaaacgcaggaaagaactacccgggaatgtaccgctctgcaattccatcagttccctccatgggagacacacggtggctccacccgc

SEQ ID NO: 337027 - DNA, 423 bp, Homo sapiens
gaattattgaccaaggagtatcattttttttaccagaaagctaagcaaaaagactggataatcaattttttggaggtgtgctgtaacrgggaaagcaataaatcttctgtaagagaagttgtatgtaaacttacagatgctcagaaagaaacaagcgtatctaggaaaagaaacaattggctgagtctcacaaaaacttgcatcttctcacttaaagtacaggttaaatgtttctgttttgggaggataaagtcttaactgtttgaagttaatttcatgaaatatagctataactttccaagaaatattgtggtagcatgacctgacaaaaagtatgggtcaaaaggatcattcttgagaattaactttttaaggaatacataacatattttaatgtgtaacatgtaccatggaaacgtagct

SEQ ID NO: 337028 - DNA, 612 bp, Homo sapiens
tatctggcaacggtgtgaatttttgtgcacatacgtgttggggtgtggatatgcatgtgtgtgagaagggatttgggcattggaggcagaaagacaggtcagagacttgtcaaagttaaataaaatatgtagagatgaatccctcaacttaatcgtcagatttcatttgggatacaagaattgcaattcggggaagagtcacagaccagatggtctttggtatgtctgagaaacaaagagaaggttttataaaraagggaaatgttatgtattgtcttgtgagaaagttctttggtattagtaaagttttggaaagctggaaagctctgattggttactgacagcagtgggtaaaattagtcatagaattgcagcaggtggttgcagcaaatattagataaaaccagtttcgggttacagcaggtagtttcagcacctggacttgcagagaattacatttttggagcaatgttgtgtgccctgagtgtttttttcccccagcttctcagctgtttcagttgggtataacaagaatgacccaatttgtatgatcgactttcacagactgttgggtgaaaaacaatgagaatccaaactaaggcaattgcagag

SEQ ID NO: 337029 - DNA, 612 bp, Homo sapiens
tatctggcaacggtgtgaatttttgtgcacatacgtgttggggtgtggatatgcatgtgtgtgagaagggatttgggcattggaggcagaaagacaggtcagagacttgtcaaagttaaataaaatatgtagagatgaatccctcaacttaatcgtcagatttcatttgggatacaagaattgcaattcggggaagagtcacagaccagatggtctttggtatgtctgagaaacaaagagaaggttttataaagaagggaaatgttatgtattgtcttgtgagaaagttctttggtattagtaaagttttggaaagctggaaagctctgattggttactgacagcagtgggtaaaattagtcatagaattgcagcaggtggttgcagcaaatattagataaaaccagtttcgggttacagcaggtagtttcagcacctggacttgcagagaattayatttttggagcaatgttgtgtgccctgagtgtttttttcccccagcttctcagctgtttcagttgggtataacaagaatgacccaatttgtatgatcgactttcacagactgttgggtgaaaaacaatgagaatccaaactaaggcaattgcagag

SEQ ID NO: 337030 - DNA, 551 bp, Homo sapiens
tgttaaataataatttaagtttggattatttaattatttgaatggagagaaatgtcacatatccaagttcattaataatacatcaaaaaatcacatgtagacaatccactgtaaaggttgacatgagatgtcttataacacattcagcaagacataaagaatcaatttttaaaattgattgtgtagactctgcatctcactttgtcagtttctcagtattgcgtatgtatgccaacacctggtatgaaacatccatctgattcatatgctccattacctaccctttatttcatgaaattacaaagtcccattgaggaacagtgagttgtccaagggtaaagagaagattttcagacctagacaaaatttatggctctaatataacaaacatctacatttmttttaagtaaaacatttatttaacacgcctataataaagttaaataaattacgtaaacttcaatctcatcacgaagcatttttatgttagtaaatctttattgcaccctagaaacttagaatatctgtaagaaagaaatagagacagctct

SEQ ID NO: 337031 - DNA, 642 bp, Homo sapiens
tttgaccttgtgcttaatttgttgcattgatgatgttttaagattgatgcattttgttttcttgcttcttgattagaatgggtgttgagagtctgtgagtgtgttcactaatgaggttaggacatgatagaaatcactttggcgatagagatacgcgctcgagtgctgtggggtactgtgtgcaaatttaagcttgcagagggggaaatgtctggaagcagatacaaaaccaccgttgattctttttccaaactgccatataatttcataatattttacaaagatatgatcctctctgtcaactcacacttatgatggagaatttgaccttagattgattttataatgtgtgtatgttacagaaatacaaatacacaaatacattaaatggtgtgttttgtatagatacatacagaygcataccttcactttcataacaatatatgtgagggtgttacggcctgtttataacagccagccttttgtaaacaggttgcttttatgaaagcatgttttctctgctcctgaataatagatgaaatgtgtccatctcaatgcaaaattagaaagtccttaaaagaaggctgaatattagaaccctgagtattcatcatacagaaatggtcatttgttggttagtag

SEQ ID NO: 337032 - DNA, 588 bp, Homo sapiens
taactggcagtaataaagattttttcaaaccaccctatttagattttgactagttggcaggtctgttaaaggtgccgttgtgcagagctgaaacttaacaacactcccttctgccttttttttttcccctcatttccagaacagtgttcttataggtaagtgaggagtccatgggggcaggggacacctmtgtaaattttgctcaaacatatgttgtgccgcttactaaaatattttcattccaccaaaactatgctacttaaataaatgtaaacccggtttcaattatgtcattacagattacatagacgtagtttgtttgactccgtgttagatgtgtggcgatgttagtgaaatttgaaggccagtctggattcttgtgctgtgcttaaagcatgctattcattgaaagaaacttttgagttagaaactatatagggaaaatttgtgatgataatatctcctgtttatagagcatctatgaaccatgagaccctagggattattctattcctttttcaattaatgactccttcctttcttgttccaggtgagctttgctgttctttaagttaggcactctctgta

SEQ ID NO: 337033 - DNA, 594 bp, Homo sapiens
cctgaaacatagatctgtttcttgtgaaaccctatttatgtttctctaaaagcagatatgctcccatctttgatttgggattttgattctgcccatacacagagcttccttccctaccttatatcacctttatctcatcccgtaatagggcaaaatttctagagttcctggcatggatcaagtactctaacaagccttcctttccttcctctttctcctgactcaccatatctcacacccagctgtgtgtgtgtgtgtgtgtgtgtgtgtgtgtgtgtgtgtgtgwgaaacatcttttttgttctaagttttgctctaaatcagtagataacatcttccatgtataatttcccactatgttccaggcatatttataatgtcttgattctgcattatagtcctgctagtccttgatattttactcatttgcagataaagagacttagcaaaaacagaagagttaagttgtgaaaaaaaggaagaaatgtagtgatagcatccagggtcacccatggagggtgccggggccctgggcacccgtgtgcatgcagggcaatgggctcatctagacgggcgaagagctgcaggaaagct

SEQ ID NO: 337034 - DNA, 563 bp, Homo sapiens
ctaagtgcacccatgccctctcttggccaggagctctgtcccctcactcctctcctacaggtgcataccccaaatcctgctcagatagttgttcccatttctcatctttttaattcatgaagaaatattagaatgacgtgttttatttctctttagaaactatttatcaattaagttacttggtatttatttccttcgcaaaaaaaaatttggatttccatttggatttgggaaaattaagacagaaaaccataaatgagaaagctagagttagaagtggcaaggaaggaaagagaagaaaaggaggtgtgggactgtgctttaacaaggaggtctcaataagaagtgagggcagaagagcccctagatgagtaacagggagtcatgatcctcacgcccgtctgctccccaccaygccgaccagtccttgctgtaagacaaatcacagagcaggaagtttaaaatgatttgggattgatttggtttgcttaaataacaaattctctaacctcagcttcatgatgcagcatttctagtgtaaattatttacaataaaagcacta

SEQ ID NO: 337035 - DNA, 624 bp, Homo sapiens
gacctgggggtgacttttgtccatgagttttaatagtttttttatgttttgcacrggacagatttttaccataaattaattttctgttagatgtcattgaagaaaacaatagtaaaatagaagttaaaggctttattcaacagctacacatcaagaagccccttaacatgagctagttctctaagttgaagcaggattggagtaggacaggtagagagaagagaggaatatgtggctgtgatctcgtccaaggttgtagttgccttcatctgtaactgctgcaaaatctgtagttgaaatgattgaaagacgatgccaatggttcatgcccttttcttgaggtggttgatgcaataccatctggcagttctagagcagttctttcaaaaactgtctttgtaagcctggtgagttgtctgttggctgcctaataccacctaagcttcaggagaggagatgatacaaaagacataaaggcagggggagcagagagagagaaaaaaaggaggcaaatgttggtctaagcaagaaaattgggttgattttgattattaaacattaaacatggggaaaatgtatgatttaaaaagtgttagttctgttctttgttataaaggattttaa

SEQ ID NO: 337036 - DNA, 624 bp, Homo sapiens
gacctgggggtgacttttgtccatgagttttaatagtttttttatgttttgcacgggacagatttttaccataaattaattttctgttagatgtcattgaagaaaacaatagtaaaatagaagttaaaggctttattcaacagctacacatcaagaagccccttaacatgagctagttctctaagttgaagcaggattggagtaggacaggtagagagaagagaggaatatgtggctgtgatctygtccaaggttgtagttgccttcatctgtaactgctgcaaaatctgtagttgaaatgattgaaagacgatgccaatggttcatgcccttttcttgaggtggttgatgcaataccatctggcagttctagagcagttctttcaaaaactgtctttgtaagcctggtgagttgtctgttggctgcctaataccacctaagcttcaggagaggagatgatacaaaagacataaaggcagggggagcagagagagagaaaaaaaggaggcaaatgttggtctaagcaagaaaattgggttgattttgattattaaacattaaacatggggaaaatgtatgatttaaaaagtgttagttctgttctttgttataaaggattttaa

SEQ ID NO: 337037 - DNA, 624 bp, Homo sapiens
gacctgggggtgacttttgtccatgagttttaatagtttttttatgttttgcacgggacagatttttaccataaattaattttctgttagatgtcattgaagaaaacaatagtaaaatagaagttaaaggctttattcaacagctacacatcaagaagccccttaacatgagctagttctctaagttgaagcaggattggagtaggacaggtagagagaagagaggaatatgtggctgtgatctcgtccaaggttgtagttgccttcatctgtaactgctgcaaaatctgtagttgaaatgattgaaagacgatgccaatggttcatgcccttttcttgaggtggttgatgcaataccatctggcagttctagagcagttctttcaaaaactgtctttgtaagcctggtgagttgtctgttggctgcctaataccacctaagcttcaggagrggagatgatacaaaagacataaaggcagggggagcagagagagagaaaaaaaggaggcaaatgttggtctaagcaagaaaattgggttgattttgattattaaacattaaacatggggaaaatgtatgatttaaaaagtgttagttctgttctttgttataaaggattttaa

SEQ ID NO: 337038 - DNA, 563 bp, Homo sapiens
aaaactccagcagagaaagctgcagatgggaaaccaaggctctgcaaatattaaggtcttgaaggcctttatatcaccttcttgttgcctttattttaaatacattttttcccacagactatggagacttgtctcttgctactytcgtaaattattccctagccccagatttctagagtagtctgtggtttatttatgcaatgaaatactacccagaagttaaaatggactatattatatatgtgcataaaatatatatatagggttaaattcatataacaattgtatgtattatttatgggtgcatacatatgtagaaaaagtgagttaaatattcatgggaatgatacacactgaccttaggataaggcttgaggaagaaggaagaggaggagtgaaagaactgtaggcaaggctttagctatgccatgaagttttaatttctttttcttaagtgtgctggcagaacgaaatgtggcagaatgcgaatatgtgcttcctctgagcaatgggtgtctgtgtatgttttataagtcctatcattacattcaattaaaaaatgg

SEQ ID NO: 337039 - DNA, 643 bp, Homo sapiens
tatggagacttgtctcttgctactctcgtaaattattccctagccccagatttctagagtagtctgtggtttatttatgcaatgaaatactacccagaagttaaaatggactatattatatatgtgcataaaatatatatatagggttaaattcatataacaattgtatgtattatttatgggtgcatacatatgtagaaaaagtgagttaaatattcatgggaatgatayacactgaccttaggataaggcttgaggaagaaggaagaggaggagtgaaagaactgtaggcaaggctttagctatgccatgaagttttaatttctttttcttaagtgtgctggcagaacgaaatgtggcagaatgcgaatatgtgcttcctctgagcaatgggtgtctgtgtatgttttataagtcctatcattacattcaattaaaaaatggaaagccattcaccattcatgtcagtctcttgtgttgttggtaaattattgtgggattctttttccctctgattcttcaaagactagctttgtattgcttgtatctgcacctgttgattgcaattacatttatccctcccctccctttgtttctccacacactctgtactttttgaattgggttgtttccatttaaggaa

SEQ ID NO: 337040 - DNA, 643 bp, Homo sapiens
tatggagacttgtctcttgctactctcgtaaattattccctagccccagatttctagagtagtctgtggtttatttatgcaatgaaatactacccagaagttaaaatggactatattatatatgtgcataaaatatatatatagggttaaattcatataacaattgtatgtattatttatgggtgcatacatatgtagaaaaagtgagttaaatattcatgggaatgatacacactgaccttaggataaggcttgaggaagaaggaagaggaggagtgaaagaactgtaggcaaggctttagctatgccatgaagttttaattwctttttcttaagtgtgctggcagaacgaaatgtggcagaatgcgaatatgtgcttcctctgagcaatgggtgtctgtgtatgttttataagtcctatcattacattcaattaaaaaatggaaagccattcaccattcatgtcagtctcttgtgttgttggtaaattattgtgggattctttttccctctgattcttcaaagactagctttgtattgcttgtatctgcacctgttgattgcaattacatttatccctcccctccctttgtttctccacacactctgtactttttgaattgggttgtttccatttaaggaa

SEQ ID NO: 337041 - DNA, 574 bp, Homo sapiens
cagcttaaaaacagctattactgtgccatttcttttttgagacggagtctcactctgcaacacaggctggagtgcactggtgcgatttcggctcactgcaacctccacctcccgggttcaagcacttctcctgcctcagcctcccgagtagctggaattacaggcgcccgccaccacgcccagctaatttttgtatatttagtagagacggggtttcaccatgttggcaaagctggtctcaaactcctgayctgaggtgatctgcccgcctcgacctcccaaaatgctgggattacaggtgtgagccaccacgcctggcctactatgccacttctaatagaaaagaacttttataattatgagtatttagactgagtaaaaaccttacttatgagcaagataagcaactgttatggatgtgcattacaagcatcaccatctagattttcccttacagaaagatggagtaggtgtttccctattcttcctgctaaatatattttaaagctctggaccttacatatgtaaaaaataaataaataattaaattttgaaaagaaggcagaccagccag

SEQ ID NO: 337042 - DNA, 630 bp, Homo sapiens
aggtaaggtgtttctgtttttcagtgaattgcttaatttatttatagaaatatttttcaaaagttatacattcaccctagagtgttcttatattcaccctggaatctagaagagctgggactttgtcttgtttctaagtcctgaaaacttggcacgtaataagtgctcagaacgttctctttttgagctaacttttattgactatatttgttgtaatttacatattgggaattattgttaaccatcatatttgttcttttttaagtactttttttttaaaattaacctcaacttcccaggtttttattcttacttctcttccacctcattmtattttttctcctgtctgtcgtttggagtgttgtttgtaatgtaaacagaagaaaaatagggaaacaagctaaacatccatgagtatggaaatggttctgaaactctttttactctggaaaatgatgtcaccattttaaagaatgaagtgattttataacttggaataaatcctaatgcaaaataaagagaaaacccagtactacttgtgtgtgggcagaatcctataataactagtattatgggaaaattacaaatattttgtttttgctataaccctgtagaataatttttgaaatt

SEQ ID NO: 337043 - DNA, 512 bp, Homo sapiens
gggaaaacatctcacataattgaaagtctagaagtaggagtcatatgacctgccactcagtgattctgttatggacctgaattatatctttccattctgccatcctcagtgtacactttatcttcagactgtctcctcttgtgatcacaagaatgctgagagtggcaatcagggcgacatgatttcttgtccatttgacagaaaagagaggaaaacctctccccaaccatagaatgtaagtcctttcagtttcttggaccacttttgagcacatttmcctctagaccaatgaaacttataagaagaatactatttactgattgtctcagtgtaatcatatgaaagtaggattgatttgggaggactcaactgcattgtctgctgaagactttgagatatatttaggatctatcataaggaatgcaatttaggttctactttgacatcttgttgactaatgagatactaatgattatgacgatggggaaatgagataggaagtatggaataga

SEQ ID NO: 337044 - DNA, 573 bp, Homo sapiens
gatttcaattggagagtttggttttttacaaattcctggtggtataattatatatagtacattgttacatcttgaggccatataaaaatagatttttgtaccaaatgatgaccagaattttatagactaagctatattttcatatgattcaaagtattaaataagtggtaaaagtgagaaaatagtattttgtattcattgtgaaataagacttgtaatttttaaaaggaagaggtttagctatgtgctacgatgttcaggttttataatcaccagtttctggttgatatgaaatcttacagaattatttgtggtcttgtgatagacatttttttcaaagaccaaataaattttgaaaattattcagtatggtgcttaggagcttcttatttttgtatataygtcttaagacacattttagctgactgctgtattatgactatctcatgtatgcatgtgtcaattttaatacctatttatgagcacctgaaagatcaggaagcaggtatgtcatgtgtaataaaagagtacttgttgcctttttggtgataaaattgtctttattgacatagt

SEQ ID NO: 337045 - DNA, 586 bp, Homo sapiens
tcattcatagaacatttaataattaccagctatatgccaagcagtctattgggttttgaggaaataaaaatacaatatgaattctttgactttgaagagcccacagtctgatttaaaaaacaaagaattgacaacagaagtattctttcatccaatcgcttatgtaacatatatttattggactcctactgagtgccaggcattgttctaggtgacagaaatacagcagtgacaaaattacaaagtccctacctccrtggtccttaccttctagtgagatacatcaattgaccaatagcacaccactaaacatgatacttttgactagtgatagattgaggaaaacagtgaaatgttatagagaatgacgggtgttaccttagattgaatgttaagagtataaattaagctatatatttttttctttggcacggagtttcgctcttgttgcccaggctggagtgtagtggcacaatctcaagtgattctcatgcctcggcctcctgagcagctgggattacaggagtgcaccaccaagaccagctaatttttgtattttttgtagagatggggttttgccatgtca

SEQ ID NO: 337046 - DNA, 586 bp, Homo sapiens
tcattcatagaacatttaataattaccagctatatgccaagcagtctattgggttttgaggaaataaaaatacaatatgaattctttgactttgaagagcccacagtctgatttaaaaaacaaagaattgacaacagaagtattctttcatccaatcgcttatgtaacatatatttattggactcctactgagtgccaggcattgttctaggtgacagaaatacagcagtgacaaaattacaaagtccctacctccgtggtccttaccttctagtgagatacrtcaattgaccaatagcacaccactaaacatgatacttttgactagtgatagattgaggaaaacagtgaaatgttatagagaatgacgggtgttaccttagattgaatgttaagagtataaattaagctatatatttttttctttggcacggagtttcgctcttgttgcccaggctggagtgtagtggcacaatctcaagtgattctcatgcctcggcctcctgagcagctgggattacaggagtgcaccaccaagaccagctaatttttgtattttttgtagagatggggttttgccatgtca

SEQ ID NO: 337047 - DNA, 586 bp, Homo sapiens
tcattcatagaacatttaataattaccagctatatgccaagcagtctattgggttttgaggaaataaaaatacaatatgaattctttgactttgaagagcccacagtctgatttaaaaaacaaagaattgacaacagaagtattctttcatccaatcgcttatgtaacatatatttattggactcctactgagtgccaggcattgttctaggtgacagaaatacagcagtgacaaaattacaaagtccctacctccgtggtccttaccttctagtgagatacatcaattgaccaatagcacaccactaaacatgatacttttgactagtgatagattgaggaaaacagtgaaatgttatagagaatgacgggtgttaccttagattgaatgttaagagtataaattaagctatatatttttttctttggcacggagtttcrctcttgttgcccaggctggagtgtagtggcacaatctcaagtgattctcatgcctcggcctcctgagcagctgggattacaggagtgcaccaccaagaccagctaatttttgtattttttgtagagatggggttttgccatgtca

SEQ ID NO: 337048 - DNA, 603 bp, Homo sapiens
tcttatggttgtcatgtgttagcagggacctcttcttatcacggtcactcagggacccagtctcatggagtaactactattctgaattgctggcaccatgcagaattacttaaatgccccactgaccacaaggaggtgaggaatcacaatgctaccttgtgtttgcaactggagaccgataggaatgattagggaaccataccaccataatcctagtaaccagaaagccagccagctagtaccagagccccaagcagaggcacttgtggtttccaaatttcatctttaggctcaggctgatttgtaagaacaaatgagctacagccatgcatcacacatcctgtgctgccaccacagtcttaaatcccttgcccaagacaggagcctttgctttttgtgagagtcygcgtctgtcacctggtgtgactcatccattctccagtgcattgcccctcccactgcaggagctactcccatgcaggacttgtctgtcaggctgcagcactcctgcacatggggctgactgcctatgggaaccgcagggtccagcctggggagctgccattcggggctaacttgactctcatccatacaagagcccag

SEQ ID NO: 337049 - DNA, 603 bp, Homo sapiens
tcttatggttgtcatgtgttagcagggacctcttcttatcacggtcactcagggacccagtctcatggagtaactactattctgaattgctggcaccatgcagaattacttaaatgccccactgaccacaaggaggtgaggaatcacaatgctaccttgtgtttgcaactggagaccgataggaatgattagggaaccataccaccataatcctagtaaccagaaagccagccagctagtaccagagccccaagcagaggcacttgtggtttccaaatttcatctttaggctcaggctgatttgtaagaacaaatgagctacagccatgcatcacacatcctgtgctgccaccacagtcttaaatcccttgcccaagacaggagcctttgctttttgtgagagtccgcgtctgtcacctrgtgtgactcatccattctccagtgcattgcccctcccactgcaggagctactcccatgcaggacttgtctgtcaggctgcagcactcctgcacatggggctgactgcctatgggaaccgcagggtccagcctggggagctgccattcggggctaacttgactctcatccatacaagagcccag

SEQ ID NO: 337050 - DNA, 603 bp, Homo sapiens
tcttatggttgtcatgtgttagcagggacctcttcttatcacggtcactcagggacccagtctcatggagtaactactattctgaattgctggcaccatgcagaattacttaaatgccccactgaccacaaggaggtgaggaatcacaatgctaccttgtgtttgcaactggagaccgataggaatgattagggaaccataccaccataatcctagtaaccagaaagccagccagctagtaccagagccccaagcagaggcacttgtggtttccaaatttcatctttaggctcaggctgatttgtaagaacaaatgagctacagccatgcatcacacatcctgtgctgccaccacagtcttaaatcccttgcccaagacaggagcctttgctttttgtgagagtccgcgtctgtcacctggtgtgactcatccattctccagtgcattgcccctcccactgcaggagctactcccatgcaggacttgtctgtcaggctgcagcactcctgcacatggggctgactgcctrtgggaaccgcagggtccagcctggggagctgccattcggggctaacttgactctcatccatacaagagcccag

SEQ ID NO: 337051 - DNA, 632 bp, Homo sapiens
aatctgtacttcctgttttttttttaatacctattattatttgtaaaatgtaaaacttgaaayggagaactcttgatagttttcattattaaaggcattgtgccttcattactttctggtaattgttaatattttgtgtagtgctttttgcatttgtgtttagtttttttgactttttcaaagcactttctcatgtatgttcttagtttaactctaggaagcagatgcttttttttcctatttggtgtctaaacaaagtaagctacagacacattaaataagcactatcacataaatcaaaggagaactctaaattttcatttttactgtgatattcttttaagaaatcttaatattctaatttttctagcttcattgttcacatttcatgtttacatttaaagttcaagggcagttacacttagatgttttttattaccttattataaaatatgctattacatttcagggtttttcaggtgaccttattcttccctctttcagtttgcgaatgcaaagtttctgacttaaagtgtggcctcctttcagtctttttatttgaacatcttatagatccttttgtcagagttggattccccttgttatggatgaagctatatttactactaatt

SEQ ID NO: 337052 - DNA, 632 bp, Homo sapiens
aatctgtacttcctgttttttttttaatacctattattatttgtaaaatgtaaaacttgaaacggagaactcttgatagttttcattattaaaggcattgtgccttcattactttctggtaattgttaatattttgtgtagtgctttttgcatttgtgtttagtttttttgactttttcaaagcactttctcatgtatgttcttagtttaactctaggaagcagatgcttttttttcctatttggtgtctaaacaaagtaagctacagacacattaaataagcactatcacataaatcaaaggagaactctaaattttcatttttactgtgatattcttttaagaaatcttaatattctaatttttctagcttcattgttcacatttcatgtttacatttaaagttcaagggcagttacacttagatgttttttattaccttattataaaatatgctattacatttcagggtttttcaggtgaccttattcttycctctttcagtttgcgaatgcaaagtttctgacttaaagtgtggcctcctttcagtctttttatttgaacatcttatagatccttttgtcagagttggattccccttgttatggatgaagctatatttactactaatt

SEQ ID NO: 337053 - DNA, 583 bp, Homo sapiens
gggaattgaaggagtaaaatctggaatccacatcttgctttgtattcatcttgaatgttttacttagtttatgtcaaagtaatggaattttttttaaaatttaggtaaattacaacattttctttttttcgaaacttttcctatatagtgtcacaacacactgccatatttctagtaaaaataatatatgtaataatttcaaactattgatgattggaaagttctgtttttacttggtttgggggaccctatttctatcttttatacatagctgttatttactccctatatagtaaacagagactttgtggaacagggygtgaaaacatcttatttctgatttgttcttttctttcaataaataaggaaataatctagagatgctgagacttagccaagtcagaaaactaacagctactttcaggctgctgttctttattccttccacttaattatactacctttggtgtagtatacttaggccctgtaaagttcagaaaatacagatgttgggaatttagttcatgttagctgtcagattattcactgagcaggttttatatcctcagtcgtgttttaggca

SEQ ID NO: 337054 - DNA, 538 bp, Homo sapiens
gttcgtggcgaacgggaccgtccttctcgctccgccccgcgggggtcccctcgtctctcctctccccgcccgccggcggtgcgtgtgggaaggcgtggggtgcggaccccggcccgacctcgccgtcccgcccgccgccttctgcgtcgcggggcgggccggcggggtcctctgacgcggcagacagccctcgctgtcgcctccagtggttgtcgacttgcgggcggcccccctccgcggcggtgggggtgccgtccccgccggcccgkcgtgctgccctctcgggggggtttgcgcgagcgtcggctccgcctgggcccttgcggtgctcctggagcgctccgggttgtccctcaggtgcccgaggccgaacggtggtgtgtcgttcccgcccccggcgccccctcctccggtcgccgccgcggtgtccgcgcgtgggtcctgagggagctcgtcggtgtggggttcgaggcggtttgagtgagacgagacgagacgcgcccctcccacgcggggaagggcgcccgcctgctctcgg

SEQ ID NO: 337055 - DNA, 497 bp, Homo sapiens
ccggcggggtcctctgacgcggcagacagccctcgctgtcgcctccagtggttgtcgacttgcgggcggcccccctccgcggcggtgggggtgccgtccccgccggcccgtcgtgctgccctctcgggggggtttgcgcgagcrtcggctccgcctgggcccttgcggtgctcctggagcgctccgggttgtccctcaggtgcccgaggccgaacggtggtgtgtcgttcccgcccccggcgccccctcctccggtcgccgccgcggtgtccgcgcgtgggtcctgagggagctcgtcggtgtggggttcgaggcggtttgagtgagacgagacgagacgcgcccctcccacgcggggaagggcgcccgcctgctctcggtgagcgcacgtcccgtgctcccctctggcgggtgcgcgcgggccgtgtgagcgatcgcggtgggttcgggccggtgtgacgcgtgcgccggccggccgccgaggggctgccgttctg

SEQ ID NO: 337056 - DNA, 491 bp, Homo sapiens
ctcgctgtcgcctccagtggttgtcgacttgcgggcggcccccctccgcggcggtgggggtgccgtccccgccggcccgtcgtgctgccctctcgggggggtttgcgcgagcgtcggctccgcctgggcccttgcggtgctcctggagcgctccgggttgtccctcaggtgcccgaggccgaacggtggtgtgtcgttcccgcccccggcgccccctcctccggtcgccgccgcggtgtccgcgygtgggtcctgagggagctcgtcggtgtggggttcgaggcggtttgagtgagacgagacgagacgcgcccctcccacgcggggaagggcgcccgcctgctctcggtgagcgcacgtcccgtgctcccctctggcgggtgcgcgcgggccgtgtgagcgatcgcggtgggttcgggccggtgtgacgcgtgcgccggccggccgccgaggggctgccgttctgcctccgaccggtcgtgtgtgggttg

SEQ ID NO: 337057 - DNA, 497 bp, Homo sapiens
ccggcggggtcctctgacgcggcagacagccctcgctgtcgcctccagtggttgtcgacttgcgggcggcccccctccgcggcggtgggggtgccgtccccgccggcccgtcgtgctgccctctcgggggggtttgcgcgagcgtcggctccgcctgggcccttgcggtgctcctggagcgctccgggttgtccctcaggtgcccgaggccgaacggtggtgtgtcgttcccgcccccggcgccccctcctccggtcgccgccgcggtgtccgcgcgtgggtcctgagggagctcgtcggtgtggggtycgaggcggtttgagtgagacgagacgagacgcgcccctcccacgcggggaagggcgcccgcctgctctcggtgagcgcacgtcccgtgctcccctctggcgggtgcgcgcgggccgtgtgagcgatcgcggtgggttcgggccggtgtgacgcgtgcgccggccggccgccgaggggctgccgttctg

SEQ ID NO: 337058 - DNA, 609 bp, Homo sapiens
cggtttgagtgagacgagacgagacgcgcccctcccacgcggggaagggcgcccgcctgctctcggtgagcgcacgtcccgtgctcccctctggcgggtgcgcgcgggccgtgtgagcgatcgcggtgggttcgggccggtgtgacgcgtgcgccggccggccgccgaggggctgccgttctgcctccgaccggtcgtgtgtgggttgacttcggaggcgctctgcctcggaaggaaggaggtgggtggacgggggggcctggtggggttgcgcgcacgcgcgcaccggccgggcccccgccctgaacgcgaacgctcgaggtggccgcgcgcaggtgtttcctcgtaccgcagggccccctcccttccccaggcgtccctcgscgcctctgcgggcccgaggaggagcggctggcgggtggggggagtgtgacccaccctcggtgagaaaagccttctctagcgatctgagaggcgtgccttgggggtaccggatcccccgggccgccgcctctgtctctgcctccgttatggtagcgctgccgttagcgacccgctcgcagaggaccctcctccgcttccccctcgacggggttgggggggagaagc

SEQ ID NO: 337059 - DNA, 475 bp, Homo sapiens
aacatttactaattcacagatattacccgaagtttagaaagtcacctaagaacaattgtttaaaaattatttagggaaaatgaagcaaaattgttgtttcaatctgagattttaacagccagtgcactcctgttcctcagctgaatrtccccttcattctgaatgtctgcagtagtattgaattggggagcagttagattccagggacatattcactcctgttttgttctccccccaatctcagcctttcggtgactgtttgggcaaagcctcccttgtggtagaagatgcctcacttctggggagaagaggctcctcatcttgcagacaagaagcagcacccactggttcttgctccaaaagccattaacattataaactggccaggtgcggtggctcaaacttgtaatcccagcaccttttgggaggttgaggcagaaggattgcttgagcccaggagtttgagtacagcctt

SEQ ID NO: 337060 - DNA, 474 bp, Homo sapiens
gggttgaggaagatatttattatttaggtgcaccggcccagtcagattaacatccaaaggactgagtcctgaacaaagattcaagttaccttttaagcgttttgtggggtggtggggartgggggagatctgtgcacggggaagcatattacagaagcgagaaacaaagacagttattcaattaattgagacatgcattatattatttcttacttttcaaggaaaaacatgttttacgacttgagtttctctgtctagtgaccttgcagctgcacagctagagaaacagggtcttcacaatgcctgggaaaggaggagagatgaggctcactagccacagaaaaacaggcagttaatttttaaaggactccagctctttctgtttctcagggggaattgggttttctcacatacagctgagtttctgcttacacattttttaatttcttttaattcctgttccacttggaccag

SEQ ID NO: 337061 - DNA, 474 bp, Homo sapiens
gggttgaggaagatatttattatttaggtgcaccggcccagtcagattaacatccaaaggactgagtcctgaacaaagattcaagttaccttttaagcgttttgtggggtggtggggaatgggggagatctgtgcacrgggaagcatattacagaagcgagaaacaaagacagttattcaattaattgagacatgcattatattatttcttacttttcaaggaaaaacatgttttacgacttgagtttctctgtctagtgaccttgcagctgcacagctagagaaacagggtcttcacaatgcctgggaaaggaggagagatgaggctcactagccacagaaaaacaggcagttaatttttaaaggactccagctctttctgtttctcagggggaattgggttttctcacatacagctgagtttctgcttacacattttttaatttcttttaattcctgttccacttggaccag

SEQ ID NO: 337062 - DNA, 474 bp, Homo sapiens
gggttgaggaagatatttattatttaggtgcaccggcccagtcagattaacatccaaaggactgagtcctgaacaaagattcaagttaccttttaagcgttttgtggggtggtggggaatgggggagatctgtgcacggggaagcatattacagaagcgagaaacaaagacagttattcaattaattgagacatgcattatattatttcttacttttcaaggaaaarcatgttttacgacttgagtttctctgtctagtgaccttgcagctgcacagctagagaaacagggtcttcacaatgcctgggaaaggaggagagatgaggctcactagccacagaaaaacaggcagttaatttttaaaggactccagctctttctgtttctcagggggaattgggttttctcacatacagctgagtttctgcttacacattttttaatttcttttaattcctgttccacttggaccag

SEQ ID NO: 337063 - DNA, 218 bp, Homo sapiens
catgcattatattatttcttacttttcaaggaaaaacatgttttacgacttgagtttctctgtctagtgamcttgcagctgcacagctagagaaacagggtcttcacaatgcctgggaaaggaggagagatgaggctcactagccacagaaaaacaggcagttaatttttaaaggactccagctctttctgtttctcagggggaattgggttttctca

SEQ ID NO: 337064 - DNA, 218 bp, Homo sapiens
catgcattatattatttcttacttttcaaggaaaaacatgttttacgacttgagtttctctgtctagtgaccttgcagctgcacagctagagaaacaggktcttcacaatgcctgggaaaggaggagagatgaggctcactagccacagaaaaacaggcagttaatttttaaaggactccagctctttctgtttctcagggggaattgggttttctca

SEQ ID NO: 337065 - DNA, 565 bp, Homo sapiens
ttggcattctctgcctaaatttcagaggatgtatgagaaaggctggatgcccagggagaagcctatgcacagctggagccctcaaagaggacctcttctaggacagtgccaagtggtaatgtgggattggaggccccacaytgtgggggctgcctagtggagctgtgggagggggggctgctgccctccagatcaaagaatgatagagccaccagcagctcctgtcttcagtgtagaaaagctgtgggagcagagctgcccaaagccttgggagcccaccctatgcatcctggtaatgctctatgttcccaggatgtgggacatggtttcaaaggagattattttggaacatcgagatttaatgactgccctgctgggatttgaacttgtgtggggcctgtagtccctttcttttggccaatttatctcatttgtaatgggaatgtttaccaaagacctgtatcccagttttatcttagaagtcaataactggttttgattttacaggctcattggtggaagggacttgccttgtctcagaagaaactgcactttcgagtgatgc

SEQ ID NO: 337066 - DNA, 565 bp, Homo sapiens
ttggcattctctgcctaaatttcagaggatgtatgagaaaggctggatgcccagggagaagcctatgcacagctggagccctcaaagaggacctcttctaggacagtgccaagtggtaatgtgggattggaggccccacactgtgggggctgcctagtggagctgtgggaggggsggctgctgccctccagatcaaagaatgatagagccaccagcagctcctgtcttcagtgtagaaaagctgtgggagcagagctgcccaaagccttgggagcccaccctatgcatcctggtaatgctctatgttcccaggatgtgggacatggtttcaaaggagattattttggaacatcgagatttaatgactgccctgctgggatttgaacttgtgtggggcctgtagtccctttcttttggccaatttatctcatttgtaatgggaatgtttaccaaagacctgtatcccagttttatcttagaagtcaataactggttttgattttacaggctcattggtggaagggacttgccttgtctcagaagaaactgcactttcgagtgatgc

SEQ ID NO: 337067 - DNA, 565 bp, Homo sapiens
ttggcattctctgcctaaatttcagaggatgtatgagaaaggctggatgcccagggagaagcctatgcacagctggagccctcaaagaggacctcttctaggacagtgccaagtggtaatgtgggattggaggccccacactgtgggggctgcctagtggagctgtgggagggggggctgctgccctccagatcaaagaatgatagagccaccagcagctcctgtcttcagtgtagaaaagctgtgggagcagagctgcccaaagccttgggagcccaccctatgcatcctggtaatgctctatgttcccaggatgtgggacatggtttcaaaggagattattttggaacatcgagatttaatgactgccctgctgggatttgaacttgtgtggggcctgtagtccctttcttttggycaatttatctcatttgtaatgggaatgtttaccaaagacctgtatcccagttttatcttagaagtcaataactggttttgattttacaggctcattggtggaagggacttgccttgtctcagaagaaactgcactttcgagtgatgc

SEQ ID NO: 337068 - DNA, 610 bp, Homo sapiens
aaactgaccagtaatcccaggagagaaacataccttggcaaattcgaagatatttctaattttatttaacaattttaaaattaatgtatcaaagattcacccaactcatgtcaaacaaaatatgtttgggttaawtaatatatattttatatggacattcctttatttaaaacatccttttttcctagaatgatggattaggggctttcagtgtgcctcggccagttggaagtagaaaaataagcataaagataaactttgtgaacttcaattcaagaagaaaaataggaattcacaggaatagagaagaacattccagacactgtggagggggaggtgggaaggcagcctctgttataacatttggttcataaaagggagtgaaacaccagtacgagagaagagcagccagtctccctctgcaactcacctttccactggggatctgtgcaatccagattaagggagagcactctgtttctcccaagccttggagctagcacaaaagtggctgagatatggggaaagaggaaagacactcagaaaagctgcaggcatttccccagacctgggactgagagaaggatgccctttttaatctgggctcata

SEQ ID NO: 337069 - DNA, 610 bp, Homo sapiens
aaactgaccagtaatcccaggagagaaacataccttggcaaattcgaagatatttctaattttatttaacaattttaaaattaatgtatcaaagattcacccaactcatgtcaaacaaaatatgtttgggttaattaatatatattttatatggacattcctttatttaaaacatccttttttcctagaatgatggattaggggctttcagtgtgcctcrgccagttggaagtagaaaaataagcataaagataaactttgtgaacttcaattcaagaagaaaaataggaattcacaggaatagagaagaacattccagacactgtggagggggaggtgggaaggcagcctctgttataacatttggttcataaaagggagtgaaacaccagtacgagagaagagcagccagtctccctctgcaactcacctttccactggggatctgtgcaatccagattaagggagagcactctgtttctcccaagccttggagctagcacaaaagtggctgagatatggggaaagaggaaagacactcagaaaagctgcaggcatttccccagacctgggactgagagaaggatgccctttttaatctgggctcata

SEQ ID NO: 337070 - DNA, 552 bp, Homo sapiens
ggccagttggaagtagaaaaataagcataaagataaactttgtgaacttcaattcaagaagaaaaataggaattcacaggaatagagaagaacattccagacactgtggagggggaggtgggaaggcagcctctgttataacatttggttcataaaagggagtgaaacaccagtrcgagagaagagcagccagtctccctctgcaactcacctttccactggggatctgtgcaatccagattaagggagagcactctgtttctcccaagccttggagctagcacaaaagtggctgagatatggggaaagaggaaagacactcagaaaagctgcaggcatttccccagacctgggactgagagaaggatgccctttttaatctgggctcatacaaagtcaatcattgttttgtgcctggcaatgatggccactgcagacactttaatcttgggctaggaattggagtgcttgctctggagcaggggagcagcctccacagccagaattgagtgttgagtatggaaagtgccccagcagtagtgttggaattag

SEQ ID NO: 337071 - DNA, 552 bp, Homo sapiens
ggccagttggaagtagaaaaataagcataaagataaactttgtgaacttcaattcaagaagaaaaataggaattcacaggaatagagaagaacattccagacactgtggagggggaggtgggaaggcagcctctgttataacatttggttcataaaagggagtgaaacaccagtacgagagaagagcagccagtctccctctgcaactcacctttccactggggatctgtgcaayccagattaagggagagcactctgtttctcccaagccttggagctagcacaaaagtggctgagatatggggaaagaggaaagacactcagaaaagctgcaggcatttccccagacctgggactgagagaaggatgccctttttaatctgggctcatacaaagtcaatcattgttttgtgcctggcaatgatggccactgcagacactttaatcttgggctaggaattggagtgcttgctctggagcaggggagcagcctccacagccagaattgagtgttgagtatggaaagtgccccagcagtagtgttggaattag

SEQ ID NO: 337072 - DNA, 552 bp, Homo sapiens
ggccagttggaagtagaaaaataagcataaagataaactttgtgaacttcaattcaagaagaaaaataggaattcacaggaatagagaagaacattccagacactgtggagggggaggtgggaaggcagcctctgttataacatttggttcataaaagggagtgaaacaccagtacgagagaagagcagccagtctccctctgcaactcacctttccactggggatctgtgcaatccagattaagggagagcactctgtttctcccaagccttggagctagcacaaaagtggctgagatatggggaaagaggaaagacactcagaaaagctgcaggcatttccccagacctgggactgagagaaggatgccctttttaatctgggctcatacaaagtcaatcattgttttgtgcctggcaatgrtggccactgcagacactttaatcttgggctaggaattggagtgcttgctctggagcaggggagcagcctccacagccagaattgagtgttgagtatggaaagtgccccagcagtagtgttggaattag

SEQ ID NO: 337073 - DNA, 552 bp, Homo sapiens
ggccagttggaagtagaaaaataagcataaagataaactttgtgaacttcaattcaagaagaaaaataggaattcacaggaatagagaagaacattccagacactgtggagggggaggtgggaaggcagcctctgttataacatttggttcataaaagggagtgaaacaccagtacgagagaagagcagccagtctccctctgcaactcacctttccactggggatctgtgcaatccagattaagggagagcactctgtttctcccaagccttggagctagcacaaaagtggctgagatatggggaaagaggaaagacactcagaaaagctgcaggcatttccccagacctgggactgagagaaggatgccctttttaatctgggctcatacaaagtcaatcattgttttgtgcctggcaatgatggccactgcagacactttaatcttgggctaggaattggagtgcttgctctggagcaggggagcagcctccacmgccagaattgagtgttgagtatggaaagtgccccagcagtagtgttggaattag

SEQ ID NO: 337074 - DNA, 498 bp, Homo sapiens
agggaaggaggaatacagcttgccaaacccaccccttggataaaaggaaacacgatcatgacatcagstgctgaaaggggcacaccaaagcctgggaacagatttagagaggtagtcatctcttgccctctgtccccttcctagtgcactgctgcagacccagcagtggtcatcctgttggggcccaaggaacgtgggctgaaagaggctgcttcttaggtttctccagcagctctgcccctgctgaagactagtacacactgggacagggcgcttttggcactttgtcacttctgcacctgtcgaggacaagtacacagaggagaagaccctgcagccagctgttactcttaagcactgtctactggagtgaagccttgattacaccaccaaacaaaaatacatcaccacaccacgccaccacaggagcctatctgcaaccaaggaacttgtacagagccttggtcctctgaaagtacccagaaatgaagcaaattg

SEQ ID NO: 337075 - DNA, 498 bp, Homo sapiens
agggaaggaggaatacagcttgccaaacccaccccttggataaaaggaaacacgatcatgacatcagctgctgaaaggggcacaccaaagcctgggaacagatttagagaggtagtcatctcttgccctctgtccccttcctagtgcactgctgcagacccagcagtggtcatcctgttggggcccaaggaacgtgggctgaaagaggctgcttcttaggtttctccagcagctctgcccctgctgaagactagtacacactgggacagggcgcttttggcactttgtcacttctgcacctgtcgaggacaagtacacagaggagaagaccctgcagccagctgtyactcttaagcactgtctactggagtgaagccttgattacaccaccaaacaaaaatacatcaccacaccacgccaccacaggagcctatctgcaaccaaggaacttgtacagagccttggtcctctgaaagtacccagaaatgaagcaaattg

SEQ ID NO: 337076 - DNA, 498 bp, Homo sapiens
agggaaggaggaatacagcttgccaaacccaccccttggataaaaggaaacacgatcatgacatcagctgctgaaaggggcacaccaaagcctgggaacagatttagagaggtagtcatctcttgccctctgtccccttcctagtgcactgctgcagacccagcagtggtcatcctgttggggcccaaggaacgtgggctgaaagaggctgcttcttaggtttctccagcagctctgcccctgctgaagactagtacacactgggacagggcgcttttggcactttgtcacttctgcacctgtcgaggacaagtacacagaggagaagaccctgcagccagctgttactcttaagcactgtctactggastgaagccttgattacaccaccaaacaaaaatacatcaccacaccacgccaccacaggagcctatctgcaaccaaggaacttgtacagagccttggtcctctgaaagtacccagaaatgaagcaaattg

SEQ ID NO: 337077 - DNA, 348 bp, Homo sapiens
ctgtccatctacttgctactctcacactcttgccagcagaaggggctcctctaatggcccatatcaccacataggctattgtcacmccacagctgtgtagcacgaccttcctgcttgccgacgtggcttccagtgcccatgctgacaggaacctctaccatgttggcatccctgtgggtgacactaccggtgtgacattgctagattgaccctcctacctggcagtgacactgttgatgtgagcccccattttcaggtctgtgatttgtaaatagggccattttcccttttctttctttcttccattcacagggcttttcattctctctgtttctgtctccatttcag

SEQ ID NO: 337078 - DNA, 493 bp, Homo sapiens
cttatttcttttactatgtcaattctcaccttagtagaactactactagttctagtaccatggctgtcatagatgcaaccattatattccatttagtttcttcctcaggttccctaacaattgtttgaaactgaatatatatgtttatgtatgtgtstgtgttcactgtcatgtatatggtgtatatgggatgtgtgcagttttcagttatatatatattcatatatacatatgcatatatatgtataatatacatatatacatgcatacacttgtataatatacatatatatacacatatatgcacacatataatcactgagttccaaagtgagtctttatttggggcaattgtattctctcccctctgtctgctcactggcctttgcaagacatagcaattgcttgattttcctttggataagagtcttatcttcggcactcttgactctagccttaactttagatttctattccagaatacctctcatat

SEQ ID NO: 337079 - DNA, 493 bp, Homo sapiens
cttatttcttttactatgtcaattctcaccttagtagaactactactagttctagtaccatggctgtcatagatgcaaccattatattccatttagtttcttcctcaggttccctaacaattgtttgaaactgaatatatatgtttatgtatgtgtgtgtgttcactgtcatgtatatggtgtatatgggatgtgtgcagttttcagttatatatatattcatatatacatatgcatatatatgtataatatacatatatacatgcatacacwtgtataatatacatatatatacacatatatgcacacatataatcactgagttccaaagtgagtctttatttggggcaattgtattctctcccctctgtctgctcactggcctttgcaagacatagcaattgcttgattttcctttggataagagtcttatcttcggcactcttgactctagccttaactttagatttctattccagaatacctctcatat

SEQ ID NO: 337080 - DNA, 493 bp, Homo sapiens
cttatttcttttactatgtcaattctcaccttagtagaactactactagttctagtaccatggctgtcatagatgcaaccattatattccatttagtttcttcctcaggttccctaacaattgtttgaaactgaatatatatgtttatgtatgtgtgtgtgttcactgtcatgtatatggtgtatatgggatgtgtgcagttttcagttatatatatattcatatatacatatgcatatatatgtataatatacatatatacatgcatacacttrtataatatacatatatatacacatatatgcacacatataatcactgagttccaaagtgagtctttatttggggcaattgtattctctcccctctgtctgctcactggcctttgcaagacatagcaattgcttgattttcctttggataagagtcttatcttcggcactcttgactctagccttaactttagatttctattccagaatacctctcatat

SEQ ID NO: 337081 - DNA, 493 bp, Homo sapiens
cttatttcttttactatgtcaattctcaccttagtagaactactactagttctagtaccatggctgtcatagatgcaaccattatattccatttagtttcttcctcaggttccctaacaattgtttgaaactgaatatatatgtttatgtatgtgtgtgtgttcactgtcatgtatatggtgtatatgggatgtgtgcagttttcagttatatatatattcatatatacatatgcatatatatgtataatatacatatatacatgcatacacttgtataatatacatatatatacacatatatgcacacatataatcactgagttccaaagtgagtctttatttggggcaattgtattctctcccctctgtctgctcactggcctttgcaagacatagcaattgcttgattttcctttgsataagagtcttatcttcggcactcttgactctagccttaactttagatttctattccagaatacctctcatat

SEQ ID NO: 337082 - DNA, 580 bp, Homo sapiens
ctttggataagagtcttatcttcggcactcttgactctagccttaactttagatttctattccagaatacctctcatatctatcttaaaacctaagatgggtaaagaggtcataagatttgtagtatgaaagagtttgcttagttaaattatatctcaggaaactcattcatctacaarttaaattgtaaaatgattgtttattgtatctgaaaaaatgtttagaacaagaaatgtaactgggtagcctgttatatcaaagaaccctcgatttattaattctcctcatagccatatccttatatagccctctctgacactgacttaatagacacttgataaatgatagtaaatttaggcttggcaaattaaaatggcaccaatgccaagtgagaacctgatctactctaccagagagactaagtggaggagaacccagctgatagcaccagtgaactgccagatatttgagtgatgtcactttggactatgtaggccttgtcagtgatataaggcaacctaggcaagactccaaatattttcctccggagcccaaccaaagttaacaaattgtgagtatg

SEQ ID NO: 337083 - DNA, 580 bp, Homo sapiens
ctttggataagagtcttatcttcggcactcttgactctagccttaactttagatttctattccagaatacctctcatatctatcttaaaacctaagatgggtaaagaggtcataagatttgtagtatgaaagagtttgcttagttaaattatatctcaggaaactcattcatctacaagttaaattgtaaaatgattgtttrttgtatctgaaaaaatgtttagaacaagaaatgtaactgggtagcctgttatatcaaagaaccctcgatttattaattctcctcatagccatatccttatatagccctctctgacactgacttaatagacacttgataaatgatagtaaatttaggcttggcaaattaaaatggcaccaatgccaagtgagaacctgatctactctaccagagagactaagtggaggagaacccagctgatagcaccagtgaactgccagatatttgagtgatgtcactttggactatgtaggccttgtcagtgatataaggcaacctaggcaagactccaaatattttcctccggagcccaaccaaagttaacaaattgtgagtatg

SEQ ID NO: 337084 - DNA, 580 bp, Homo sapiens
ctttggataagagtcttatcttcggcactcttgactctagccttaactttagatttctattccagaatacctctcatatctatcttaaaacctaagatgggtaaagaggtcataagatttgtagtatgaaagagtttgcttagttaaattatatctcaggaaactcattcatctacaagttaaattgtaaaatgattgtttattgtatctgaaaaaatgtttagaacaagaaatgtaactgggtagcctgttatatcaaagaaccctcgatttattaaktctcctcatagccatatccttatatagccctctctgacactgacttaatagacacttgataaatgatagtaaatttaggcttggcaaattaaaatggcaccaatgccaagtgagaacctgatctactctaccagagagactaagtggaggagaacccagctgatagcaccagtgaactgccagatatttgagtgatgtcactttggactatgtaggccttgtcagtgatataaggcaacctaggcaagactccaaatattttcctccggagcccaaccaaagttaacaaattgtgagtatg

SEQ ID NO: 337085 - DNA, 580 bp, Homo sapiens
ctttggataagagtcttatcttcggcactcttgactctagccttaactttagatttctattccagaatacctctcatatctatcttaaaacctaagatgggtaaagaggtcataagatttgtagtatgaaagagtttgcttagttaaattatatctcaggaaactcattcatctacaagttaaattgtaaaatgattgtttattgtatctgaaaaaatgtttagaacaagaaatgtaactgggtagcctgttatatcaaagaaccctcgatttattaattctcctcatagccatatccttatatagccctctctgacactgacttaatagacacttgataaatgatagtaaatttaggcttggcaaattaaaatggcaccaatgccaagtgagaacctgatctactctaccagagagactaagtggaggagaacccagctgatagcaccagtgaactgccagatatttgagtgatgtcactttggactatgtaggccttgtcagtsatataaggcaacctaggcaagactccaaatattttcctccggagcccaaccaaagttaacaaattgtgagtatg

SEQ ID NO: 337086 - DNA, 526 bp, Homo sapiens
gggcgctgggtgtccacctgcagcatggatgtccactggtactttatgtccaccaggggcctaatgtccacctaaaacctggtgttcacctggggtctgatgttcagctgaagaccggatgtccacctggagccgaggaatccacccagggactggtgttgaactggggcctgatgaccacccggggacaaggtacacaccaggcttgttgtccacctgtcaccagatgtccacctgagtcctgatgtccatcttgatcctgggtgtccacattaggcctgatgtccacctggggcctargtacccactgggggcttcctgttaacctgggggctggtgtcattctggggcctaatgaccacctgggttgtattattcacctagggcctggtgtccacttggggcttgagtgtaaccttggacctggcacccacacaggacttgggtatcaaactggccccttggtgtccagttaagacatcatgtgaacctggcgcctgagtgtccacatggggccaaatgacta

SEQ ID NO: 337087 - DNA, 526 bp, Homo sapiens
gggcgctgggtgtccacctgcagcatggatgtccactggtactttatgtccaccaggggcctaatgtccacctaaaacctggtgttcacctggggtctgatgttcagctgaagaccggatgtccacctggagccgaggaatccacccagggactggtgttgaactggggcctgatgaccacccggggacaaggtacacaccaggcttgttgtccacctgtcaccagatgtccacctgagtcctgatgtccatcttgatcctgggtgtccacattaggcctgatgtccacctggggcctaagtacccactgggggcttcctgttaacctgggggctggtgtcattctggggcctaatgaccacctgggttgtaytattcacctagggcctggtgtccacttggggcttgagtgtaaccttggacctggcacccacacaggacttgggtatcaaactggccccttggtgtccagttaagacatcatgtgaacctggcgcctgagtgtccacatggggccaaatgacta

SEQ ID NO: 337088 - DNA, 548 bp, Homo sapiens
agtactgatgttcacctttgacctgatgtccacctgtggactgtttatccacccatggcctgatgttcacctggggctgaatgtccaactgtgacctgttgtgcacctggmacctaggcatccacctgcagcctgatgttcagctgggctgggacccggaagttcacctgaggcatgatgtccacctgaagcttgatgttcacctgggggctgggtgtccacttggggcccaatatccacctggactaggtacccacctgggatctggtgttcactcaagattggtgttcagctgtggcctaatgaccacctgggtcatgatgtctaccttggactgggtgcttacctgtagccagtgttcactggggacctagtgtgcacctgagaccaggggatgtacctggggcctggtgtctacctggtgcctaggtatccacttgaggcctaatgttcatctggaatctggtatccacctggggccttgtaattacctggggtctgggcatccacctagggcttgagtatcctcctggggccttgagttttac

SEQ ID NO: 337089 - DNA, 548 bp, Homo sapiens
agtactgatgttcacctttgacctgatgtccacctgtggactgtttatccacccatggcctgatgttcacctggggctgaatgtccaactgtgacctgttgtgcacctggaacctaggcatccacctgcagcctgatgttcagctgggctgggacccggaagttcacctgaggcatgatgtccacctgaagcttgatgttcacctgggggctgggtgtccacttggggccyaatatccacctggactaggtacccacctgggatctggtgttcactcaagattggtgttcagctgtggcctaatgaccacctgggtcatgatgtctaccttggactgggtgcttacctgtagccagtgttcactggggacctagtgtgcacctgagaccaggggatgtacctggggcctggtgtctacctggtgcctaggtatccacttgaggcctaatgttcatctggaatctggtatccacctggggccttgtaattacctggggtctgggcatccacctagggcttgagtatcctcctggggccttgagttttac

SEQ ID NO: 337090 - DNA, 548 bp, Homo sapiens
agtactgatgttcacctttgacctgatgtccacctgtggactgtttatccacccatggcctgatgttcacctggggctgaatgtccaactgtgacctgttgtgcacctggaacctaggcatccacctgcagcctgatgttcagctgggctgggacccggaagttcacctgaggcatgatgtccacctgaagcttgatgttcacctgggggctgggtgtccacttggggcccaatatccacctggactaggtacccacctgggatctggtgttcactcaagattggtgttcagctgtggcctaatgaccacctgggtcatgatgtctaccttggactgggtgcttacctgkagccagtgttcactggggacctagtgtgcacctgagaccaggggatgtacctggggcctggtgtctacctggtgcctaggtatccacttgaggcctaatgttcatctggaatctggtatccacctggggccttgtaattacctggggtctgggcatccacctagggcttgagtatcctcctggggccttgagttttac

SEQ ID NO: 337091 - DNA, 585 bp, Homo sapiens
ggggacctagtgtgcacctgagaccaggggatgtacctgggkcctggtgtctacctggtgcctaggtatccacttgaggcctaatgttcatctggaatctggtatccacctggggccttgtaattacctggggtctgggcatccacctagggcttgagtatcctcctggggccttgagttttactggggactcgtgtctgccttggacctgggtgtacatctgtggcctaatgtacaccttgagagtgatgtcaacctggggacagatgtcctcttggggtctgagtgtacacctggtgtctgatgtctgcctgaggacttgtgttcacctgagacctgatattcacctggagactgggcgtccatgaggggctgatgtccagctggacactggatatccacctggggcttaaggatccacccagaaactgatgtcaaactggggcctgatgcctacctgcggactaggtatccatgtgaggcttgatgttcatccgcagccagacgtccatctgatgcttgatgtccaccttagtcctgggtgtctactggagacctcatgttcaactagagcttaggaaccta

SEQ ID NO: 337092 - DNA, 585 bp, Homo sapiens
ggggacctagtgtgcacctgagaccaggggatgtacctggggcctggtgtctacctggtgcctaggtatccacttgaggcctaatgttcatctggaatctggtatccacctggggccttgtaattacctggggtctgggcatccacctagggcttgagtatcctcctggggccttgagttttactggggactcgtgtctgccttggacctgggtgtacatctgtggcctaatgtacaccttgagagtgatgtcaacctggggacagatgtcctcttggggtctgagtgtacacctggtgtctgatgtctgcctgaggacttgtgttcacctgagacctgatattcacctggrgactgggcgtccatgaggggctgatgtccagctggacactggatatccacctggggcttaaggatccacccagaaactgatgtcaaactggggcctgatgcctacctgcggactaggtatccatgtgaggcttgatgttcatccgcagccagacgtccatctgatgcttgatgtccaccttagtcctgggtgtctactggagacctcatgttcaactagagcttaggaaccta

SEQ ID NO: 337093 - DNA, 585 bp, Homo sapiens
ggggacctagtgtgcacctgagaccaggggatgtacctggggcctggtgtctacctggtgcctaggtatccacttgaggcctaatgttcatctggaatctggtatccacctggggccttgtaattacctggggtctgggcatccacctagggcttgagtatcctcctggggccttgagttttactggggactcgtgtctgccttggacctgggtgtacatctgtggcctaatgtacaccttgagagtgatgtcaacctggggacagatgtcctcttggggtctgagtgtacacctggtgtctgatgtctgcctgaggacttgtgttcacctgagacctgatattcacctggagactgggcgtccaygaggggctgatgtccagctggacactggatatccacctggggcttaaggatccacccagaaactgatgtcaaactggggcctgatgcctacctgcggactaggtatccatgtgaggcttgatgttcatccgcagccagacgtccatctgatgcttgatgtccaccttagtcctgggtgtctactggagacctcatgttcaactagagcttaggaaccta

SEQ ID NO: 337094 - DNA, 553 bp, Homo sapiens
cacctagggcctggtgtccatttggggcttgaatgacaaccttmggtcttgtgttcatctttgacgtagtgtccacctgggacttggttatcaacctgaggacttggtgtccaattgaggtgtcatgaccacctggggactgaatgtcaatctggggtctgatgtaaacctctagttcagtatccacctggggccagatgtcttcctagagacttatattctcttttgacctgatgtccacctggggacttgctatccatccatggtctgatattcacctggggacagatgtccaactgtggccagaagtgcacctggggtctgggcttccacctggagcctgatgtttagctggggctagagtttaaatggagaacgatgtccacctgaagtttgatgtttacccggggcctgatacctgcctggtgcccaagtattctcatgtgcctaatgtccactagttggcctggtgttcatctgagggcttggagtcaaccagtggctttatgtacacctggattctagtgtcctcctggggccttatgcttaccag

SEQ ID NO: 337095 - DNA, 553 bp, Homo sapiens
cacctagggcctggtgtccatttggggcttgaatgacaaccttaggtcttgtgttcatctttgacgtagtgtccacctgggacttggttatcaacctgaggacttggtgtccaattgaggtgtcatgaccacctggggactgaatgtcaatctggggtctgatgtaaacctctagttcagtatccacctggggccagatgtcttcctagagacttatattctcttttgacctgatgtccacctggggacttgctatccatccatggtctgatattcacctggggacagatgtccaactgtggccagaagtgcacctggggtctgggcttccacctggagcctgatgtttagctggggctagagtttamatggagaacgatgtccacctgaagtttgatgtttacccggggcctgatacctgcctggtgcccaagtattctcatgtgcctaatgtccactagttggcctggtgttcatctgagggcttggagtcaaccagtggctttatgtacacctggattctagtgtcctcctggggccttatgcttaccag

SEQ ID NO: 337096 - DNA, 576 bp, Homo sapiens
aggactggttttcctctggggcctcatgtctacctgggccctgggagtgcacaaggagccagatgtctataaagggcctgagtgtccactagggcctgaggttcaccaggagcatagacatccacctaggacctcgtgtccacctaaaacctggtattcacttggggcctgggtgacaacctgggatctgatgttcacctgaggcccagagttcagctggtgcctatgtcagcctggcacctgatgcacacgggaggactaggtgcccacctgaggactggtgttcatggggaactggtgttcagctgtggcttgatgaccaactgggtcctggtgtcctcctggcacctgttgtccacctgggactgcatgcttacccagggcctggtgtttccctggggcctggtgtgcccctgagacctggggtccacctgggcctagtatccacttrgggcctcatatccatctggaacatcatgtccacttggggccttttagttacctagggactgggtgtccttctggcgcttgagtgtcctcctggggcctggggttctcctggggcctgggtgtaca

SEQ ID NO: 337097 - DNA, 351 bp, Homo sapiens
gacataatgtaccaatgaatatccaggcctccggtaaatacccaggccccagattgacatcggggtctatgtggacacacaggccccgggtagtaaacaggcccaaggtggacactggactagacatcaggtcctaggttgacaaccatgcttcaagttgacaccaggccccaagtgaacatctggtcccagctggacactagtctcctggtgaatacctgggctcaaggttgacatcagaccctatgtgaacactagaccccagctaaacacttatgccctaagtggacatcaggcctcaggtggttacccagtcccaaggtraacataggaccctgatgggcaccagtt

SEQ ID NO: 337098 - DNA, 599 bp, Homo sapiens
acctatttttgcttgtgttgactctccctccagctttgtggaaagagggatcatgtagcttcatttctcaggcagatcagtcaccttttgctatcaaagttttagcatccatttcsaaaatttggtgtacaagttgatattttggtgtttttagctaatctggagtcaaaacagaatgccatagatgaggaagcttataaaccaatttgtttctttcagttttggagatggcaaaattcaaggtcaagtggttagcagattccatgtctggtgtgggcttgctttgtggttcatagacagccatgtttctaccatgtcctcacatgacagaaggggtgagggagctctctatggtgccttcaataggggctactaatcccactcctgtggcccctgccttcatgagctaatcattccccaaggccctacctccaaatatcatcacatagggaattagataccagcacttgaatttgagtgggacaataacatttggtctatagaatcaggttacccagagccttatgcattcagaggaaatccaaaatcttctataagtaaagtattcgctggtcccctctgggcttagggacaccttt

SEQ ID NO: 337099 - DNA, 599 bp, Homo sapiens
acctatttttgcttgtgttgactctccctccagctttgtggaaagagggatcatgtagcttcatttctcaggcagatcagtcaccttttgctatcaaagttttagcatccatttcgaaaatttggtgtacaagttgatattttggtgtttttagctaatctggagtcaaaacagaatgccatagatgaggaagcttataaaccaatttgtttctttcagttttggagatggcaaaattcaaggtcaagtggttagcagattccatgtctggtgtgggcttgctttgtggttcatagacagccatgtttctaccatgtcctcacatgacagaaggggtgagggagctctctatggtgccttcaataggggctaytaatcccactcctgtggcccctgccttcatgagctaatcattccccaaggccctacctccaaatatcatcacatagggaattagataccagcacttgaatttgagtgggacaataacatttggtctatagaatcaggttacccagagccttatgcattcagaggaaatccaaaatcttctataagtaaagtattcgctggtcccctctgggcttagggacaccttt

SEQ ID NO: 337100 - DNA, 527 bp, Homo sapiens
tgtgtgaccaaaagtgcctctgctgggagctgggatcctcgggaccatgcttgctagcgctggatgagtctctggaaggacgcacgggactccgcaaagctgacctgtcccaccgaggtcaaatggatacctctgcattggcccgaggcctccgaagtacatcaccgtcaccaaccgtcaccgtcagcatccttgtgagcctgcccaaggccccgcctccggggagactcttgggagcccggccttcgtcggctaaagtccaaagggatggtgacttccacccacaaggtccccactgaacggcgaaratgtggagcgtaggtcagagaggggaccaggaggggagacgtcccgacaggcgatgagttcccaaggctctggccaccccacccacgccccacgccccacgtcccgggcacccgcgggacaccgcccctttatcccctcctctgtccacagccggccccaccccaccacgcaacccacgcacacacgctggaggttccaaaaccacacggtgtgactag

SEQ ID NO: 337101 - DNA, 527 bp, Homo sapiens
tgtgtgaccaaaagtgcctctgctgggagctgggatcctcgggaccatgcttgctagcgctggatgagtctctggaaggacgcacgggactccgcaaagctgacctgtcccaccgaggtcaaatggatacctctgcattggcccgaggcctccgaagtacatcaccgtcaccaaccgtcaccgtcagcatccttgtgagcctgcccaaggccccgcctccggggagactcttgggagcccggccttcgtcggctaaagtccaaagggatggtgacttccacccacaaggtccccactgaacggcgaaaatgtggagcgtaggtcagagaggggaccaggaggggagacgtcccgacaggcgaygagttcccaaggctctggccaccccacccacgccccacgccccacgtcccgggcacccgcgggacaccgcccctttatcccctcctctgtccacagccggccccaccccaccacgcaacccacgcacacacgctggaggttccaaaaccacacggtgtgactag

SEQ ID NO: 337102 - DNA, 527 bp, Homo sapiens
tgtgtgaccaaaagtgcctctgctgggagctgggatcctcgggaccatgcttgctagcgctggatgagtctctggaaggacgcacgggactccgcaaagctgacctgtcccaccgaggtcaaatggatacctctgcattggcccgaggcctccgaagtacatcaccgtcaccaaccgtcaccgtcagcatccttgtgagcctgcccaaggccccgcctccggggagactcttgggagcccggccttcgtcggctaaagtccaaagggatggtgacttccacccacaaggtccccactgaacggcgaaaatgtggagcgtaggtcagagaggggaccaggaggggagacgtcccgacaggcgatgagttcccaaggctctggccaccccacccacgccccacgccccacgtcccgggcacccgcgggacaccgccsctttatcccctcctctgtccacagccggccccaccccaccacgcaacccacgcacacacgctggaggttccaaaaccacacggtgtgactag

SEQ ID NO: 337103 - DNA, 613 bp, Homo sapiens
acaggatcaccatagaccaaagcaagtttataactaaggcaatgaagatcatctgtctcctcccttccccattaattgtgaactttagttttataagctcctaagaggcagaaaacaaattggagactcgtcatctatttgggagtgtatggcatgtatttattgtcctaggtgctgggtttatttttttcagctaatgacagttttccatgctttatggtaagtgaccataaagtaagtggtaagtgacttacccttcaggcagttcagcccaggacagtcagcagaagactgtttccagaccccacctgctagttacagatcatccctgatagagcagagaggggtgaccaggtagtgactttatagtcactggaggcaaagcccatttttggacagttcattgagggcttacagataaaaggttcacaaattatgcagtgagctggatggagtgtgaagcgtatttatgggtcgtgcacatacataataggtttactttttgagatttcaaaacatgttttaamcttaacctaggattcccacctgatttaaacctcttatttctctaatgtcagccaaaaatgtgagtatgacatacaaagagaaatac

SEQ ID NO: 337104 - DNA, 564 bp, Homo sapiens
tagccaatactgtcttcttaaaccaaaagttgacagttgcagaagacacgttttttagtgtcacggcaaccaagcaacatattaccttaaattaaatttacaggttgagcatccctaatctgaaaatctgaaatttgaaatgcttcaaaatctgaaactttttgagcactgacatgacaccacatgtggattttgatgtcctagtcaaagtgcaggtgaacaacacacagtttatttgatgttctctaatgaaaaaagaccctctcagcccccttcagctgcagtataacttttctacacatgctcagatttccccatgcaagcacacacacaaagggtcacagaatggcacatgtgcaagctggacaagccaatggcaggatccccacagatgggacctaagtgcatgactcrttgtgtatttttcttattctctgctctgtggtgttagcatactgaaaatgtcaataaggcctgtagatatccctgcgagcagcaatgataaggaaaagtagaaacacttagaacacagaaagtcaagctgttggagaaattggactgtag

SEQ ID NO: 337105 - DNA, 570 bp, Homo sapiens
ttctgcctctgatccctcccatccccattacctgcagactacaggcggcgcaccaccacaccggctgacttttatgttgtttctcatgttttccgtaggtaggtgtgtgtgtgtgtgtgtgtgtgtgtgtgtgtgtgtgtgtgtgtgtgtgtgtgtatctatgtatgtacgtatgtatgtatgtatgtgagtgagatgggtttcggggttctatcatgttgcccacgctggtctcgaactcctgtcctcaagcaatccgcctgcctgcctcggccgcccacactgctgctattacaggcgtgagacrctgcgcctggctccttctacatttgcctgcctgcctgcctgcctgcctgcctgcctgcctgcctgcctgcctgcctatcaatcgtcttctttttagtacggatgtgctctcgctttattgtccatgctctgggcacacgtggtctcttttcaaacttctatgattattattattgtaggcgtcatctcacgtgtcgaggtgatctcgaacttttaggctccagagatcctcccgcatcggcctcccggagtgctgtgatgaca

SEQ ID NO: 337106 - DNA, 574 bp, Homo sapiens
cagaatgcatattttaggcttatataaagtattctgcaacataaggtcaaaaataccccctaccccctttttgataaarataaagcttactactaataataaaatacagccagaggtgtgctgggagtggagggggactgagttaaagaaagtaggaatggggtaaaggctgggacaaagagcagactctctccctgcaggggagtatcaggggtctgcagccaagttaaatgacagcatgacttcaggaggccagatttgagggcttttatctaagatgcagcatcggagtttggtttaagagagtaggaagtgatacatctgttacccaaaggacacttctctttttagaataaattacctgcagagtttaggccaaagaggtgggcaaggtagatttgggaaactgttgcttgctaatatcaccaaacgctttctttttatacttggtggaggctttaattggggcaaggacatttttatacaaagatagagaaaacactcacctatggaatttgattccttgctccatgccctcgctagcacctctcaacatgcttgatgatatttaaaa

SEQ ID NO: 337107 - DNA, 574 bp, Homo sapiens
cagaatgcatattttaggcttatataaagtattctgcaacataaggtcaaaaataccccctaccccctttttgataaaaataaagcttactactaataataaaatacagccagaggtgtgctgggagtggagggggactgagttaaagaaagtaggaatggggtaaaggctgggrcaaagagcagactctctccctgcaggggagtatcaggggtctgcagccaagttaaatgacagcatgacttcaggaggccagatttgagggcttttatctaagatgcagcatcggagtttggtttaagagagtaggaagtgatacatctgttacccaaaggacacttctctttttagaataaattacctgcagagtttaggccaaagaggtgggcaaggtagatttgggaaactgttgcttgctaatatcaccaaacgctttctttttatacttggtggaggctttaattggggcaaggacatttttatacaaagatagagaaaacactcacctatggaatttgattccttgctccatgccctcgctagcacctctcaacatgcttgatgatatttaaaa

SEQ ID NO: 337108 - DNA, 272 bp, Homo sapiens
tcccccgaagagggggacggcggagcgagcgcacggggtcggcggcgacgtcggctacccacccgacccgtcttgaaacacggaccaaggagtctracacgtgcgcgagtcgggggctcgcacgaaagccgccgtggcgcaatgaaggtgaaggccggcgcgctcgccggccgaggtgggatcccgaggcctctccagtccgccgagggcgcaccaccggcccgtctcgcccgccgcgccggggaggtggagcacgagcgcacgtgttagga

SEQ ID NO: 337109 - DNA, 319 bp, Homo sapiens
ggccacgcgcgcgtcccccgaagagggggacggcggagcgagcgcacggggtcggcggcgacgtcggctacccacccgacccgtcttgaaacacggaccaaggagtctaacrcgtgcgcgagtcgggggctcgcacgaaagccgccgtggcgcaatgaaggtgaaggccggcgcgctcgccggccgaggtgggatcccgaggcctctccagtccgccgagggcgcaccaccggcccgtctcgcccgccgcgccggggaggtggagcacgagcgcacgtgttaggacccgaaagatggtgaactatgcctgggcagggcg

SEQ ID NO: 337110 - DNA, 476 bp, Homo sapiens
cagtccgccgagggcgcaccaccggcccgtctcgcccgccgcgccggggaggtggagcacgagcgcacgtgttaggacccgaaagatggtgaactatgcctgggcagggcgaagccagaggaaactctggtggaggtccgtagcggtcctgacgtgcaaatcggtcgtccgacctgggtataggggcgaaagactaatcgaaccatytagtagctggttccctccgaagtttccctcaggatagctggcgctctcgcagacccgacgcacccccgccacgcagttttatccggtaaagcgaatgattagaggtcttggggccgaaacgatctcaacctattctcaaactttaaatgggtaagaagcccggctcgctggcgtggagccgggcgtggaatgcgagtgcctagtgggccacttttggtaagcagaactggcgctgcgggatgaaccgaacgccgggttaaggcgcccga

SEQ ID NO: 337111 - DNA, 489 bp, Homo sapiens
tgcgctgggcccaggggaccctggcgtacctggttcgagaccagggtgtgcttcaggccgctaggtgtacccaaaagcgggcagaaggcccatgaggggaaggtgatgcacgtggggcagagaaaaaaaaaaaacaaccgcgccgcggataagcggggcctgggtcccccacagaagaagctgtcttcccatcagcrcttgcaatgcgccttggggaccctggtatccctggctggaacccagcgtgcacctcggcctgataggggtaccccaagacagaaggcccatgagggaaaggtgagacacctggggcagagaaaaaaataaaaaactgcgccgcccaaaattggggcctgggtcccccacggacgaatgtccctacccatcagccctgcactgggccccggagaccctagcgtctctggctcgaaaccagggtgcgcctcgggcccgctaggggtacctcaaggcgggcagaaagcccatgac

SEQ ID NO: 337112 - DNA, 489 bp, Homo sapiens
tgcgctgggcccaggggaccctggcgtacctggttcgagaccagggtgtgcttcaggccgctaggtgtacccaaaagcgggcagaaggcccatgaggggaaggtgatgcacgtggggcagagaaaaaaaaaaaacaaccgcgccgcggataagcggggcctgggtcccccacagaagaagctgtcttcccatcagcgcttgcaatgcgccttggggaccctggtatccctggctggarcccagcgtgcacctcggcctgataggggtaccccaagacagaaggcccatgagggaaaggtgagacacctggggcagagaaaaaaataaaaaactgcgccgcccaaaattggggcctgggtcccccacggacgaatgtccctacccatcagccctgcactgggccccggagaccctagcgtctctggctcgaaaccagggtgcgcctcgggcccgctaggggtacctcaaggcgggcagaaagcccatgac

SEQ ID NO: 337113 - DNA, 598 bp, Homo sapiens
gcgctggatgagtctctggaaggacgcacgggactccgcaaagctgacctgtcccaccgaggtcaaatggatacctctgcattggcccgaggcctccgaagtacatcaccgtcaccaaccgtcaccgtcagcatccttgtgagcctgcccaaggccccgcctccggggagactcttgggagcccggccttcgtcggctaaagtccaaagggatggtgacttccacccacaaggtccccactgaacggcgaagatgtggagcgtaggtcagagaggggaccaggaggggagacgtcccgacaggcgaygagttcccaaggctctggccaccccacccacgccccacgccccacgtcccgggcacccgcgggacaccgccgctttatcccctcctgtgtccacagccggccccaccccaccacgcaacccacgcacacacgctggaggttccaaaaccacacggtgtgactagagcctgacggagcgagagcccatttcacgaggtgggaggggtgggggtggggtgggttgggggttgtggggtctgtggcgagcccgattctccctcttgggtggctacaggctagaaatgaatatcg

SEQ ID NO: 337114 - DNA, 525 bp, Homo sapiens
tgtgtgaccaaaagtgcctctgctgggagctgggatcctcgggaccatgcttgctagcgctggatgagtctctggaaggacgcacgggactccgcaaagctgacctgtcccaccgaggtcaaatggatacctctgcattggcccgaggcctccgaagtacatcaccgtcaccaaccgtcaccgtcagcatccttgtgagcctgcccaaggccccgcctccggggagactcttgggagcccggccttcgtcggctaaagtccaaagggatggtgacttccacccacaaggtccccactgaacggcgaagatgtggagcgtaggtcagagaggggaccaggaggggagacgtcccgacaggcgacgagttcccaaggctctggccaccccacccacgccccacgccccacgtcccgggcacccgcgggacaccgccgctttatcccctcctstgtccacagccggccccaccccaccacgcaacccacgcacacacgctggaggttccaaaaccacacggtgtgact

SEQ ID NO: 337115 - DNA, 364 bp, Homo sapiens
ttctttggccactttggctgaaattcaccacttccatccaatycactcaagcgagagacttgaaatcacagatggaccatttcttgcaacaagagatactattttttcaaaaagtcacctaaaatttgatagtgttgaatgactagctattctattgtggactttttccacttcacgggtactttctacagcagaatgataacagtatcaaagagctagtgccagctatcggtggtagtacaaggatgactttgtgctcaactgaaacccagctgaatatataactgtctaggaaagtgttaatatggtgatagaatagaaacagtaacaaatgaactaaatcatactatgaatgcctacacta

SEQ ID NO: 337116 - DNA, 364 bp, Homo sapiens
ttctttggccactttggctgaaattcaccacttccatccaattcactcaagcgagagacttgaaatcacagatggaccatttcttgcaacaagagatactattttttcaaaaagtcacctaaaatttgatagtgttgratgactagctattctattgtggactttttccacttcacgggtactttctacagcagaatgataacagtatcaaagagctagtgccagctatcggtggtagtacaaggatgactttgtgctcaactgaaacccagctgaatatataactgtctaggaaagtgttaatatggtgatagaatagaaacagtaacaaatgaactaaatcatactatgaatgcctacacta

SEQ ID NO: 337117 - DNA, 350 bp, Homo sapiens
gaatagaaacagtaacaaatgaactaaatcatactatgaatgcctacactaccattataactttttgaagaatgataataccacttactttattgcyttttgaagtaggaatattttagtggatatgctatagacctgaaaccctataaagaatcccaaagaagctggctggataaagcctgctatggatgtctttatactcaaagactgatgaggcaattcgaatatgtgtccccaccaaatctcatgttgagttatgcttcctaatgttggaggtggatcctggtataaggtgattgaatcatgaaggcaaatttctcatgagtggttcagcactatccccttggtac

SEQ ID NO: 337118 - DNA, 493 bp, Homo sapiens
tgttgtgttaaatacactggattttgtcgttggagtgggaagaacagtgtagaatatctgcttgattttttttatatttattacatgttaaaattattactatgattactatttgggacatactgagttragtatatttaaaattaatttcaccttttcttttaatggggcttactattacatttaaaattacatacgtggctcacatatttattggacagcacagctctataagtttaggaagaaataagaaaaatattgagaatatgtagcgacagtagagaagtttgacctcctgtaagactgattccaataaaactaataggtgatagttttaattgggtttttcctaataaaaaaagtaagtgtactttacatgcctctttgttctccctctttccccttcaatttagaggggagcgtgtatttactacatcaggcttaatattcactatacagtgttaggaagacttaggtaaatgattccctgatg

SEQ ID NO: 337119 - DNA, 493 bp, Homo sapiens
tgttgtgttaaatacactggattttgtcgttggagtgggaagaacagtgtagaatatctgcttgattttttttatatttattacatgttaaaattattactatgattactatttgggacatactgagttgagtatatttaaaattaatttcaccttttcttttaatggggcttactattacatttaaaattacatacgtggctcacatatttattggacagcacagctctakaagtttaggaagaaataagaaaaatattgagaatatgtagcgacagtagagaagtttgacctcctgtaagactgattccaataaaactaataggtgatagttttaattgggtttttcctaataaaaaaagtaagtgtactttacatgcctctttgttctccctctttccccttcaatttagaggggagcgtgtatttactacatcaggcttaatattcactatacagtgttaggaagacttaggtaaatgattccctgatg

SEQ ID NO: 337120 - DNA, 493 bp, Homo sapiens
tgttgtgttaaatacactggattttgtcgttggagtgggaagaacagtgtagaatatctgcttgattttttttatatttattacatgttaaaattattactatgattactatttgggacatactgagttgagtatatttaaaattaatttcaccttttcttttaatggggcttactattacatttaaaattacatacgtggctcacatatttattggacagcacagctctataagtttaggaagaaataagaaaaatattgagaatatgtagcgacagtagagaagtttgacctcctgtaagactgattccaataaaactaataggtgatagttttaattggstttttcctaataaaaaaagtaagtgtactttacatgcctctttgttctccctctttccccttcaatttagaggggagcgtgtatttactacatcaggcttaatattcactatacagtgttaggaagacttaggtaaatgattccctgatg

SEQ ID NO: 337121 - DNA, 635 bp, Homo sapiens
tgcagttttttagaaaacaccaaatatttctcaagttagagatgttttaataaaaacagtcatattgtactggcagcagacaaataaaatggccctttatttcacagttgagaatttgaaattggaaggtaattaacatatgtaaggatgaygtatttgctgcctggcttataggaatgagccaagttgttttttgaggtatgttgttgctgtgtatgtcccacctattttgcttccttaatgaacaatgcaagtttgagacagaaatatttgagaacatttttatcagttgtgacattttgatagtgaacattttatatcttctgtcaacttaaaatgtttgcatcttctgtcagcttaaaatgtttaatttgttatagccaaataatttggctataattgataatttaatttatcaaattaaattgctttttttccctttagactttcttcagtcacatctgaataaatcccttagaagtaagctagatgtaatataatgaaatgcttaaaagggctgtgtatcttcatattacacttacagtgattttctcttgtgcccattatattctacctgcagctagttgaggtaaagagagggcatttaactgtcaagggaacctgtgaggagactg

SEQ ID NO: 337122 - DNA, 471 bp, Homo sapiens
tttttgaggtatgttgttgctgtgtatgtcccacctattttgcttccttaatgaacaatgcaagtttgagacagaaatatttgagaacatttttatcagttgygacattttgatagtgaacattttatatcttctgtcaacttaaaatgtttgcatcttctgtcagcttaaaatgtttaatttgttatagccaaataatttggctataattgataatttaatttatcaaattaaattgctttttttccctttagactttcttcagtcacatctgaataaatcccttagaagtaagctagatgtaatataatgaaatgcttaaaagggctgtgtatcttcatattacacttacagtgattttctcttgtgcccattatattctacctgcagctagttgaggtaaagagagggcatttaactgtcaagggaacctgtgaggagactgtagaaatctggaaagtctcttgagtc

SEQ ID NO: 337123 - DNA, 471 bp, Homo sapiens
tttttgaggtatgttgttgctgtgtatgtcccacctattttgcttccttaatgaacaatgcaagtttgagacagaaatatttgagaacatttttatcagttgtgacattttgatagtgaacattttatatcttctgtcaacttaaaatgtttgcatcttctgtcwgcttaaaatgtttaatttgttatagccaaataatttggctataattgataatttaatttatcaaattaaattgctttttttccctttagactttcttcagtcacatctgaataaatcccttagaagtaagctagatgtaatataatgaaatgcttaaaagggctgtgtatcttcatattacacttacagtgattttctcttgtgcccattatattctacctgcagctagttgaggtaaagagagggcatttaactgtcaagggaacctgtgaggagactgtagaaatctggaaagtctcttgagtc

SEQ ID NO: 337124 - DNA, 498 bp, Homo sapiens
tgttgttgctgtgtatgtcccacctattttgcttccttaatgaacaatgcaagtttgagacagaaatatttgagaacatttttatcagttgtgacattttgatagtgaacattttatatcttctgtcaacttaaaatgtttgcatcttctgtcagcttaaaatgtttaatttgttatagccaaataatttggctataattgataatttaatttatcaaattaaattgctttttttccctttagactttcttcagtcacatctgaataaatcccttagaagtaagctagatgtaatataatgaaatgcttaaaagggctgtgtatcttcatattacacttacartgattttctcttgtgcccattatattctacctgcagctagttgaggtaaagagagggcatttaactgtcaagggaacctgtgaggagactgtagaaatctggaaagtctcttgagtctttgagggattttgggatgcagagagtggggctgggat

SEQ ID NO: 337125 - DNA, 471 bp, Homo sapiens
tttttgaggtatgttgttgctgtgtatgtcccacctattttgcttccttaatgaacaatgcaagtttgagacagaaatatttgagaacatttttatcagttgtgacattttgatagtgaacattttatatcttctgtcaacttaaaatgtttgcatcttctgtcagcttaaaatgtttaatttgttatagccaaataatttggctataattgataatttaatttatcaaattaaattgctttttttccctttagactttcttcagtcacatctgaataaatcccttagaagtaagctagatgtaatataatgaaatgcttaaaagggctgtgtatcttcatattacacttacagtgattttctsttgtgcccattatattctacctgcagctagttgaggtaaagagagggcatttaactgtcaagggaacctgtgaggagactgtagaaatctggaaagtctcttgagtc

SEQ ID NO: 337126 - DNA, 471 bp, Homo sapiens
tttttgaggtatgttgttgctgtgtatgtcccacctattttgcttccttaatgaacaatgcaagtttgagacagaaatatttgagaacatttttatcagttgtgacattttgatagtgaacattttatatcttctgtcaacttaaaatgtttgcatcttctgtcagcttaaaatgtttaatttgttatagccaaataatttggctataattgataatttaatttatcaaattaaattgctttttttccctttagactttcttcagtcacatctgaataaatcccttagaagtaagctagatgtaatataatgaaatgcttaaaagggctgtgtatcttcatattacacttacagtgattttctcttgtrcccattatattctacctgcagctagttgaggtaaagagagggcatttaactgtcaagggaacctgtgaggagactgtagaaatctggaaagtctcttgagtc

SEQ ID NO: 337127 - DNA, 498 bp, Homo sapiens
tgttgttgctgtgtatgtcccacctattttgcttccttaatgaacaatgcaagtttgagacagaaatatttgagaacatttttatcagttgtgacattttgatagtgaacattttatatcttctgtcaacttaaaatgtttgcatcttctgtcagcttaaaatgtttaatttgttatagccaaataatttggctataattgataatttaatttatcaaattaaattgctttttttccctttagactttcttcagtcacatctgaataaatcccttagaagtaagctagatgtaatataatgaaatgcttaaaagggctgtgtatcttcatattacacttacagtgattttctcttgtgcccattatattctacctgcagctagttgaggtaaagagagggcatttaactgtcaagggaacctgtgaggagactgtagaaatctggaaagtctcttgrgtctttgagggattttgggatgcagagagtggggctgggat

SEQ ID NO: 337128 - DNA, 264 bp, Homo sapiens
tatcttggaagcaaacttagaatgcagagatagatgtggcctggatgctgctaactctagccaaccactaamtcttaaggtgggagagatgcagcctttggctgggtgctaagctgctgtagctggttgaatgtagaggtcactatcttttctgaatatttgtaagtaaattaaatcattctttactcctgtatgcctgccaaccaaatgggaaatcgctatagaaaagatggtttaaattttagtctttgaagtggtttatgc

SEQ ID NO: 337129 - DNA, 264 bp, Homo sapiens
tatcttggaagcaaacttagaatgcagagatagatgtggcctggatgctgctaactctagccaaccactaaatcttaaggtgggagagatgcagsctttggctgggtgctaagctgctgtagctggttgaatgtagaggtcactatcttttctgaatatttgtaagtaaattaaatcattctttactcctgtatgcctgccaaccaaatgggaaatcgctatagaaaagatggtttaaattttagtctttgaagtggtttatgc

SEQ ID NO: 337130 - DNA, 264 bp, Homo sapiens
tatcttggaagcaaacttagaatgcagagatagatgtggcctggatgctgctaactctagccaaccactaaatcttaaggtgggagagatgcagcctttggctgggtgctaagctgctgtagctggttgaatgtagaggtcactatcttttctgaatatttgtaagtaaattaaatcattctytactcctgtatgcctgccaaccaaatgggaaatcgctatagaaaagatggtttaaattttagtctttgaagtggtttatgc

SEQ ID NO: 337131 - DNA, 604 bp, Homo sapiens
tctaggcgccaaaacacaaagaaaagtaaagcgccgatcaaagaacaatagggcccccgccagggcggaggttccctaggcgaggttccctaggcaacgagggagagagggaggggcctccagaagggagagagagaaacccgttgccccaggctcggtgaagtcggcgagacctccctccgtgtcacgtcgactttcaataacagtggccgctaggtgatgcccgaagacaaccgatgcctgcctgcaaatgtccgtcagcagggaaaagaattaatgaattaattaatttccktatttatttagagaccgagtctcactcactctacagcctgggccgtagtgcagtggcgcgatctcggctccctgcagcctccgcctccttggttcaagcgattctcccgcctcagcctcccgaggagctggcattacaggggcctgccccaccgctcccgactcagctttgtatttttagtagagacggggtttcgccgtgttgcgtccggccttcacagtttatgttgaagtcgaggagcttatcggggaaataggagaagtacggacgccacacgtgaccgagagaaaagtctgaaaatgcccctcg

SEQ ID NO: 337132 - DNA, 575 bp, Homo sapiens
cccacaaaatcagattgtttgttttacctgcatgatttctattcctcccatcttgttgttctttttataaaacacctttgctaaataataaagttattactctaaggtagtgtccaggtctctttgataataatgaaacgtccatggccaaatcccattgctytgttttgacagtgtgctccaagaaaattactttgatatgccctctcatattagaataaatacattatacatgcctattgcctacatcaagttttgaattgtaccactttcaggtttaacctggccatacagcagattttcttaatggttggtgaacacggaataatagtttattcagataaactattttgcagaaacatttaaaatcagatattgcagaactactgagtatctgaactttaaagggacactcttaaccatattttgttttatttagtactcacactgacaagttgatttaccacctcattttcccaacaagtgtcaagatttcaatatgcagttagtggtttctaaaaacgttgactatttaattacatccttatagtttcccaaaattgcttatagtttgc

SEQ ID NO: 337133 - DNA, 575 bp, Homo sapiens
cccacaaaatcagattgtttgttttacctgcatgatttctattcctcccatcttgttgttctttttataaaacacctttgctaaataataaagttattactctaaggtagtgtccaggtctctttgataataatgaaacgtccatggccaaatcccattgctctgttttgacagtgtgctccaagaaaattactttgatatgccctctcatattagaataaatacattatacatgcctattgcctacatcaagttttgaattgtaccactttcaggtttaacctggccatacagcagattttcttaatgrttggtgaacacggaataatagtttattcagataaactattttgcagaaacatttaaaatcagatattgcagaactactgagtatctgaactttaaagggacactcttaaccatattttgttttatttagtactcacactgacaagttgatttaccacctcattttcccaacaagtgtcaagatttcaatatgcagttagtggtttctaaaaacgttgactatttaattacatccttatagtttcccaaaattgcttatagtttgc

SEQ ID NO: 337134 - DNA, 573 bp, Homo sapiens
gatatgccctctcatattagaataaatacattatacatgcctattgcctacatcaagttttgaattgtaccactttcaggtttaacctggccatacagcagattttcttaatggttggtgaacacggaataataktttattcagataaactattttgcagaaacatttaaaatcagatattgcagaactactgagtatctgaactttaaagggacactcttaaccatattttgttttatttagtactcacactgacaagttgatttaccacctcattttcccaacaagtgtcaagatttcaatatgcagttagtggtttctaaaaacgttgactatttaattacatccttatagtttcccaaaattgcttatagtttgccctcatttagttaggtctataatatttctcaattagtgtaaaaatttctatgcctttttaattatcaatgcatataatgatgtataaaaattattatgtagatagctcctgcaagaaaacttaaaatcaagagcttttagcatcaaagtatcagaatacaaactaaagaaaacacaccaatttggaaagatttt

SEQ ID NO: 337135 - DNA, 573 bp, Homo sapiens
gatatgccctctcatattagaataaatacattatacatgcctattgcctacatcaagttttgaattgtaccactttcaggtttaacctggccatacagcagattttcttaatggttggtgaacacggaataatagtttattcagataaactattttgcagaaacatttaaartcagatattgcagaactactgagtatctgaactttaaagggacactcttaaccatattttgttttatttagtactcacactgacaagttgatttaccacctcattttcccaacaagtgtcaagatttcaatatgcagttagtggtttctaaaaacgttgactatttaattacatccttatagtttcccaaaattgcttatagtttgccctcatttagttaggtctataatatttctcaattagtgtaaaaatttctatgcctttttaattatcaatgcatataatgatgtataaaaattattatgtagatagctcctgcaagaaaacttaaaatcaagagcttttagcatcaaagtatcagaatacaaactaaagaaaacacaccaatttggaaagatttt

SEQ ID NO: 337136 - DNA, 575 bp, Homo sapiens
cccacaaaatcagattgtttgttttacctgcatgatttctattcctcccatcttgttgttctttttataaaacacctttgctaaataataaagttattactctaaggtagtgtccaggtctctttgataataatgaaacgtccatggccaaatcccattgctctgttttgacagtgtgctccaagaaaattactttgatatgccctctcatattagaataaatacattatacatgcctattgcctacatcaagttttgaattgtaccactttcaggtttaacctggccatacagcagattttcttaatggttggtgaacacggaataatagtttattcagataaactattttgcagaaacatttaaaatcagatattgcagaactactgagtatctgaactttraagggacactcttaaccatattttgttttatttagtactcacactgacaagttgatttaccacctcattttcccaacaagtgtcaagatttcaatatgcagttagtggtttctaaaaacgttgactatttaattacatccttatagtttcccaaaattgcttatagtttgc

SEQ ID NO: 337137 - DNA, 604 bp, Homo sapiens
tctaggcgccaaaacacaaagaaaagtaaagcgccgatcaaagaacaatagggcccccgccagggcggaggttccctaggcgaggttccctaggcaacgagggagagagggaggggcctccagaagggagagagagaaacccgttgccccaggctcggtgaagtcggcgagacctccctccgtgtcacgtcgactttcaataacagtggccgctaggtgatgcccgaagacaaccgatgcctgcctgcaaatgtccgtcagcagggaaaagaattaatgaattaattaatttccttatttatttagagaccgagtctcactcactctacagcctgggccgtagtgcagtggcgcgatctcggctccctgcagcctccgcytccttggttcaagcgattctcccgcctcagcctcccgaggagctggcattacaggggcctgccccaccgctcccgactcagctttgtatttttagtagagacggggtttcgccgtgttgcgtccggccttcacagtttatgttgaagtcgaggagcttatcggggaaataggagaagtacggacgccacacgtgaccgagagaaaagtctgaaaatgcccctcg

SEQ ID NO: 337138 - DNA, 604 bp, Homo sapiens
tctaggcgccaaaacacaaagaaaagtaaagcgccgatcaaagaacaatagggcccccgccagggcggaggttccctaggcgaggttccctaggcaacgagggagagagggaggggcctccagaagggagagagagaaacccgttgccccaggctcggtgaagtcggcgagacctccctccgtgtcacgtcgactttcaataacagtggccgctaggtgatgcccgaagacaaccgatgcctgcctgcaaatgtccgtcagcagggaaaagaattaatgaattaattaatttccttatttatttagagaccgagtctcactcactctacagcctgggccgtagtgcagtggcgcgatctcggctccctgcagcctccgcctccytggttcaagcgattctcccgcctcagcctcccgaggagctggcattacaggggcctgccccaccgctcccgactcagctttgtatttttagtagagacggggtttcgccgtgttgcgtccggccttcacagtttatgttgaagtcgaggagcttatcggggaaataggagaagtacggacgccacacgtgaccgagagaaaagtctgaaaatgcccctcg

SEQ ID NO: 337139 - DNA, 592 bp, Homo sapiens
gcagaaacatttaaaatcagatattgcagaactactgagtatctgaactttaaagggacactcttaaccatattttgttttatttagtactcacactgacaagttgatttaccacctcattttcccaacaagtgtcaagatttcaatatgcagttagtggtttctaaaaacgttgactatttaattacatccttatagtttcccaaaattgcttatagtttgccctcatttagttaggtctataatatttctcaattagtgtaaaaatttctatgcctttttaattatcaatgcatataatgatgtataaaaattattatgtagatagctcctgcaagaaaacttaaaatcaagagcttttagcatcaaagtatcagaatacaaactaaagaaaacacacyaatttggaaagattttctttaaatacattaaagtgaataaaatgttcacagagaataactcacatctaaggatacagacgttttcttaaagtgaaactatttttggctcactcagactctgggtagtgtttcactgattttgaatttcactggtcagaaccagtgttggtagtaagaattactgtcccaga

SEQ ID NO: 337140 - DNA, 604 bp, Homo sapiens
tctaggcgccaaaacacaaagaaaagtaaagcgccgatcaaagaacaatagggcccccgccagggcggaggttccctaggcgaggttccctaggcaacgagggagagagggaggggcctccagaagggagagagagaaacccgttgccccaggctcggtgaagtcggcgagacctccctccgtgtcacgtcgactttcaataacagtggccgctaggtgatgcccgaagacaaccgatgcctgcctgcaaatgtccgtcagcagggaaaagaattaatgaattaattaatttccttatttatttagagaccgagtctcactcactctacagcctgggccgtagtgcagtggcgcgatctcggctccctgcagcctccgcctccttggttcaagcgattctcccgcctcagcctcccgaggagctggcattacaggggcctgccccaccgctcccgactcagctttgtatttttagtagagacggggtttcgccgtgttgcgtccggccttmacagtttatgttgaagtcgaggagcttatcggggaaataggagaagtacggacgccacacgtgaccgagagaaaagtctgaaaatgcccctcg

SEQ ID NO: 337141 - DNA, 587 bp, Homo sapiens
tgacctgtgccccatttccctcctccacctgtctgacctggcattcctatttcgggagaccagaagtggggggaagagaagggatgactgtttctttgctttcaccattcctgcatgccatgcaaaggaaggaatattgygcttttaaatattcgttttattaagtaagtggttactctttcaaggacaaaaaaaaatgcaaattgttacaaaactggtagtatttgtaagtgcaagcactacatgctgccttgttcttttaccaattgcatttgcattttaaggtactactggtacagccatggtggagaacagtttggaggttcctctaaacactgaaaatagaggtgccacatgatccagcaatcccactgttggatatatactccagaaataagaaatgagtatatggaagaaattatctgcactcccatgttggttgcaccactgttgacaatagctaagatttggaagcaacctaagtgtccatcaacagattaatgtattaaagaaaatgtggtagatacacacagtggagtattattcagccctaaaaaataatgagattcagtcatttgcaacaacat

SEQ ID NO: 337142 - DNA, 587 bp, Homo sapiens
tgacctgtgccccatttccctcctccacctgtctgacctggcattcctatttcgggagaccagaagtggggggaagagaagggatgactgtttctttgctttcaccattcctgcatgccatgcaaaggaaggaatattgcgcttttaaatattcgttttattaagtaagtggttactctttcaaggacaaaaaaaaatgcaaattgttacaaaactggtagtatttgtaagtgcaarcactacatgctgccttgttcttttaccaattgcatttgcattttaaggtactactggtacagccatggtggagaacagtttggaggttcctctaaacactgaaaatagaggtgccacatgatccagcaatcccactgttggatatatactccagaaataagaaatgagtatatggaagaaattatctgcactcccatgttggttgcaccactgttgacaatagctaagatttggaagcaacctaagtgtccatcaacagattaatgtattaaagaaaatgtggtagatacacacagtggagtattattcagccctaaaaaataatgagattcagtcatttgcaacaacat

SEQ ID NO: 337143 - DNA, 587 bp, Homo sapiens
tgacctgtgccccatttccctcctccacctgtctgacctggcattcctatttcgggagaccagaagtggggggaagagaagggatgactgtttctttgctttcaccattcctgcatgccatgcaaaggaaggaatattgcgcttttaaatattcgttttattaagtaagtggttactctttcaaggacaaaaaaaaatgcaaattgttacaaaactggtagtatttgtaagtgcaagcactacatgctgccttgttcttttaccaattgcatttgcattttaaggtactactggtacagccatggtggagaacagtttggaggttcctctaaacactgaaaatagaggtgccacatgatccagcaatcccactgttggatatatacyccagaaataagaaatgagtatatggaagaaattatctgcactcccatgttggttgcaccactgttgacaatagctaagatttggaagcaacctaagtgtccatcaacagattaatgtattaaagaaaatgtggtagatacacacagtggagtattattcagccctaaaaaataatgagattcagtcatttgcaacaacat

SEQ ID NO: 337144 - DNA, 587 bp, Homo sapiens
tgacctgtgccccatttccctcctccacctgtctgacctggcattcctatttcgggagaccagaagtggggggaagagaagggatgactgtttctttgctttcaccattcctgcatgccatgcaaaggaaggaatattgcgcttttaaatattcgttttattaagtaagtggttactctttcaaggacaaaaaaaaatgcaaattgttacaaaactggtagtatttgtaagtgcaagcactacatgctgccttgttcttttaccaattgcatttgcattttaaggtactactggtacagccatggtggagaacagtttggaggttcctctaaacactgaaaatagaggtgccacatgatccagcaatcccactgttggatatatactccagaaataagaaatgagtatatsgaagaaattatctgcactcccatgttggttgcaccactgttgacaatagctaagatttggaagcaacctaagtgtccatcaacagattaatgtattaaagaaaatgtggtagatacacacagtggagtattattcagccctaaaaaataatgagattcagtcatttgcaacaacat

SEQ ID NO: 337145 - DNA, 612 bp, Homo sapiens
tgggtattatataaccattggttctrtttggcataaccctattaaatggtgctcagagctgaattacctacagaaactttctggtttaattagcataagttggtataaatattagtgagcccatacttctgtgatataattaaaccaacttaatgattctcacataaggtgtcaatttattttactaatgcattcataatctatgctttgtagcaacatttttcaaatgtttaaaatgctaaatcttctcaattttccaatcttttcttgaatctattagatacctatagtgtagttactgaatagctgggaaacaaatacacctagttagaaatggcactgctttataaaaggcactagagaaaagacgagactattcctatatttaaatgctgctggcaagtgaattcctttgtatataaatgaaagataccattcattaaaatgaaagacttgttttaagtgtgattcttacatttcattcatttatgatagagtaaatggctttataattactttaaaatttaactcactagtacattaaatctgttcattgcaagattagaatcaactgtgaggggaactaatttaaacaagcccttccttagtctt

SEQ ID NO: 337146 - DNA, 612 bp, Homo sapiens
tgggtattatataaccattggttctatttggcataaccctattaaatggtgctcagagctgaattacctacagaaactttctggtttaattagcataarttggtataaatattagtgagcccatacttctgtgatataattaaaccaacttaatgattctcacataaggtgtcaatttattttactaatgcattcataatctatgctttgtagcaacatttttcaaatgtttaaaatgctaaatcttctcaattttccaatcttttcttgaatctattagatacctatagtgtagttactgaatagctgggaaacaaatacacctagttagaaatggcactgctttataaaaggcactagagaaaagacgagactattcctatatttaaatgctgctggcaagtgaattcctttgtatataaatgaaagataccattcattaaaatgaaagacttgttttaagtgtgattcttacatttcattcatttatgatagagtaaatggctttataattactttaaaatttaactcactagtacattaaatctgttcattgcaagattagaatcaactgtgaggggaactaatttaaacaagcccttccttagtctt

SEQ ID NO: 337147 - DNA, 486 bp, Homo sapiens
gggagtttgactggggcggtacacctgtsaaacggtaacgcaggtgtcctaatgcgagctcaggtaggacaaaaacctcccgtggagcagaagggcaaaagctcgcttgatcttgattttcagtacgaatacagaccgtgaaagcggggcctcacgatccttctgaccttttgggttttaagcaggaggtgtcagaaaagttaccacagggataactggcttgtggcggccaagcgttcatagcgacgtcgctttttgatccttcgatgtcggctcttcctatcattgtgaagcagaattcaccaagcgttggattgttcacccactaatagggaacgtgagctgggtttagaccgtcgtgagacaggttagttttaccctactgatgatgtgttgttgccatggtaatcctgctcagtacgagaggaaccgcaggttcagacatttggtgtatgtgcttggctgaggagccaatggggcgaagct

SEQ ID NO: 337148 - DNA, 345 bp, Homo sapiens
gggagtttgactggggcggtacacctgtcaaacggtaacgcaggtgtcctaatgcgagctcaggtaggacaraaacctcccgtggagcagaagggcaaaagctcgcttgatcttgattttcagtacgaatacagaccgtgaaagcggggcctcacgatccttctgaccttttgggttttaagcaggaggtgtcagaaaagttaccacagggataactggcttgtggcggccaagcgttcatagcgacgtcgctttttgatccttcgatgtcggctcttcctatcattgtgaagcagaattcaccaagcgttggattgttcacccactaatagggaacgtgagctg

SEQ ID NO: 337149 - DNA, 615 bp, Homo sapiens
gttacaggtgactagcacctactgaattggacactgcagtttcagtgcattgaatttctatcccacttagcgctaattaaaacttcaccctctcacctgacaatgatgctaagatctcagtaagtaaccaactacaggcagtttcaagccctactttacctctaattactcttacagcaatgcaatgaatcatgatttaaaawaaaaaaaaaactgctgttaaattattagtcaagtgcccagggcaatggacagtaaagaaataatgtaggccatgggccgagatgacaaaacggtccttttatttaaagctataataatctgaagccagccctgtaaaatagacatccattgaaaaaggcatgctagttcttttgcttttttgtgtacttggcctcctgtgtccctaaacagatctcttctcagcagagtttgctcagcaagtcacttgatgagtcttgcagtctacagagggggtagggaatggcaggagttggcataggagtgagaggggaggaggcaaggtgaggggggccaggtgaggagggtggcacttgaaggggagttcaagactagcctgggcaacatggtgagaccactgcccctcaccaccgc

SEQ ID NO: 337150 - DNA, 615 bp, Homo sapiens
gttacaggtgactagcacctactgaattggacactgcagtttcagtgcattgaatttctatcccacttagcgctaattaaaacttcaccctctcacctgacaatgatgctaagatctcagtaagtaaccaactacaggcagtttcaagccctactttacctctaattactcttacagcaatgcaatgaatcatgatttaaaaaaaaaaaaaaactgctgttaaattattagtcaagtgcccagggcaatggacagtaaagaaataatgtaggccatgggccgagatgacaaaacggtccttttatttaaagctataataatctgaagccagccctgtaaaatagacatccattgaaaaagrcatgctagttcttttgcttttttgtgtacttggcctcctgtgtccctaaacagatctcttctcagcagagtttgctcagcaagtcacttgatgagtcttgcagtctacagagggggtagggaatggcaggagttggcataggagtgagaggggaggaggcaaggtgaggggggccaggtgaggagggtggcacttgaaggggagttcaagactagcctgggcaacatggtgagaccactgcccctcaccaccgc

SEQ ID NO: 337151 - DNA, 615 bp, Homo sapiens
gttacaggtgactagcacctactgaattggacactgcagtttcagtgcattgaatttctatcccacttagcgctaattaaaacttcaccctctcacctgacaatgatgctaagatctcagtaagtaaccaactacaggcagtttcaagccctactttacctctaattactcttacagcaatgcaatgaatcatgatttaaaaaaaaaaaaaaactgctgttaaattattagtcaagtgcccagggcaatggacagtaaagaaataatgtaggccatgggccgagatgacaaaacggtccttttatttaaagctataataatctgaagccagccctgtaaaatagacatccattgaaaaaggcatgctagttcttttgcttttttgtgtacttggcctcctstgtccctaaacagatctcttctcagcagagtttgctcagcaagtcacttgatgagtcttgcagtctacagagggggtagggaatggcaggagttggcataggagtgagaggggaggaggcaaggtgaggggggccaggtgaggagggtggcacttgaaggggagttcaagactagcctgggcaacatggtgagaccactgcccctcaccaccgc

SEQ ID NO: 337152 - DNA, 561 bp, Homo sapiens
gaaaaaggcatgctagttcttttgcttttttgtgtacttggcctcctgtgtccctaaacagatctcttctcagcagagtttgctcagcaagtcacttgatgagtcttgcagtctacagagggggtagggaatggcaggagttggcataggagtgagaggggaggaggcaaggtgaggggggccaggtgaggagggtggcacttgaaggggagttcaagactagcctgggcaacatggtgagaccactgcccctcaccaccgccatatctgttctcactctggtctcacacacatgcacaaattaaatttaatttaaaaattaaaaaattgttttaaaataagtagagtatttacatggattatgtatacattcattttgtagaactatagatcccatgtaactgggaactctttactcttctaacacaacatttatttagccacaaataaaagaagaccagtgatgtagcctgtacacaaaaaagtaagaacacwctggttagtctggggcaggggtaggggaaagagatctacaaaattaaaattttattggagagcatc

SEQ ID NO: 337153 - DNA, 561 bp, Homo sapiens
gaaaaaggcatgctagttcttttgcttttttgtgtacttggcctcctgtgtccctaaacagatctcttctcagcagagtttgctcagcaagtcacttgatgagtcttgcagtctacagagggggtagggaatggcaggagttggcataggagtgagaggggaggaggcaaggtgaggggggccaggtgaggagggtggcacttgaaggggagttcaagactagcctgggcaacatggtgagaccactgcccctcaccaccgccatatctgttctcactctggtctcacacacatgcacaaattaaatttaatttaaaaattaaaaaattgttttaaaataagtagagtatttacatggattatgtatacattcattttgtagaactatagatcccatgtaactgggaactctttactcttctaacacaacatttatttagccacaaataaaagaagaccagtgatgtagcctgtacacaaaaaagtaagaacactctggttagkctggggcaggggtaggggaaagagatctacaaaattaaaattttattggagagcatc

SEQ ID NO: 337154 - DNA, 561 bp, Homo sapiens
gaaaaaggcatgctagttcttttgcttttttgtgtacttggcctcctgtgtccctaaacagatctcttctcagcagagtttgctcagcaagtcacttgatgagtcttgcagtctacagagggggtagggaatggcaggagttggcataggagtgagaggggaggaggcaaggtgaggggggccaggtgaggagggtggcacttgaaggggagttcaagactagcctgggcaacatggtgagaccactgcccctcaccaccgccatatctgttctcactctggtctcacacacatgcacaaattaaatttaatttaaaaattaaaaaattgttttaaaataagtagagtatttacatggattatgtatacattcattttgtagaactatagatcccatgtaactgggaactctttactcttctaacacaacatttatttagccacaaataaaagaagaccagtgatgtagcctgtacacaaaaaagtaagaacactctggttagtctggggcaggggtaggggraagagatctacaaaattaaaattttattggagagcatc

SEQ ID NO: 337155 - DNA, 251 bp, Homo sapiens
gattgttcacccactaatagggaacgtgagctgggtttagaccgtcgtgagacaggttagttttaccctactgatgatgtgttgttgccatggtaatcctgctcagtacgagaggaaccgcaggttcaracatttggtgtatgtgcttggctgaggagccaatggggcgaagctaccatctgtgggattatgactgaacgcctctaagtcagaatcccgcccaggcggaacgatacggcagcgccgcggag

SEQ ID NO: 337156 - DNA, 547 bp, Homo sapiens
  misc_feature (1)...(547): n = A,T,C or G
ttctgcagtgagtgtccaacctcacatggtctgaaggggcacaggcaagggtcattcacataccctatcatgggccasgctggaaaggccactgtgccacgcctgtggaaacacctgtgaactgcacccaccacaagggcacgcagtgggccactgatcaccacacactggatcgtgtgatggccccagggctgtctgtcacgcacaggagggcagctgggtccagactcctatgtgagcagcccgtggagtgatctcagcagctctccctgccctgaaatggtntggaaagtgggggccaagcaggaacagcccaccgtgggtgacctcctcccctgtctactgttctcttacggggttaaggcaaaggggaaattggatccctgccaggtttccaataaagaggcttcctcaggattcaaactcatttcatgagaagagcctggccccatcaggcacctcagcaacttgtcaaacatgtctcctgcaaggactatcctgtgtgcaacactgctaagctccttgttttgggcagcaccaggagggg

SEQ ID NO: 337157 - DNA, 547 bp, Homo sapiens
  misc_feature (1)...(547): n = A,T,C or G
ttctgcagtgagtgtccaacctcacatggtctgaaggggcacaggcaagggtcattcacataccctatcatgggccacgctggaaaggccactgtgccacgcctgtggaaacacctgtgaactgcacccaccacaagggcacgcagtgggccactgatcaccacacactggatcgtgtgatggccccagggctgtctgtcacgcacaggagggcagctgggtccagactcctatgtgagcagcccgtggagtgatctcagcagctctccctgccctgaaatggtntggaaagtgggggccaagcaggaacagcccaccgtgggtgacctcctcccctgtctactgttctcttacrgggttaaggcaaaggggaaattggatccctgccaggtttccaataaagaggcttcctcaggattcaaactcatttcatgagaagagcctggccccatcaggcacctcagcaacttgtcaaacatgtctcctgcaaggactatcctgtgtgcaacactgctaagctccttgttttgggcagcaccaggagggg

SEQ ID NO: 337158 - DNA, 512 bp, Homo sapiens
  misc_feature (1)...(512): n = A,T,C or G
gccccagggctgtctgtcacgcacaggagggcagctgggtccagactcctatgtgagcagcccgtggagtgatctcagcagctctccctgccctgaaatggtntggaaagtgggggccaagcaggaacagcccaccgtgggtgacctcctcccctgtctactgttctcttacggggttaaggcaaaggggaaattggatccctgccaggtttccaataaagaggcttcctcaggaytcaaactcatttcatgagaagagcctggccccatcaggcacctcagcaacttgtcaaacatgtctcctgcaaggactatcctgtgtgcaacactgctaagctccttgttttgggcagcaccaggaggggagggtcatttcttcttctgagacatggtggttgggtccaggtgacatccacagtctgggccctgacccctttcactctcagcgggaccccttgagacaccagcttcccttccttgctcgggtgtccacaccagcagttctacctact

SEQ ID NO: 337159 - DNA, 512 bp, Homo sapiens
  misc_feature (1)...(512): n = A,T,C or G
gccccagggctgtctgtcacgcacaggagggcagctgggtccagactcctatgtgagcagcccgtggagtgatctcagcagctctccctgccctgaaatggtntggaaagtgggggccaagcaggaacagcccaccgtgggtgacctcctcccctgtctactgttctcttacggggttaaggcaaaggggaaattggatccctgccaggtttccaataaagaggcttcctcaggattcaaactcatttcatgagaagagcctggccccatcaggcacctcagcaacttgtcaaacatgtctcytgcaaggactatcctgtgtgcaacactgctaagctccttgttttgggcagcaccaggaggggagggtcatttcttcttctgagacatggtggttgggtccaggtgacatccacagtctgggccctgacccctttcactctcagcgggaccccttgagacaccagcttcccttccttgctcgggtgtccacaccagcagttctacctact

SEQ ID NO: 337160 - DNA, 547 bp, Homo sapiens
  misc_feature (1)...(547): n = A,T,C or G
ttctgcagtgagtgtccaacctcacatggtctgaaggggcacaggcaagggtcattcacataccctatcatgggccacgctggaaaggccactgtgccacgcctgtggaaacacctgtgaactgcacccaccacaagggcacgcagtgggccactgatcaccacacactggatcgtgtgatggccccagggctgtctgtcacgcacaggagggcagctgggtccagactcctatgtgagcagcccgtggagtgatctcagcagctctccctgccctgaaatggtntggaaagtgggggccaagcaggaacagcccaccgtgggtgacctcctcccctgtctactgttctcttacggggttaaggcaaaggggaaattggatccctgccaggtttccaataaagaggcttcctcaggattcaaactcatttcatgagaagagcctggccccatcaggcacctcagcaacttgtcaaacatgtctcctgcaaggactatcctgtgtgcaacactgctaagctccytgttttgggcagcaccaggagggg

SEQ ID NO: 337161 - DNA, 563 bp, Homo sapiens
agcaccaggaggggagggtcatttcttcttctgagacatggtggttgggtccaggtgacatccacagtctgggccctgacccctttcactctcagcgggaccccttgagacaccagcttcccttccttgctcgggtstccacaccagcagttctacctactacattattacagccagatcaggatcaatgtcctctctctggaataaatgcagtgaccactgttctttgagcattatttatcttaaattattgttttaattagaaatgtatttcacttatattagccaaatttcctttcaatctaaccaaatttcttttaagtgaaaattaaatatttaccttctgctatcaagcattctatgtacacaaaatgtttatttttttcaactttagaaaaaaattgaaaatgtctacatgctactaatctaaaaatacaggctctgggtttatatggtgtttacctttcttccaaattttaaggaatagatatttaaatggcatctactttgttttaaaatacataaaatgttttaagcttttgacctcaaaatttacagtagca

SEQ ID NO: 337162 - DNA, 563 bp, Homo sapiens
agcaccaggaggggagggtcatttcttcttctgagacatggtggttgggtccaggtgacatccacagtctgggccctgacccctttcactctcagcgggaccccttgagacaccagcttcccttccttgctcgggtgtccacaccagcagttctacctactacattattacagccagatcaggatcaatgtcctctctctggaataaatgcagtgaccactgttctttgagcattatttatcttaaattattgttttaattagaaatgtatttcacttatattagccaaatttcctttcaatstaaccaaatttcttttaagtgaaaattaaatatttaccttctgctatcaagcattctatgtacacaaaatgtttatttttttcaactttagaaaaaaattgaaaatgtctacatgctactaatctaaaaatacaggctctgggtttatatggtgtttacctttcttccaaattttaaggaatagatatttaaatggcatctactttgttttaaaatacataaaatgttttaagcttttgacctcaaaatttacagtagca

SEQ ID NO: 337163 - DNA, 552 bp, Homo sapiens
tgtgaagcagaattcaccaagcgttggattgttcacccactaatagggaacgtgagctgggtttagaccgtcgtgagacaggttagttttaccctactgatgatgtgttgttgccatggtaatcctgctcagtacgagaggaaccgcaggttcagacatttggtgtatgtgcttggctgaggagccaatggggcgaagctaccatctgtgggattatgactgaacgcctctaagtcagaatcccgcccaggcggaacgatacggcagcgccgcggagcctcggttggcctcggatagccggtcccccgcctgtccccgccggcgggccgcccccccctccacgcgccccgcgcgcgcgggagggcgcgtgccccgccgcgcgccgggaccggggtccggtgcggagtgcccttcgtcctgggaaacggggcgcggccggaarggcggccgccccctctcccgtcacgcaccgcacgttcgtggggaacctggcgctaaaccattcgtagacgacctgcttctgggtcggggtttcgtacgtagcagagcagc

SEQ ID NO: 337164 - DNA, 555 bp, Homo sapiens
cattaagcttaaactcttctgaaggagaaaagaagcaatggagtagggacattaaagcaggagtgtggtgatatggctgagacttctacttgcacactgtggtagctgtgtggagaatggattgaaaaaagggcaatgacagaagcttaaattagtatcaaatatggcaatcctgtaaatttaggtgtccttgaaataagaatgtataatagttctcattatttccccaagaaatctctgcatttggccttgtgagggaagcgctatagttaccaagtggtgggggtgggaaggtgaatttgaaacaacatttggaattactacactttaaaggtaaagctggcaggaattccatacacgtcagatctgaaaatgtgtgtgtgtgtgtgtgtgtgtgtgtgtgtgtctgtctgtgtgtgtttgtgtgtgtgtgaagcagggagaragagcaagagtgaaagtgagcaagagagagaggagagagagagagagaatcagacagatacagaaaaagattgacagagctgcagagacagaattaaaaggggacaccaa

SEQ ID NO: 337165 - DNA, 555 bp, Homo sapiens
cattaagcttaaactcttctgaaggagaaaagaagcaatggagtagggacattaaagcaggagtgtggtgatatggctgagacttctacttgcacactgtggtagctgtgtggagaatggattgaaaaaagggcaatgacagaagcttaaattagtatcaaatatggcaatcctgtaaatttaggtgtccttgaaataagaatgtataatagttctcattatttccccaagaaatctctgcatttggccttgtgagggaagcgctatagttaccaagtggtgggggtgggaaggtgaatttgaaacaacatttggaattactacactttaaaggtaaagctggcaggaattccatacacgtcagatctgaaaatgtgtgtgtgtgtgtgtgtgtgtgtgtgtgtgtctgtctgtgtgtgtttgtgtgtgtgtgaagcagggagagagagcaagagtgaaagtgagcaagagagagaggagagagagrgagagaatcagacagatacagaaaaagattgacagagctgcagagacagaattaaaaggggacaccaa

SEQ ID NO: 337166 - DNA, 596 bp, Homo sapiens
gttgggtgtagtgtccagtgtttaggtgtaataagaaatatcaggaaattaatgacacaaacattagtaagaaagcaaagataagaagtcgaagtcctgagcctaatggtcctctaayatttaaaaaatagaaaagatgaaacctgcaataaaggactaggggtaattatccaaaacatggtgggggggaagtaggttaagtattctggaattctataaaaaagttttacaaagagaaggtggagatcaactgtgtgaaatgctgctgatatataaattaagacgaaggccgaggagttatggttcaatttatagtttaacaatatggatagcacttatgttttgatacgagcagcttcgttggagtgagtaggtgagaaatcatattggagtggttgctgaaatgaaagtctgatctctggattcttaaggaaaaattttattggactgcagagacataaattggatttttaattctggagtcaggatgtgctcagtaaacatgtgcccattaatgcctcctcgcatttttttagctcggtattctgttatcttttaataatataataatgacttgcaaaacctacacccatttt

SEQ ID NO: 337167 - DNA, 596 bp, Homo sapiens
gttgggtgtagtgtccagtgtttaggtgtaataagaaatatcaggaaattaatgacacaaacattagtaagaaagcaaagataagaagtcgaagtcctgagcctaatggtcctctaatatttaaaaaatagaaaagatgaaacctgcaataaaggactaggggtaattatcmaaaacatggtgggggggaagtaggttaagtattctggaattctataaaaaagttttacaaagagaaggtggagatcaactgtgtgaaatgctgctgatatataaattaagacgaaggccgaggagttatggttcaatttatagtttaacaatatggatagcacttatgttttgatacgagcagcttcgttggagtgagtaggtgagaaatcatattggagtggttgctgaaatgaaagtctgatctctggattcttaaggaaaaattttattggactgcagagacataaattggatttttaattctggagtcaggatgtgctcagtaaacatgtgcccattaatgcctcctcgcatttttttagctcggtattctgttatcttttaataatataataatgacttgcaaaacctacacccatttt

SEQ ID NO: 337168 - DNA, 596 bp, Homo sapiens
gttgggtgtagtgtccagtgtttaggtgtaataagaaatatcaggaaattaatgacacaaacattagtaagaaagcaaagataagaagtcgaagtcctgagcctaatggtcctctaatatttaaaaaatagaaaagatgaaacctgcaataaaggactaggggtaattatccaaaacatggtggggggraagtaggttaagtattctggaattctataaaaaagttttacaaagagaaggtggagatcaactgtgtgaaatgctgctgatatataaattaagacgaaggccgaggagttatggttcaatttatagtttaacaatatggatagcacttatgttttgatacgagcagcttcgttggagtgagtaggtgagaaatcatattggagtggttgctgaaatgaaagtctgatctctggattcttaaggaaaaattttattggactgcagagacataaattggatttttaattctggagtcaggatgtgctcagtaaacatgtgcccattaatgcctcctcgcatttttttagctcggtattctgttatcttttaataatataataatgacttgcaaaacctacacccatttt

SEQ ID NO: 337169 - DNA, 596 bp, Homo sapiens
gttgggtgtagtgtccagtgtttaggtgtaataagaaatatcaggaaattaatgacacaaacattagtaagaaagcaaagataagaagtcgaagtcctgagcctaatggtcctctaatatttaaaaaatagaaaagatgaaacctgcaataaaggactaggggtaattatccaaaacatggtgggggggaagtaggttaagtattctggaattctataaaaaagttttacaaagagaaggtggagatcaactgtgtgaaatgctgctgatatataaattaagacgaaggccgaggagttatggttcaatttatagtttaacaatatggatagcacttatgttttratacgagcagcttcgttggagtgagtaggtgagaaatcatattggagtggttgctgaaatgaaagtctgatctctggattcttaaggaaaaattttattggactgcagagacataaattggatttttaattctggagtcaggatgtgctcagtaaacatgtgcccattaatgcctcctcgcatttttttagctcggtattctgttatcttttaataatataataatgacttgcaaaacctacacccatttt

SEQ ID NO: 337170 - DNA, 460 bp, Homo sapiens
agataaaataattcagcagcaataaaagtcacacttcttaaagttgcagtctcaccaatgcaccacaatgtagcagtctctcttatgaggtatcacgtggagttcttcatctcaccaccaagatgattaaggaacagggacacacgggtgaggttggagggaaagtttaataatcaaaaggaggaagctctctgcagcagacaagrgagtccaactggattgccgtttttactgttgaatcaaaaagcttttataagaaactcctctcagctctatataaaactgtctgcacaattccctttatatatccagctgtgggtatgtgtctagtcaagcacaaagtaggcttctcttgtttgtataactgtgggtttgttttaggtaagcccccctcctccctgtgcaagttcccacagaggccgccatatatatgcctgaaaaagggaggaaaattttacct

SEQ ID NO: 337171 - DNA, 460 bp, Homo sapiens
agataaaataattcagcagcaataaaagtcacacttcttaaagttgcagtctcaccaatgcaccacaatgtagcagtctctcttatgaggtatcacgtggagttcttcatctcaccaccaagatgattaaggaacagggacacacgggtgaggttggagggaaagtttaataatcaaaaggaggaagctctctgcagcagacaagagagtccaactggattgccgtttttactgttgaatcaaaaagcttttataagaaactcctctcagctctwtataaaactgtctgcacaattccctttatatatccagctgtgggtatgtgtctagtcaagcacaaagtaggcttctcttgtttgtataactgtgggtttgttttaggtaagcccccctcctccctgtgcaagttcccacagaggccgccatatatatgcctgaaaaagggaggaaaattttacct

SEQ ID NO: 337172 - DNA, 361 bp, Homo sapiens
  misc_feature (1)...(361): n = A,T,C or G
nnnnnnnnnnnnnnnnnagcgcggcggaggcgacggaggcggcgacgggaatccggccggcctcgacggcggggagccggcgcggcggggccggacgacgggccccggcggggaggagggcaccgagaccccaaacccgccgcgacgccgccgagaaccgcccccgcgcccgccgacacccacgycgtcggggccgcggccggggaccgctccccgccgcccgccggccccacgacacgcgcacaccaacgacacgcccttctttctctctctctctctctctctctctcccccgtctccctcccgagttctccggctctcgcggccggcggggccgggcggcgaacgaacgagcgagcga

SEQ ID NO: 337173 - DNA, 361 bp, Homo sapiens
  misc_feature (1)...(361): n = A,T,C or G
nnnnnnnnnnnnnnnnnagcgcggcggaggcgacggaggcggcgacgggaatccggccggcctcgacggcggggagccggcgcggcggggccggacgacgggccccggcggggaggagggcaccgagaccccaaacccgccgcgacgccgccgagaaccgcccccgcgcccgccgacacccacgtcgtcggggccgcggccggggaccgctccccgccgcccgccggccccacgacacgcgcacaccaacgacacgcccttctttctytctctctctctctctctctctcccccgtctccctcccgagttctccggctctcgcggccggcggggccgggcggcgaacgaacgagcgagcga

SEQ ID NO: 337174 - DNA, 501 bp, Homo sapiens
ccgcggccggggaccgctccccgccgcccgccggccccacgacacgcgcacaccaacgacacgcccttctttctctctctctctctctctctcyctcccccgtctccctcccgagttctccggctctcgcggccggcggggccgggcggcgaacgaacgagcgagcgaacgaacgggcacgcgggccccgcccgcgcacgcgccgcgtcgcggtgggggggtgggtgtgcggagggaagcgcgcggcggcgccgccgccgccgcgggcctcgccctccgggctccgttaatgatccttccgcaggttcacctacggaaaccttgttacgacttttacttcctctagatagtcaagttcgaccgtcttctcagcgctccgccagggccgtgggccgaccccggcggggccgatccgagggcctcactaaaccatccaatcggtagtagcgacgggcggtgtgtacaaagggcagggacttaatcaacgcaagcttatgaccc

SEQ ID NO: 337175 - DNA, 282 bp, Homo sapiens
gaacgaacgggcacgcgggccccgcccgcgcacgcrccgcgtcgcggtgggggggtgggtgtgcggagggaagcgcgcggcggcgccgccgccgccgcgggcctcgccctccgggctccgttaatgatccttccgcaggttcacctacggaaaccttgttacgacttttacttcctctagatagtcaagttcgaccgtcttctcagcgctccgccagggccgtgggccgaccccggcggggccgatccgagggcctcactaaaccatccaatcggtagtagc

SEQ ID NO: 337176 - DNA, 464 bp, Homo sapiens
gccccacgacacgcgcacaccaacgacacgcccttctttctctctctctctctctctctctctcccccgtctccctcccgagttctccggctctcgcggccggcggggccgggcggcgaacgaacgagcgagcgaacgaacgggcacgcgggccccgcccgcgcacgcgccgcrtcgcggtgggggggtgggtgtgcggagggaagcgcgcggcggcgccgccgccgccgcgggcctcgccctccgggctccgttaatgatccttccgcaggttcacctacggaaaccttgttacgacttttacttcctctagatagtcaagttcgaccgtcttctcagcgctccgccagggccgtgggccgaccccggcggggccgatccgagggcctcactaaaccatccaatcggtagtagcgacgggcggtgtgtacaaagggcagggacttaatcaacgcaagcttatg

SEQ ID NO: 337177 - DNA, 386 bp, Homo sapiens
cgagttctccggctctcgcggccggcggggccgggcggcgaacgaacgagcgagcgaacgaacgggcacgcgggccccgcccgcgcacgcgccgcgtcgcggygggggggtgggtgtgcggagggaagcgcgcggcggcgccgccgccgccgcgggcctcgccctccgggctccgttaatgatccttccgcaggttcacctacggaaaccttgttacgacttttacttcctctagatagtcaagttcgaccgtcttctcagcgctccgccagggccgtgggccgaccccggcggggccgatccgagggcctcactaaaccatccaatcggtagtagcgacgggcggtgtgtacaaagggcagggacttaatcaacgcaagcttatg

SEQ ID NO: 337178 - DNA, 386 bp, Homo sapiens
cgagttctccggctctcgcggccggcggggccgggcggcgaacgaacgagcgagcgaacgaacgggcacgcgggccccgcccgcgcacgcgccgcgtcgcggtgggggkgtgggtgtgcggagggaagcgcgcggcggcgccgccgccgccgcgggcctcgccctccgggctccgttaatgatccttccgcaggttcacctacggaaaccttgttacgacttttacttcctctagatagtcaagttcgaccgtcttctcagcgctccgccagggccgtgggccgaccccggcggggccgatccgagggcctcactaaaccatccaatcggtagtagcgacgggcggtgtgtacaaagggcagggacttaatcaacgcaagcttatg

SEQ ID NO: 337179 - DNA, 386 bp, Homo sapiens
cgagttctccggctctcgcggccggcggggccgggcggcgaacgaacgagcgagcgaacgaacgggcacgcgggccccgcccgcgcacgcgccgcgtcgcggtgggggggygggtgtgcggagggaagcgcgcggcggcgccgccgccgccgcgggcctcgccctccgggctccgttaatgatccttccgcaggttcacctacggaaaccttgttacgacttttacttcctctagatagtcaagttcgaccgtcttctcagcgctccgccagggccgtgggccgaccccggcggggccgatccgagggcctcactaaaccatccaatcggtagtagcgacgggcggtgtgtacaaagggcagggacttaatcaacgcaagcttatg

SEQ ID NO: 337180 - DNA, 453 bp, Homo sapiens
ggaccgctccccgccgcccgccggccccacgacacgcgcacaccaacgacacgcccttctttctctctctctctctctctctctctcccccgtctccctcccgagttctccggctctcgcggccggcggggccgggcggcgaacgaacgagcgagcgaacgaacgggcacgcgggccccgcccgcgcacgcgccgcgtcgcggtgggggggtgggtgtgcggagggaagcgcgcggcggcgscgccgccgccgcgggcctcgccctccgggctccgttaatgatccttccgcaggttcacctacggaaaccttgttacgacttttacttcctctagatagtcaagttcgaccgtcttctcagcgctccgccagggccgtgggccgaccccggcggggccgatccgagggcctcactaaaccatccaatcggtagtagcgacgggcggtgtgta

SEQ ID NO: 337181 - DNA, 453 bp, Homo sapiens
ggaccgctccccgccgcccgccggccccacgacacgcgcacaccaacgacacgcccttctttctctctctctctctctctctctctcccccgtctccctcccgagttctccggctctcgcggccggcggggccgggcggcgaacgaacgagcgagcgaacgaacgggcacgcgggccccgcccgcgcacgcgccgcgtcgcggtgggggggtgggtgtgcggagggaagcgcgcggcggcgccgscgccgccgcgggcctcgccctccgggctccgttaatgatccttccgcaggttcacctacggaaaccttgttacgacttttacttcctctagatagtcaagttcgaccgtcttctcagcgctccgccagggccgtgggccgaccccggcggggccgatccgagggcctcactaaaccatccaatcggtagtagcgacgggcggtgtgta

SEQ ID NO: 337182 - DNA, 525 bp, Homo sapiens
cctcactaaaccatccaatcggtagtagcgacgggcggtgtgtacaaagggcagggacttaatcaacgcaagcttatgacccgcacttactgggaattcctcgttcatggggaataattgcaatccccgatccccatcacgaatggggttcaacgggttacccgcgcctgccggcgtagggtaggcacacgctgagccagtcagtgtagcgcgcgtgcagccccggacatctaarggcatcacagacctgttattgctcaatctcgggtggctgaacgccacttgtccctctaagaagttgggggacgccgaccgctcgggggtcgcgtaactagttagcatgccagagtctcgttcgttatcggaattaaccagacaaatcgctccaccaactaagaacggccatgcaccaccacccacggaatcgagaaagagctatcaatctgtcaatcctgtccgtgtccgggccgggtgaggtttcccgtgttgagtcaaattaagccgcaggctccactcctggtggtg

SEQ ID NO: 337183 - DNA, 563 bp, Homo sapiens
ccgccgcgggcctcgccctccgggctccgttaatgatccttccgcaggttcacctacggaaaccttgttacgacttttacttcctctagatagtcaagttcgaccgtcttctcagcgctccgccagggccgtgggccgaccccggcggggccgatccgagggcctcactaaaccatccaatcggtagtagcgacgggcggtgtgtacaaagggcagggacttaatcaacgcaagcttatgacccgcacttactgggaattcctcgttcatggggaataattgcaatccccgatccccatcacgaatggggttcaacgggttacccgcgcctgccggcgtagggtaggcacacgctgagccagtcagtgtagcgcgcgtgcagccccggacatctaagggcatcacagacctgttattgctcaatctcgggtggctgaacgccacttgtccctctaaraagttgggggacgccgaccgctcgggggtcgcgtaactagttagcatgccagagtctcgttcgttatcggaattaaccagacaaatcgctccaccaactaagaacg

SEQ ID NO: 337184 - DNA, 513 bp, Homo sapiens
cagtcagtgtagcgcgcgtgcagccccggacatctaagggcatcacagacctgttattgctcaatctcgggtggctgaacgccacttgtccctctaagaagttgggggacgccgaccgctcgggggtcgcgtaactagttagcatgccagagtctcgttcgttatcggaattaaccagacaaatcgctccaccaactaagaacggccatgcaccaccacccacggaatcgagaaagagctatcaatctgtcaatcctgtccgtgtccgggccgggtgaggtttcccgtgttgagtcaaattaagccgcargctccactcctggtggtgcccttccgtcaattcctttaagtttcagctttgcaaccatactccccccggaacccaaagactttggtttcccggaagctgcccggcgggtcatgggaataacgccgccgcatcgccggtcggcatcgtttatggtcggaactacgacggtatctgatcgtcttcgaacctccgactttcgttct

SEQ ID NO: 337185 - DNA, 369 bp, Homo sapiens
gagctatcaatctgtcaatcctgtccgtgtccgggccgggtgaggtttcccgtgttgagtcaaattaagccgcaggctccactcctggkggtgcccttccgtcaattcctttaagtttcagctttgcaaccatactccccccggaacccaaagactttggtttcccggaagctgcccggcgggtcatgggaataacgccgccgcatcgccggtcggcatcgtttatggtcggaactacgacggtatctgatcgtcttcgaacctccgactttcgttcttgattaatgaaaacattcttggcaaatgctttcgctctggtccgtcttgcgccggtccaagaatttcacctctagcggcgcaatacgaatg

SEQ ID NO: 337186 - DNA, 369 bp, Homo sapiens
gagctatcaatctgtcaatcctgtccgtgtccgggccgggtgaggtttcccgtgttgagtcaaattaagccgcaggctccactcctggtggkgcccttccgtcaattcctttaagtttcagctttgcaaccatactccccccggaacccaaagactttggtttcccggaagctgcccggcgggtcatgggaataacgccgccgcatcgccggtcggcatcgtttatggtcggaactacgacggtatctgatcgtcttcgaacctccgactttcgttcttgattaatgaaaacattcttggcaaatgctttcgctctggtccgtcttgcgccggtccaagaatttcacctctagcggcgcaatacgaatg

SEQ ID NO: 337187 - DNA, 441 bp, Homo sapiens
gggccgggtgaggtttcccgtgttgagtcaaattaagccgcaggctccactcctggtggtgcccttccgtcaattcctttaagtttcagctttgcaaccatactccccccggaacccaaagactttggtttcccggaagctgcccggcgggtcatgggaataacgccgccgcatcgccrgtcggcatcgtttatggtcggaactacgacggtatctgatcgtcttcgaacctccgactttcgttcttgattaatgaaaacattcttggcaaatgctttcgctctggtccgtcttgcgccggtccaagaatttcacctctagcggcgcaatacgaatgcccccggccgtccctcttaatcatggcctcagttccgaaaaccaacaaaatagaaccgcggtcctattccattattcctagctgcggtatccaggcggctcggg

SEQ ID NO: 337188 - DNA, 497 bp, Homo sapiens
gctccaccaactaagaacggccatgcaccaccacccacggaatcgagaaagagctatcaatctgtcaatcctgtccgtgtccgggccgggtgaggtttcccgtgttgagtcaaattaagccgcaggctccactcctggtggtgcccttccgtcaattcctttaagtttcagctttgcaaccatactccccccggaacccaaagactttggtttcccggaagctgcccggcgggtcatgggaataacgccgccgcatcgccggtcggcatcgtttatggtcggaactacgacggyatctgatcgtcttcgaacctccgactttcgttcttgattaatgaaaacattcttggcaaatgctttcgctctggtccgtcttgcgccggtccaagaatttcacctctagcggcgcaatacgaatgcccccggccgtccctcttaatcatggcctcagttccgaaaaccaacaaaatagaaccgcggtcctattccattattcc

SEQ ID NO: 337189 - DNA, 619 bp, Homo sapiens
gaacgccacttgtccctctaagaagttgggggacgccgaccgctcgggggtcgcgtaactagttagcatgccagagtctcgttcgttatcggaattaaccagacaaatcgctccaccaactaagaacggccatgcaccaccacccacggaatcgagaaagagctatcaatctgtcaatcctgtccgtgtccgggccgggtgaggtttcccgtgttgagtcaaattaagccgcaggctccactcctggtggtgcccttccgtcaattcctttaagtttcagctttgcaaccatactccccccggaacccaaagactttggtttcccggaagctgcccggcgggtcatgggaataacgccgccgcatcgccggtcggcatcgtttatggtcggaactacgacggtatctgakcgtcttcgaacctccgactttcgttcttgattaatgaaaacattcttggcaaatgctttcgctctggtccgtcttgcgccggtccaagaatttcacctctagcggcgcaatacgaatgcccccggccgtccctcttaatcatggcctcagttccgaaaaccaacaaaatagaaccgcggtcctattccattattcctagctgcggtatc

SEQ ID NO: 337190 - DNA, 490 bp, Homo sapiens
tccgggccgggtgaggtttcccgtgttgagtcaaattaagccgcaggctccactcctggtggtgcccttccgtcaattcctttaagtttcagctttgcaaccatactccccccggaacccaaagactttggtttcccggaagctgcccggcgggtcatgggaataacgccgccgcatcgccggtcggcatcgtttatggtcggaactacgacggtatctgatcgtcttcgaacctccgactttcgttcttgattaatgaaaacattcttggcaaatgctttcgctcyggtccgtcttgcgccggtccaagaatttcacctctagcggcgcaatacgaatgcccccggccgtccctcttaatcatggcctcagttccgaaaaccaacaaaatagaaccgcggtcctattccattattcctagctgcggtatccaggcggctcgggcctgctttgaacactctaattttttcaaagtaaacgcttcgggccc

SEQ ID NO: 337191 - DNA, 331 bp, Homo sapiens
  misc_feature (1)...(331): n = A,T,C or G
tgcccccggccgtccctcttaatcatggcctcagttccgaaaaccaacaaaatagaaccgcggtcctattccattattcctagctgcggtatccaggcggctcgggcctgctttgaacactctaattttttcaaagtaaacgcktcgggccccgcgggacactcagctaagagcatcgagggggcgccgagaggcaaggggcggggacgggcggtggctcgcctcgngggggccggcccggcccgctcccaagatccaactacgagctttttaactgcagcaactttaatatacgctattggagctggaattaccgcggctgctggcacca

SEQ ID NO: 337192 - DNA, 331 bp, Homo sapiens
  misc_feature (1)...(331): n = A,T,C or G
tgcccccggccgtccctcttaatcatggcctcagttccgaaaaccaacaaaatagaaccgcggtcctattccattattcctagctgcggtatccaggcggctcgggcctgctttgaacactctaattttttcaaagtaaacgctkcgggccccgcgggacactcagctaagagcatcgagggggcgccgagaggcaaggggcggggacgggcggtggctcgcctcgngggggccggcccggcccgctcccaagatccaactacgagctttttaactgcagcaactttaatatacgctattggagctggaattaccgcggctgctggcacca

SEQ ID NO: 337193 - DNA, 472 bp, Homo sapiens
tgccttccttggatgtggtagccgtttctcaggctccctctccggaatcgaaccctgattccccgtcacccgtggtcaccatggtaggcacggcgactaccatcgaaagttgatagggcagacgttcgaatgggtcgtcgccgccacggggggcgtgcgatcggcccgaggttatctagagtcaccaaagccgccggcgcccgccccccrgccggggccggagaggggctgaccgggttggttttgatctgataaatgcacgcatcccccccgcgaagggggtcagcgcccgtcggcatgtattagctctagaattaccacagttatccaagtaggagaggagcgagcgaccaaaggaaccataactgatttaatgagccattcgcagtttcactgtaccggccgtgcgtacttagacatgcatggcttaatctttgagacaagcatatgctactggcaggatcaaccaggt

SEQ ID NO: 337194 - DNA, 432 bp, Homo sapiens
atttttcgtcactacctccccgggtcgggagtgggtaatttgcgcgcctgctgccttccttggatgtggtagccgtttctcaggctccctctccggaatcgaaccctgattccccgtcacccgtggtcaccatggtaggcacggcgactaccatcgaaagttgatagggcagacgttcgaatgggtcgtcgccgccacggggggcgtgcgatcggcccgaggttatctagagtcaccaaagccgccggcgcccgccccccggccggggccggagaggggctgaccgggttggttttgatctgataaatgcacgcatcccccccgcgaagggggtcagcgcccgtcggcatgtattagctctagaattaccacagttmtccaagtaggagaggagcgagcgaccaaaggaaccataactgatttaatgagcca

SEQ ID NO: 337195 - DNA, 215 bp, Homo sapiens
cgaccaccggggccccgcgccacagacccgcgacgtttttttgtcgcgcccgcccgcgaggaggcggacggcccgacccgcgcccggcggccgggagggaccggcggccacgcgcgcgcgcgcgcggccggcgcccgcgggcggcggmgaggcggggacggcgctccgcccgccccgcggggcggccccgacgtccgggcggcgagcgagaggcg

SEQ ID NO: 337196 - DNA, 588 bp, Homo sapiens
tgcgcctggcctgacacagcctcctgatggggctttgaggacagcagccagtagacttaccccaacccaggccgagccagaacctattgcaggtggcctgggaasctcttctcactgtccgtcaagattgggaggtcagcggaccttcagggactggtgtggtctgagaaacatccttgagcctcgccatgactcagtttccccagatggcatcaggctggagcccatgcagggcaggatgccaggctccaccttttgtctggaacctgcattcactgggcacctctctgtaggcatagcagagcagagctccctgtttctgtccctgatctgcagccccaggagcccgagagaccacctaagccaaggggaaggcctctgggccagagcccagctctgcgaagtgggagacctctcagcctccacttccaggtgccctgaagtcgttggcagggggtgctgcctacttggggctcccagactaagggaacacattcacctggtgaccacaataggccctgcaggctgaggcacaggatttgaccaaggacgcatcagagttaggggactgggccctgactcctgcca

SEQ ID NO: 337197 - DNA, 588 bp, Homo sapiens
tgcgcctggcctgacacagcctcctgatggggctttgaggacagcagccagtagacttaccccaacccaggccgagccagaacctattgcaggtggcctgggaacctcttctcaytgtccgtcaagattgggaggtcagcggaccttcagggactggtgtggtctgagaaacatccttgagcctcgccatgactcagtttccccagatggcatcaggctggagcccatgcagggcaggatgccaggctccaccttttgtctggaacctgcattcactgggcacctctctgtaggcatagcagagcagagctccctgtttctgtccctgatctgcagccccaggagcccgagagaccacctaagccaaggggaaggcctctgggccagagcccagctctgcgaagtgggagacctctcagcctccacttccaggtgccctgaagtcgttggcagggggtgctgcctacttggggctcccagactaagggaacacattcacctggtgaccacaataggccctgcaggctgaggcacaggatttgaccaaggacgcatcagagttaggggactgggccctgactcctgcca

SEQ ID NO: 337198 - DNA, 588 bp, Homo sapiens
tgcgcctggcctgacacagcctcctgatggggctttgaggacagcagccagtagacttaccccaacccaggccgagccagaacctattgcaggtggcctgggaacctcttctcactgtccgtcaagattgggaggtcagcggaccttcagggactggtgtggtctgagaaacatccttgagcctcgccatgactcagtttccccagatggcakcaggctggagcccatgcagggcaggatgccaggctccaccttttgtctggaacctgcattcactgggcacctctctgtaggcatagcagagcagagctccctgtttctgtccctgatctgcagccccaggagcccgagagaccacctaagccaaggggaaggcctctgggccagagcccagctctgcgaagtgggagacctctcagcctccacttccaggtgccctgaagtcgttggcagggggtgctgcctacttggggctcccagactaagggaacacattcacctggtgaccacaataggccctgcaggctgaggcacaggatttgaccaaggacgcatcagagttaggggactgggccctgactcctgcca

SEQ ID NO: 337199 - DNA, 588 bp, Homo sapiens
tgcgcctggcctgacacagcctcctgatggggctttgaggacagcagccagtagacttaccccaacccaggccgagccagaacctattgcaggtggcctgggaacctcttctcactgtccgtcaagattgggaggtcagcggaccttcagggactggtgtggtctgagaaacatccttgagcctcgccatgactcagtttccccagatggcatcaggctggagcccatgcagggcaggatgccaggctccaccttttgtctggaacctgcattcactgggcacctctctgtaggcatagcagagcagagctccctgtttctgtccctgatctgcagccccaggagcccgagagaccacctaagccaaggrgaaggcctctgggccagagcccagctctgcgaagtgggagacctctcagcctccacttccaggtgccctgaagtcgttggcagggggtgctgcctacttggggctcccagactaagggaacacattcacctggtgaccacaataggccctgcaggctgaggcacaggatttgaccaaggacgcatcagagttaggggactgggccctgactcctgcca

SEQ ID NO: 337200 - DNA, 599 bp, Homo sapiens
cttctcactgtccgtcaagattgggaggtcagcggaccttcagggactggtgtggtctgagaaacatccttgagcctcgccatgactcagtttccccagatggcatcaggctggagcccatgcagggcaggatgccaggctccaccttttgtctggaacctgcattcactgggcacctctctgtaggcatagcagagcagagctccctgtttctgtccctgatctgcagccccaggagcccgagagaccacctaagccaaggggaaggcctctgggccagagcccagctctgcgaagtgggagasctctcagcctccacttccaggtgccctgaagtcgttggcagggggtgctgcctacttggggctcccagactaagggaacacattcacctggtgaccacaataggccctgcaggctgaggcacaggatttgaccaaggacgcatcagagttaggggactgggccctgactcctgccagctgcaaactcccaaagcccccagccctctcatggggtgaagacaccctgaaggacactccagtgtgctcccacctctgggttctgccagccagagagtgggactctcaggccacatg

SEQ ID NO: 337201 - DNA, 599 bp, Homo sapiens
cttctcactgtccgtcaagattgggaggtcagcggaccttcagggactggtgtggtctgagaaacatccttgagcctcgccatgactcagtttccccagatggcatcaggctggagcccatgcagggcaggatgccaggctccaccttttgtctggaacctgcattcactgggcacctctctgtaggcatagcagagcagagctccctgtttctgtccctgatctgcagccccaggagcccgagagaccacctaagccaaggggaaggcctctgggccagagcccagctctgcgaagtgggagacctctcagcctccacttccaggtgccctgaagtcgttggcagggggtkctgcctacttggggctcccagactaagggaacacattcacctggtgaccacaataggccctgcaggctgaggcacaggatttgaccaaggacgcatcagagttaggggactgggccctgactcctgccagctgcaaactcccaaagcccccagccctctcatggggtgaagacaccctgaaggacactccagtgtgctcccacctctgggttctgccagccagagagtgggactctcaggccacatg

SEQ ID NO: 337202 - DNA, 599 bp, Homo sapiens
cttctcactgtccgtcaagattgggaggtcagcggaccttcagggactggtgtggtctgagaaacatccttgagcctcgccatgactcagtttccccagatggcatcaggctggagcccatgcagggcaggatgccaggctccaccttttgtctggaacctgcattcactgggcacctctctgtaggcatagcagagcagagctccctgtttctgtccctgatctgcagccccaggagcccgagagaccacctaagccaaggggaaggcctctgggccagagcccagctctgcgaagtgggagacctctcagcctccacttccaggtgccctgaagtcgttggcagggggtgctgcctacttggggctcccagactaagggaacacattcacctggtgaccacaataggccctgcaggctgaggcacaggatttraccaaggacgcatcagagttaggggactgggccctgactcctgccagctgcaaactcccaaagcccccagccctctcatggggtgaagacaccctgaaggacactccagtgtgctcccacctctgggttctgccagccagagagtgggactctcaggccacatg

SEQ ID NO: 337203 - DNA, 599 bp, Homo sapiens
cttctcactgtccgtcaagattgggaggtcagcggaccttcagggactggtgtggtctgagaaacatccttgagcctcgccatgactcagtttccccagatggcatcaggctggagcccatgcagggcaggatgccaggctccaccttttgtctggaacctgcattcactgggcacctctctgtaggcatagcagagcagagctccctgtttctgtccctgatctgcagccccaggagcccgagagaccacctaagccaaggggaaggcctctgggccagagcccagctctgcgaagtgggagacctctcagcctccacttccaggtgccctgaagtcgttggcagggggtgctgcctacttggggctcccagactaagggaacacattcacctggtgaccacaataggccctgcaggctgaggcacaggatttgaycaaggacgcatcagagttaggggactgggccctgactcctgccagctgcaaactcccaaagcccccagccctctcatggggtgaagacaccctgaaggacactccagtgtgctcccacctctgggttctgccagccagagagtgggactctcaggccacatg

SEQ ID NO: 337204 - DNA, 519 bp, Homo sapiens
gctttgacaactagttagttcacatatgtaaaataagtctacctgtctgtatgcataattaagatgtaacagtagtgtggtaatgacttgttaaagcaattagaatggcagtrgatcatggcacaatttaccttaaaagccgtgagcagaatacatcacaagctatgatacaatgaatagtcattaggtttaaagtagtatccacatataaaaacacaaagcatattttagctctttaaatgaaagcttcattcagtcaatattggtcttcctgtagatgcatttatgaaacagaaccacaaaacatacagcttacccgcttctcaaaactcattgcacaataggttgagggacttctctacaccaggacctattattaaaaccagtaagtcctcagtgaaaatcatttatttgcccggagtgtcatctgatgtgtctgttgtaggcagctgtggcagtggtgggtggtttagtgacacggaccctgcccacgtctgtccatccatcagtgggctagtg

SEQ ID NO: 337205 - DNA, 344 bp, Homo sapiens
ttcatcaaggatattggtctgtagttttcttttttggttatgtcctttcatggttttggtattagggtgatgctggcttcatagaatgaataagggagggtttcttctttctctgtcttgtggaatagtatgaaaagwttggtatcatttcttctttgaatgaaagaagacattctttgaatgtctggtagaattctgctgtgaatctgtctggtcctcggctttttttgctggtaattttaaaattaccatttcagtcttgctgcttgctttattggtctgcttggggtatctaattcttcctgatttaagctaggagagttgtatttttccaggaatttatc

SEQ ID NO: 337206 - DNA, 425 bp, Homo sapiens
ctaacagattagggccttacccttttgcccctatttaacctttaccttcttaaaagctccttctccaaatacagtcacactgggagatagggcttyaggttaggaattctggggggacaaaattctctccagaacagacactaatatcatgagtgctcagattgctagtgaatatgttcttgttacaattattttcactttgcagttttaaataatgaatacttggataaaaaatacccactgtattctaattttttcaacacttcttacttgcatggattctaaacagaagtccaatgtaattcttatttctgtttctctgtagacaatgtgtttcttcctctgccttattttaatattttatctttgttacaggttttctacggtttgaatatgatattcctaggtatatttttaaaatattc

SEQ ID NO: 337207 - DNA, 425 bp, Homo sapiens
ctaacagattagggccttacccttttgcccctatttaacctttaccttcttaaaagctccttctccaaatacagtcacactgggagatagggctttaggttaggaattctggggggacawaattctctccagaacagacactaatatcatgagtgctcagattgctagtgaatatgttcttgttacaattattttcactttgcagttttaaataatgaatacttggataaaaaatacccactgtattctaattttttcaacacttcttacttgcatggattctaaacagaagtccaatgtaattcttatttctgtttctctgtagacaatgtgtttcttcctctgccttattttaatattttatctttgttacaggttttctacggtttgaatatgatattcctaggtatatttttaaaatattc

SEQ ID NO: 337208 - DNA, 425 bp, Homo sapiens
ctaacagattagggccttacccttttgcccctatttaacctttaccttcttaaaagctccttctccaaatacagtcacactgggagatagggctttaggttaggaattctggggggacaaaattctctccagaacagacaytaatatcatgagtgctcagattgctagtgaatatgttcttgttacaattattttcactttgcagttttaaataatgaatacttggataaaaaatacccactgtattctaattttttcaacacttcttacttgcatggattctaaacagaagtccaatgtaattcttatttctgtttctctgtagacaatgtgtttcttcctctgccttattttaatattttatctttgttacaggttttctacggtttgaatatgatattcctaggtatatttttaaaatattc

SEQ ID NO: 337209 - DNA, 568 bp, Homo sapiens
tatgaaacataagtgaatttcacatttagacttgggtctcatcgycaagatatctcacgtagatgcaaatattataaaatccaaaaaaaaattccgaaaccctaaacacttctggttccaaacatttcagataagggatactcaatctgcatatataaaatatttatgtatcacatacatagtatgtataaaatatgaatttccattcctctacaggttactattctggtacattcccgttatattctgtttatcagactgcaactaaaactttcatgggttcagctttatgttgaacagaatttgcagaattatgagttgaagcaaaccctaggttgataatgctatgattctcctaaatcaccaaagtgcatgaaatgattttaaagctccagaaatactgaagcaactttgtgataaaaattattagtggatgcacaaggagtctataatgtcttggttttgctattgcttactaaggtgcagcaccagtttgaatttgaataccagaccaaagtggatggtgagataatccctcgggataagtgggacagaggagaaaggtgtt

SEQ ID NO: 337210 - DNA, 568 bp, Homo sapiens
tatgaaacataagtgaatttcacatttagacttgggtctcatcgccaagatatctcacgtagatgcaaatattataaaatccaaaaaaaaattccgaaaccctaaacacttctggttccaaacatttcagataagggatactcaatctgcatatataaaatatttatgtatcacatacatagtatgtataaaatatgaatttccattcctctacaggttactattctggtacattcccgttatattctgtttatcagacygcaactaaaactttcatgggttcagctttatgttgaacagaatttgcagaattatgagttgaagcaaaccctaggttgataatgctatgattctcctaaatcaccaaagtgcatgaaatgattttaaagctccagaaatactgaagcaactttgtgataaaaattattagtggatgcacaaggagtctataatgtcttggttttgctattgcttactaaggtgcagcaccagtttgaatttgaataccagaccaaagtggatggtgagataatccctcgggataagtgggacagaggagaaaggtgtt

SEQ ID NO: 337211 - DNA, 568 bp, Homo sapiens
tatgaaacataagtgaatttcacatttagacttgggtctcatcgccaagatatctcacgtagatgcaaatattataaaatccaaaaaaaaattccgaaaccctaaacacttctggttccaaacatttcagataagggatactcaatctgcatatataaaatatttatgtatcacatacatagtatgtataaaatatgaatttccattcctctacaggttactattctggtacattcccgttatattctgtttatcagactgcaactaaaactttcatgggttcagctttatgttgaacagaatttgcagaattatgagttgaagcaaaccctagkttgataatgctatgattctcctaaatcaccaaagtgcatgaaatgattttaaagctccagaaatactgaagcaactttgtgataaaaattattagtggatgcacaaggagtctataatgtcttggttttgctattgcttactaaggtgcagcaccagtttgaatttgaataccagaccaaagtggatggtgagataatccctcgggataagtgggacagaggagaaaggtgtt

SEQ ID NO: 337212 - DNA, 568 bp, Homo sapiens
tatgaaacataagtgaatttcacatttagacttgggtctcatcgccaagatatctcacgtagatgcaaatattataaaatccaaaaaaaaattccgaaaccctaaacacttctggttccaaacatttcagataagggatactcaatctgcatatataaaatatttatgtatcacatacatagtatgtataaaatatgaatttccattcctctacaggttactattctggtacattcccgttatattctgtttatcagactgcaactaaaactttcatgggttcagctttatgttgaacagaatttgcagaattatgagttgaagcaaaccctaggttgataatgctatgattmtcctaaatcaccaaagtgcatgaaatgattttaaagctccagaaatactgaagcaactttgtgataaaaattattagtggatgcacaaggagtctataatgtcttggttttgctattgcttactaaggtgcagcaccagtttgaatttgaataccagaccaaagtggatggtgagataatccctcgggataagtgggacagaggagaaaggtgtt

SEQ ID NO: 337213 - DNA, 648 bp, Homo sapiens
ggttggtgtgctggtggcgctggctgcactgcatgttgtcagtggtgatggagaagggcacctccatggcatccagggcgcgctccagccgttgcttctgggccagcagcaggtcggtctccgcagccagtgcctccacctcacgctgcagctccgacttccagctgtkcgtgtcctgcagtcgctcgcccaccctgcacgtggagtcttgctgtgtcggctgtgccagcacctgggtctctgcggccagctgctggctctcgtgcccctgcagctcccgctctgactggttgcagttggcgaaggcctggcggtagcgagcatagcagttctggaaccacacctccagccagcggtggccaggccggaggacgtgtaggcgcccgtgtttctggccacgtcatactctttgcagggcagctcgtagggtggcactgtctgtggggccagctctggtaggagcacatccgtctgcaccatggtgtctgccgcccaccacggccacgggagtgaggagtgtgtgtggtcagcttgttgcggtcagcccagtgcagtcatcggtcggctccaacggctcagtcccagagcaggacctggctcccagtcgcttgggtgacacagtaaaccaagagcttcctgttgccaaga

SEQ ID NO: 337214 - DNA, 648 bp, Homo sapiens
ggttggtgtgctggtggcgctggctgcactgcatgttgtcagtggtgatggagaagggcacctccatggcatccagggcgcgctccagccgttgcttctgggccagcagcaggtcggtctccgcagccagtgcctccacctcacgctgcagctccgacttccagctgtgcgtgtcctgcagtcgctcgcccaccctgcacgtggagtcttgctgtgtcggctgtgccagyacctgggtctctgcggccagctgctggctctcgtgcccctgcagctcccgctctgactggttgcagttggcgaaggcctggcggtagcgagcatagcagttctggaaccacacctccagccagcggtggccaggccggaggacgtgtaggcgcccgtgtttctggccacgtcatactctttgcagggcagctcgtagggtggcactgtctgtggggccagctctggtaggagcacatccgtctgcaccatggtgtctgccgcccaccacggccacgggagtgaggagtgtgtgtggtcagcttgttgcggtcagcccagtgcagtcatcggtcggctccaacggctcagtcccagagcaggacctggctcccagtcgcttgggtgacacagtaaaccaagagcttcctgttgccaaga

SEQ ID NO: 337215 - DNA, 648 bp, Homo sapiens
ggttggtgtgctggtggcgctggctgcactgcatgttgtcagtggtgatggagaagggcacctccatggcatccagggcgcgctccagccgttgcttctgggccagcagcaggtcggtctccgcagccagtgcctccacctcacgctgcagctccgacttccagctgtgcgtgtcctgcagtcgctcgcccaccctgcacgtggagtcttgctgtgtcggctgtgccagcrcctgggtctctgcggccagctgctggctctcgtgcccctgcagctcccgctctgactggttgcagttggcgaaggcctggcggtagcgagcatagcagttctggaaccacacctccagccagcggtggccaggccggaggacgtgtaggcgcccgtgtttctggccacgtcatactctttgcagggcagctcgtagggtggcactgtctgtggggccagctctggtaggagcacatccgtctgcaccatggtgtctgccgcccaccacggccacgggagtgaggagtgtgtgtggtcagcttgttgcggtcagcccagtgcagtcatcggtcggctccaacggctcagtcccagagcaggacctggctcccagtcgcttgggtgacacagtaaaccaagagcttcctgttgccaaga

SEQ ID NO: 337216 - DNA, 344 bp, Homo sapiens
ttcatcaaggatattggtctgtagttttcttttttggttatgtcctttcatggttttggtattagggtgatgctggcttcatagaatgaataagggagggtttcttctttctctgtcttgtggaatagtatgaaaagtttggtatcatttcttctttgaatgaaagaagacattctttgaatgtctggtagaattctgctgtgaatctgtctggycctcggctttttttgctggtaattttaaaattaccatttcagtcttgctgcttgctttattggtctgcttggggtatctaattcttcctgatttaagctaggagagttgtatttttccaggaatttatc

SEQ ID NO: 337217 - DNA, 344 bp, Homo sapiens
ttcatcaaggatattggtctgtagttttcttttttggttatgtcctttcatggttttggtattagggtgatgctggcttcatagaatgaataagggagggtttcttctttctctgtcttgtggaatagtatgaaaagtttggtatcatttcttctttgaatgaaagaagacattctttgaatgtctggtagaattctgctgtgaatctgtctggtcctcrgctttttttgctggtaattttaaaattaccatttcagtcttgctgcttgctttattggtctgcttggggtatctaattcttcctgatttaagctaggagagttgtatttttccaggaatttatc

SEQ ID NO: 337218 - DNA, 344 bp, Homo sapiens
ttcatcaaggatattggtctgtagttttcttttttggttatgtcctttcatggttttggtattagggtgatgctggcttcatagaatgaataagggagggtttcttctttctctgtcttgtggaatagtatgaaaagtttggtatcatttcttctttgaatgaaagaagacattctttgaatgtctggtagaattctgctgtgaatctgtctggtcctcggctttttttgctggtaattttaaaattaccatttcagtcttkctgcttgctttattggtctgcttggggtatctaattcttcctgatttaagctaggagagttgtatttttccaggaatttatc

SEQ ID NO: 337219 - DNA, 617 bp, Homo sapiens
ttccttccttccttccttcctttctttctttctgtttcgtccttttgagacagagtttcactcttgtttccacggctagagtgcaatggcgcggtcttggctcaccgcaccttccgcctcccgggttcgagcgcttctcctgcctcagcctcccgattagcggggatkacagggaggcacccccacgcctggcttggctgatgtttgtgtttttagtaggcacgccgtgtctctccatgttgctcaggctggtctccaactcccgacctcctgtgatgcgcccacctcggcctctcgaagtgctgggatgacgggcgtgagccaccgtgcccggcctgttgactcatttcgcttttttatttctttcgtttccacgcgtttacttatatgtattaatgtaaacgtttctgtacgcttatatgcaaacaacgacaacgtgtatctctgcgttgaatactcttgcgtatggtaaatacgtatcggttgtatggaaatagacttctgtatgatagatgtaggtgtttgtgttatacaaataaatacacatcgctctataaagaagggatcgtcgataaagacgtttactttacgtatgaaaagcctcgtatttatgtgtg

SEQ ID NO: 337220 - DNA, 566 bp, Homo sapiens
tttcgtttccacgcgtttacttatatgtattaatgtaaacgtttctgtacgcttatatgcaaacaacgacaacgtgtatctctgcgttgaatactcttgcgtatggtaaatacgtatcggttgtatggaaatagacttctgtatgatagatgtaggtgtytgtgttatacaaataaatacacatcgctctataaagaagggatcgtcgataaagacgtttactttacgtatgaaaagcctcgtatttatgtgtgtaaatgaacgagcgtacgtagttatctctgttttctttcttcctctccttcgtgtttttcttccttcctttcttcctttctctccttctttaggtttttcttcctctcttcctttccttctttctctctttctgtccttttttccttcgtgctttatttctctttcgttccctgtgtttccttcttttttctttcctctctgtttctttttcccttctttccttcgtttctttcctcattctttctctctttttcgtgtttctttccttcccgtctgtcttttaaaaaatggagtgtttcagaagtttactt

SEQ ID NO: 337221 - DNA, 566 bp, Homo sapiens
tttcgtttccacgcgtttacttatatgtattaatgtaaacgtttctgtacgcttatatgcaaacaacgacaacgtgtatctctgcgttgaatactcttgcgtatggtaaatacgtatcggttgtatggaaatagacttctgtatgatagatgtaggtgtttgtgttatacaaataaatacacatcgctctataaagaagggatcgtcgataaagacgtttaytttacgtatgaaaagcctcgtatttatgtgtgtaaatgaacgagcgtacgtagttatctctgttttctttcttcctctccttcgtgtttttcttccttcctttcttcctttctctccttctttaggtttttcttcctctcttcctttccttctttctctctttctgtccttttttccttcgtgctttatttctctttcgttccctgtgtttccttcttttttctttcctctctgtttctttttcccttctttccttcgtttctttcctcattctttctctctttttcgtgtttctttccttcccgtctgtcttttaaaaaatggagtgtttcagaagtttactt

SEQ ID NO: 337222 - DNA, 502 bp, Homo sapiens
aacgacaacgtgtatctctgcgttgaatactcttgcgtatggtaaatacgtatcggttgtatggaaatagacttctgtatgatagatgtaggtgtttgtgttatacaaataaatacacatcgctctataaagaagggatcgtcgataaagacgtttacttkacgtatgaaaagcctcgtatttatgtgtgtaaatgaacgagcgtacgtagttatctctgttttctttcttcctctccttcgtgtttttcttccttcctttcttcctttctctccttctttaggtttttcttcctctcttcctttccttctttctctctttctgtccttttttccttcgtgctttatttctctttcgttccctgtgtttccttcttttttctttcctctctgtttctttttcccttctttccttcgtttctttcctcattctttctctctttttcgtgtttctttccttcccgtctgtcttttaaaaaatggagtgtttcagaagtttactt

SEQ ID NO: 337223 - DNA, 549 bp, Homo sapiens
tacttatatgtattaatgtaaacgtttctgtacgcttatatgcaaacaacgacaacgtgtatctctgcgttgaatactcttgcgtatggtaaatacgtatcggttgtatggaaatagacttctgtatgatagatgtaggtgtttgtgttatacaaataaatacacatcgctctataaagaagggatcgtcgataaagacgtttactttacgtatgaaaagcstcgtatttatgtgtgtaaatgaacgagcgtacgtagttatctctgttttctttcttcctctccttcgtgtttttcttccttcctttcttcctttctctccttctttaggtttttcttcctctcttcctttccttctttctctctttctgtccttttttccttcgtgctttatttctctttcgttccctgtgtttccttcttttttctttcctctctgtttctttttcccttctttccttcgtttctttcctcattctttctctctttttcgtgtttctttccttcccgtctgtcttttaaaaaatggagtgtttcagaagtttactt

SEQ ID NO: 337224 - DNA, 541 bp, Homo sapiens
tgtattaatgtaaacgtttctgtacgcttatatgcaaacaacgacaacgtgtatctctgcgttgaatactcttgcgtatggtaaatacgtatcggttgtatggaaatagacttctgtatgatagatgtaggtgtttgtgttatacaaataaatacacatcgctctataaagaagggatcgtcgataaagacgtttactttacgtatgaaaagcctcgtatktatgtgtgtaaatgaacgagcgtacgtagttatctctgttttctttcttcctctccttcgtgtttttcttccttcctttcttcctttctctccttctttaggtttttcttcctctcttcctttccttctttctctctttctgtccttttttccttcgtgctttatttctctttcgttccctgtgtttccttcttttttctttcctctctgtttctttttcccttctttccttcgtttctttcctcattctttctctctttttcgtgtttctttccttcccgtctgtcttttaaaaaatggagtgtttcagaagtttactt

SEQ ID NO: 337225 - DNA, 538 bp, Homo sapiens
ggatggtacctactgctgaataacttctaactaagatgtttccttacgaaacgtatgtcttgaacaaactctgaagtgaactcatgatcgtagaataccagatccttatactcaacagtttcagtcttctagcaaacttttgcagacgctgtagttgtctttggtttgtgtgtgtgtttctttagttgtgttccttgatttgttacttttycttcgagcaccgaagtggtgatggggacaagaagtgcttgggagactggaaaggaatagcatagttcacttattggataatagaaaaatacatggaaacaattcactagctgctgctttttgacagtgttccagtttacggagttactatgaagaacttcacgtaccctttaatttagcagtctctctgttttactcttttgtactcgtgtataagtaggcacataggaaattactacctaggtcatattgttatcaactgaataagataggaaaaagtgtggtcctacttctgcctcaacaccatcctcaccgttgacatttattg

SEQ ID NO: 337226 - DNA, 538 bp, Homo sapiens
ggatggtacctactgctgaataacttctaactaagatgtttccttacgaaacgtatgtcttgaacaaactctgaagtgaactcatgatcgtagaataccagatccttatactcaacagtttcagtcttctagcaaacttttgcagacgctgtagttgtctttggtttgtgtgtgtgtttctttagttgtgttccttgatttgttactttttcttcgagcaccgaagtggtgatggggacaagaagtgcttgggagactggaaaggaatagcatagttcacttattggataatagaaaaatacatggaaacaattcactagctgctgctttttgacagtgttccagtttacggagttactatgaagaacttcacgtaccctttaatttagcagtctctctgttttactcttttgtactcgtgtataagtaggcacataggaaattactacctaggtcatattgttatcaactgaataagataggaaaaagtgtggtcctacttctgcctcmacaccatcctcaccgttgacatttattg

SEQ ID NO: 337227 - DNA, 338 bp, Homo sapiens
taatgtatataaaccatgttttcaacgtgtacgttaaaaataacaacactgtgtatgcttaactttgtgagttaaatcactcaaattctccaactgctccagccatggaattatgagggatggaaaacagctgagagtccgtttggctccgccgctctgagggtgcccagagccctgaaaggccccgtcccaggggcagtggggaagccaggcctggggaccccctcccaccccgggctgagtcccygctacctgtgctgcttgtccggggcatccaggtctccgctcctgcgcgccaggcagcactccacccccgcggcgtcgcccttgacagctgc

SEQ ID NO: 337228 - DNA, 291 bp, Homo sapiens
ctcttctaggttttgtagtttatgtgccaaaaggtgttcatagtacccttgaataatctttawtatttcagtggtgtcagttgtaatatcccctgtttcatttcttagtgaggttatttggattttctctcttcttttcttggttaatcttgctaatggtctatcaattttatttatcttttcaaataaccaactttttgttttatttatgttttgtattttttgttgttgtgtcaatttcatttagttctgctctgatcttggttatttcctgtgtttgctgggattggg

SEQ ID NO: 337229 - DNA, 600 bp, Homo sapiens
actcttgtttccacggctagagtgcaatggcgcgatcttggctcaccgcaccttccgcctcccgggttcgagcgcttctcctgcctcagcctcccgattagcggggatkacagggaggcacccccacgcctggcttggctgatgtttgtgtttttagtaggcacgccgtgtctctccatgttgctcaggctggtctccaactcccgacctcctgtgatgcgcccacctcggcctctcgaagtgctgggatgacgggcgtgagccaccgtgcccggcctgttgactcatttcgcttttttatttctttcgtttccacgcgtttacttatatgtattaatgtaaacgtttctgtacgcttatatgcaaacaacgacaacgtgtatctctgcattgaatactcttgcgtatggtaaatacgtatcggttgtatggaaatagacttctgtatgatagatgtaggtgtttgtgtcatacaaataaatacacatcgctctataaagaagggatcgtcgataaagacgtttattttacgtatgaaaagcgtcgtatttatgtgtgtaaatgaacgagcgtacgtagttatctctgttttctttcttc

SEQ ID NO: 337230 - DNA, 600 bp, Homo sapiens
actcttgtttccacggctagagtgcaatggcgcgatcttggctcaccgcaccttccgcctcccgggttcgagcgcttctcctgcctcagcctcccgattagcggggattacagggaggcacccccacgcctggcttggctgatgtttgtgtttttagtaggcacgccgtgtctctccatgttgctcaggctggtctccaactcccgacctcctgtgatgcgcccacctcggcctctcgaagtgctgggatgacgggcgtgagccaccgtgcccggcctgttgactcatttcgcttttttatttctttcgtttccacgcgtttacttatatgtattaatgtaaacgtttctgtacgcttatatgcaaacaacgacaacgtgtatctctgcattgaatactcttgcgtatggtaaatacgtatcggttgtatggaaatagacttctgtatgatagatgtaggtgtttgtgtcatacaaataaatacacatcgctctataaagaagggatcgtcgataaagacgtttattttacgtatgaaaagcgtcgtatktatgtgtgtaaatgaacgagcgtacgtagttatctctgttttctttcttc

SEQ ID NO: 337231 - DNA, 373 bp, Homo sapiens
ggctgcgttttcggcctcgggaagagcttctcgactcacggtttcgctttcgcggtccacgggccgccctgccagccggatctgtctcgctgacgtccgyggcggttgtcgggctccatctggcggccgctttgagatcgtgctctcggcttccggagctgcggtggcagctgcagagggagggccccgtccccgctgtgagataggcagagctccggaaagcccgcggtcgtcagcccggctggcccggtggcgccagagctgtggcgcgtcgcttgtgagtcacagctctggcgtgcaggtttatgtgggggagaggctgtcgctgcgcttctgggcccgaggcgggcgtggggctgcccgggccggtcga

SEQ ID NO: 337232 - DNA, 466 bp, Homo sapiens
ctttcgcggtccacgggccgccctgccagccggatctgtctcgctgacgtccgcggcggttgtcgggctccatctggcggccgctttgagatcgtgctctcggcttccggagctgcggtggcagctgcagagggagggccccgtccccgctgtgagataggcagagctccggaaagcccgcggtcgtcagcccggctggcccggtggcgccagagctgtggcgcgtcgcttgtgrgtcacagctctggcgtgcaggtttatgtgggggagaggctgtcgctgcgcttctgggcccgaggcgggcgtggggctgcccgggccggtcgaccagcgcgccgtagctccagaggcccgacccgcgacccgcggggaccccccgcgcgtggcgcgggaggctggggacccccttccccggcccggtcgcgggtccgcgctcatcctggccgtctgaggcggcggccgaatt

SEQ ID NO: 337233 - DNA, 551 bp, Homo sapiens
cccccgtcccccgggtgccggggagcggtccccgggccgrgccgcggtccctctgccgcgatcctttctggcgagtccccgtgcggagtcggagagcgctccctgagcgcgcgtgcggcccgagaggtcgcgcctggccggccttcggtccctcgtgtgtcccggtcgtaggaggggccggccgaaaatgcttccggctcccgctctggagacacgggccggccccctgcgtgtggcacgggcggccgggagggcgtccccggcccggcgctgctcccgcgtgtgtcctggggttgaccagagggccccgggcgctccgtgtgtggctgcgatggtggcgtttttggggacaggtgtccgtgtcgcgcgtcgcctgggccggcggcgtggtcggtgacgcgacctcccggccccgggggaggtatatctttcgctccgagtcggcattttgggccgccgggttattgctgacacgctgtcctctggcgacctgtcgctggagaggttgggcctccggatgcgcgcggggctctggcctaccggtgacccgg

SEQ ID NO: 337234 - DNA, 370 bp, Homo sapiens
ggccccctgcgtgtggcacgggcggccgggagggcgtccccggcccggcgctgctcccgcgtgtgtcctggggttgaccagagggccccgggcgctccgtgtgtggctgcgatggtggcgtttttggggacaggtgtccgtgtcgcgcgtcgcctgggccggcggcgtggtcggtgacgcgacctcccggccccgggggaggtatatctttcgctccgagtcggcattttgggccgycgggttattgctgacacgctgtcctctggcgacctgtcgctggagaggttgggcctccggatgcgcgcggggctctggcctaccggtgacccggctagccggccgcgctcctgcttgagccgcctgccggggc

SEQ ID NO: 337235 - DNA, 279 bp, Homo sapiens
cggcattttgggccgccgggttattgctgacacgctgtcctctggcgacctgtcgctggagaggttgggcctccggatgcgcgcggggctctggcctaccggtgacccggctagccggccgcgctcctgcttgagccgcctgccggggcccgygggcctgctgctctctcgcgcgtccgagcgtcccgactcccggtgccggcccgggtccgggtctctgacccacccgggggcggcggggaaggcggcgagggccaccgtgcccccgtgcgctctccg

SEQ ID NO: 337236 - DNA, 174 bp, Homo sapiens
cgcgcggggctctggcctaccggtgacccggctagccggccgcgctcctgcttgagccgcctgccggggcccgcgggcctgctgctctcycgcgcgtccgagcgtcccgactcccggtgccggcccgggtccgggtctctgacccacccgggggcggcggggaaggcggcgagg

SEQ ID NO: 337237 - DNA, 478 bp, Homo sapiens
tgtcctctggcgacctgtcgctggagaggttgggcctccggatgcgcgcggggctctggcctaccggtgacccggctagccggccgcgctcctgcttgagccgcctgccggggcccgcgggcctgctgctctctcgcgcgtccgagcgtcccgactcccggtgccggcccgggtccgggtctctgacccacccgggggcggcggggaaggcggcgagggccaccgtgcccccgtgcgctctccgctgcgggcgsccggggcggccgcgacaaccccaccccgctggctccgtgccgtgcgtgtcaggcgttctcgtctccgcggggttgtccgccgccccttccccggagtggggggttggccggagccgatcggctcgctggccggccggccggcctccgctcccggggggctcttcttgatcgatgtggtgacgtcgtgctctcccgggccgggtccgagccgcgacgggcgaggg

SEQ ID NO: 337238 - DNA, 478 bp, Homo sapiens
tgtcctctggcgacctgtcgctggagaggttgggcctccggatgcgcgcggggctctggcctaccggtgacccggctagccggccgcgctcctgcttgagccgcctgccggggcccgcgggcctgctgctctctcgcgcgtccgagcgtcccgactcccggtgccggcccgggtccgggtctctgacccacccgggggcggcggggaaggcggcgagggccaccgtgcccccgtgcgctctccgctgcgggcgcccgggscggccgcgacaaccccaccccgctggctccgtgccgtgcgtgtcaggcgttctcgtctccgcggggttgtccgccgccccttccccggagtggggggttggccggagccgatcggctcgctggccggccggccggcctccgctcccggggggctcttcttgatcgatgtggtgacgtcgtgctctcccgggccgggtccgagccgcgacgggcgaggg

SEQ ID NO: 337239 - DNA, 582 bp, Homo sapiens
ataattggctactatatctgagccagctaaaatttcagcagacgacgaaaagaagatgtatttgcccagtcctggtgtctgtgagtgattttctcctgtgtgtatgacagctgaagactcataggccctaatcctagcaaacattatcacaacctacacatggggctatgaacggcctacacttcagtttggcccccattaatttacttcatttatttgacaggtagtcactgtgtatgcactatggaagttttttgacayacagtcaaaaaaaaaggacacattggattatattaacaaatttaaaaacctaaaggtttcttctttataagacacttttcagaatataaaaggacaagacatagaatgggagaaaatgtttgcaatgtatctatctgacaaagcaactgtgtccagaccatatagatgacttttacaactgaataagacaaaatataaattaaaattgtcacaaagttgaataggcactttaccagaggagatgtagcgatggccaataagcacacaaaaagaaaatcaacttcactagtaatcagggaaattaaaaccatgagataccac

SEQ ID NO: 337240 - DNA, 536 bp, Homo sapiens
accccttgtcatgtggcattttctggcaaacatgtagatcagtaacaaacatgggcaacataaagccttaatgagatgatttgcttcatagtgagcatgtaattatcgtgtgcatttagatttttcaccaagtttttgcctctgttataggaaaatgaatagattcactgttgatgctataatgaaagtcagcgattsaaagttgaatttttttcattattcagtttggacttttttattagagactatatttctaaatcataatgaaaatcaatggcagaattaatcaatatataagattatcttcacatatattggagaaacaaatctaataggtaaagtaaaatcaaactctactgatattttgtcacatttataaggcaaaattgatagctttaggatatgtgggtttcttgcgagaggtatttatcaaagaaaagatggagatattgccagcgtaagtaaactttgctttttcttcatggttaaagcttcagcactggaatgataaacagcatgaggtccttctaataagt

SEQ ID NO: 337241 - DNA, 620 bp, Homo sapiens
gaagaattagagcccactaaatgtgtggcaaaaggcaagtggttaaatgaattatgayacagggagactatgtgcttgaaaagagatatttaatatgtcaaatacccaccaagctgtggaaataaatgttcaaggatcataacccctaaaatccaatgctgttagttccagcaggctgtgggcagctccataaacgcttaccccagtggtaatgggttaagatgtggcaaatttggtaataaaacacaggatttcaaatttatattttcaaatgtttgagtataattttgaaaaaagacaaaaattcacaatctctttggtttcagatctttaaaaatcagtatcaaaataatctattagatattaggaaaaaataattgagatgaaggttgggagctataaaaattagagtgtaagcaaaagcagaaatatttgctaggatgcatgaagttgtagcagacactttaacttctacccagtaaacgtcctcctctcatttagtaatagaacttcgattttttttttttttaatgggaaagctactcaagctgcattcctagttccccattgtctcatgttctggctctgtgactaattcctggaagatggcgtaggaacaa

SEQ ID NO: 337242 - DNA, 620 bp, Homo sapiens
gaagaattagagcccactaaatgtgtggcaaaaggcaagtggttaaatgaattatgacacagggagactatgtgcttgaaaagagatatttaatatgtcaaatacccaccaagctgtggaaataaatgttcaaggatcataacccctaaaatccaatgctgttagttccagcaggctgtgggcagctccataaacgcttaccccastggtaatgggttaagatgtggcaaatttggtaataaaacacaggatttcaaatttatattttcaaatgtttgagtataattttgaaaaaagacaaaaattcacaatctctttggtttcagatctttaaaaatcagtatcaaaataatctattagatattaggaaaaaataattgagatgaaggttgggagctataaaaattagagtgtaagcaaaagcagaaatatttgctaggatgcatgaagttgtagcagacactttaacttctacccagtaaacgtcctcctctcatttagtaatagaacttcgattttttttttttttaatgggaaagctactcaagctgcattcctagttccccattgtctcatgttctggctctgtgactaattcctggaagatggcgtaggaacaa

SEQ ID NO: 337243 - DNA, 611 bp, Homo sapiens
tccaccactcttctgtccatggaaaaccatcttctttgcttataataacttaccagtggccaaaggactaaaaccacggactcattgaactgttatcagatctcttcagggcagcatgagctagggagggaaaacctcagccttcctctcaagacagagctttccatttttggacaatgataatggggtgttagaaaacacttatctgtgtggatatgaatctgcacctctataacttctaatcatcattcattgattctacgtttattcaattattattccttttgggttgggttaaaataattcctttttcgaattgacagttcttctaagatgtgaagatatcctcttcccttccaggccccagctcctctcttttccagctaaagtataccasaattttcccaaggcttacctgtgagcatctcacacttggttgtcctcctctggaccagcccatttagtaagcatcactctgtgtgtgcagatatgtagatatacatgtatatacatatatacagtagcctaatgttatagagtataataaaattcttgaaaatgagacagagttatcattgacttaccaattattatcttgtcctggataggat

SEQ ID NO: 337244 - DNA, 550 bp, Homo sapiens
tgcctaggcttgtttctacccatccttcttgggaaggctttctagatatttgaaagggtgtggtggtctaagctgtgtctgctttagggggcaccccaagcaccgtaacactgtggttcttgccaactcatagaggtaccacyttgatggtcttggacaagttccggaaaattctctggattacaggcagagactcttgttttctttccttactttctcttaaacaaacagtatctctctctgttctgaaccacctaaagctgggtgtggagtcacactggcacccctgtggacaccaccactgtgactgcactgggtcagacctgaaaccagcacagccctgggtttcacttaaggcctcctgtaactactacctggctactgtctgtttgctcaaggccctcaggctctacagtcagcaggtagcaaaaccagtcagccttgtgttcttctcttcagggtgatgagttcccctaggccccatttggatcaagaggtaccatctgggagtcagggactagagtgaaaaccttaaaagtctgcttggtat

SEQ ID NO: 337245 - DNA, 550 bp, Homo sapiens
tgcctaggcttgtttctacccatccttcttgggaaggctttctagatatttgaaagggtgtggtggtctaagctgtgtctgctttagggggcaccccaagcaccgtaacactgtggttcttgccaactcatagaggtaccaccttgatggtcttggacaagttccrgaaaattctctggattacaggcagagactcttgttttctttccttactttctcttaaacaaacagtatctctctctgttctgaaccacctaaagctgggtgtggagtcacactggcacccctgtggacaccaccactgtgactgcactgggtcagacctgaaaccagcacagccctgggtttcacttaaggcctcctgtaactactacctggctactgtctgtttgctcaaggccctcaggctctacagtcagcaggtagcaaaaccagtcagccttgtgttcttctcttcagggtgatgagttcccctaggccccatttggatcaagaggtaccatctgggagtcagggactagagtgaaaaccttaaaagtctgcttggtat

SEQ ID NO: 337246 - DNA, 550 bp, Homo sapiens
tgcctaggcttgtttctacccatccttcttgggaaggctttctagatatttgaaagggtgtggtggtctaagctgtgtctgctttagggggcaccccaagcaccgtaacactgtggttcttgccaactcatagaggtaccaccttgatggtcttggacaagttccggaaaattctctggattacaggcagagactcttgttttctttccttactttctcttaaacaaacagtatctctctctgttctgaaccacytaaagctgggtgtggagtcacactggcacccctgtggacaccaccactgtgactgcactgggtcagacctgaaaccagcacagccctgggtttcacttaaggcctcctgtaactactacctggctactgtctgtttgctcaaggccctcaggctctacagtcagcaggtagcaaaaccagtcagccttgtgttcttctcttcagggtgatgagttcccctaggccccatttggatcaagaggtaccatctgggagtcagggactagagtgaaaaccttaaaagtctgcttggtat

SEQ ID NO: 337247 - DNA, 550 bp, Homo sapiens
tgcctaggcttgtttctacccatccttcttgggaaggctttctagatatttgaaagggtgtggtggtctaagctgtgtctgctttagggggcaccccaagcaccgtaacactgtggttcttgccaactcatagaggtaccaccttgatggtcttggacaagttccggaaaattctctggattacaggcagagactcttgttttctttccttactttctcttaaacaaacagtatctctctctgttctgaaccacctaaagctgggtgtggagtcacactggcacccctgtggacaccaccactgtgactgcactgggtcagacytgaaaccagcacagccctgggtttcacttaaggcctcctgtaactactacctggctactgtctgtttgctcaaggccctcaggctctacagtcagcaggtagcaaaaccagtcagccttgtgttcttctcttcagggtgatgagttcccctaggccccatttggatcaagaggtaccatctgggagtcagggactagagtgaaaaccttaaaagtctgcttggtat

SEQ ID NO: 337248 - DNA, 494 bp, Homo sapiens
actgccagactactgctggtattttcttaaatctcaaggactcttaagtcagcttgtggtgaatgctccctggcctgagactcacccttcagagcagtgggctcccctctggcccagggcaggtccggcaatgacatccaagagtcatattctacaactggggacccaaagagcttgcctgatgctctacccccttgtggttgtgctcgtatctaaggtgcaaacaacatcccctttacttttcctctgctttttttaagcagacrgagctttgtcccctagccaccgcagctgggaatgtgttgagtctcaccagcaagtctcagaggctcactcaatgtccttgacatagtacctagttatcactgctggttattcctggttcaagggctcttcagttagcaggtgatgaatgctgacagaactgggtcctttccttcaaggcagctgtttcccttctggcccagggtgtgtctagaaatatcatctgtgag

SEQ ID NO: 337249 - DNA, 423 bp, Homo sapiens
actgccagactactgctggtattttcttaaatctcaaggactcttaagtcagcttgtggtgaatgctccctggcctgagactcacccttcagagcagtgggctcccctctggcccagggcaggtccggcaatgacatccaagagtcatattctacaactggggacccaaagagcttgcctgatgctctacccccttgtggttgtgctcgtatctaaggtgcaaacaacatcccctttacttttcctctgctttttttaagcagacggagctttgtcccctagccaccrcagctgggaatgtgttgagtctcaccagcaagtctcagaggctcactcaatgtccttgacatagtacctagttatcactgctggttattcctggttcaagggctcttcagttagcaggtgatgaatgctgacaga

SEQ ID NO: 337250 - DNA, 610 bp, Homo sapiens
tgtgttcttctcttcagggtgatgagttcccctaggccccatttggatcaagaggtaccatctgggagtcagggactagagtgaaaaccttaaaagtctgcttggtattctgttgtactgaggctgagctgacactctaaccacaagacacagtccttccccttcttccctcccccttccaaaggcagaagagcctcacccccttagccaccaccaccacaggccacgaggagtactgccagactactgctggtattttcttaaatctcaaggactcttaagtcagcttgtggtgaatgctccctggcctgagactcacccttcagagcagtgggctcccctctggcccagggcaggtccggcaatgacatccaagagtcatattctacaactggggacccaaagagcttgcctgatgctctacccccttgtggttgtgctcgtatctaaggtgcaaacaacatcccctttacttttcctctgctttttttaagcagacggagctttgtcccctagccaccgcagctgggaatgtgttgagtctcaccagcaagtctcagaggctcactcartgtccttgacatagtacctagttatcactgctggttat

SEQ ID NO: 337251 - DNA, 423 bp, Homo sapiens
actgccagactactgctggtattttcttaaatctcaaggactcttaagtcagcttgtggtgaatgctccctggcctgagactcacccttcagagcagtgggctcccctctggcccagggcaggtccggcaatgacatccaagagtcatattctacaactggggacccaaagagcttgcctgatgctctacccccttgtggttgtgctcgtatctaaggtgcaaacaacatcccctttacttttcctctgctttttttaagcagacggagctttgtcccctagccaccgcagctgggaatgtgttgagtctcaccagcaagtctcagaggctcactcaatgtcctygacatagtacctagttatcactgctggttattcctggttcaagggctcttcagttagcaggtgatgaatgctgacaga

SEQ ID NO: 337252 - DNA, 584 bp, Homo sapiens
agttgctaatgaatatagaaacttagtatatgataaaggcttcatgtcaaagcagtagagaaatttaaaagaaaaagattaattcttttctaaaaatagtatgagatcattgcttagtagtgtagagaaagataaaatgaaagcgtacaaatagtagaagaatgcatggatgcattcctctataagctaggaatagaaaaagcttttcttaaatatgacccaaaatctaggaacaatttgctgaaagaaaaataaaagtgctgacattaaaaaatcacgtaaaaatgccagagcaaatgaaaygacaaatgaaaaaccgggaaaatatttgtgacttatattagaccaaagggtcaatgtacctagtatatgaagagcatccaaaaatagagaacattgtaagataagaatggagaagaggcatgcacgaagagttcactggaaaactaatacaaatggcccttaaaaataaagatgctcagtcttactcaaaaataagataaatgcacattaaaaatactttgtaatattatttatcacctatcatcacctttccatcacctgttggtgggggagagggtttg

SEQ ID NO: 337253 - DNA, 531 bp, Homo sapiens
ctgttcagtgataactaatatgttacataaaaaatggagaagtttataatggatggatcaagctgacatcactagaatttactcattaaatatcatgaaagaggaagccagacattaattgtcccttgatgtgttacaatagaaggtgccatgatgccacctataggatgctcttgccaaaacattggccctaaatctcatcaagcctttagatgtaaccacagtttatataacacaccaaggagagcggracatgccaactaaaaccatgatattgcaatcctcaaaactcagaatgtggaatattccacaagaccaacaatcttgactcctcaacaaataaattacagaaaaataataaatacggaaacctattgattaatacatccttaaagacatagccaaattcagtgggttgatcttacttgaattttgatttaaaacatattatatatgcatataatgatagctgggtgtatagttatggtcaaaatgataagtcatagatttcagacattatagatgttgcag

SEQ ID NO: 337254 - DNA, 564 bp, Homo sapiens
tgaaataggaaatctcttcaaaccaaagtcttccttagacaggtacatttttttwagcatttttcgccatcactgtctggagatttaccatttatcaagaaaactagactgcccatagttgctcatggatagaatggacagtggggtaatttcatcctaatgcctgatgaggttcttgcccctcatcaacaggcttggtagctcccagctatgacttccttcttccagtgcttttcccctctggctgaacttcaaaatcaaagtgaaatttatctgcttaatgtaatacctgctttgcccaattcatttatcaatgtttggctgatttctttccaagaggcagatacttgggcataaatattttctattctatatgtaatatgtagccctgggtaactttcatcagggatggcattaagctctgcaaaatgatggactgttttccttcacattaccttcctccaggtaaactactctgtagattagtaactggtttttcttgatttatttttgaaggttactccatattcctttacacaatacttttctatgaattatgcatgc

SEQ ID NO: 337255 - DNA, 549 bp, Homo sapiens
aaattaaggaagcaatgatatataaaataacatagtgcggaccaaaaaagacatagaggaaggctactgtttggaagaattctgaaccacgttttggaaagggaggagagaggggtccataccagagatctgggctggagcacattggcttggtgggtgactgtgtagatggataaatcagaatcagcacaatgcctatacraactggagggtttctaatggccagaagataggagctttaagtgttgagtttgagattcgtaaacagaatgctagattttaaaggttacattagaaatgctggataaaatggaactactacaacctgtataaacagaaaaaaaagatgtaatgcaatttgctatacttaaatataatttactatataaattatatttggcggtcatttattcgttaatgcattcaacaaacatctaccagatgtgtacaatgtaccaggaactgctctgtgcagtgaggagagaacaataaatgagacaaagatcctgtcctcatggaagactagtagagaaaacaaatgataattta

SEQ ID NO: 337256 - DNA, 479 bp, Homo sapiens
aaaaaaaaaaagtaaaaccagtgcaaattgagttataccctaggtctaggctgttcagaggcaggaacccactcagcccattttcttctggataaccaccactaggagactgtggccaagagcttcccagaatttgagtgaagactagacagcttacctttgttttttttctttttcttttaatttccaacttttaagttccagggtacctgtgcaggacgtgcaggttgttacataggtaaacgtgcgccatggtggtttgctgcacagatcgttccatcacctggagctggaagccattatcctcagcaagctaatgcaggaaccaaaaaccaaataccatgtattctcacttatgagtatgggagctgaatgatkagaacacatggaccatggacacatgcaggggaacaccacaccatggaccctgtcaaagggtatgggtgggggtaggaggaggaaaagcatctggaagaata

SEQ ID NO: 337257 - DNA, 579 bp, Homo sapiens
gcatttggtttccattctaaatgtttaccacctatatacactgttcagaaggcaagtgagtctgactttttacaacctrcaaataatgtggatggacattttgcagacttgagtctagaatagcaattttctgtgggtggaatcataaaaatagaaagctctacctcagacacaaatgaatgaaagattgtagtatgcccctccctcgcttaaaatccagtggttgtaacatacaataaagccagcatgtgaaagctgtggggaaaacatgggttattaaataaatggctttcagaaacctggagagccatttcaggaaaaaaaaaataaattgcatccatacctcaaataatacaacagaataaattccaagtgcatcaaagatttaggaaacatgtaaaaaacatttttaaattatggactaactgtgtcctcttcagctaaacactgaccatcacgtccttctctccagtgggtcatctttaaaagcttgggaaacttagctatggcctcatgacacactgaggcaggttttcccacaggttttgtgtgaagcaagttatacttatttgtaaaatt

SEQ ID NO: 337258 - DNA, 579 bp, Homo sapiens
gcatttggtttccattctaaatgtttaccacctatatacactgttcagaaggcaagtgagtctgactttttacaacctacaaataatgtggatggacattttgcagacttgagtctagaatagcaattttctgtgggtggaatcataaaaatagaaagctctacctcagacacaaatgaatgaaagattgtagtatgcccctccctcgcttaaaatccartggttgtaacatacaataaagccagcatgtgaaagctgtggggaaaacatgggttattaaataaatggctttcagaaacctggagagccatttcaggaaaaaaaaaataaattgcatccatacctcaaataatacaacagaataaattccaagtgcatcaaagatttaggaaacatgtaaaaaacatttttaaattatggactaactgtgtcctcttcagctaaacactgaccatcacgtccttctctccagtgggtcatctttaaaagcttgggaaacttagctatggcctcatgacacactgaggcaggttttcccacaggttttgtgtgaagcaagttatacttatttgtaaaatt

SEQ ID NO: 337259 - DNA, 579 bp, Homo sapiens
gcatttggtttccattctaaatgtttaccacctatatacactgttcagaaggcaagtgagtctgactttttacaacctacaaataatgtggatggacattttgcagacttgagtctagaatagcaattttctgtgggtggaatcataaaaatagaaagctctacctcagacacaaatgaatgaaagattgtagtatgcccctccctcgcttaaaatccagtggttgtaacatacaataaagccagcatgtgaaagctgtggggaaaacatgggttattaaataaatggctttcagaaacctggagagccatttcaggaaaaaaaaaataaattgcatccatacctcaaataatacaacagaataaattccaagtgcatcaaagatttaggaaacrtgtaaaaaacatttttaaattatggactaactgtgtcctcttcagctaaacactgaccatcacgtccttctctccagtgggtcatctttaaaagcttgggaaacttagctatggcctcatgacacactgaggcaggttttcccacaggttttgtgtgaagcaagttatacttatttgtaaaatt

SEQ ID NO: 337260 - DNA, 636 bp, Homo sapiens
agccatttcaggaaaaaaaaaataaattgcatccatacctcaaataatacaacagaataaattccaagtgcatcaaagatttaggaaacatgtaaaaaacatttttaaattatggactaactgtgtcctcttcagctaaacactgaccatcacgtccttctctccagtgggtcatctttaaaagcttgggaaacttagctatggcctcatgacacactgaggcaggttttcccacaggttttgtgtgaagcaagttatacttatttgtaaaattttcaacttgtattagcttaaaaaatgaatatctgattgcagctgtattctattctatattttagaacaaaaacctggctcaggaaacaccaggtcttattacaacaatactgcttaatgataccttttcctgtgcatgatattttaggcacaaagtgtgagaagagartttaaacatgtcccttgtgtgtactagagaacaaccccaacccacacacagtctatgaaagggaaaattaatgagcttatgtggttatttttaagccttccttcctttcttctttgtagtctttctcctatttttaatttttttaaaagtgtaataatggataagagcggaaaaacatttttaaaaagtttgag

SEQ ID NO: 337261 - DNA, 533 bp, Homo sapiens
gaagtttatagtaagagagtccacactttaataactgttctttgaaacagagaaatcaatacttgctagcgatgagggtggacacttcatgagctgagttctcatgaacctgcaagctaactttaatatgaaaagaaacctgtaagtttctcagtgcaattatattagcacctggaagtgccgataagtcttggaaaggtcaattatttcagctgttattagaaaaatgttkgtgatggtcagggaaagtaagagaattttccatgatgacatgtcttttactctttttttttttttaatttaaaatccccgcctgactctgaaacatcaggttgtataataattcaatgcttggattactatttagcagtgcttgacatttcccaaaacattattttcactgctattctatcatgcgaaagccttaagccaccccatgaagtcagtaggtggataataaatatttttctaaagaatattctttttctaagaattaactgtagttaggatgcttcatcaactatcaattcttg

SEQ ID NO: 337262 - DNA, 596 bp, Homo sapiens
ggtatcattcaaacctaggtcttcctctttggggattttcaaggtcatggtggtccacactttaaagaattcagaatagtgatgaattctgcatttcaagccacataaaaattggtgttagtaactaacagaacatgaagactctcactaagtaactaatcccaattcaagcactttgaaactagctataatgraaatcacaccaggagaaggacatcagacgtccgttagcaaaacaaagcataatgaaaccctttactttactctattatgagtacccaaatcacagggtactgaagagactttatagaacaccatttctttctttcttcctttttcaagaatgttattgatgtaacaacacaaaggaaatgtcaaaaatagaaaatgtgtcctataatccaactcttcaatatgcatcattactgttcaagccttgtgctaaagattatatatttttaagtaggtaggcataaatctttcacgttctgttttaataaataatattttttccttttggaagcacggttttcaaatggtaatttaaaaataactgcatgtcaatacaactaattaacaaattaccctttccaaaa

SEQ ID NO: 337263 - DNA, 544 bp, Homo sapiens
accttgaggaaagtggcatttggcagattgtgactttacagggaggaaatactaagcgagcctttcccagaactgtacagcgctgatctccccaggtctcacacactgcttggtaactgggagtgattataagtcttgcagtcttacagaaataattgcaaagaagtgaatgagtgaggaaaagccacaacatcgtgttaascaaatcagtgagattttaagggagaagatgaggtctcctgtgcccataaagcagtggttctcaaaccctcgttgttcattaaaatgacctggacaactttaaaaaatcttgattcccaggccactaccctgactaattaaaattaaatcataatcttagagggtggaacctagcatcagtacttttaaagctccccaggtaatttcaaggtggtttaaatgctaatgaaattagaaattaccagcaatcaatattcatgagtcacaaggaattatagttatggattttgccagtcatgttcagatctggaatatgccctcaagttatatagcatttagcaaa

SEQ ID NO: 337264 - DNA, 539 bp, Homo sapiens
tctcggggcagacatgtaggcactgagagaagatgaagcwattcttcaagagaagccaagatttcaggctcaggcatgagtcataaatagctttgaaggtccaaccccactccctccagagaacccccggggaatttcagtcctggagtcccatagtgtctttccagtcattttcctttatttatttattgtggcccaactcagttgcagtgaatttctcttccttgtgaccaaacaattcatcactgagacaaatgggcaaaatcccagtcatttgaaaaacaatccagttatcaaaaaggatcaattctctaacagctatagatggctatcaagttttgcagtttgtgtggtttactgaagtgctttttgttcaatatgtgcatttcaagaaacactccaagctttgattaagagaatatggtttcccacctcaataactaacttttcataaaacagatgtctgtaattttattttaaatatgacccaatagtggaatttgatctgaaggagttgaaatagagtgtttttaaaataa

SEQ ID NO: 337265 - DNA, 539 bp, Homo sapiens
tctcggggcagacatgtaggcactgagagaagatgaagctattcttcaagagaagccaagatttcaggctcaggcatgagtcataaatagctttgaaggtccaaccccactccctccagagaacccccggggaatttcagtcctggagtcccatagtgtctttccagtcattttcctttatttatttattgtggcccaactcagttgcagtgaatttctcttccttgtgaccaaacaattcatcactgagacaaatgggcaaaatcccagtcatttgaaaaacaatccagttatcaaaaaggatcaattctctaacagctmtagatggctatcaagttttgcagtttgtgtggtttactgaagtgctttttgttcaatatgtgcatttcaagaaacactccaagctttgattaagagaatatggtttcccacctcaataactaacttttcataaaacagatgtctgtaattttattttaaatatgacccaatagtggaatttgatctgaaggagttgaaatagagtgtttttaaaataa

SEQ ID NO: 337266 - DNA, 538 bp, Homo sapiens
tccatcttacctagagcaacaactatgggtctattaataaagtacttaagactatatacaattaaacatgaaattcctcagttacagaacacacaattcaagtgctcaatggctacatgtctagcggtgattgtgttgcacagcacagatacaggacatgtccatcatcacacagaacgctatttgtcagaaatattccaaattaacaaacaaacccaagtggaaaaattactgttaaatacgtccaaatagttgcaaacaggctttgttttccaggcagaagaatttggaaaatgctatgaatcgtatctcacacctatctgcaaaattgcaatgttatttagagtaaggatgttctgactttctcttcgtgacaagcagacggacgtctcaggaaacactcatgtagccggctgcttctgggaargagtggggcagggctcctctcacatttacaggactgtgcattcacatcatctcttatggatcatggtgcctcaactccacctgccaacattaatagaaaatgacagttgcc

SEQ ID NO: 337267 - DNA, 538 bp, Homo sapiens
tccatcttacctagagcaacaactatgggtctattaataaagtacttaagactatatacaattaaacatgaaattcctcagttacagaacacacaattcaagtgctcaatggctacatgtctagcggtgattgtgttgcacagcacagatacaggacatgtccatcatcacacagaacgctatttgtcagaaatattccaaattaacaaacaaacccaagtggaaaaattactgttaaatacgtccaaatagttgcaaacaggctttgttttccaggcagaagaatttggaaaatgctatgaatcgtatctcacacctatctgcaaaattgcaatgttatttagagtaaggatgttctgactttctcttcgtgacaagcagacggacgtctcaggaaacactcatgtagccggctgcttctgggaaagagtggggcagggctcctctcacatttacaggactgtkcattcacatcatctcttatggatcatggtgcctcaactccacctgccaacattaatagaaaatgacagttgcc

SEQ ID NO: 337268 - DNA, 608 bp, Homo sapiens
ttgttgtgtttctcccttctaaacattctaactgtccttgacacaggtctggggtagagtataaagggagtgttgcaaattcacatcttaaaccaaatcaaagacacaatttggatgacaagatgttttatattgcacctcatttcaatttgggttattccattaatgtgtcagtatactacaaaatgcaaatgagcctgaatatctgctataatattaaaataaagttgcaggctcaaatccagtttcaagcattaatccttaatactatactggtttttcagaaaaaaatatattttttgtctacaaatctgagatcaaaacggaatgaataaatagctcccttataagtaagcaataatctaccttagcctgtatttccatgtttytactggccttacacgtagacaatttctattatcaccagttcatttaaaagaggtcacagcattttggcatgtgaaagactagaatcagtgtattgccctagaggcaataacatgtatgaatcagagtcaaagtcacatgcttctgttcttgctggattgtgatattacatagtaaaacatgaggtggtatttctgttgtgtgtagctctttgtttgtta

SEQ ID NO: 337269 - DNA, 595 bp, Homo sapiens
atagcactttctcaattactgaaatcaagtggcttaggttactatttcttacatataaacaacctcctaacactgctttttgtatcctttttcctttccaggttgctattaatattcattttaacaaatttttttatttaaataccaatagctagacagctgtaaaagaaaaccgggaagaaacttgacttaaaaaaatgcaaaaggaaataagttgattaaaaaaatacaaaacacttctaaaaagtaaaagacataattaaactacacagtgaaataaattatatcaatctatacaatacatatgaaaggactgactttttctataaaacagaccatctagtgaacaggtgagttaaaatataagccccagccataccttgttaacaaatacacatgtaacagaaatgtgaaatagaaaggttgaaagtagggagacaggcaaatgaaatttcttttaaaaagyggggggtggaggaagagaaaaaaatcaggattacaatgttctcatcaaaaatggtagaatttttgttaaaatactaagtaaaatataaagggagtataaaaaatcagataaagtacaagtgacgaggaa

SEQ ID NO: 337270 - DNA, 581 bp, Homo sapiens
attaaaaaaatacaaaacacttctaaaaagtaaaagacataattaaactacacagtgaaataaattatatcaatctatacaatacatatgaaaggactgactttttctataaaacagaccatctagtgaacaggtgagttaaaatataagccccagccataccttgttaacaaatacacatgtaacagaaatgtgaaatagaaaggttgaaagtagggagacaggcaaatgaaatttcttttaaaaagtggggggtggaggaagagaaaaaaatcaggattacaatgttctcatcaaaaatggtagaatttttgttaaaatactaagtaaaatataaagggagtataaaaaatcagataaagtacaagtgacgaggaagatatgccaagttataaacccatatacaacaaccaatatctaaatacaaaaataaaaactaatagatttacaaagayaatttggtgaaaacttaaatcatagtacaatttttaaaatatgtatttctaataattggacaaattagtagaaaaaataagggacaaaggaaattcataatatagtcagtacatttggtatcatag

SEQ ID NO: 337271 - DNA, 261 bp, Homo sapiens
acagaacatttcacccaagaccagcataatacacactcatcttaagcacacaaaacatcctccaagatagatcacatgttaggtcacaaaataagccagaagatttaataagactgaagtcatactgagtacattttccaaccacagtagaatgaaacttrgaattaatggcagggggaaaactggaaaatgtataattataaataaagcaaacaatgcattcttaaccaatgagtcaaagaagaaactaaaagggatatt

SEQ ID NO: 337272 - DNA, 495 bp, Homo sapiens
aggcttaatacttgggtgatgaaaaaatctgtacaataaccctcatgacacaagtttacctatatagcaaacctgcgcttgtactcctgaacttaaaagttttttaagaaaagagaaaaaagaaaagaaagtttgttttatgggattgttttggggattaaataagataataacaacaagctttaaactagcacatcagtaagaaacaaatactaaatwctataaataacaattgtttcttgattcagtttatgttttgttattctatattcacataatcacatatgtcacaaattaatgaaaattgccatataatgacaacatatacaattaagccactgtgaatctgcaatgttttggcagaacttcatattgtatccacaggaaacaaagtgatgaatgaataaagagatatgtcatatcaagtaaattgggatatatttgtctctcacgaaactctcattttcttccaccacactagtatccacttcagca

SEQ ID NO: 337273 - DNA, 574 bp, Homo sapiens
acaatctgatttaaaaatgggcaaaagatttgaatacacatttctcaaaagaatacttacaaatggtaaacaggtatatgaaaaggtgctcaacatcattaaaaatcagagaaatgcaaatcattagttacaatgatatatcatcaccccagttaaaatggcttatatccaaagataagcaataataaatgctggcgaggatgtggaggaaagtgaatacttgtacactgttggtatgaatgtaaattagtacaaccagtatagagagcagtttggaggttcctcaaaaaactraaaatagaactagcatatgatccagcaatcccactgctgggtatacacagcaaagaaaggaaatcagtatattaaagagatatctgcattcccatgtttgttacagcactgtttacaatagctaaggtttggaagtaacctaagtgtttactaacagatgaatggataaggaaaatgtgatccatatacacaatggggttttatttaagcacaaaaaagaatgggatcctgttatatgcaataacatggatggaactggagggcattatgctaagggaaa

SEQ ID NO: 337274 - DNA, 440 bp, Homo sapiens
tttttgtggcaattcaaaaatttggtcttggtttgtatccactgctggtgagctagtgtgatattttgaggatgttaacgaaccgtgcttcgtcatattaccagaattatttttcttgtttcttctcatttgagtattctatgtcagaaggaagatctgggcatcaaaggctgctgttcaaaattttttcttccatggggtcttccttgatgtggwgctctcccctttaccctaaggatgggcttcctgagagtcaaactgcaaagatttttcttcctcttctggatcttgccacccagtggacctaccaagctctggctggtactggggagtgtctgcaaaggatcctgtgacttgatccatcttcaagtctctcatccttggataccagcagctactctggtggaggtagcaggggagtgcagtgaactctgtgaggt

SEQ ID NO: 337275 - DNA, 520 bp, Homo sapiens
atagaaacttgtcacataggagaagatgaaggaaggtaaattagaaataagaataaaggacagggaggttggatcaacaggaagctagagatgaggagctgggctcctcacctctggaaggacaagggaacaaagatgataagaagctgggtttgattctgagataatggctagctgctcagaggtttaagcatataagttttaaaaataatttgatgcattatcaaaactgagtacatactgggtaccagtcattatgcttgtgattggaatacaaggcacatgtgaaatgctttctgtccttcaaggagctcactaccttaaaagggaaacacatgagaaaatctcatatttacagtaaaaggattaaagcacctaggtttgaacagagcatggaccaagtgttatgaaagttaagagaagcagcccagaaaagggtctttaactcagtctttgagtggatttcaagggtatgtctaaggggaggtagtatwgaagtcaagtctggaagaacttgcag

SEQ ID NO: 337276 - DNA, 552 bp, Homo sapiens
aacaccaagaacaatgtatttacagaataggagattgttaacaaaaacaagaactatatcctctttttgttgttcagaaagaatgtcacatgtcaataaaactgtttarcattttcagcgagctatttataatcaatggggcaaattaaagtaaatgtatcgcaatagttgttgctatattgtaactgtacatcacttaaaaatataccataaatccttcataaagtatttctatagtgcgttaatgtagcctatatatagtgtttctaaatatgttcattcttcagaacagttcttaaaattttaaaaataccttaaaataaaacaattgtcaaggctcatggagtctggataagagtttttaaagttttaaaaccatctctgcatttctccactgaacaattttttacctcttttaaagacttacacatagaaccacatttgggcaaaaatctccctttaagcctagagcatgctattagttattctgaaagctacaggaggataataactctctatacacatagaggaagattatgagtggtaagaaca

SEQ ID NO: 337277 - DNA, 544 bp, Homo sapiens
ttcactcatgtaataaggagtttgcaccacacaccactataaagttgaataatctgttatcacttttgttcatccgcataagtgagatwttctttactgtgtgggaatagataaaatgggccttcactcggctaattaaaaatgtgatttttgaactgtgtaaaaaagatggacattttttaaaagtggttgaagagagacaaatgagagatagctgaatatgtgttaaagacatgcatatctggttcacagtaagtgttacattaacctaacctggttccaatagatattgatttttaattacatcattattaaacgtcctaaaaacatattctttaataacatttgctaatgaagttattagtattgctaagatctgggctacaactgttttgctatagcaataatgtaaatacattttgtgccctgtaaaattttaaattttaggaagggagacagacatataaatatgatatgaaagacctgcaaaaatgttcagtataggagttgcatggggttttcaagtaaggacatgggaagggtg

SEQ ID NO: 337278 - DNA, 544 bp, Homo sapiens
ttcactcatgtaataaggagtttgcaccacacaccactataaagttgaataatctgttatcacttttgttcatccgcataagtgagatattctttactgtgtgggaatagataaaatgggccttcactcggctaattaaaaatgtgatttttgaactgtgtaaaaaagatggacattttttaaaagtggttgaagagagacaaatgagagatagctgaatatgtgttaaagacatgcatatctggttcacagtaagtgttacattaacctaacctggttccaatagatattgatttttaattacatcattaktaaacgtcctaaaaacatattctttaataacatttgctaatgaagttattagtattgctaagatctgggctacaactgttttgctatagcaataatgtaaatacattttgtgccctgtaaaattttaaattttaggaagggagacagacatataaatatgatatgaaagacctgcaaaaatgttcagtataggagttgcatggggttttcaagtaaggacatgggaagggtg

SEQ ID NO: 337279 - DNA, 538 bp, Homo sapiens
ttaataacatttgctaatgaagttattagtattgctaagatctgggctacaactgttttgctatagcaataatgtaaatacattttgtgccctgtaraattttaaattttaggaagggagacagacatataaatatgatatgaaagacctgcaaaaatgttcagtataggagttgcatggggttttcaagtaaggacatgggaagggtgtttaatctagctgtgggtaggagttaaaagaagcttgcaggaagtggtcacatctaaattgagaacagaagtatggctagaaagtaacgtgatgaggtaagggaagaaatatcctctaggcaaagggaactgcatatgctgggggaattttgctcattctatcaaagcaaatatttcatcttgaccaaatgaaaagtgggaggagggggctgatactagctttatccagaggggaacacagaaaaacatcaaggttcttgatgctgaactaagaagtgtggtatgtatctcgagagcagtggaagtttcaaccaaggggattctctact

SEQ ID NO: 337280 - DNA, 564 bp, Homo sapiens
ggtttccggtgaaaggcgttacatggtctattagtagtattaatattattaatgggatatacatttgaaaggacatttttcctgtgaaagaaacttacaaattttatagtcagctagagaaaggatgcaagtgtgccatttaaagatcataactgaaaaagaaaatatgctattctcctttagagaagtaaaaggattacactatttaatcttctatgagttcaatatatgtagttcaatccggagggactcctgtggggatttaattaacgatattttgtggctccaattagaatgagattcttaacckttctaatgcgctgacctacctttgcagggaagaaaaattataccaccggcataccaagtaattaaatttacattaatgctaccaagaaatgtgagcaactttttcttattgagaaatactccaaaaggtcagtaggtctgacaaactttccatccttaaacatagtaaacaatttcttgacatgacaaacaaatctagaatgtcttgttctagtaatagtaacattcaaatattgccctcggggtgtgagtcat

SEQ ID NO: 337281 - DNA, 568 bp, Homo sapiens
cggccactaccatctgaaagctgatcacatgctaccaagatagagtgttgctgctgaagcttaaggcagrtacaggctggagtatcagagggcgtgcctggccctctgatgctgttgtagctactaccctctcaactatcactgctggttctccacagcctggtcatactcaaggcaaatcctcattgttccatgtggcttgttctgggtctcatgtatatgttctggatgcagagaccctccagaccctgctgaagcttaaggcaggtacagcctggagtatcagagggcatgccttaccctctgatgctgttgcagctactaccttctcagctaccactgctggttctccacagcctggtcatgctcacagcaaatcctcattgttccatgtggcttgttctgggtctcaagtacgtcttctggatgcagagaccctcctgtcactctaagctgggagttcttcagtgtctgacatatgcaaaggacaatccttagccaataccttatggagggagactgccactactgctgctgctctggctaatttaaggtttgctcaacttta

SEQ ID NO: 337282 - DNA, 568 bp, Homo sapiens
cggccactaccatctgaaagctgatcacatgctaccaagatagagtgttgctgctgaagcttaaggcagatacaggctggagtatcagagggcgtgcctggccctctgatgctgttgtagctactaccctctcaactatcactgctggttctccacagcctggtcatactcaaggcaaatcctcattgttccatgtggcttgttctgsgtctcatgtatatgttctggatgcagagaccctccagaccctgctgaagcttaaggcaggtacagcctggagtatcagagggcatgccttaccctctgatgctgttgcagctactaccttctcagctaccactgctggttctccacagcctggtcatgctcacagcaaatcctcattgttccatgtggcttgttctgggtctcaagtacgtcttctggatgcagagaccctcctgtcactctaagctgggagttcttcagtgtctgacatatgcaaaggacaatccttagccaataccttatggagggagactgccactactgctgctgctctggctaatttaaggtttgctcaacttta

SEQ ID NO: 337283 - DNA, 602 bp, Homo sapiens
ttccaatcaaggatggcctttatttctttctcgtctgattgttctagctagaactataaataatgtatcattctttctatatctagtgagaaatgacaatgggtcttttcattctgtgcatttgtctgtctatgaacactagatcaggatctctcagagcctatattatttactgcttatagacgcatgtctgcaaggtacatacaccatttttgggcasgatactatctattattttgctactatatcaggcagagctataccataatgaggcagaaagagttaatctacatcccttacagcacttgagatatttatatcctatgaaattatggctcctttttattacatatgtttttactctgtgattgcttctgttagctattccctatctttggctggttatttcacaggaagcaaaccataccgagtaattttagtaatgttattatttatttaaataaaattagtaattttattaaaggaataactgaaagttagtgtctagtccattaggattttctcctctttaaattattctatattttttctaatttaaccaaaatgtgacagtaccttcaccagacactacattaaatttg

SEQ ID NO: 337284 - DNA, 602 bp, Homo sapiens
ttccaatcaaggatggcctttatttctttctcgtctgattgttctagctagaactataaataatgtatcattctttctatatctagtgagaaatgacaatgggtcttttcattctgtgcatttgtctgtctatgaacactagatcaggatctctcagagcctatattatttactgcttatagacgcatgtctgcaaggtacatacaccatttttgggcacgatactatctattattttgctactatatcaggcagagctataccataatgaggcagaaagagttaatctacatcccttacagcacttgagatatttatatcctatgaaattatggctcctttttattacatatgtttttactytgtgattgcttctgttagctattccctatctttggctggttatttcacaggaagcaaaccataccgagtaattttagtaatgttattatttatttaaataaaattagtaattttattaaaggaataactgaaagttagtgtctagtccattaggattttctcctctttaaattattctatattttttctaatttaaccaaaatgtgacagtaccttcaccagacactacattaaatttg

SEQ ID NO: 337285 - DNA, 614 bp, Homo sapiens
aggtgtagggaaaatattttcaactgaaagtcatcgaaagtaaatgcactgagaaaagagagttcagaggcttatagctagaaagaagcctatctaatgtttagtcagggtgagggaagtgttaaggttgtcttggtcagccctcacaggatggactatgtggaggcactttataagacagagatggtccctgamagtgaggtaggaaagtcagggtgagatgcattgttggaggaaggagtactggttcttgaacaggagagaaggtgcagatatgacagagaggaagagggcgtgtacgtgcagtagactgggtattgaaatgggataaaatgtagattacctaaaaatgttagcagaaccatcaaactccaatgaccaaagccaggtagacaaatacatgagtttagctagccagttgtaatacaccaaggagtgttgggggctgtggtagatttgagagtatttgcccagacttattttgaaagtggagtctcaggccccacccagacctactgaatcagaagatacattttagcaagatcttaaagggatacacaagcacattaaggtttgaagaagcatagcttaaatcccgcctccccaaataataa

SEQ ID NO: 337286 - DNA, 499 bp, Homo sapiens
ttttacaaccaacaacccttccactakgcagatcatcacaaattgggattttcaatgaatcatctggtaataaagaagtatgtgctttgcagattgagccctctttcatgtgacatcaacagcttcaacataaattacccattacacgtttatttgtcatgaactgcagccaaaataccatgatggtaaagctacctcctgcatcttaaactccccatcaaaaaatgtttttatggtttttgagttaaagctttgccttcaacagctatttttcttgagcatcagttacaagctttactgaaattgaatggttagagaggattagcaatgccaagtttctcaatcgtggcttatttggcagctggtaaccatataaggagaaaatacgaagataaaaatgaatataaaaatgaatatataaaatatagtagtcttgtaatttatttaatgctaacacctctttcagagaaggattttattatggtcccacttcacagtt

SEQ ID NO: 337287 - DNA, 499 bp, Homo sapiens
ttttacaaccaacaacccttccactatgcagatcatcacaaattgggaytttcaatgaatcatctggtaataaagaagtatgtgctttgcagattgagccctctttcatgtgacatcaacagcttcaacataaattacccattacacgtttatttgtcatgaactgcagccaaaataccatgatggtaaagctacctcctgcatcttaaactccccatcaaaaaatgtttttatggtttttgagttaaagctttgccttcaacagctatttttcttgagcatcagttacaagctttactgaaattgaatggttagagaggattagcaatgccaagtttctcaatcgtggcttatttggcagctggtaaccatataaggagaaaatacgaagataaaaatgaatataaaaatgaatatataaaatatagtagtcttgtaatttatttaatgctaacacctctttcagagaaggattttattatggtcccacttcacagtt

SEQ ID NO: 337288 - DNA, 499 bp, Homo sapiens
ttttacaaccaacaacccttccactatgcagatcatcacaaattgggattttcaatgaatcatctggtaataaagaagtatgtgctttgcagattgagccctctttcatgtgacatcaacagcttcaacataaattacccattacacgtttatttgtcatgaactgcagccaaaataccatgatggtaaagctacctcctgcatcttaaactccccatcaaaaaatgtttttatggtttttgagttaaagctttgccttcaacagctatttttcttgagcatcagttacaagctttactgaaattgaatggttagagaggattagcaatgccaagtttctcaatcgtggcttatttggcagctggtaaccatataaggagaaaatacgaagataaaaatgaatataaaaatgaatatataaaatatagtagtcttgtaatttatttaatgctmacacctctttcagagaaggattttattatggtcccacttcacagtt

SEQ ID NO: 337289 - DNA, 457 bp, Homo sapiens
gtagtaaaccccagcttttaaccaacatgtttttcaattctatacacaaagtttatatatgattttgtgcaaggcattttcagtgttgtagggccaatagatggacacgacacaggacatgccctcatgttgctcaaagtacaacagagaaaacagacggatatttacttacctatagtcagggttagaacatgacaatttctaagacaaggagtagacaccatgcattgggaggacagatatatgattgacaaattctgactctggggatgtaagaaggcctcataaaaaaggtgataagaacatttcatgtagatacattcaatttttataaaatcagaagaataagtggagcacaraaactatttgtggaatgtcaaggtgttgtatgtggttggtaataagataaattcattaatttcttaaccctgttagataattactgatattatatctg

SEQ ID NO: 337290 - DNA, 630 bp, Homo sapiens
ctaatagaaaaagccaggataaattcatccatttgcattaatacacgcatttaagatattttttctggtatagtgagcacactatagggaagcaaggatggaaacaacaaaaactgaaagaaggatgtttagcaataatccacatggaagatgtgggtaggttgaatgagaatggaagtggtcaaaatgataagaagcagttggattctaagtagattctgcaggcaagagtgcaasgataagaagtgtgagagaagagaggagtcaagaatgactcagaagtttttgtttgactaactggaaaaatcaagttgctgaaagtcttcctgaagaataagtaggctgagactgaataccaagaattcactgtacatatgctgagagagtactaagagccttccaggtgcaatattgagtcagaaatggggtatacgaatgttaaaaattcagcatcaaatggccaaagtagcagactttcaagacaaagcctatctctgggaatgaagaacgtatagttttctagaacatatgtaagtctcaaaaacagtgggaggttgctgagcagcgtatcctagcaacagaaaagagggatattacaaaaatatgttccactggcattcactaaattat

SEQ ID NO: 337291 - DNA, 597 bp, Homo sapiens
aaggctggaatgctcatgctgggattagtgcccttataagaagaaacaccagagagcttacacactctttctctttctgtcatgtgaggacacagcaagaaggtggccatctctaagccaggaagaaatcctttaccagaacccacccatgctggcaccctggcttctcagacttctagcctccagaactgtgaaaaaatgaatttctattattgaagccacccagtctgtggtattttgttatatcagtgtaagctaatacacccagaaaactatatagggggctgccagtgctcrtctaggtactttgctatgctgtggatataatccctcacatagagagcacttagaagttttcaaagcacttttcacatcttttcctggcatatttaatcatgataacaaacaactttgtgcagtgtatgtggagcacgaatcacagatgtcttagtaggaaaagaactatacttgttcttgtcctcacccttgttagtggtgggggtggatggggaatcaaatccagctttttcaatttcaatcctcttgctccttccatgaccacaggagcaaggcattattacttactatcaggcagtg

SEQ ID NO: 337292 - DNA, 597 bp, Homo sapiens
aaggctggaatgctcatgctgggattagtgcccttataagaagaaacaccagagagcttacacactctttctctttctgtcatgtgaggacacagcaagaaggtggccatctctaagccaggaagaaatcctttaccagaacccacccatgctggcaccctggcttctcagacttctagcctccagaactgtgaaaaaatgaatttctattattgaagccacccagtctgtggtattttgttatatcagtgtaagctaatacacccagaaaactatatagggggctgccagtgctcatctaggtactttgctatgctgtggatataatccctcacatagagagcacttagaagttttcaaagcacttttcacatcttttcctggcatatttaatcatgatarcaaacaactttgtgcagtgtatgtggagcacgaatcacagatgtcttagtaggaaaagaactatacttgttcttgtcctcacccttgttagtggtgggggtggatggggaatcaaatccagctttttcaatttcaatcctcttgctccttccatgaccacaggagcaaggcattattacttactatcaggcagtg

SEQ ID NO: 337293 - DNA, 542 bp, Homo sapiens
ctgaacccttccttcctctgtagcccctttcaccagtccagaagctgaaactcagtccagtggccagagcctgctcctcactgatggccaccattatgccagaaatagttgcctgtatttctagaaatctgaaaattattctgaattccttacacataagattagcacattagttgagagattctgacacttcactcaccaactagtgacctggcccatggcaacaattgtatgtctaccagagtttgccaggcaattctaccagagttaactggggctatggttcagggctagggtccaggttgtatctgtcctggtcctctttttgtgataaagcattcatgctgtactgaatgtcataaagtcacatgcataatctttacgagagtatccttggcaaaaagttgccttaataagtatatttttgcactcctcaccccatgatgagatgtaytgatgctcactaagcagaagatacctaagaggcaacacatcaaagcagcattcagaaatgacctatagaagaaatttacctgatgatt

SEQ ID NO: 337294 - DNA, 556 bp, Homo sapiens
gcgagttctttccccaccgtttgtttttgtcagctttgtcaaagatcagatggctgtaggcatgtggttttatttctggcttctctttctgtcctcttggtgtatgttgttttggtattagttactacagccctatagtacagtttgaagtcaagtagtatgatgcctccagccttgttccttttgtttaggatttctatgtctattttgaccccttttttgtttcatataaattttagaatagcttttcctaattctgtgagaaatacattggtagtttaataggaatagtgttgaaactgtaaattgcttcagatagaatgaccattttaacagtattgattctgccaatacagaagcatggcatgtttttccatttgtttgtatcatctctggtttcttgttgtgatattttgtcattctccttgtttcacctttttggttagctatagtcctagataccatctcacaccagttggaaaagctatcattaaaaagtcaaataataacagatgctggtgaggcaacacttaracactgttggtgggaatgtaaa

SEQ ID NO: 337295 - DNA, 533 bp, Homo sapiens
ttccttttgggggtctatgaagttccttggtattattttgccaaacaaagaaacctctgggttatgggtgccctactcacttttattacctggcagaatttgcaggataatttcccagaactagcatattgatccagatttttgcattactcatccctttttgtttcttcaaagctgtaggagatcaccacttgattcacaggaataagcagggttagtataaaatgtaggcagaaagctaaaaaaattaatgagactaggatttagtgacaaatgtatgataatctttggagtacagtttctctccccagtcctcatttttggttaaaaaaaataagataggactgtgttgtttgtagataaaactttagtcttatacttggcctgattatttgcataaagtgcagcaagaataattatttctacataggccttttggattggctttgaaggaactctgttccacaaggaatctcagataagatctcttaaagctgrgcccaaccatgggtttttatcctcaaatacctgtg

SEQ ID NO: 337296 - DNA, 582 bp, Homo sapiens
gggttggggagcaaatataagacaaatgcagacttgttctttcaaggaatatgtgaaaggaaggagagtgagaaggaagaagatataaaagagagagagagggagggagggagagagagagagagatagagagagaagagcttaatccttaggccattaagttggggaactgatgtttattgaaccactattttcaggctctgcgcccagtatcttctatttgagcctttaaatgaacatgtaaagtttgtttatggtcaacattttaaaaattggaaagctgagattgggaaggttaaattacttgctttaggccccatttattaactggtggaaccasaaatggaacctatgctgtggcttgctggagccagcttataatatctggaaagctgtctggagaaaactgattgtgctcctctcttcccagctctgcattcagtgaggtcatgcaggtagcttaaaattggccatggtgggagtatttacacatggagattggcaaacactacaaaccagggttcattcagttttaaacattgaccagtgtgcccctggatctatgtctgtgtgatagcaaag

SEQ ID NO: 337297 - DNA, 582 bp, Homo sapiens
gggttggggagcaaatataagacaaatgcagacttgttctttcaaggaatatgtgaaaggaaggagagtgagaaggaagaagatataaaagagagagagagggagggagggagagagagagagagatagagagagaagagcttaatccttaggccattaagttggggaactgatgtttattgaaccactattttcaggctctgcgcccagtatcttctatttgagcctttaaatgaacatgtaaagtttgtttatggtcaacattttaaaaattggaaagctgagattgggaaggttaaattacttgctttaggccccatttattaactggtggaaccacaaatggaacctakgctgtggcttgctggagccagcttataatatctggaaagctgtctggagaaaactgattgtgctcctctcttcccagctctgcattcagtgaggtcatgcaggtagcttaaaattggccatggtgggagtatttacacatggagattggcaaacactacaaaccagggttcattcagttttaaacattgaccagtgtgcccctggatctatgtctgtgtgatagcaaag

SEQ ID NO: 337298 - DNA, 513 bp, Homo sapiens
gcagtcatagttcatggtaacctcaaactccttggtttaagtgatcctcctgcctcagcctcccaactaattagggaggtgacagatgtgtgccaccatgcctggctaatctttaaaaaaacaatttagagatggtggtctcattttgttgcacaggctggtctgaaactgctggcctcaagtgatcctcctgcctcagcctcccaaagcatagggattacaagcatgagccaccacacccaaactggaagccacaattttcttaaggatcaacctcaaaatcacactatattattcccacaaaatccttgattacacagtcaatctaattcagtgggattacacagsacgtgaatatcaaaagaagagaagatgggaatcatttgggacaccttgatcactacaccatattatttatctcaaatacatacacttccaactttcagaattagtgacttattctaatataggttaaagacactccaaaaagttgtttttgtttacatattttac

SEQ ID NO: 337299 - DNA, 513 bp, Homo sapiens
gcagtcatagttcatggtaacctcaaactccttggtttaagtgatcctcctgcctcagcctcccaactaattagggaggtgacagatgtgtgccaccatgcctggctaatctttaaaaaaacaatttagagatggtggtctcattttgttgcacaggctggtctgaaactgctggcctcaagtgatcctcctgcctcagcctcccaaagcatagggattacaagcatgagccaccacacccaaactggaagccacaattttcttaaggatcaacctcaaaatcacactatattattcccacaaaatccttgattacacagtcaatctaattcagtgggattacacagcacgtgaatatcaaaagaagagaagatgggaatcatttgggayaccttgatcactacaccatattatttatctcaaatacatacacttccaactttcagaattagtgacttattctaatataggttaaagacactccaaaaagttgtttttgtttacatattttac

SEQ ID NO: 337300 - DNA, 531 bp, Homo sapiens
gttgcttaattttttcatgattatctatttaaaggtaagtcttgcaaccaacagtattaaaatacagacattgtgatgtgatagttgacaaccagtttactttcccaaatgactatgaatctcaattttatttcttaaaaccgtatatgtagtggatgcttttcaggacagtgttaactgagaagcatctttatattttggaggaattttaagaatgccttcacttctaaattcatatggattcagaagtgaatcatgctttggcagaatgccattgcacatagtaggggtcagtatttgctaactaatacaaaattaagtttttacattttcatatttccatgacttgccttttagcttaaagttgtgaggtaagatagattttcatttaccaagtcgatctttgcataggagcagtgttgcagctcacagtgcccagaaattgccaacaatcatakagaacgctaatttggcatgtgtacctatgcccgccatccttcccaagtttctaccaacccactattcctgtga

SEQ ID NO: 337301 - DNA, 530 bp, Homo sapiens
gcaagaaagtgtctgagtccctcacaggtatgattaccttcattattgctccttgggggagaaattatttctaaataatttctaaattgcttctaaatgctatttccataatgctgtrtgtactaccttcttagttaaagaaaatgcacagtttggaagaaagctaagttggccaaagtgttaagtctgatgcctcattaggttccctcaatagtcatggcttctgaaattatttgtgatcaaggtgacaccaaggttagagacagaggcaggacaaggactcaggcatctccactccctaccctttcctgcacccccaccatgctaacgtttcttttcaaaacaaagtgctaatcactttaatgctttgttcagttacttgcttaataaaacacttttcaacaaatggaaaatctttaaggcaacagcatctttgatagggaacacaggtcaccagggctatgagaaaaatccctttactagtggaatttttactaatttgccctatctgatctgtagcttgtcaattg

SEQ ID NO: 337302 - DNA, 581 bp, Homo sapiens
ccactccctaccctttcctgcacccccaccatgctaacgtttcttttcaaaacaaagtgctaatcactttaatgctttgttcagttacttgcttaataaaacacttttcaacaaatggaaaatctttaaggcaacagcatctttgatagggaacacaggtcacyagggctatgagaaaaatccctttactagtggaatttttactaatttgccctatctgatctgtagcttgtcaattgcctgatttctatgagagggtgaggttaaggataactaatggatagagcccatattctatgggaatgttagggggctcctaatcatttcaaatgacaacaaatcacgccatcaggaaatctaaatttgtaacaatagtctgagttttcaagattggaacatactgtttgccactatagtcataaatactacaatcagtctgtggtactggcctgaatgtagacttctttagataaagtgtgtggctaagataccaaaaacatcatgggaactcctatttctgacttcctgcttggaattttttacatcttagttcattttcctcaggttctatgtcctgcctc

SEQ ID NO: 337303 - DNA, 581 bp, Homo sapiens
ccactccctaccctttcctgcacccccaccatgctaacgtttcttttcaaaacaaagtgctaatcactttaatgctttgttcagttacttgcttaataaaacacttttcaacaaatggaaaatctttaaggcaacagcatctttgatagggaacacaggtcaccagggctatgagaaaaatccctttactagtggaatttttactaatttgccctatctgatctgtagcttgtcaattgcctgatttctatgagagggtgaggttaaggataactaatggatagagcccatattctakgggaatgttagggggctcctaatcatttcaaatgacaacaaatcacgccatcaggaaatctaaatttgtaacaatagtctgagttttcaagattggaacatactgtttgccactatagtcataaatactacaatcagtctgtggtactggcctgaatgtagacttctttagataaagtgtgtggctaagataccaaaaacatcatgggaactcctatttctgacttcctgcttggaattttttacatcttagttcattttcctcaggttctatgtcctgcctc

SEQ ID NO: 337304 - DNA, 581 bp, Homo sapiens
ccactccctaccctttcctgcacccccaccatgctaacgtttcttttcaaaacaaagtgctaatcactttaatgctttgttcagttacttgcttaataaaacacttttcaacaaatggaaaatctttaaggcaacagcatctttgatagggaacacaggtcaccagggctatgagaaaaatccctttactagtggaatttttactaatttgccctatctgatctgtagcttgtcaattgcctgatttctatgagagggtgaggttaaggataactaatggatagagcccatattctatgggaatgttagggggctcctaatcatttcaaatgacaacaaatcaygccatcaggaaatctaaatttgtaacaatagtctgagttttcaagattggaacatactgtttgccactatagtcataaatactacaatcagtctgtggtactggcctgaatgtagacttctttagataaagtgtgtggctaagataccaaaaacatcatgggaactcctatttctgacttcctgcttggaattttttacatcttagttcattttcctcaggttctatgtcctgcctc

SEQ ID NO: 337305 - DNA, 365 bp, Homo sapiens
tatttaatgaatagccattgactgagggaatcaaccatgctcccaaatgaggaatgtgtcttatattaattaaaataggagtcaataacrtgcaagatatagcctatatttcctttattactgccatttggcaaattgaggacgaaagctctaacaattcaaatctctctcggaggtaagtttagtaactatcaagatagatcttggcagctctctcttggggtccccaaggctcattaaacattttaagaggacgctgaacattttcctagtggatggtgagataactcacttccaagtgtgggaggaagtgcaatcttgcctgttgcaaccagcaaattctggaatgaggtttagacttggtg

SEQ ID NO: 337306 - DNA, 643 bp, Homo sapiens
aataaatggatgcatggtgactcagttactattccaatttttcaatatacccctaggagggcatggtctgattttgtctttttccctcacctcaaatctttgctattgccctaggaatctgacttgcttgctttgcaaaaatgttgagttttaaatgaaaacaaatgttacctgccatgtgagatcatgaaaaagaaaatggaataatatatcatttttttcttgtaaagtaaacatactactgtcatctaggtgatcaacattacagatatgcatcccaaaattagaatttatatttataaatttttaagataataggaattgatcatcttctattactaaatgcttccatccacatgttacacaatagcaaacctcattagattagaataattagtttggaaaggaggagaggaagatctakcctgaattatggaagtcagaatttattgaaagcaacattgttttattactttcaatactattacctgccaataaagtctaaggggatatctacttcatgatcttaataatctttattttacagctgaatctttttgcctaaagaccactgtatgccaaagccatgaaaacaatgtattctttttacatgggtcacaaatattccatttcacttagcaaa

SEQ ID NO: 337307 - DNA, 591 bp, Homo sapiens
cattatgaatattataaagttgagactttgggagttttctgatatgtttacatcacctccctctcttcccttctttttgtttccaaggaaaaaggggcttcccattttagtggattccctttctctcatcctcatgtcctaactcttttcaaatacaaattagtttgatgaaaaccaaatttacatgtcaaaattctccccagttatgagctaagatcatatgattttaggatgcaggctttatggcttaaattcctattcacattttggagtggccaccaactgtggactgccaatagtctaatgtggtctgaagagaaagggagagctgctctagaaatcagasacctccctgccagaacttgttctcttccacaattggtagtagaatcttgaacaagtaacttggctcttgcaagattcaatggtctattcatttagataggtaaatgctatctttcaataattccaaaagaaattatgcaaacagggatgtgaaaggattttatgtactacattgtaagaggaggaacagagaagtttaactgggccaatttgaaaaccaactggtctgtagaagtctacataaaa

SEQ ID NO: 337308 - DNA, 613 bp, Homo sapiens
tggtctggctgaattaaatcttagagtaaaccttttgatattcaggatctcattctgaggcagtcatttcttggcagagaagatttttggaagacctttagaggttgaagtcagactggcaatagtaaatacctaattattgccaggttttaaatagctttgcaaaataggaatrctagtcttaattgcgtaagctgcagctactgactaaaggagggatgtgagcatttgtactttcctctgagcattgaacgtgtttctagtaagttaggtgtgagtagtcacttttaaataatataatattctaagtgtctttggtgtgtttattatattgagaaaaactggaatgaattattttgtaaaatgacaaatcttttcataatgtttattcactcctgtgctagaaaaaaatgataacacattaagagttagagtttaattcccttcccctcgaatctctgcaggcctagtaacttgcttacccagtcggatacagcagaaatgatgtttttccaatccctaagcttaggccttgagcatcaggcagcttctactttccatctttaaaaacgtgctccagacaccatgtaagaaatcagacaccctaagacca

SEQ ID NO: 337309 - DNA, 613 bp, Homo sapiens
tggtctggctgaattaaatcttagagtaaaccttttgatattcaggatctcattctgaggcagtcatttcttggcagagaagatttttggaagacctttagaggttgaagtcagactggcaatagtaaatacctaattattgccaggttttaaatagctttgcaaaataggaatgctagtcttaattgcgtaagctgcagctactgactaaaggagggatgtgagcatttgtactttcctctgagcattgaacgtgtttctagtaagttaggtgtgagtagtcacttttaaataatataatattctaagtgtctttggtgtgtttattatattgagaaaaactggaatgaattattttgtaaaatgacaaatcttttcataatgtttattcactcctgtgctagaaaaaaatgataacacattaagagttagagtttaattcccttcccctcgaatctctgcaggcctagtaacttgcttaccyagtcggatacagcagaaatgatgtttttccaatccctaagcttaggccttgagcatcaggcagcttctactttccatctttaaaaacgtgctccagacaccatgtaagaaatcagacaccctaagacca

SEQ ID NO: 337310 - DNA, 610 bp, Homo sapiens
cagtggatattgattaattgctttcaggcctttacaggctactttgtaagcttgtaaagactatcccccataaacttggttgaatggagtttactaggaaaattgttaattgtctagttcattttaggtgtagaagaggctccccacmacttgggcacttaggagaaaacaaccagagcacatcttgttgagtgtctattatgtgagagacagaaagataggtacttaatgtctgcaacgctattgtaaaaagtaaacaagaaattcacagtcaaggttcagggaggggccctagagaagaggctgtggactggtgcaactgctagggccttcaagtgggggctggaagtgggcctgtacctaataatagagacatggaggaagagacactccaggagtgaagagaaatattgtctgaatgcctaaggcaacaagctattttctggaaaaatcttttattagtgttcagtgtgaattgctgacttcagaaaaagcaagccaggcactggcacagtgcagctcaccagaagggcgggaagtagggtactccagggagtgggtgcgggtgagctccaggaaggagagtgggaatgttgaaaagagggtccca

SEQ ID NO: 337311 - DNA, 588 bp, Homo sapiens
ggaataatatctaaaggaaagagcattgcctttaagacagttccaaaaattgtaggcgtgagactcttccccagccaggcactgtactttagaggatcttctcttgctctctttcacacacatcactttcacagaaggtgaggagggcccaggtgtctgtatatggcatccacacctttcmtagaccatgcactgagtacctgggatgccagaattctctgacctaactctgcccagatcagatctgtggaggaggggaccagattgcatcattggtgtgtaggctccaaggcccgaggagtgttcaaaggattcctggggctttgatgtgtgtatcaatggccccagtgcacgtgcatgaggccccttgcaatgctggagggactgtgatgaaggcagaaagaaaaggggacctacacttgttctctatgagagcaaagcatcacctgtggggcatcaagcacgtgatctataggcaaaactccttatctgaggaattcagaagtaattagacttctagaatttctatacatttctggaatacaagcatgtcgaaacccattgtacaacctttgccgacataaaggc

SEQ ID NO: 337312 - DNA, 511 bp, Homo sapiens
tctctaaggcaccttaaactcaagaggtctgaaatcgaagatagtgaatgcccacacccaccccagggcccccataaaaactgctacttctatttcttctctcagagaggaaatggggagccattctttacacttctgtcacccttatgcttcgaatctgagcagtttcctaagtttgtctcaactccctttttcttcattcttaccccattgtcttagttcctctcctaaggattcctgatggacaatcataatcatcttccagaagatccctctgcccccaggcacacctccccactgccccagaatgttttaaatcgtgaatcttgtcacgaccttattgaaaatccccatcatatatatggtaaagtctgactgtttatatcagcccaggccctcctggaatgacacccaacccctcctgcctctccctgtcatctgagtctggcccccaagcagactckatgtcaggatgtacagcccttgccatctctggcttgtccacctggta

SEQ ID NO: 337313 - DNA, 534 bp, Homo sapiens
gaccttttggtcaatgttgtttttcttcaacaaggtcataaaacagttgtttagaagaccactattaaattagaagcacatttacttattcaagaattatttccttaacatcttctatgcgccaggcagtgtgcttagtaccacagagagcaagaaagataagacctctctgcagttatattctattgcaatggaggtagagtggggtgaaaaagacaacagagaaggaaataaataaaatcatttctcagtgtgattagtgctatgagaaaaataagcagggttctgcaggaaatattttgaaagggagggaaataacctakacagggtgaatagggaaagcctttctacagaggtgactttccaactgagagctgaagaatgaagagccagtcatgctggctgttaagacctgggtaacagtgaaaagtggtcaaagaattgcaaaccaggaaataacactgaactggaaggtgagacaagagtggtcagaaagatggtgggaatagtaaaggctctggtgataaccaagtt

SEQ ID NO: 337314 - DNA, 485 bp, Homo sapiens
tatcatgtatatatatatttgcaatcatgtgtatattccctaggaaactttccccaccactccctccacctctaggctgatgacaccatgcattatgtccacagcacagaatttattcatttacttttccaataacatgctgacaaccctatatgtatatatccagtccattcctctccacaccatccttttcaagtctaagtgagatcatgttacttttctacccagagccctacaaaagttccctagtttacccagagtaaaagccaaggtscttaaaattttcatccctaccagaggatgccaccttgtaaatcccgtcttccatgtcttcttttactgtgagagttgtaggaaggatgtggcaagatgaacagtatgtggtaaatggactcattcatcctactgaaaagataactacatttttgctctaccttgatacagttttatagagcaggacgtcaagtagacttttctggattcct

SEQ ID NO: 337315 - DNA, 605 bp, Homo sapiens
tacattagcctacagttaggcgaaatcatctaacacaaagcctatttcacaattacgtgttgaatatctcatgtaattttttgaataatttactgaagtgaaaaacagaatggttacatgagtactcaaaagtacaatttctgctgaatggatatagcttttgcaccactgtaaaactgaaaaatcataagctgatccatcataagtcaaggacataggtctgtattgcatttctatattgcatttacttcctggtttctaggaatatcaagatgatccatgttggcaaagagctcagtttttgttgcaggaggctacataatgcaataaaggaaatagcaaggctattgtagccttccaagtgagcaatgaattaaaaaaaaaaaaattaaggatggtgcaggcctccaggtaggattctgcagtttgtgcactgcagggtgaatgggggctgaaagctcacttacattgtttctcaagctgtgggtcctggcccastactgaattagcctaaaggaaggagtgactctttctcattcatccacccaaaggatgtgcctttttttttttactttgtcaatcttgagtgggcatttctttaaaaa

SEQ ID NO: 337316 - DNA, 410 bp, Homo sapiens
cactggcttctgacaagggcttttgtgctgcaaagcatggcagagaggtcaaagaggaagcagacacgtgcaaagagagccaaaacctaagggatgtsttggttatataactactctccctataactaatccatttcctcaagaactaattcaaccttactggagctagaactgacttattgtcatgagaatagcaccaagccattcatgaaggatgggcccccatgacccagacacctcccactctgtcccatatcccaacactgtcccatcggggatcaaatgtcaatatgaattttggtggggaaaagcaaatcatatccaaaccacagcatttactcacatgggtaataatcctgtggctttttatacctttgtataaacacaggttttcattcactatcaatatc

SEQ ID NO: 337317 - DNA, 410 bp, Homo sapiens
cactggcttctgacaagggcttttgtgctgcaaagcatggcagagaggtcaaagaggaagcagacacgtgcaaagagagccaaaacctaagggatgtgttggttatataactactctccctakaactaatccatttcctcaagaactaattcaaccttactggagctagaactgacttattgtcatgagaatagcaccaagccattcatgaaggatgggcccccatgacccagacacctcccactctgtcccatatcccaacactgtcccatcggggatcaaatgtcaatatgaattttggtggggaaaagcaaatcatatccaaaccacagcatttactcacatgggtaataatcctgtggctttttatacctttgtataaacacaggttttcattcactatcaatatc

SEQ ID NO: 337318 - DNA, 553 bp, Homo sapiens
  misc_feature (1)...(553): n = A,T,C or G
ccacatcataaaaatctgtattccagggtctcagaacagactgcttcagtattggtgtcagaattgggggattaattagggtggtcataagtgagatcatttaattaatagaacagcttccacaagaggtgggagtgtagtataattgtggagagaaaggaattcagaatgagatacacctggattcacatttgagggctgccactcatcagcggagtgccgttaagaaanattttaaagcatcccacaatagtggctgttgctcacactgctgatagcattggattgccttatttaatcctggcgtgaccacttatgcatgcatgcattttagtacgaactacttcgcctcactaaaatgaatcttttgatttgttcctacttcgcaggggcactgttgtgaggtgtaagagagataatttaatgtraaatttatcataatgcctacacacaaaaagcttgtcaagcatttaataataataccgaccattattattactaatgtggtgctcaatgtggcacgacctgaaaaattactaaatctgatttcaag

SEQ ID NO: 337319 - DNA, 553 bp, Homo sapiens
  misc_feature (1)...(553): n = A,T,C or G
ccacatcataaaaatctgtattccagggtctcagaacagactgcttcagtattggtgtcagaattgggggattaattagggtggtcataagtgagatcatttaattaatagaacagcttccacaagaggtgggagtgtagtataattgtggagagaaaggaattcagaatgagatacacctggattcacatttgagggctgccactcatcagcggagtgccgttaagaaanattttaaagcatcccacaatagtggctgttgctcacactgctgatagcattggattgccttatttaatcctggcgtgaccacttatgcatgcatgcattttagtacgaactacttcgcctcactaaaatgaatcttttgatttgttcctacttcgcaggggcactgttgtgaggtgtaagagagataatttaatgtgaaatttakcataatgcctacacacaaaaagcttgtcaagcatttaataataataccgaccattattattactaatgtggtgctcaatgtggcacgacctgaaaaattactaaatctgatttcaag

SEQ ID NO: 337320 - DNA, 553 bp, Homo sapiens
  misc_feature (1)...(553): n = A,T,C or G
ccacatcataaaaatctgtattccagggtctcagaacagactgcttcagtattggtgtcagaattgggggattaattagggtggtcataagtgagatcatttaattaatagaacagcttccacaagaggtgggagtgtagtataattgtggagagaaaggaattcagaatgagatacacctggattcacatttgagggctgccactcatcagcggagtgccgttaagaaanattttaaagcatcccacaatagtggctgttgctcacactgctgatagcattggattgccttatttaatcctggcgtgaccacttatgcatgcatgcattttagtacgaactacttcgcctcactaaaatgaatcttttgatttgttcctacttcgcaggggcactgttgtgaggtgtaagagagataatttaatgtgaaatttatcataatgcctacacacaaaaagcttgtcaagcatttaataataataccgaccattattattactaatgtggtgctmaatgtggcacgacctgaaaaattactaaatctgatttcaag

SEQ ID NO: 337321 - DNA, 512 bp, Homo sapiens
tttaactactatcttttaaatcattgttatttttctgtatatttgtacataataaatatgtaggatgttgggctcastccatacaatcaatatagactgactgactagctacaagatcatgtactgaatagctatgcatattcttccatggttaactgtgaaaataacttgaaaccccaacactggggattgcttcacaaacagaaattaattgggtttggccagagccactaaaattaatgagtttaaacctcacatccagtatatctgttcttatattgtgtttagaagattgaaaaagaattaagacttaatttagataatcaaataaaataggatctttgcctttcattccataacttattctgatcatcgttttttgtggggaagcatgtgttacctcttgaaacttggcatacacatcataataagtgaataggtctagagctttgatgaaaatttaatttttttaaaaattagcatttcactgatccttatactgagggggggag

SEQ ID NO: 337322 - DNA, 591 bp, Homo sapiens
tgcacattacatactgtctttttactctaaattatggagctagtaaaagataaatggaggatgatattttatggaaatttgagtgaaaattcacagattgtgataattacacccagtcagattttcttggaattgtgttataaagtataggatatcattagttcaataatgtgactctaaaatcacaatatctagaatttctcttcactattttaaaaatcctctttgatgatataatattttctatttttttttactttatcaaattagcacaatctagtggttgttacattaaggattccctgcataaattttaaaaaaatttatatctgccatcctaataccatatagacgaaaaagtttaaaaatcatgtcacaaacctataaaacatttatgaatattaaacatcatattagttttctattacttctgtaacagacaatcacaaacagtggcttaaaatagcrcagatgtattattctacagcccggagatcgggagtctaccgtgagtgggcagggttgtgctgcttctggaggttcgcagggagactctgtccaccccggccttctgcagcttctagaggcggc

SEQ ID NO: 337323 - DNA, 596 bp, Homo sapiens
tctcacatctctttggattctgacccttgtgatgacatggagtccacctaggtaattcaaaataatctccccatctggggtcctttgcttaatcacatctgcaaagccctttttcccatgtaaggttacagagtcacaggttctgggggttagattgtggatatctttgggagcccttattcagcctaccacaaatgtataattggtccaagttctatagagagttcaaagataattgatgcatggtccttgcccttaaaacctgtaatctakgcaggagctggcaaatactaaaatgaccataaaacaaggtagaggaactttcatgtcatatgggagttcagaaaagaaagagatgggtcattaactgaccaaaaaatggttcaacctgcgtatctccacaaggcaatatacgcctttgttcatacttgtctctcatctggaaatgccatttcctcctcttctacttggttaactcttacttagcctttaaaattcaagtcatttcttttaggacatgctcctggatgcccaagcagagacggtaatttcgtcacattgtttttgaaaaatagcttatgtatatctctcattag

SEQ ID NO: 337324 - DNA, 302 bp, Homo sapiens
acactcaagtgagagaacacaaatacacccatggtgtacttttctcaaagaattcaaaataattcttctggccatgtgataaattaatttagttgtttgtcatcatccttatctaactgagaatacaaggatakgaaaaggttagagagcttcctaaggctatgtggcagtttgttgttaaagttgaaatagggttacatttggaatgccaaggctttattttcaataatgaatcaggatttgtttttccagctaaactttgtagatatttgatcatcaatatcctcttaattttacacaca

SEQ ID NO: 337325 - DNA, 583 bp, Homo sapiens
tttaggtgctttggttgctgggtttaaaagwttatcccaatattttcttttgaaagatagatttgggctcaccttgccttttgttttatcttttcttttaaaatcgcctggatgcgccattattaaatgaataataaccacaataacagctaacatggattgaatgcttattaaatatcacacatgctgctgagtgcgttatgtgaaccttatctaatttagtatcataagaatcccatggaaatactaccaggatttctgcatatagaatatagccacatatttccagttgtgcattttcttacataaactacacccataatcatcatgtatatttctcagtttctgtttcattaaagtagattgaaaaaggcacaaagcagaatccttttagatttaagtttttccccaatattttaccactatctagctcacatataattctatagcctttattttattttattttgtatttttttgagacagagtcttgctctgttgcccaagcaggaatgcagtggcgcgatctcggctcactgcaacctcctcccactgcaacctctgcctcctgagttcaagcgat

SEQ ID NO: 337326 - DNA, 583 bp, Homo sapiens
tttaggtgctttggttgctgggtttaaaagattatcccaatattttcttttgaaagatwgatttgggctcaccttgccttttgttttatcttttcttttaaaatcgcctggatgcgccattattaaatgaataataaccacaataacagctaacatggattgaatgcttattaaatatcacacatgctgctgagtgcgttatgtgaaccttatctaatttagtatcataagaatcccatggaaatactaccaggatttctgcatatagaatatagccacatatttccagttgtgcattttcttacataaactacacccataatcatcatgtatatttctcagtttctgtttcattaaagtagattgaaaaaggcacaaagcagaatccttttagatttaagtttttccccaatattttaccactatctagctcacatataattctatagcctttattttattttattttgtatttttttgagacagagtcttgctctgttgcccaagcaggaatgcagtggcgcgatctcggctcactgcaacctcctcccactgcaacctctgcctcctgagttcaagcgat

SEQ ID NO: 337327 - DNA, 583 bp, Homo sapiens
tttaggtgctttggttgctgggtttaaaagattatcccaatattttcttttgaaagatagatttgggctcaccttgccttttgttttatcttttcttttaaaatcgcctggatgcgccattattaaatgaataataaccacaataacagctaacatggattgaatgcttattaaatatcasacatgctgctgagtgcgttatgtgaaccttatctaatttagtatcataagaatcccatggaaatactaccaggatttctgcatatagaatatagccacatatttccagttgtgcattttcttacataaactacacccataatcatcatgtatatttctcagtttctgtttcattaaagtagattgaaaaaggcacaaagcagaatccttttagatttaagtttttccccaatattttaccactatctagctcacatataattctatagcctttattttattttattttgtatttttttgagacagagtcttgctctgttgcccaagcaggaatgcagtggcgcgatctcggctcactgcaacctcctcccactgcaacctctgcctcctgagttcaagcgat

SEQ ID NO: 337328 - DNA, 453 bp, Homo sapiens
tggttttgaaagatcttcttggtattgatgtatattttcactccactgttgtccaagagtatgactggtatgatttctattttttggaatttattgactcattttacagctgagcatgtggtcaatcttggagtatgttccatgtgcagattttaaaaaatgtccattttgtggttgttgggggcaatattctgtatatgtctattaggtccaattggtcacatgttcagtttaagtccagaatttcttcgttggtkttctgcctcaatagcctgtctaatgctgttagtggggtattgaagtcccccactatcattgtgtggctgtcaagtctttttggagaactagaagttcttgttatatgtatctgggtgctccaattttaggtgtgtatatttttagaataattaagtcttcttgaattgaaccatttaacattatgtagtgcccttc

SEQ ID NO: 337329 - DNA, 564 bp, Homo sapiens
gatcaaactgtaacaccttatcatattcacagtagggatgtggaatgggacaaaattattgaacacttgataaagaaaacaaaatcttattcaaagaaaatcttaactctcatttgtttattgttggtgttttatatatacaaaatagcaacctctcttttattcaaaattcagaataaatattaacatcagaaaatgtaaaaagcctttctgtcaggtgataacatcaaagtgaccaaaatgtttatgactgagttctcaagttttcattaccaaattgttaaagagatttagcaatttcttatgtataactattttatgttgataataatgtgcagttacatgaaacgttagcaatgaaaattataaatgatgtttcattttaaatatatcaaagagagatttcaggaacaacttggagaaaaagcaatggtcagaaggaatttataaagtgttatgttcatataataatagatacaaagcttgsacatttttactccaattaaccctcatggcaacctaacaaagttcaaactacaaccccaaatgtataattcagcacaa

SEQ ID NO: 337330 - DNA, 567 bp, Homo sapiens
gaaacaatgtttttaaaaaaaaaaaatagtccctggaacaaatttagccttgtgaaaacaaaatatcatttctttgacaagaaattccagacagctacaagaccrgtcaaggataagcagaatctaagaggaagaaagttcaggcgaactttccacacataggcccctgacagccactgcagatggtcacggttcagcaagctagtcacacacagtgagaaccactcctgctagaaacagagcaactgtgcattatccccttcttcctgagtctccttccctagtactagtttgtagtcagattaccctgagcctacacgggaagactgcagaaaagaatagaggagcaagctgacttaaaccgactgaaaaaacaccatgaaaccaggtgaaaataaataagctcttgctagaagatggcagacatttcccaggcctgtgatcattacctgaggaaggccaggtctggggagttcaacagaacattgcctcatatcatttcattctcagaatttcctagtcagtcacatcttagtttttcaccaggatcatatgcttccaggcaaa

SEQ ID NO: 337331 - DNA, 557 bp, Homo sapiens
gatgtcactacctgtgcacttgcctgaatccccttaatggtcagtttcccactgttcttgagaggatcttaaatttcccaaaaatggtctacctgacttctttgcagggtttcctgcatatstgtgtagcctctctcacaatatgccgtgctcacctctccacacctgccatgctggcctcctttctatccttggatccactatgctccctcctatcacatggcccgtgtcatgttcttccttctgcctgaaagttctcccccctcttcttggtcaagttaactcctttatcatctttcaggttttgactcaaatgtcacttctttggggagcccacatttaaacaccagtgatgtgtaatttaaaaggccaaccttttcccacaagccatgttgtctcttctttaaacactccgcatataaactgacaaaagaaatctaaaacatatcaagagtatctgattgagattgcccttaaaaaaatgaagaaaattgattcttattatctggcgagtctgagactggccccaggcatcaggcatttcctaacaatgacac

SEQ ID NO: 337332 - DNA, 557 bp, Homo sapiens
gatgtcactacctgtgcacttgcctgaatccccttaatggtcagtttcccactgttcttgagaggatcttaaatttcccaaaaatggtctacctgacttctttgcagggtttcctgcatatgtgtgtagcctctctcacaatatgccgtgctcacctctccacacctgccatgctggcctcctttctatccttggatccactatgctccctcctatcacatggcccktgtcatgttcttccttctgcctgaaagttctcccccctcttcttggtcaagttaactcctttatcatctttcaggttttgactcaaatgtcacttctttggggagcccacatttaaacaccagtgatgtgtaatttaaaaggccaaccttttcccacaagccatgttgtctcttctttaaacactccgcatataaactgacaaaagaaatctaaaacatatcaagagtatctgattgagattgcccttaaaaaaatgaagaaaattgattcttattatctggcgagtctgagactggccccaggcatcaggcatttcctaacaatgacac

SEQ ID NO: 337333 - DNA, 557 bp, Homo sapiens
gatgtcactacctgtgcacttgcctgaatccccttaatggtcagtttcccactgttcttgagaggatcttaaatttcccaaaaatggtctacctgacttctttgcagggtttcctgcatatgtgtgtagcctctctcacaatatgccgtgctcacctctccacacctgccatgctggcctcctttctatccttggatccactatgctccctcctatcacatggcccgtgtcatgttcttccttctgcctgaaagttctcccccctcttcttggtcaagttaactcctttatcatctttcaggttttgactcaaatgtcacttctttggggagcccacatttaaacaccagtgatstgtaatttaaaaggccaaccttttcccacaagccatgttgtctcttctttaaacactccgcatataaactgacaaaagaaatctaaaacatatcaagagtatctgattgagattgcccttaaaaaaatgaagaaaattgattcttattatctggcgagtctgagactggccccaggcatcaggcatttcctaacaatgacac

SEQ ID NO: 337334 - DNA, 591 bp, Homo sapiens
aatgaaattttttttaagctctctgacacaggtgggattttaggaaaaaagtggagatagggagcccatttaagaaagctgttaaagtaaaccaggagaaaaatgaagtggccgagaaccaaggtggtttcagtagaaataatgagatgctgtcagatttaggaaggattttataagtaaaactgacagcacatgctgatatagtggatgtggaaggatacgaaaacacagataaaggatgactccacatttaagctgagaacaagctggtgaataatactattagctgagatacaccacacacacgaggatccatttggggggctgaggataaaaggagatttctattttatttatcttmaatttgaaatgactgtgagctaccacagcaatgatgcttcttggatatctactgcgattatctatgttagaaacacggaaacaccactgcggatgggggagtgggtggattatgagaaatgtttgaagaaggaatgaacacgacttggttatctatgacatgtaagtaatggaggaatgcaagaggaattccaaggcccctgatttgagtgactgagtgccacattccct

SEQ ID NO: 337335 - DNA, 591 bp, Homo sapiens
aatgaaattttttttaagctctctgacacaggtgggattttaggaaaaaagtggagatagggagcccatttaagaaagctgttaaagtaaaccaggagaaaaatgaagtggccgagaaccaaggtggtttcagtagaaataatgagatgctgtcagatttaggaaggattttataagtaaaactgacagcacatgctgatatagtggatgtggaaggatacgaaaacacagataaaggatgactccacatttaagctgagaacaagctggtgaataatactattagctgagatacaccacacacacgaggatccatttggggggctgaggataaaaggagatttctattttatttatcttaaatttgaaatgactgtgagctaccacagcaatgatgcttcttggatatctactgcgattatctatgttagaaacacggaaacaccactgcggatgggggagtgggtggattatgagaaatgtttgaagaaggaatgaacacgacttggttatckatgacatgtaagtaatggaggaatgcaagaggaattccaaggcccctgatttgagtgactgagtgccacattccct

SEQ ID NO: 337336 - DNA, 407 bp, Homo sapiens
tgtcagcaaatttagtgggttgagtcaactgctaatttgaatccagtccattttcctccatgccgtcattgccctagttgaagttcttatcagctctctcgatcagctgcaatatttcttctaaccagtcttctgtattccagtctcccatcctccccttyccactttccagtaaatcctccacacagcagtcagaatgacctttagaaaagcaaatctattatgttattttccctccttaacatcattcaatggcttacagctgcctttaagataaagtacaaaatcctccgcagagtaaaaaagacccatgatgtagtctctgcccagaggctgaattctgagtccctcaacactgaaaagattacagtgatccactttctacttcctcgtctcttcatccacat

SEQ ID NO: 337337 - DNA, 407 bp, Homo sapiens
tgtcagcaaatttagtgggttgagtcaactgctaatttgaatccagtccattttcctccatgccgtcattgccctagttgaagttcttatcagctctctcgatcagctgcaatatttcttctaaccagtcttctgtattccagtctcccatcctcccctttccacttyccagtaaatcctccacacagcagtcagaatgacctttagaaaagcaaatctattatgttattttccctccttaacatcattcaatggcttacagctgcctttaagataaagtacaaaatcctccgcagagtaaaaaagacccatgatgtagtctctgcccagaggctgaattctgagtccctcaacactgaaaagattacagtgatccactttctacttcctcgtctcttcatccacat

SEQ ID NO: 337338 - DNA, 493 bp, Homo sapiens
ctttgaacatttaagatgtacttgaggtcttttcattttcaggttctttgtttctagttcttggggtaaaaactaacttttgtgttatgtgtgctgatctcccttcaaataattcatatcattatataagtttaaatctttgaattatccccagtgaaagatggcgataactctttgtgtacgttacatgtgtccttggctgtggaaatttttctagagtaatttgcatttgctcctgatgatatccaggtatttcatcaattttggaccatttattattttaacttaccaacatactactagggtagttgaatttgtaccctatattyattcacatagtatggaagtcagaggttcaagtttctttgggatgcctcattttattcttgtggcctttggcttacttgctagtgctgcatctctgggacaactgcaggtttcttccaggcccctttcacaaatgtggtcatgatttcacatcgtcatatgtatg

SEQ ID NO: 337339 - DNA, 392 bp, Homo sapiens
aaaaaaacaaactttaattttaattgaaataactgttgagtcacatgtagttgtaagaaataatgcagagagatctcttgtactttttacccagttcccctaatggtaacatcttgaaaagctatagtacactattacaaccaaggtrttaatattgatagaaagagtgtgttccttaccacaagtatctccccttttgtgcactacactacatcactcccctccacctccatgctttccctaaaccctggcaaccactagtctgttttccatttctgtcgttttgtcatttcaggagtgtgatacaaatgagtcataaagcatatagcctctaaagataggcttttttcctctgcatacttctctggagattctttcaggttgctgtgtgt

SEQ ID NO: 337340 - DNA, 392 bp, Homo sapiens
aaaaaaacaaactttaattttaattgaaataactgttgagtcacatgtagttgtaagaaataatgcagagagatctcttgtactttttacccagttcccctaatggtaacatcttgaaaagctatagtacactattacaaccaaggtgttaatattgatagaaagagtgtkttccttaccacaagtatctccccttttgtgcactacactacatcactcccctccacctccatgctttccctaaaccctggcaaccactagtctgttttccatttctgtcgttttgtcatttcaggagtgtgatacaaatgagtcataaagcatatagcctctaaagataggcttttttcctctgcatacttctctggagattctttcaggttgctgtgtgt

SEQ ID NO: 337341 - DNA, 657 bp, Homo sapiens
gttacaacttgttggtggggatgtaaattagttcatcccctatggaaaacagtatggagatttcttaaagaagtaaaactggaaccaacattttacctagcagtctcactactagatatctacccaaaggaaaaaaaatcattttatcaggaaagacacctgcactcatatgtttattgcagcactattcacaatagcaaaggtgtggaatcaacctaagtgtccatcaatggtggattagacaaagaaaagttggtatagatacaccatgaaatagtatgcagccatagaaaagaatgaaatcacatcctttgccggaaaatggatgcagccrgaggccattatcctacgcaaattaacacagaaacaaaaagtcaaataccacacgttctcacttttaactggaagccaaacaatgagtacacatggatataacgatggaaacagtagacactggggactccaaaatgggagtggaagagtggggaaaagggttgtaaaagctgcctgttgggtagtacatccactatttgggtgatggattcactggaagccaaaacccagcattatgcagtacatccacataacaaatttgcacatgaaccccctgaatctattttttaaaaagattatgagatttagccttttctgaatctg

SEQ ID NO: 337342 - DNA, 568 bp, Homo sapiens
agaatgaaatcacatcctttgccggaaaatggatgcagccagaggccattatcctacgcaaattaacacagaaacaaaaagtcaaataccacacgttctcacttttaactggaagccaaacaatgagtacacatggatataacgatggaaacagtagacactggggactccaaaatgggagtggaagagtggggaaaagggttgtaaaagctgcctgttgggtagtacatccactatttgggtgatggattcactggaagccaaaacccagcattatgcagtacatccacataacaaatttgcacatgaaccccctgaatctattttttaaaaagattatgagatttagccttttctgaatctggtagttactgttaaaaatgttgacaggccagaggtacacatatcctarcatctgttctgacatttggtaggtgttactagtgttctattctgttatttacactttattgtgtgccttctgtgtgcctatattcttttaaattccataattattgactttaatgtctctcagattcagtattcctaaattgtgctgcaatcccta

SEQ ID NO: 337343 - DNA, 369 bp, Homo sapiens
tgtcttttctctaaactagtaccacagcattcattcaagctttatctccttgtttatctataactttcctttattttattttcaaactgataggctgtagctatcactgaaagagacatttactctatatatggattttccttttatgcacataatacttttgcaaaaccaccatccatggacttacagagtgttttatccacaatattggcagttcacatagcattgyttctgatcaagaaactgccttcaaagaaaatgaaatatggtaattgactcatgttcatgaaatcttctgatcttagcatatcccccatcatgacaaagcagctgtcttgagaaaatggtgaaatgtctttctgaagaccc

SEQ ID NO: 337344 - DNA, 570 bp, Homo sapiens
tggcttgcaaggaaggtcgatgagattcaagacaaggttaaaaatgaaaacaaagaaacttctagagcaatctaggaaatgaaaaaagacataaaaatcattaaaaaaaaatcattcagtgcctctggaattgaaaaactcacttaaggaatttcaaaatacaaatgaaagctttatcaatagactggactaagcagaagaaactgtttcagagattgaggactgatctttctaactaacccagtctggcaaaagtctgtgagaaccttgggattatgtaaagaaaccaaaccttccaattattagcattcctgagataggataaaaaggaaacaatctggaaaatatacttgaggaaacagttcaaaaaaacttctttaattatgccagaaaggtagacatgcagacaagaaatccagagatcacctggaagatactatactaaataatcaccaaggyatataatagtcagaaggttcaaggtcaatgctaaatgaaaaaaatcttaaaggcagctagagaaaaagaatgaatcacaaaaaaagggaacctcatcaggctaacagtggg

SEQ ID NO: 337345 - DNA, 593 bp, Homo sapiens
aaactaatacagaatcctagaagaaaacctcagaaacatcatttgggacatgggccttgggaaagcatttataactaggttctcagaagcaatttcaacaaaaacaaaaatcaaaagttggatccaattaaactaaagaacgtctgcagagcaaaaataattatcaaaagaaagcagacaatctacagaatggaagaaaatatttgcatgcaatgcaaccaacagaggtctaatatccataatttgtaaggaatttaattcaacaagcaaaaaccaaatgccatcataaaaaatgggcaaaagacatgaayggacacttctcaaaagaagacacacaagtggccaacaaacataaaaaattcacatcatcactaatcatcagagaaatgaaaatcaaaaccacaatgagataccatcttacaccagtcagaatgactattagtaaaaatgtaaacaaaaaaacagatgctggcgaggatgcggagaaaaggactgttcatacactgttgctgtgaatgtaaattagctcagccactgtagaaagcagtctggagatttctcaagaaacttaaaacagaactgccattcaacca

SEQ ID NO: 337346 - DNA, 389 bp, Homo sapiens
agtgaagttggtaagaaatggtaggacttgggatttatttacaatgaagagtgcactggatttggtgatggattggatctggagtgcgagtatagagagaagtcaattatgactccagagcctttttttcyttaagatataaaaagaatgggaatgccatttactgaggtgtataggtaatgtagtggcaggttagggaggaaaatcaagagttcaattatagctatgctaagtttgagatattagtggacagatcacatatgcagtgtttctttaattagactgaccccctttagggcagaatatatatcttttactaacatacggtttcctataatagcaagggaaaagattagaagatttaggggtgtttttcagcccctaaattt

SEQ ID NO: 337347 - DNA, 389 bp, Homo sapiens
agtgaagttggtaagaaatggtaggacttgggatttatttacaatgaagagtgcactggatttggtgatggattggatctggagtgcgagtatagagagaagtcaattatgactccagagcctttttttctttaagatataaaaagaatgggaatgccatttactgaggtgtataggtaatgtagtggcaggttagggaggaaaatcaagagttcaattatagctatgctaagtttgagatattagtggacagatcacatatgcastgtttctttaattagactgaccccctttagggcagaatatatatcttttactaacatacggtttcctataatagcaagggaaaagattagaagatttaggggtgtttttcagcccctaaattt

SEQ ID NO: 337348 - DNA, 389 bp, Homo sapiens
agtgaagttggtaagaaatggtaggacttgggatttatttacaatgaagagtgcactggatttggtgatggattggatctggagtgcgagtatagagagaagtcaattatgactccagagcctttttttctttaagatataaaaagaatgggaatgccatttactgaggtgtataggtaatgtagtggcaggttagggaggaaaatcaagagttcaattatagctatgctaagtttgagatattagtggacagatcacatatgcagtgtttcyttaattagactgaccccctttagggcagaatatatatcttttactaacatacggtttcctataatagcaagggaaaagattagaagatttaggggtgtttttcagcccctaaattt

SEQ ID NO: 337349 - DNA, 566 bp, Homo sapiens
tcaattctctaacaaattgatatgtggattcaatgcaatccaaatcaaactcctggcaagctttttacagaaatttaaagcttacggtaaaatttatgtggaaatacaaaggactttagaacacccaaaataatttttttataaagaacacactacatgatttcaagacttgctataaagctgcagtaataaagttcagtactgaaataacagtaaacatatagatcagtagagcagaatgggagtttcagaaataggcccacatatatatgttcaattgatattttttaaaacaaaagtgccacartaattccatggaggaaagaaatgatgctgaagcaattggatcagtggattgaaaaaaaaaagttgagtcttacctgacattatatacaaaaattaactcacagttatatatttaactcacacttaaatatgtaagctaaaagctataacaatatagttgaggaaaatatttttaaaaatctttgtgaccttgggctatgcaaagattttttgtaacacaaaaatcacaacttaggctgggcatggtgactcatgcctgt

SEQ ID NO: 337350 - DNA, 545 bp, Homo sapiens
cagtggcagcatccctcaataggcagctctcaggctatggggagcgcatgctttggctccctttgtcctggggccagcttccttggtgtgctgaactgcctgttccctagggtgtaggacaatatgtggacaacagtgctggatatctggcttcactactgggtccagccagcatcatgacaatttagccctctagaaagatgtggagggatgtcagcagggctccagagatgtgaagatgcaggggttgttgggacctaaggcagaatatagtttgatggaggctgatctcctaaaatggcagggaggtgcagctgcttgagtctcagtgggtacatgggacccagtatcaactctcttgatggaacaatgctgttgcatgggctccaagtagctgcctatactagtcttaaggcccataagaactgaagagctctcctatagctakaattgcacgagtccacggtgggaatgtggaccaatagaaatcacttgctaactctttccctataatgaaggcagaacttaaagaacatgggggtgat

SEQ ID NO: 337351 - DNA, 297 bp, Homo sapiens
ttcattgttaactgccaggagttcygcagcaggcactaaactgcccgagtgacactggtgaatgtctgtgcattttcattgcaggaacattgaagtagagaattacttagttaagactgaggaactagcctgctggaatcttcctcacttgccaccactgggaaaaattacaaaaccacactggaacctgcatgcctctcctcttccaatctcctcaagaaccaaaagagaccatcattacatttcttgccaccatgatttatgaggtcttaaatcttgccagggggaaaaaaaaca

SEQ ID NO: 337352 - DNA, 562 bp, Homo sapiens
ccagtcaacagccagtgaagaactgaggttctcagcctatcatcaacaaccaggtgggtgagcttgaaacagatttttccccaattgagccttcagtgtgaccacagccctggccaggattatatgagaaaccttgagctggaggcagccaactaaactgcacccagagtccggacctacagaaactgtgagataataactgctgttgtaagctgttatttggagtcggggggtggtggggcagtaattgctatacagcggtagataactaatacatattcccaatagtaaaaatttttggagcatgcattctccttccttcttcctgtctctctttatatattctctctctmtatatatatacatatatatatatatatctctttatgaattaaacatgtgctaaatattcaaactaaatattagtaaagattgcatcttttcttaatattattttgttcagctctataaaggtacaattggaaaataaaattgcataaatctaaagtgtacaatgtgatgatttgatatatgtatatattatgaaatgattaccacaata

SEQ ID NO: 337353 - DNA, 616 bp, Homo sapiens
tacacaatggaatactattcagcctttaaaaagaacaaaattatgtcatttgggacaacatgaataagcctggaaaacattatgttaagtgaaatatttcggrcacagaaacacaaataccaagtgatctcacttatatgttgaatctagacaagtgggtctcatagaagtagagagtaaaatggtggttaccagggactatgggtgggagtggaaaggggttggggagatgttggttaaaaaaattatgtgtgacagagatataaattagtgattacagaccagaggaagcagttaatttttaagtatctcgaaactttaacaagtactttaaaaatatgttacaaagagaagataaatgtttgacgtaatggataccccagtggcctgaatttggtcattgcacattgtatatgggtatcaaaatatcacatgcactaaaaaattacaattattacatatcattttaaaaattgttaaaatggaaaaaatatctgttgtcttaaatgcacacctagatggagtattgtatatattggccaatgtctatcaattggaccattgttcgtattcagagccattactgacctacccatttccattatccaaatatcca

SEQ ID NO: 337354 - DNA, 616 bp, Homo sapiens
tacacaatggaatactattcagcctttaaaaagaacaaaattatgtcatttgggacaacatgaataagcctggaaaacattatgttaagtgaaatatttcggacacagaaacacaaataccaagtgatctcacttatatgttgaatctagacaagtgggtctcatagaagtagagagtaaaatggtggttaccagggactatgggtgggagtggaaaggggttggggagatgttggttaaaaaaattatgtgtgacagagatataaattagtgattacagaccagaggragcagttaatttttaagtatctcgaaactttaacaagtactttaaaaatatgttacaaagagaagataaatgtttgacgtaatggataccccagtggcctgaatttggtcattgcacattgtatatgggtatcaaaatatcacatgcactaaaaaattacaattattacatatcattttaaaaattgttaaaatggaaaaaatatctgttgtcttaaatgcacacctagatggagtattgtatatattggccaatgtctatcaattggaccattgttcgtattcagagccattactgacctacccatttccattatccaaatatcca

SEQ ID NO: 337355 - DNA, 616 bp, Homo sapiens
tacacaatggaatactattcagcctttaaaaagaacaaaattatgtcatttgggacaacatgaataagcctggaaaacattatgttaagtgaaatatttcggacacagaaacacaaataccaagtgatctcacttatatgttgaatctagacaagtgggtctcatagaagtagagagtaaaatggtggttaccagggactatgggtgggagtggaaaggggttggggagatgttggttaaaaaaattatgtgtgacagagatataaattagtgattacagaccagaggaagcagttaatttttaagtatctcgaaactttaacaagtactttaaaaatatgttacaaagagaagataaatgtttgacgtaatggataccccagtggcctgaatttggtcattgcacattgtatatgggtatcaaaatatcacatgyactaaaaaattacaattattacatatcattttaaaaattgttaaaatggaaaaaatatctgttgtcttaaatgcacacctagatggagtattgtatatattggccaatgtctatcaattggaccattgttcgtattcagagccattactgacctacccatttccattatccaaatatcca

SEQ ID NO: 337356 - DNA, 616 bp, Homo sapiens
tacacaatggaatactattcagcctttaaaaagaacaaaattatgtcatttgggacaacatgaataagcctggaaaacattatgttaagtgaaatatttcggacacagaaacacaaataccaagtgatctcacttatatgttgaatctagacaagtgggtctcatagaagtagagagtaaaatggtggttaccagggactatgggtgggagtggaaaggggttggggagatgttggttaaaaaaattatgtgtgacagagatataaattagtgattacagaccagaggaagcagttaatttttaagtatctcgaaactttaacaagtactttaaaaatatgttacaaagagaagataaatgtttgacgtaatggataccccagtggcctgaatttggtcattgcacattgtatatgggtatcaaaatatcacatgcactaaaaaattacaattattacatatcattttaaaaattrttaaaatggaaaaaatatctgttgtcttaaatgcacacctagatggagtattgtatatattggccaatgtctatcaattggaccattgttcgtattcagagccattactgacctacccatttccattatccaaatatcca

SEQ ID NO: 337357 - DNA, 546 bp, Homo sapiens
gacgtcagccatacacaactaccaaggccacatttagatgtattgattgaatttcaaccttgggcttaggagggggacacatctaaaatatattggactctgtttatagactactagacagtttaattatttaacttctctaagtctccaatttctcacttgcaaattcctaatgctgatctctctctctttttaaaaaatttcattggatgaatgttggagacctttttcttacattttgtgcttctttggatcttgattaatttcttcaactttttattccaaatgacgatactttaactgtgtttggactttagctgaattcattctatttttcaactcctctattgaatatttatttttggcactcatatttctaatttttaggaatgaattatttaattgcttctgtttcaggagacatattttattttctggatgttgtcacctctcaaatctctttaataatgctaattaaaaaaattaagttcctgatccagcaatctcacatstgggtatttaccccaaagatttgaaatcagtttg

SEQ ID NO: 337358 - DNA, 509 bp, Homo sapiens
tagaattctaatactttaggatgtattcgaatcacttggagttctaattaaaatgtagattgggggcctcatatgaaactataataacagtattcacagatgagggccaggaatttatattttttgtaagtgcctatatgattgttttgtagattgctcatgctttgataaagcctgccataggctgtgttttctgatgacggggttaatggcagaacctgaagccttatgtygtgatgcacgtaaactgctaggctaaggaattagtattagcatcatgtgcattagctatttgacagccataaaatatacttagtcaaagggtgtaatacagtcaggtctgtatatttgaaagagttttgatggcagtgtggagaataaaccgaaagaaggagatacggagctggggaaaagttgtcgggttattgccatagatgaggcagatgatgatgaagacctgaatttgggtgtcaggaacagaatggagaaaaaaagagtaaaaaaacatt

SEQ ID NO: 337359 - DNA, 509 bp, Homo sapiens
tttggaaatatatcttgtaaaaagccaaaggggaaagggtggtaggaaatgaatacatatgaaaattgagacctggagaagtaaactttgctgcatctacggattctttatactacagcgcacttcctcaggggctcagctaagcatttcagaagagtgcaagtgttgttgacatttaaaagctacagcatgggcttgggataaggcaattctgttctctatttcttagagaagaaaagaatcccagtgcacaccaggaaaataattttggaaactcagttaattgtgaaggtgaggctgagccagcttgtggttaaagctacaaaggaaatattgttcacttcccataaatgatttcccrtatgtaaagtggggccgatcctagcaggtgacttcagagacatggaaacatttaaccacagatgaataaatcttgcaaacacattttttaaaaatgcaaagagtaacctataaaataaaatctgtggctgtcacatttggagactgaa

SEQ ID NO: 337360 - DNA, 496 bp, Homo sapiens
taaacactgcccaaggacttaatggatcttactgagccacaccatgcagatgtattggaacataaataggtataggakataagaggcacaaaagcaatttgtttggattgggtcactgcttaatccagatgggttcagcaaaagaattcatgaaacgtgacagtgggccaagaagaacttgctgtgacatttcagattcccctacttcttctaattaaccatttcaagtataacaaaacttatagcacatacaaatctagtgcaacccatctgtaccaagcgcagacctgtccgtggaggatggatggttctgttctcaagcaatggactatgacacaataatatctcaagttgggcttttaatttctatgatacattgattctgaacagcatttttctaaaagacaaaaactataccagagttgctttttgacatagcctgtcattaaatgcatttggatatattgcatggatcaaaatatactgcaagtttaat

SEQ ID NO: 337361 - DNA, 487 bp, Homo sapiens
cttaattgtttgtacaaagaaaatctttgacttatgaatgataagaaaataatgaaaattgagttagtgcttataaaattctcgaattcttttgcttttgcaatcaagccaggcagatttctaggagttgaggtttcttagggtattttatgtttcacatgacstcaccaagaagttacggatcaatagaactttgtaatgttcatgtagcagagggatgaaagagttaaaggatttaggtgttgcaaagggtgcttcttctgggcaacagaggtttgaatgtagggcaccttttgcattttcagcattaatgtttgaactcttgtcctacagttatgtaataagacaactttatttttttttaaaagagaaacagaaaaaaacgtctgctgagaaaaatacttgccgcccttggggacagattttgcagtacatttttgtacaggagtcattctctcctgtccaaaagctctggaacaggatgaat

SEQ ID NO: 337362 - DNA, 506 bp, Homo sapiens
aaatggaaaagaggcatgggataagtgcttacttcagtgactgcagaaggatccaactccgccaacatcctgatttcagacttctgggctctacaactatgaaagaatacatttgaattgtccgtagtcatcaagtgtgtagtgatttgttacagcagcagtaagacatgaatacaaactctgtttgcctttgtaggcctccttggagagatgctaaggcatcactgtgcttactccttcacctgtgccgtgtcttgtccaggggaaacataagcacatccttttctcagtctctagggctgcaggaagatcccaacccagcttcagttttcctttgcttcttctttctttcatcatctttgtttctttcctcttgttctcttcctgggttcttgattcattcagtagaagtkaagactccaattcatcatattcctttaactgaagggactcataccatgacctgtgagtagttcatttgagtgctgaattagtcttccagggct

SEQ ID NO: 337363 - DNA, 565 bp, Homo sapiens
tactcctactttatagatgaggaaactgagtttcaaagaggctatattatttgctaaagaaaataaaggcactaagtagtatttcctggaacaaggctgaatgcatgtatattattattattattattaactatttggtgtgagatataatctgtgagttcagggctctctgagttaaagtgtttatttgtcccaccacacagaaacttttccttatgtttggttactttgggtttgcatgtattytttcaaagtgcttcatgctgtctttgaagaagagccgacaggttctgtgaccttgagcaaagctcagacgccctatatcctagttctcatcaaaagagcagagctgaacttgctaatcaattttctgagactcctccgaggtaatgctgatgatcttggttgccaagaactttaatagtaagaagcaccctgtgagcaattaaaaataataacaggccaaggaagatattcctgggaagcgctgcaggtgagaagtgaccaaaacctagggagtcagatggatgatggctctgtgattctcacgaacaaagcctttcct

SEQ ID NO: 337364 - DNA, 577 bp, Homo sapiens
ggtaaggcaggcagtggtatggggcagactgcacccccacaattaaccatggcaagcatatggagattttcctatatgtcaatcagatgtcagtgtacagatggatttaagcactcccaaaagrgccactcaatgagcgaggggaccctgtagcaaggggagacagggtgggtggcttgccaactgtgggttgaagctgacaggcagaggtcaaaactgagccatgattctgggccagcagactgtgtagggcaagtgtgaagagggctgtactatgagcacccaaaagaggcagcccattgggaacctgccacacagaagagtgacagccagtcagtgaaggaaagcaaattacagggctctggaaaagcctgcaagaagtcccttacactaaaacgaatggcttttatgtaaataatgtaattcaggttgtagatcatcaaagaatttgcaaatgtagctttccacacatgcaacctaaattgtcaaaacaactcagtgaaaattttgtgcattaaaaatgtcatcatggggtggaggcctcttcatgtcctccctaactcattctatgaagcca

SEQ ID NO: 337365 - DNA, 558 bp, Homo sapiens
gggctctcgcgaggcgggagcctccccaacaggcaccgccccctgctccatggcgcccagtcccatcgaccgcccaagggctgaggagtgcaggcacaaggcacgggattggcaggcagctccgcccatggccccagcacaggatccacaagggtaagtcagctgggatcctgagttaaatagggmcttggagaacttttatgtctagctgcaggattatatatgcaccagtcagcattctgtgtctagctccaggtttgttgatgcaccaatcagcacttatctagctaatctggtgggggctaggagaacttttgtgtctagctaaaggattgtaaatgcaccagtcagcactctgtgtctagctcagggattgtaaacgcaccaatcatccccctgtcaaaatggaccaaccagctctctgtagaatggaccaatcagctctctgtaaaatgggccaatcagctctctgtaaaatggaccaatcagcaggatgtgggtggggccagataacggaataaaagcaggctgctcgggccagcagcagcaactgggtac

SEQ ID NO: 337366 - DNA, 558 bp, Homo sapiens
gggctctcgcgaggcgggagcctccccaacaggcaccgccccctgctccatggcgcccagtcccatcgaccgcccaagggctgaggagtgcaggcacaaggcacgggattggcaggcagctccgcccatggccccagcacaggatccacaagggtaagtcagctgggatcctgagttaaatagggccttggagaacttttatgtctagctgsaggattatatatgcaccagtcagcattctgtgtctagctccaggtttgttgatgcaccaatcagcacttatctagctaatctggtgggggctaggagaacttttgtgtctagctaaaggattgtaaatgcaccagtcagcactctgtgtctagctcagggattgtaaacgcaccaatcatccccctgtcaaaatggaccaaccagctctctgtagaatggaccaatcagctctctgtaaaatgggccaatcagctctctgtaaaatggaccaatcagcaggatgtgggtggggccagataacggaataaaagcaggctgctcgggccagcagcagcaactgggtac

SEQ ID NO: 337367 - DNA, 603 bp, Homo sapiens
atcattgtctctaaataacttcctggggattgctaggtgaaatggcattcatttattataatggctattgttttttaaaaaatacacactaaacacaaaaaccaggatagaatggtcaaataacatggacaaaaacccgacagaagaaattcaaataaactaataaataaaatattttgccttctctgtaatttaatgtaaatgaaaataaaaayatacttttaatgtatgtatcatgtcaaattagcaaagtgtgtgttgtgtgcctgtatgttttaaaaacaacattcggtattggtgataatatgtgatatggtttagccgtgtccccacccaaatctcatcttgaattgtagcttctttaattcccacgtgtcatgggaaggacctgatgggaggtaattgaatcatgggggtaggtctttcccatgctgttctcatgatagtgaataagtctcatgagatctgatggttttataaaggggagttcccctacatattctctctttgcctaccaccatgtaagactaagatgtgccttgactcctcattcaccttctaccatgattgtgaggcctccccagccatgtgaaactgtgagtc

SEQ ID NO: 337368 - DNA, 603 bp, Homo sapiens
atcattgtctctaaataacttcctggggattgctaggtgaaatggcattcatttattataatggctattgttttttaaaaaatacacactaaacacaaaaaccaggatagaatggtcaaataacatggacaaaaacccgacagaagaaattcaaataaactaataaataaaatattttgccttctctgtaatttaatgtaaatgaaaataaaaatatacttttaatgtatgtatcatgtcaaattagcaaagtgtgtgttgtgtgcctgtatgttttaaaaacaacattcggtattggtgataatatgtgatatggtttagccgtgtccccacccaaatctcatcttgaattgtagcttctttaattcccacgtgtcatgggaaggacctgatgggaggtaattgaatcatgggggtaggtctttcccatgctgttctcatgatagtgaataagtctcatgagatctgatggttttataaaggggagttcccctacatattctctctttgcctaccaccrtgtaagactaagatgtgccttgactcctcattcaccttctaccatgattgtgaggcctccccagccatgtgaaactgtgagtc

SEQ ID NO: 337369 - DNA, 563 bp, Homo sapiens
tttttaaatctttgtgacctcctgtgaggaggagaaagaagaggaggagatgaagaagaaaaagaatttcagacacatataaattgctatttatgtgcaaaggcagcagaattacattctcaaacaatgcagttaggaaatgctctgaaaacattgcacctgtaacaaactcttcccgaagtctttttcagaaaaattatctaccatctcacaatggcccaacataagtgagaagaccaagtgaagtatctcaaaaactgagactttttcaactcttaaattcacaggcagtctaggttccatgcaaatcatactccacaaataataacagagaaatttttagatttctttttaataktagaagatcaaagcactcaaatcaatcattctttgcattatctgtatattagaatctcctgtagatcttgtaaaatccccaatgcccatgcagcaccccagacattaagatatttaaatgtccagctggggatgaaacccaaatgacagtatattttaaatctttctgtgtgattacaatgtgcagccaagattaagaagcagtg

SEQ ID NO: 337370 - DNA, 545 bp, Homo sapiens
catgatggaatactatgcagccataacacagaatgagttcatgtcctttgcagggacatggatgaagctggaaaccatcatcctcagcaaactaacacaggaacagaaaccaaacaccacatgttctcactcataagtgggagctgaacattgagaacacatgggcacagggaggggaacatcagacaccagggcctgtcggagggtgaggacaagrggagggacagcattaggacaaacacctaatgcatatagggcttaaaacctatatgatgggttgatgggtgcagcaaaccaccatggcacatgtataccctatgtaagaaacctgcacattctgcccatgtatcccagaacttaaagtaaaataaattttttttaaaagatgcagtgccacaaatctttactgtgcacagagcagaaaacacaacaaaaaaaggaacaatgtaagggcactgttttctccctagtcagaaggtgcaaactttcattttaatatttttaatttgccaattatattgcttttccagctaagatctttttaa

SEQ ID NO: 337371 - DNA, 526 bp, Homo sapiens
caacatttatatcactgtagagcaactgaccaatataagcaacattgaagctataaaaaggtaagatgagaagactacagagaggaaggttatagaaccggtgagatcagcaccgcctaaggtcgcactgcaaatccaccatttcatttttttttcactgcaccgagagctaatccctactaatgaacaagatttttatttacaaaacctaatgtcaacgtattaatttacaatgaggaatatctctttccaagcatgggaaaactcatgttaagtttcatgagcagaaatagatagcatttgaccatctacttcctttgattctttccatgagcccatagctatccaacagaatccttaacacagtcrtccaggcaacgcctgtgaatcacactaaagtggaactctactggcttcattcaaaggcagtgatttttcgctcccaagatgactaagaggcagatagtaaccaggttattctggagatcagggaataagagctaatgtagacagatgcttgaggacc

SEQ ID NO: 337372 - DNA, 591 bp, Homo sapiens
catcttcctatttcacagatgaagaaactgagactcaaggaggacaaagaattcacacacttgtgtgtggtaggatgaggatcagaacttgggctccacaggcactctgggtgctctttaccatttgcttctatttacttctcagctgccccaggaaatatggtggcatacaagattaggcttggcttggcgctcactaagaatagaacagggaacttttcccaattaatgaagggctctttgaaaaaatcgacccaatattcttccagccaatagaaaaaaatgattctcctttrtagaggagttggggcaaatggattctaaaaatcaattataaaagcagctggtccaatgtaaactgatgtctcagctgagtttggactgactgaaaatccagccacagcttggttttcacctcttcatccctccacccttccttgtgcctaaagagacaagagaatgtgagcccccacccctgacatgtttgaaaagggaaacaaattcattgataacattgtggtctgttcaattctttgcttttctttttgcctccttaccccaccatcttcctcaggtacacaggacacacca

SEQ ID NO: 337373 - DNA, 423 bp, Homo sapiens
tttaaataggctcccaacttccagttttgttcacatccaacatactctactgcagcctgagtcctttccaaaacacaaattgttcagtgattgcctctgtccctgaagttcaaacttcctgatattagcaaggtccgcattatcagtttcctgtstccttctatttacacgcacaccagtgtgcctctcataagcgtatttaacttttttcagcttttcaaatctactatgatccatgctctttcttggggctgattcttcacaaatgatgtttcctggtctggaactcttctctcctttatcttggctaatccttatctcctattgaccagttcaaggttactttttaagaacagactccccaggacaagccaggtcccccagcactgtgtttccattgtctcttttatgcctttttgcata

SEQ ID NO: 337374 - DNA, 649 bp, Homo sapiens
tctctcctttatcttggctaatccttatctcctattgaccagttcaaggttactttttaagaacagactccccaggacaagccaggtcccccagcactgtgtttccattgtctcttttatgcctttttgcataacactcatatataacattttgttttaaaacttgcttagttgcctgtcttcctcattaattcataacttctctgagagtagggattgccttaatcaggcaagctaagaattaaaggctcattgggtcttttctcatcaattcattcaccaaaaatacatggagcatttactatgagccaggaaccatactaaactctagaaagacaatggtgagccaagccaacccagttagtccctgaacatatggtccacatttaagtcctcttatagtctactaattgaagttccccagctttgttttaatagcatcccatttttaytccttgttacttggggaagaatctaagagtaagtagacagttacctctagttttcctagaggtaatgcctcctcccaataccttatagatccagagtagagaaacgaaatggagaggcagagggaagaatctaccgaaaactatgggatgttgccctgctctgttgtgtccaggaggtcattaatggggaaaggaaa

SEQ ID NO: 337375 - DNA, 649 bp, Homo sapiens
tctctcctttatcttggctaatccttatctcctattgaccagttcaaggttactttttaagaacagactccccaggacaagccaggtcccccagcactgtgtttccattgtctcttttatgcctttttgcataacactcatatataacattttgttttaaaacttgcttagttgcctgtcttcctcattaattcataacttctctgagagtagggattgccttaatcaggcaagctaagaattaaaggctcattgggtcttttctcatcaattcattcaccaaaaatacatggagcatttactatgagccaggaaccatactaaactctagaaagacaatggtgagccaagccaacccagttagtccctgaacatatggtccacatttaagtcctcttatagtctactaattgaagttccccagctttgttttaatagcatcccatttttattccttgttacttggggaagaatctaagagtaagtagacagttacctctagttttcctagaggtaatgcctcctcccaataccttatagatccagagtagagaaacgaaatggagaggcagagggaagaatmtaccgaaaactatgggatgttgccctgctctgttgtgtccaggaggtcattaatggggaaaggaaa

SEQ ID NO: 337376 - DNA, 615 bp, Homo sapiens
accctccctctcactgccacgggagacttgacttgcatttgaggaccsaggagtaattgtcctttccaaggggcttatttcacagtcgattatgcagtggcagccccagacataccattttaaacatggatagcatgtccttgaagagcccaattgctttgacaagatgcagtcactcaaaatattaaatatcactcaatcttcaaagcaacttatcatatcagctcaccccttctgtggcaggatttgccattgtcacaacataaaataaaataaaaatagcctgacttaaatgctaggcttggagatgaaatcagtcaattactgagccacagtatccacagtgccagatactaccaacaaaacgtcacttggtgaaaggctcagacacggctgtttggctggcaacagccaagcaagtactctcaaccaagtgaatgtagggctccagttttctgcaatcttgaaggacttcagtgtgccaccccattcctctggtggaaatcctatggctcattctcatctctcagtgcctccaagtagtatttttaccttagctgcctaagccaccgctggtttcattagtgactgcagaaagaaacaccaggtcctctt

SEQ ID NO: 337377 - DNA, 565 bp, Homo sapiens
gaacttctaccttctcattcgataaagggcttaggtagacaattcctcctggtgttcctagtataattcctgatataaccaggagttgcaaaactaaaaccctacacatctaaaatgaaactggcctactgttattttatatatgtttttagaaattcagaaatgacttgccctaaaataaaamctgtcaaaaaaatttcttaaaagtgattcatagaatgtaaataacatgtgttcatactcttctaaaaaagaaaggaggaaaataacagagaaggaaatacaaatagatccaattcatcattgtgatacctaggtttctccttagataaaacagacataaaacatgtgctttacaagtctcagatgaccttcaagacatctaagtacagtatctgtggatttttaagtataattaacaacttgtttttctatttaaagaattttcattctgtttccttaacaggcaaaagccaatcagtcttgttctcaaatgctaatgtaagtaattaaaaataacattaattgaaatactgcagggctgttaggtttttagatggtgagt

SEQ ID NO: 337378 - DNA, 507 bp, Homo sapiens
ctgtcttttgtgccagtccctagcttctgctcaaccccacatgttttgcttggccttctcttaagtggtatccaatccttccctgagccctggaatacctgttgacaggcagggagcagcagtagtgctatataagtacttacgcatatgtttcttgctaacttaagcctgttcgagcactacactataatcttgcttctgacaagagaatcctgcaatggcaacatgaatactatttaaaaactcacacacacacacacacacacacacacacacacacacacacccctaacaaaacattaaaatagtaattgagattattaaaatatatttttcttatgtycttttcaaaatggaattggcattaaagacatttgaaatgtgtcaattaacactgcttttctttataaagcaaatgattcatacttaaaatgtattactctaccttctgcccctcctgcagcctaccaacctggaggttaaataggtagaaaatttaaatagtgg

SEQ ID NO: 337379 - DNA, 659 bp, Homo sapiens
atgtgttaggcatcctttggaccatactacccaatatagatctataaaggaatacctagggaagcttagagaaggtctggagaataagtgggatggctccaaaaataatattatggttcacacaattaatatacatttatcagagacctactgtgtttcccacacaattttttctatccttctctgtttgcaggtaaatactcagttaaccaagtcatagcttcrtttttcttcaaaggcaaatatttagtgaaatatatttggtatttttcctcttctaataaatagaccaacatatatttgagacatctaacctccttgcaagaatctcagaagacactaagcctgtaagttagcatcactgctaatcatttcaaattttaagggttaccattatgtttgcttctgtatcttcctttatgtttgttttccatgtgtttaaagtgctaatgacattcactgcttttgcgatttatcagattagcactgctgtaacagtttatgatgttacattttacaagattcacttaatataactttaattatcactgaaaaatggcttctagtcataaaagtactttaaaaattacaagctaaacctaccctaaattaaaagtcagggttcatgctgttaacaattttataaaacaaaaacatcc

SEQ ID NO: 337380 - DNA, 614 bp, Homo sapiens
tttttcatgatttattttaggatttaggaagttaaacatttaaggaatgagatctcaagtatcttctcgggcaaccatgaagcttttttttcttttattyccaatcactcttaaggtttaatcttctaaaatttagaaggttgctaagtccttcagctacagtcttatgcaggaacaacatccctacttactctctcttgcccggctcccgccctctctttcttccctctcaaagtgctcttagaacattagcagctcaatatttcaatttctgaagacacagcaaagaccagtctgaattcaagctaactaccaggatgtttgtttgttttggcttgattttgttgaactgaatgtaaaattgaaaagtattattttggatcatctcattaaacaccttcattttatagatggtgaaaaccaaagtgagagaaaaggagtgacatactcaggatgtggcagaactgagactgccttctaactgtgcagaacagcatcaggccgtctcttgtagtctctttcaaaacttagacttatatgaagtcaagacttaaagacatttcaaggaaatctactctagttcagttttcacagacctttctctcatctgaaaa

SEQ ID NO: 337381 - DNA, 554 bp, Homo sapiens
gttttggcttgattttgttgaactgaatgtaaaattgaaaagtattattttggatcatctcattaaacaccttcattttatagatggtraaaaccaaagtgagagaaaaggagtgacatactcaggatgtggcagaactgagactgccttctaactgtgcagaacagcatcaggccgtctcttgtagtctctttcaaaacttagacttatatgaagtcaagacttaaagacatttcaaggaaatctactctagttcagttttcacagacctttctctcatctgaaaacaaaatgaacacatgtgcaatgacttcaaaattttacatgcaataataggagatgcacagatgccttgaaggccatcatgggctggtgaggagcctcttcaccctaagctgagaaccaccaatctattccaacaatgtgattttagagatgagaaaatctagacaatgagaacttaaagagtcacagagtgagttaaaaatagttctaggactagagacccggtatcttgcttcccacttattcccattccctcaggtcattttagc

SEQ ID NO: 337382 - DNA, 554 bp, Homo sapiens
gttttggcttgattttgttgaactgaatgtaaaattgaaaagtattattttggatcatctcattaaacaccttcattttatagatggtgaaaaccaaagtgagagaaaaggagtgacatactcaggatgtggcagaactgagactgccttctaactgtgcagaacagcatcaggccgtctcttgtagtctctttcaaaacttagacttatatgaagtcaagacttaaagacatttcaaggaaatctactctagttcagttttcacagacctttctctcatctgaaaacaaaatgaacacatgtgcaatgacttcaaaattttacatgcaataataggagatgcacagatgccttgaaggccatcatgggctggtgaggagcytcttcaccctaagctgagaaccaccaatctattccaacaatgtgattttagagatgagaaaatctagacaatgagaacttaaagagtcacagagtgagttaaaaatagttctaggactagagacccggtatcttgcttcccacttattcccattccctcaggtcattttagc

SEQ ID NO: 337383 - DNA, 574 bp, Homo sapiens
aacaaaatgaacacatgtgcaatgacttcaaaattttacatgcaataataggagatgcacagatgccttgaaggccatcatgggctggtgaggagcctcttcaccctaagctgagaaccaccaatctattccaacaatgtgattttagagatgagaaaatctagacaatgagaacttaaagagtcacagagtgagttaaaaatagttctaggactagagacccggtatcttgcttcccacttattcccattccctcargtcattttagccataattggacataaacatgctgaagaagaaatgaacggatgtccttgattagtcaagaaaggatgggacctagtacaagaagaggggtttactttggaataggagaaggaccaataaaccctagtaataggaagggaggcagagtatataatgcagatgtcaaatagtttttaagtgtggtgttgagggtctatttttcctacatgcgctccaaagccatatgctgggctactttgctccatagataccttccttaccactctctgccttccactatcctaactctcacgcagatgactgtttt

SEQ ID NO: 337384 - DNA, 572 bp, Homo sapiens
gtagccaggtgtaaattaaatgtatccaatgggttgactcccagctagcatttcccagtaggcattctgttgttctgaagactaaaaaggtataactttatttgtcacaaaacttttatttaaagaaatctcagtccaatagttctataagtttttaaatgaatttcatgccattttgaacagctggagttagaagatggaaattattctaatataaggtgcatgattacttgtgacattaaaaaatgaaagatgtattaaataacactttttagttatattttaatgatgatcctacttttaaggagactctakaaaatgtgggaaagttcattgaaaaaaataggtgatatgtaatttgataataatgttgatgtctttcctaggatatatctacctattcacaagtcatttagaaatataaatgagggaggaaagagtacattttcgcctcaccccatttgttttactcacaagaagcagcgtgaaaaccattggtcagcaaagaatcagtaactttatttaaactaatttagaacaagataaaaatttgaaagtccttactaacaatg

SEQ ID NO: 337385 - DNA, 592 bp, Homo sapiens
ttatcatatgtgtctctagtcactcaragtatcatgagagtggcagatatagaaatgagttattttaatacagaggaatgtattggagggggatagatttggtccattgctgtgtctggcgggggtaagggctttcaaaaagtaatatttgagttttgtgaagagtgaataggattctcctgatgagccggaggagcacactgctaattgtatttagggaagctgagtttggctgtggattgcaaagcaagaggtgagtgggggtaaagttggaaagataagctatttgtgatcccaaaagaccttcactatcctgattgggaatcttaacatcttccggtaggtaaatgaaagccatgaagacttttaagcaaaggagcaatataacttattgttacatatgtgtttggctttgggaatagttatctggacactaaagaaggtagcttgaagaagagtcaatctggtagcaggaaggccagttataagagtgttgggtggattaagtcagtgatgagtgtttaagttataatggtggtgaagaaaaggcatcggatttaaggtatatttctagagaaaactgtatgagact

SEQ ID NO: 337386 - DNA, 554 bp, Homo sapiens
gagtcaatctggtagcaggaaggccagttataagagtgttgggtggattaagtcagtgatgagtgtttaagttataatggtggtgaagaaaaggcatcggatttaaggtatatttctagagaaaactgtatgagactcagtgaaaaatttgctatraagaaaaagaaagatggcataattatgaattccatagcttaggaaactagtaagtggagatgtctttaacaagatagaagaaaactgtgagtggacacagtgaaagtatatctcttcctttcactaacagggaaacagtagacaagttagatttaatcactgtttttcagtatgaccacattgtgccattcaggaggcaatgcaaatgtagggttagatcttcggagaaagataaaagctggagacatagatgtgagagagaccatagcccactgaagctgacttcaaccagagaaagagagcctgtcgataaagagaagttaagaggttcaggaacggtaagaatactgttcttggtatgacaaaaggggttttgtttgggaatgaattgagagatt

SEQ ID NO: 337387 - DNA, 554 bp, Homo sapiens
gagtcaatctggtagcaggaaggccagttataagagtgttgggtggattaagtcagtgatgagtgtttaagttataatggtggtgaagaaaaggcatcggatttaaggtatatttctagagaaaactgtatgagactcagtgaaaaatttgctataaagaaaaagaaagatggsataattatgaattccatagcttaggaaactagtaagtggagatgtctttaacaagatagaagaaaactgtgagtggacacagtgaaagtatatctcttcctttcactaacagggaaacagtagacaagttagatttaatcactgtttttcagtatgaccacattgtgccattcaggaggcaatgcaaatgtagggttagatcttcggagaaagataaaagctggagacatagatgtgagagagaccatagcccactgaagctgacttcaaccagagaaagagagcctgtcgataaagagaagttaagaggttcaggaacggtaagaatactgttcttggtatgacaaaaggggttttgtttgggaatgaattgagagatt

SEQ ID NO: 337388 - DNA, 554 bp, Homo sapiens
gagtcaatctggtagcaggaaggccagttataagagtgttgggtggattaagtcagtgatgagtgtttaagttataatggtggtgaagaaaaggcatcggatttaaggtatatttctagagaaaactgtatgagactcagtgaaaaatttgctataaagaaaaagaaagatggcataattatgaattccatagcttaggaaactagtaagtggagatgtctttaacaagatagaagaaaactgtgagtggacacagtgaaagtatatctcttcctttcactaacagggaaacagtagacaagttagatttaatcactgtttttcagtatgaccacattgtgccattcaggaggcaatgcaaatgtagggttagawcttcggagaaagataaaagctggagacatagatgtgagagagaccatagcccactgaagctgacttcaaccagagaaagagagcctgtcgataaagagaagttaagaggttcaggaacggtaagaatactgttcttggtatgacaaaaggggttttgtttgggaatgaattgagagatt

SEQ ID NO: 337389 - DNA, 440 bp, Homo sapiens
gaggcaagcagccacagtctgcaggccccacttctgtggcacctcacaggataagtcccactggcctgggattccagccagtcaccagtagcagggctacacctccctgagacaaagctcccatggggagaagtgggctgccatctttgctgtttgggtgacttagccattccagcctttagrccttgtgaagtccacgctggccgagggcaaaagcagtacccagcacatggcagctgcgctatgaaaacatggccagactacttctttaaatcggtccctgatcccattccttttcactaggtgggacctcccaactggggtttcttgccacccctgccagtgttctttggctgacagagatttgaaaactccccgagacagagctcccagagggaggggcaggtcaccatctttgctgcgtgggtgacttagcagtt

SEQ ID NO: 337390 - DNA, 594 bp, Homo sapiens
tgggtctccttatgaaaagagagcagataataatcgcgctaaatatgcattaaattactttgcaaaatgatagtggcattcattataartcctgtgtttgaggagtttaatcagctatttaaattttcatcaggatgcaagtcgacatgtgagttcttggccaaaggcattctatttaccacataaatatttgtcgattaagaaaagcacaggcccctacattttcatagggtttcagaggcacacaagcatttctcaggagcaataaataaaaacatgaaatttttaaaaatcaaacttgaattttgatacattgtttagttggcaactatgtttcctatgaataatatgccacttcatagtgatttaatattaatactcattaggaaatcaagtttaggaaagtggaattggagaacatagaaaatgatagtaaattgtattatagaaaagcagctaataaatgcaaagcaaatgatttgctgactatatcacaaggttttattttagtttcttctatgttaaatcttgtatacaccagagcacttaaaccaaaatgaaaatggagtatttgaggttatactattttatttt

SEQ ID NO: 337391 - DNA, 594 bp, Homo sapiens
tgggtctccttatgaaaagagagcagataataatcgcgctaaatatgcattaaattactttgcaaaatgatagtggcattcattataagtcctgtgtttgaggagtttaatcagctatttaaattttcatcaggatgcaagtcgacatgtgagttcttggccaaaggcattctatttaccacataaatatttgtygattaagaaaagcacaggcccctacattttcatagggtttcagaggcacacaagcatttctcaggagcaataaataaaaacatgaaatttttaaaaatcaaacttgaattttgatacattgtttagttggcaactatgtttcctatgaataatatgccacttcatagtgatttaatattaatactcattaggaaatcaagtttaggaaagtggaattggagaacatagaaaatgatagtaaattgtattatagaaaagcagctaataaatgcaaagcaaatgatttgctgactatatcacaaggttttattttagtttcttctatgttaaatcttgtatacaccagagcacttaaaccaaaatgaaaatggagtatttgaggttatactattttatttt

SEQ ID NO: 337392 - DNA, 610 bp, Homo sapiens
tgtagcccattagttggccatctcaattattgacagcctgatcaagtatctggagagaattaaaaaattaatcagctcaaatcaatgtctggaaaggccatatattaaaatttgtctgctctactattaagagagtcattcagttttgctctgtacctaaccctatgctcacttgaggcataactctaagaaaatgaatcataactgagtagaaaatcaactagaagtggtatggggaaaggagcaacgtgttattgatggacacattgagaggcagtggtctgatatttgaaacactaacacatttttattgtaaagaagacttggaagctmaaaatgggagcatttactcatggcacaaatgcttctgagttattttatcaataaaataacatcaaaaaaataaaatttattgtggttattcacatgtattgactagcgtactgttcatagtactttataaatatattggcatttatactcaccacaacactataatgtggaaactgttagtatctctattttacagataaaggaactgagacatggagaatttaagaactttgttcaaggtctcacagctaagcaaagacttctacccaggcagtgt

SEQ ID NO: 337393 - DNA, 569 bp, Homo sapiens
gagctcaaaaaaatgtgaaatttatggcagtctagcataatgggatttggggaatcagtttaatgtaaaaggtaatactaatataatgtgacatttctacacaccatacttctcaacagggctgaatccatgggcattgcaacctgtgtggctgcacaatgccatagtcagaaaggccttgtgattgatgtaatgctctgttgtcgacatattgaaattcataatagtttttgaacaagaggcccggcattttcactttgtactaggccttgtaaattatttactcactcctgtttgcaagtatgcagagtgaaacctacatgtactacatagagttttgaacatttttaacatctccacactacctgacttgaaacttacctattataaatagccaataagttttagggctgaattaaaatcttacaacaaataattaaaatttttcttttgtktcacaatttaaaacttatcagattaaattttaaaacacaaaacctttcgggcaaagtgggttaaaaaaacccttgtagaattgtatattgtaaagccaagtaataatggagatc

SEQ ID NO: 337394 - DNA, 597 bp, Homo sapiens
tatctagtttgttgtgggaatgttgaatcatttatacaacaggactgttgcaaacctttatgcaatcttaattagatcttttaggaaaacaagatttcatgtatataaaatccaaactatagtaataaagttagctaatttatatcacacttggcacttgaaaagaaaaggttgtgttatgtggctcagtgaggtgaagaaatagtttatgtctatttagttaactacaatggtcagttgaacttgggtaaaccttggttgtcattggctttgaagttgtacttgatttccaggtggtaagtggcatactaatcctgtratattggacacattaattagcctctttgaacctaatttcctgctttgagttattgtgagtgttcaagataatatatgaaaggccctgtccctgtcacaggcactcaacatatggtagctataatcctcatcatcatcatcattgtcatcaatcaggtgttcttttaatgtacttaaattaaatatattttaactatattatacctatattttacagataaaatgaatcacatgttgtaaaaatcaaaatcctacaaaatttaatatacaaaggcgcat

SEQ ID NO: 337395 - DNA, 605 bp, Homo sapiens
acactgaattgaaagaacctataaaacccaaacagaggagtgtcctattcaaagtttggatcaatgawgccaagagaagaaaatgatcagattataaacttcctaaggaaacaaatttcaaaagaaaccctacacatcacgaatcacaagctgctttgtttttttatacatgaacttaatctaccttccctttcatcaagtaaataaaaatgtgtaattctgattcaaaaaaaaaagttagctctggtggccaggcacagtgactcatgcctgtaaccccagaactgtggaaggcagaggcaggagaaatgctcaagcccaggaattcaagaccagcctggacaacacagtgagaccccatctctaccaaaaagaaatacaaaaagctagctaggcatggtggcatgtgcctatagccccagctactcaacaggctgagatggaaggattgcttgaggttgggaagtcaaggctacagtgagccgtgatcatgccactgcactccagtctgggccaacagagcaagacactgtctccaaaaataaaaattaataaataaacaatgttaactctggtaaccaagaagaggaggaactgaagaatgg

SEQ ID NO: 337396 - DNA, 605 bp, Homo sapiens
acactgaattgaaagaacctataaaacccaaacagaggagtgtcctattcaaagtttggatcaatgatgccaagagaagaaaatgatcagattataaacttcctaaggaaacaaatttcaaaagaaaccctacacatcacgaatcacaagctgctttgtttttttatacatgaacttaatctaccttccctttcatcaagtaaataaaaatgtgtaattctgattcaaaaaaaaaagttagctctggtggccaggcacagtgactcatgcctgtaaccccagaactgtggaaggcagaggcaggagaaatgctcaagcccaggaattcaagaccagcctggacaacacagtgagaccccatctctaccaaaaagaaatacaaaaagctagctaggcatggtggcatgtgcctayagccccagctactcaacaggctgagatggaaggattgcttgaggttgggaagtcaaggctacagtgagccgtgatcatgccactgcactccagtctgggccaacagagcaagacactgtctccaaaaataaaaattaataaataaacaatgttaactctggtaaccaagaagaggaggaactgaagaatgg

SEQ ID NO: 337397 - DNA, 556 bp, Homo sapiens
atggggaaacattctgggagataccctagcacattgatctgggcaaagatttcttgagtaagacctcaaaagcacaggcaaccaaagcgaaactgaacaaataggaccacatcaagctaaaaagcttctgcacagcaaaggaaacaatcaacaaagtgaagagaaaacccacagaatgagagaaaatgtttrcagcctagccatttgaaaaaggattaatagccggaatacatatggagctcaactaactcaacagcaaaacaattaatgtaaaattggcaaaagatctgaatacatatttctcaaaagaagacatacaaatgaccaataagtatatgaaaaaatgtttaatgtcactaattatcaaagaaatgcaaaccaaaactacaatgagatattatcccaccccagttaaaagtcttttatccaaaagacaggcaataaaaggtgctggtgaggatgagaagaaagaatccttctgcattgttagcaggaatgtaaattagtacagtcattatgttgaccagtatagaagttcctcaaaaaactaaaaaca

SEQ ID NO: 337398 - DNA, 550 bp, Homo sapiens
ttattaagttatttcattatcagtagatattagggtaagataaagttattatcagkctcctacttctaaaacacagaaagcagatgtttttgttgctagtgggctggttcagttcttgactttactgcacaaaagaatgtgagagagagtccaatgtaaaagttactgtaaagcaaaagtatactctgacagcggatcagagcgagctgctcaaaggtgagatagcactgactgatactggggaaattccctttatgggagtattacatgattattcatgaaagggtgggaaggggtgttgatattaagcatattacaagtggtttcttcagcctgcatgcacagcagctctacatgctggtatatacatcacatgcctcattagcatcttaaatttccacccagggtttactattgtaatgagcataggtcagcccaaagacattgagcatgggtttctgcacttgtgtgagtttggggattttctcttctgctcttcttcctccttgctgcaggatgttctaaccacaagcccaggatgcaatttgtg

SEQ ID NO: 337399 - DNA, 563 bp, Homo sapiens
attcaaattaagacaatttcaaagaaattggctttcaattcacagcttgggtggatgcaactcttcctcccacagccagctgtgcacagagaaaaacctagtccctgtattgggtagcacctggtctgcctagaaagtttgaggaacagttctatttctggccatctcagaagtacccaagcactcctccacaacatgcaattgaatcagtactttccttggactgccagtcttttgtttattcctattatgtattataaggcctttatagacaaaattctcattaacacccctttttgtcttcccaaaagagttaactaaaacatgactcctcttcctcaagctgtggaaaccrcattcagggagaaaaacaaaaagatacccttgtctaaaaatcctgtgttttttgttctacaaaccatggaacttcactcttatagaattgcttatgaaagcttctttcagtatagtattagggtataagtgataaatgaaatgaacgttataattcataacaagatagttcgtagatgttttgcctttgctaaaagtcagaactctgt

SEQ ID NO: 337400 - DNA, 590 bp, Homo sapiens
cttcaatttaaggtctaaaaatatgaactaatcaatgaacacataaagaaaatatttcagtgcattagtccatgcaaagattttatgggtaggatttcaaaagcacgagcargaaaagcaaaaatagggcattcaaataggaaaagagaaagtaaaaaatttctgcatagccgtaaaaacaatcaacagagtgaagagacaacatataaaatgagagaaaatatttgcagactattcattttgcaaaggactaatatccagaatatataaacagtcaacagcaaaaataataatctgattttaaaatgagtaaagcatctgaatagacatttctcaagagatataaaaatggctaacatgtatataaaaaatgctcaacatcactaattgtcagagaaatgcaaatcaaaaccacaatgaaatattatctcactccagttagaatgactgttatcaaaaagacaaataataataatattttttattttctggtgatgttcttcaaaacactgaatatagaactaccatatgatccagcaatcccactagcaggtatttatccaaaagaaagaaaatcagtacattgaaaa

SEQ ID NO: 337401 - DNA, 655 bp, Homo sapiens
atttcaaaagcacgagcaagaaaagcaaaaatagggcattcaaataggaaaagagaaagtaaaaaatttctgcatagccgtaaaaacaatcaacagagtgaagagacaacatataaaatgagagaaaatatttgcagactattcattttgcaaaggactaatatccagaatatataaacagtcaacagcaaaaataataatctgattttaaaatgagtaaagcatctgaatagacatttctcaagagatataaaaatggctaacatgtatataaaaaatgctcaacatcactaattgtcagagaaatgcaaatcaaaaccacaatgaartattatctcactccagttagaatgactgttatcaaaaagacaaataataataatattttttattttctggtgatgttcttcaaaacactgaatatagaactaccatatgatccagcaatcccactagcaggtatttatccaaaagaaagaaaatcagtacattgaaaaaatatcttcatcccccccatgtttattgcagcactgttcacaatagtcaagatagctaatccacctaagtgtccatcaacagatgaatggataaagaaatgtggtatccatacacatggaatactattcagccacaaaacagaatgaaatcttatcat

SEQ ID NO: 337402 - DNA, 655 bp, Homo sapiens
atttcaaaagcacgagcaagaaaagcaaaaatagggcattcaaataggaaaagagaaagtaaaaaatttctgcatagccgtaaaaacaatcaacagagtgaagagacaacatataaaatgagagaaaatatttgcagactattcattttgcaaaggactaatatccagaatatataaacagtcaacagcaaaaataataatctgattttaaaatgagtaaagcatctgaatagacatttctcaagagatataaaaatggctaacatgtatataaaaaatgctcaacatcactaattgtcagagaaatgcaaatcaaaaccacaatgaaatattatctcactccagttagaatgactgttatcaaaaagacaaataataataatattttttattttctggtgatgttcttcaaaacactgaatatagaactaccatatgatccagcaatcccactagcaggtatttatccaaaagaaagaaaatcagtacattgaaaaaatatcttcatcccccccatgtttattgcagcactgttcacaatagtcaagatagctaatccacctaagtgtccatcaacagatgaatggataaagaaatgtggtatcyatacacatggaatactattcagccacaaaacagaatgaaatcttatcat

SEQ ID NO: 337403 - DNA, 655 bp, Homo sapiens
atttcaaaagcacgagcaagaaaagcaaaaatagggcattcaaataggaaaagagaaagtaaaaaatttctgcatagccgtaaaaacaatcaacagagtgaagagacaacatataaaatgagagaaaatatttgcagactattcattttgcaaaggactaatatccagaatatataaacagtcaacagcaaaaataataatctgattttaaaatgagtaaagcatctgaatagacatttctcaagagatataaaaatggctaacatgtatataaaaaatgctcaacatcactaattgtcagagaaatgcaaatcaaaaccacaatgaaatattatctcactccagttagaatgactgttatcaaaaagacaaataataataatattttttattttctggtgatgttcttcaaaacactgaatatagaactaccatatgatccagcaatcccactagcaggtatttatccaaaagaaagaaaatcagtacattgaaaaaatatcttcatcccccccatgtttattgcagcactgttcacaatagtcaagatagctaatccacctaagtgtccatcaacagatgaatggataaagaaatgtggtatccatacacrtggaatactattcagccacaaaacagaatgaaatcttatcat

SEQ ID NO: 337404 - DNA, 589 bp, Homo sapiens
tggttaaatataaagtggcatgaaaatcaaagttaaataaataataattaaaggggcgtagcaaaaacagcccatatcaatakggctttgtggagaggggacacagcagtaattgagacatgcatttgagaactgctgctgcatccaacacctctgaaggagtaaatatctatgttctaatcagatttgatcttaataggaaatgccatacacaaaatacccacgtgtgagaaagtctaaggtcatggctctgaaattaattctacagtaaatccacacatcaaactccatgaacttcaactggagttaggaaagacaatttcagaacctggctgtgggtggataatttatgatgtggtgtgaaacaagggactttctatacctgagcaacacaaaggggtgaatttactgtcgtcaattacttttatacaacagcagggtcagcctctgcccccaattactcatgtgcacaaacagaactggtagcaagaaaatcaacagatcctcataggttgtaaaagaaacctggaaatgaattgagcagataacattggtctctccatcctctggccctaggcaccacgaaagt

SEQ ID NO: 337405 - DNA, 589 bp, Homo sapiens
tggttaaatataaagtggcatgaaaatcaaagttaaataaataataattaaaggggcgtagcaaaaacagcccatatcaatatggctttgtggagaggggacacagcagtaattgagacatgcatttgagaactgctgctgcatccaacacctctgaaggagtaaatatctatgttctaatcagatttgatcttaataggaaatgccatacacaaaatacccacgtgtgagaaagtctaaggtcatggctctgaaattaattctacagtaaatccacacatcaaactccatgaacttcaactggagttaggaaagacaatttcagaacctggctgtgggtggataatttatgatgtggtgtgaaacaagggactttctatacctgagcaacacaaaggggtgaatttactgtcgtcaattacttttatacaacagcagggtcagcctctgcccccaattactcatgtgcasaaacagaactggtagcaagaaaatcaacagatcctcataggttgtaaaagaaacctggaaatgaattgagcagataacattggtctctccatcctctggccctaggcaccacgaaagt

SEQ ID NO: 337406 - DNA, 589 bp, Homo sapiens
tggttaaatataaagtggcatgaaaatcaaagttaaataaataataattaaaggggcgtagcaaaaacagcccatatcaatatggctttgtggagaggggacacagcagtaattgagacatgcatttgagaactgctgctgcatccaacacctctgaaggagtaaatatctatgttctaatcagatttgatcttaataggaaatgccatacacaaaatacccacgtgtgagaaagtctaaggtcatggctctgaaattaattctacagtaaatccacacatcaaactccatgaacttcaactggagttaggaaagacaatttcagaacctggctgtgggtggataatttatgatgtggtgtgaaacaagggactttctatacctgagcaacacaaaggggtgaatttactgtcgtcaattacttttatacaacagcagggtcagcctctgcccccaattactcatgtgcacaaacagaactggtagcaagaaaatcaacagatcctcakaggttgtaaaagaaacctggaaatgaattgagcagataacattggtctctccatcctctggccctaggcaccacgaaagt

SEQ ID NO: 337407 - DNA, 589 bp, Homo sapiens
tggttaaatataaagtggcatgaaaatcaaagttaaataaataataattaaaggggcgtagcaaaaacagcccatatcaatatggctttgtggagaggggacacagcagtaattgagacatgcatttgagaactgctgctgcatccaacacctctgaaggagtaaatatctatgttctaatcagatttgatcttaataggaaatgccatacacaaaatacccacgtgtgagaaagtctaaggtcatggctctgaaattaattctacagtaaatccacacatcaaactccatgaacttcaactggagttaggaaagacaatttcagaacctggctgtgggtggataatttatgatgtggtgtgaaacaagggactttctatacctgagcaacacaaaggggtgaatttactgtcgtcaattacttttatacaacagcagggtcagcctctgcccccaattactcatgtgcacaaacagaactggtagcaagaaaatcaacagatcctcataggttgtaaaagaaacctggaaatgaattgagcagataacrttggtctctccatcctctggccctaggcaccacgaaagt

SEQ ID NO: 337408 - DNA, 557 bp, Homo sapiens
aatatttttgtgatattttaactaaaaattatgaatggacataaaaatataggataaacgtcatctttgtgagtaaacttgttatattttgcatagtagtcatgggataataagtctttatcaacaaatatttgtttccaacttattttctgccaggccctgggaatagagtaataaataagaaaaacatggccccactcttaagtgtttatattccagtgaagcaggtagtgatacatgctaagaagataatgaaacragataacacgatgagctgtagcaagtaggattggatggccagggaagccattggggagaaagtaaccatggaacaaagacctgaaagataagaataactcaactacatgaagatttactgtgagatcactctcaacagagggaacaggaaatctagcatagagaacacatgaatgcaaaggctatgaggctggaagaagcatagcatattcagagaaaaggagtaagagccaatgtaactagaccattgtgagagagggtgagattggtaagaaatgaagttagagaggccaagcaca

SEQ ID NO: 337409 - DNA, 557 bp, Homo sapiens
aatatttttgtgatattttaactaaaaattatgaatggacataaaaatataggataaacgtcatctttgtgagtaaacttgttatattttgcatagtagtcatgggataataagtctttatcaacaaatatttgtttccaacttattttctgccaggccctgggaatagagtaataaataagaaaaacatggccccactcttaagtgtttatattccagtgaagcaggtagtgatacatgctaagaagataatgaaacgagataacacgatgagctgtagcaagtaggattggatggccagggaagccattggggagaaagtaaccatggaacaaagacctgaaagataagaataactcarctacatgaagatttactgtgagatcactctcaacagagggaacaggaaatctagcatagagaacacatgaatgcaaaggctatgaggctggaagaagcatagcatattcagagaaaaggagtaagagccaatgtaactagaccattgtgagagagggtgagattggtaagaaatgaagttagagaggccaagcaca

SEQ ID NO: 337410 - DNA, 543 bp, Homo sapiens
tatttaattctcaaataactctatgagacagggtaccatttttatttctgttttacaggtaaagaaatggatagtctcagggactactaagttgaaggacttttggtaagtatgaggcagcacasagagagtccagaatgttttatttaaagcataagcccaatgctatgatgtctactgggatacacaatgcagtcctgtttggtccttcgctttctggaagttatgccactaaagtatgaatttaactacctcatagttttgttttcactcattttcacccaaaattttgctcatgtcacagaggatttgaaatctgtaataagcttgatttcaattttccctttcccttctgggtcattatgaccttgatggcctgtcatgggttcacagatcttttctataagtctctaagtccttgaaacatgtacatttcctttactctttgtttattttgcttacttcttgggaatatgcttttctcacccagtattcatcctctattctctatcactgactactgctttcctggcctccatagca

SEQ ID NO: 337411 - DNA, 543 bp, Homo sapiens
tatttaattctcaaataactctatgagacagggtaccatttttatttctgttttacaggtaaagaaatggatagtctcagggactactaagttgaaggacttttggtaagtatgaggcagcacacagagagtccagaatgttttatttaaagcataagcccaatgctatgatgtctactgggatacacaatgcagtcctgtttggtccttcgctttctggaagttatgccactaaagtatgaatttaactacctcatagttttgttttcactcattttcacccaaaattttgctcatgtcacagaggatttgaaatctgtaataagcttgatttcaattttccctttcccttctgggtcattatgaccttgatggcctgtcatggkttcacagatcttttctataagtctctaagtccttgaaacatgtacatttcctttactctttgtttattttgcttacttcttgggaatatgcttttctcacccagtattcatcctctattctctatcactgactactgctttcctggcctccatagca

SEQ ID NO: 337412 - DNA, 237 bp, Homo sapiens
agaatatttcaaagagtaagaaatgtctctcaggtaacctcggcatctaattttctgctttggctcccgtgcttggcatatacacagacattcacactactagagtctaaatgagacaaatatgtttgttgttatagatctggagccsaaacagtttcttcttttcactgtgtccacaaaaacataatgacaagcaaaagaatgactggcacacaaattttctaaccagagatagca

SEQ ID NO: 337413 - DNA, 629 bp, Homo sapiens
ttgctcttgctaatagtactgccttgagtatacttgtatctgtgtcctttgcacatatgcaagtgtttctctagaatatatgcatagaagcagaattgttggtttatgaatgtttgcattttcaactttaatagatactgccacattgatcccagaaactgtgacttaggatggagacatcttaataaaatgtgaatgtaatagacaaaacaagaacttatttctgtcatcactgayagtcagagctaactagattaccagtcagtgagaaatacataaatattaggaattggcaattcacctgctgcttaccaataatcaagtaaacctaatttataaagatactggtgttaagcttctgtgaatttttttctagtatacaaagttgatccctctttagcagatattagtcttgatgaaaatctcaagtaagcaaaaactaaagtttctttttttctttatattgcctactattttattgatatctccattcttcttttatcttcttccctctccttcctccagatccccagggatatgcaaagtttccagggacaaatgtagcaccagggctttccagagttctctacagtcagtgctgcaggcgcatcactgaaattctgctgtcc

SEQ ID NO: 337414 - DNA, 629 bp, Homo sapiens
ttgctcttgctaatagtactgccttgagtatacttgtatctgtgtcctttgcacatatgcaagtgtttctctagaatatatgcatagaagcagaattgttggtttatgaatgtttgcattttcaactttaatagatactgccacattgatcccagaaactgtgacttaggatggagacatcttaataaaatgtgaatgtaatagacaaaacaagaacttatttctgtcatcactgatagtcagagctaactagattaccagtcagtgagaaatacataaatattaggaattggcaattcacctgctgcttaccaataatcaagtaaacctaatttataaagatactggtgttaagcttctgtgaatttttttctagtatacaaagttgatccctctttagcagatattagtcttgatgaaaatmtcaagtaagcaaaaactaaagtttctttttttctttatattgcctactattttattgatatctccattcttcttttatcttcttccctctccttcctccagatccccagggatatgcaaagtttccagggacaaatgtagcaccagggctttccagagttctctacagtcagtgctgcaggcgcatcactgaaattctgctgtcc

SEQ ID NO: 337415 - DNA, 629 bp, Homo sapiens
ttgctcttgctaatagtactgccttgagtatacttgtatctgtgtcctttgcacatatgcaagtgtttctctagaatatatgcatagaagcagaattgttggtttatgaatgtttgcattttcaactttaatagatactgccacattgatcccagaaactgtgacttaggatggagacatcttaataaaatgtgaatgtaatagacaaaacaagaacttatttctgtcatcactgatagtcagagctaactagattaccagtcagtgagaaatacataaatattaggaattggcaattcacctgctgcttaccaataatcaagtaaacctaatttataaagatactggtgttaagcttctgtgaatttttttctagtatacaaagttgatccctctttagcagatattagtcttgatgaaaatctcaagtaagcaaaaactaaagtttctttttttctttatattgcctactattttattgatatctccattcttcttttatcttcttccctctccttcctccagatccccagggatatgcaaagtttccagggacawatgtagcaccagggctttccagagttctctacagtcagtgctgcaggcgcatcactgaaattctgctgtcc

SEQ ID NO: 337416 - DNA, 518 bp, Homo sapiens
aaccaaatgctgcaagtgatagtcatatattgtcacagctgaatataggtaataattatttcagcctcctatattttttcaaatcaggaagctgaatagagccactaatagagaatgctttaccatcctaccttagaatcaaggtctataaacccacaaattttcttatgtggctaattcatcttaactcaractttaaatgccagaaggtctaagtgggcctttttgtggtaatttagagcttgaaataaaatttaacatcagtgttagtttagagtgatgttgtgttagaacttaataaacattaccaactgtagccatttcataataattaagttacgaggaacatttattaaaatatttaaaggaaagatccctaaaatagaactaaaacattaagttagcaatataggttgtaatatattttccatgctgcttcctataaatttatcttcctcacacctactatttaacctttttaaggccccctatgcttacttattttatgtaaactttag

SEQ ID NO: 337417 - DNA, 486 bp, Homo sapiens
ttttcaaatcaggaagctgaatagagccactaatagagaatgctttaccatcctaccttagaatcaaggtctataaacccacaaattttcttatgtggctaattcatcttaactcagactttaaatgccagaaggtctaagtgggcctttttgtggtaatttagagcttgaaataaaatttaacatcagtgttagtttagagtgatgttgtgttagaacttaataaacattaccaactgtagccatttcataataattaagttacgaggaacatttattaaaatatttaaaggaaagatccctaaaatagaactaaaacattaagttagcaatataggttgtaatatattttccatgctgcttcctataaatttatcttcctcacacctactatttaacctttttaaggccccctakgcttacttattttatgtaaactttagcataataatgcaatattcacaaaatctttaaaaagaacaggcc

SEQ ID NO: 337418 - DNA, 566 bp, Homo sapiens
catttttcatctgctcataccctgtcagtggtattattatattgcctatggaactcaaattacaaagcaatctttctttgcttatgttataccatgccaagtaggcccaataattcagaaatataaaaccactaccactgcccattttcaatagaaagcaaataattggctaggtttttatttgaatagtagccttgctttccacagatcagaggaaagataaagtggaacaagttaagaaggaaaaaaggaaaaagaaaaagattgcctcagaggtgactgaagttagcaagrgcatccaagagtcaggatcatagcaccactttgtcatttgttttctcaaagtgtaaccaaaggttgtttccagctcttgatttaggatctaagcaatcctggcagtactatctccttcatcaagtattctgtattcattccctagcaaagctggttatcgattaatttttttctgattaaatttacaagaataatacaaaagcaattgccccgtgaattttgcctctgataccccagccgaccaaatgtaaaagtggcatatggcataaaag

SEQ ID NO: 337419 - DNA, 562 bp, Homo sapiens
tttttaatctcactcaatttgacagtagagatacaattggaatagaatattaagaaatcactyttattacaaaaattattttttatgggaggtagatttatatgttctacgacaagagcatatatgctttaagtatgagctatcagcataagatgtctgtggttgttatttttgctaatccccaactattacctattctccctatttctagacacaggatgtgattgatctttgcgactatgtgacttgctttggctaataaaatttgagtgcaagtgacatatgccatgtgcacgtgaaagacttcaaagccagtatatgatttactacatttccttcccactgatgaagtgaccctgaaagcacatgtatagaaggagccaccatcaacctgggtctctaaataactacaatgagtagatgttttgctgccaagtcacttcagacatatagactaagtgagaaacttttattaagcactgagatttgagaaggttttttttagtgattattaacccatcctcacaaagtcaaacacaaatttcaggaatacaatcatctt

SEQ ID NO: 337420 - DNA, 562 bp, Homo sapiens
tttttaatctcactcaatttgacagtagagatacaattggaatagaatattaagaaatcactcttattacaaaaattattttttatgggaggtagatttatatgttctacgacaagagcatatatgctttaagtatgagctatcagcataagatgtctgtggttgttatttttgctaatccccaactattacctattctccctatttcyagacacaggatgtgattgatctttgcgactatgtgacttgctttggctaataaaatttgagtgcaagtgacatatgccatgtgcacgtgaaagacttcaaagccagtatatgatttactacatttccttcccactgatgaagtgaccctgaaagcacatgtatagaaggagccaccatcaacctgggtctctaaataactacaatgagtagatgttttgctgccaagtcacttcagacatatagactaagtgagaaacttttattaagcactgagatttgagaaggttttttttagtgattattaacccatcctcacaaagtcaaacacaaatttcaggaatacaatcatctt

SEQ ID NO: 337421 - DNA, 562 bp, Homo sapiens
tttttaatctcactcaatttgacagtagagatacaattggaatagaatattaagaaatcactcttattacaaaaattattttttatgggaggtagatttatatgttctacgacaagagcatatatgctttaagtatgagctatcagcataagatgtctgtggttgttatttttgctaatccccaactattacctattctccctatttctagacacaggatgtgattgatctttgcgactatgtgacttgctttggctaataaaatttgagtgcaagtgacatatgccatgtscacgtgaaagacttcaaagccagtatatgatttactacatttccttcccactgatgaagtgaccctgaaagcacatgtatagaaggagccaccatcaacctgggtctctaaataactacaatgagtagatgttttgctgccaagtcacttcagacatatagactaagtgagaaacttttattaagcactgagatttgagaaggttttttttagtgattattaacccatcctcacaaagtcaaacacaaatttcaggaatacaatcatctt

SEQ ID NO: 337422 - DNA, 574 bp, Homo sapiens
ggcagcttctacatggtgttgggtctgtggctgtgcacaaaaaaagaactgaggtttgggaacctccacctagattttagaagatgtccaggaacacctggatgtccaggcagaagtttgctgcagaggtagagcccacgtggagaacttctgctagggcagtacasaaagaaaatgtgggtttggagcccccacacagagtccccagtgggacactgcctcttagtgctgtgagaagagagttactatacttcagaccccacaaaggtagatccactgacaggttgtaccatgtgcctggaaaagctgaaggcactcaatgccagcctgtgaaagcagtggcaggcactgtaccctgcataaccacagaggcaagcaactcaagaccttgtgaacccaccccttgcattagtgtgccctggatgtgagacatggagtcgaaggaaattttaaagatttaatgactgcccagctgggttcccaacttgcatggggcctgtgtctcctttgttttggccaatttctcccgtctgaaacaggaacatttacccagtgcctgtatgtacccccatta

SEQ ID NO: 337423 - DNA, 574 bp, Homo sapiens
ggcagcttctacatggtgttgggtctgtggctgtgcacaaaaaaagaactgaggtttgggaacctccacctagattttagaagatgtccaggaacacctggatgtccaggcagaagtttgctgcagaggtagagcccacgtggagaacttctgctagggcagtacacaargaaaatgtgggtttggagcccccacacagagtccccagtgggacactgcctcttagtgctgtgagaagagagttactatacttcagaccccacaaaggtagatccactgacaggttgtaccatgtgcctggaaaagctgaaggcactcaatgccagcctgtgaaagcagtggcaggcactgtaccctgcataaccacagaggcaagcaactcaagaccttgtgaacccaccccttgcattagtgtgccctggatgtgagacatggagtcgaaggaaattttaaagatttaatgactgcccagctgggttcccaacttgcatggggcctgtgtctcctttgttttggccaatttctcccgtctgaaacaggaacatttacccagtgcctgtatgtacccccatta

SEQ ID NO: 337424 - DNA, 574 bp, Homo sapiens
ggcagcttctacatggtgttgggtctgtggctgtgcacaaaaaaagaactgaggtttgggaacctccacctagattttagaagatgtccaggaacacctggatgtccaggcagaagtttgctgcagaggtagagcccacgtggagaacttctgctagggcagtacacaaagaaaatgtgggtttggagcccccacacagagtccccagtgggacactgcctcktagtgctgtgagaagagagttactatacttcagaccccacaaaggtagatccactgacaggttgtaccatgtgcctggaaaagctgaaggcactcaatgccagcctgtgaaagcagtggcaggcactgtaccctgcataaccacagaggcaagcaactcaagaccttgtgaacccaccccttgcattagtgtgccctggatgtgagacatggagtcgaaggaaattttaaagatttaatgactgcccagctgggttcccaacttgcatggggcctgtgtctcctttgttttggccaatttctcccgtctgaaacaggaacatttacccagtgcctgtatgtacccccatta

SEQ ID NO: 337425 - DNA, 574 bp, Homo sapiens
ggcagcttctacatggtgttgggtctgtggctgtgcacaaaaaaagaactgaggtttgggaacctccacctagattttagaagatgtccaggaacacctggatgtccaggcagaagtttgctgcagaggtagagcccacgtggagaacttctgctagggcagtacacaaagaaaatgtgggtttggagcccccacacagagtccccagtgggacactgcctcttagtgctgtgagaagagagttactatacttcagaccccasaaaggtagatccactgacaggttgtaccatgtgcctggaaaagctgaaggcactcaatgccagcctgtgaaagcagtggcaggcactgtaccctgcataaccacagaggcaagcaactcaagaccttgtgaacccaccccttgcattagtgtgccctggatgtgagacatggagtcgaaggaaattttaaagatttaatgactgcccagctgggttcccaacttgcatggggcctgtgtctcctttgttttggccaatttctcccgtctgaaacaggaacatttacccagtgcctgtatgtacccccatta

SEQ ID NO: 337426 - DNA, 505 bp, Homo sapiens
tgggagaaactgcccccataatccaatcaccttccagtatgtccctcccatgacaagtagggattacaatttgagatgagatttgggcaggacacagagccacaccatattattccaccctggcccctcccaaatctcatgacctgttcacatttcaaaaccaattatgccttcccaacagtcccccaaagccataactaattccagcattaacccaaaagtccaagtccagagtctcatmtgagacaaggcaagtctctttcacctatgagcctgtaaaaacaaaagcaagttagttacttccaagatataatggggggtacatacacgcactgggtaaatgttcctgtttcagacgggagaaattggccaaaacaaaggagacacacgccccatgcaagttgggaacccacctgggcagtcattaaatctttaaaatttccttcgactccatgtgtcacatccagggggcactaatgcaaagggtgggttcacaaagtcttga

SEQ ID NO: 337427 - DNA, 505 bp, Homo sapiens
tgggagaaactgcccccataatccaatcaccttccagtatgtccctcccatgacaagtagggattacaatttgagatgagatttgggcaggacacagagccacaccatattattccaccctggcccctcccaaatctcatgacctgttcacatttcaaaaccaattatgccttcccaacagtcccccaaagccataactaattccagcattaacccaaaagtccaagtccagagtctcatatgagacaaggcaagtctctttcacctatgagcctgtaaaaacaaaagcaagttagttacttccaagatataatggggggtacatacacgcactgggtaaatgttcctgtttcagacgggagaaattggccaaaacaaaggagacacasgccccatgcaagttgggaacccacctgggcagtcattaaatctttaaaatttccttcgactccatgtgtcacatccagggggcactaatgcaaagggtgggttcacaaagtcttga

SEQ ID NO: 337428 - DNA, 505 bp, Homo sapiens
tgggagaaactgcccccataatccaatcaccttccagtatgtccctcccatgacaagtagggattacaatttgagatgagatttgggcaggacacagagccacaccatattattccaccctggcccctcccaaatctcatgacctgttcacatttcaaaaccaattatgccttcccaacagtcccccaaagccataactaattccagcattaacccaaaagtccaagtccagagtctcatatgagacaaggcaagtctctttcacctatgagcctgtaaaaacaaaagcaagttagttacttccaagatataatggggggtacatacacgcactgggtaaatgttcctgtttcagacgggagaaattggccaaaacaaaggagacacacgccccatgcaagttgggaacccasctgggcagtcattaaatctttaaaatttccttcgactccatgtgtcacatccagggggcactaatgcaaagggtgggttcacaaagtcttga

SEQ ID NO: 337429 - DNA, 505 bp, Homo sapiens
tgggagaaactgcccccataatccaatcaccttccagtatgtccctcccatgacaagtagggattacaatttgagatgagatttgggcaggacacagagccacaccatattattccaccctggcccctcccaaatctcatgacctgttcacatttcaaaaccaattatgccttcccaacagtcccccaaagccataactaattccagcattaacccaaaagtccaagtccagagtctcatatgagacaaggcaagtctctttcacctatgagcctgtaaaaacaaaagcaagttagttacttccaagatataatggggggtacatacacgcactgggtaaatgttcctgtttcagacgggagaaattggccaaaacaaaggagacacacgccccatgcaagttgggaacccacctgggcagtcattaaatctttaaaatttccttcgactccatgtstcacatccagggggcactaatgcaaagggtgggttcacaaagtcttga

SEQ ID NO: 337430 - DNA, 448 bp, Homo sapiens
atagaaaagaaaggatttataaagattgggctaatcaattatcaaatgctactcgttgtaatttataatgcttaataattctttaagagggataatttgcccaagttccagcatcaacactgaggataatacacagatcacatgataamaaactggctttaggatcacgtgcagtggactttttatttaagaaaatagaagtgaaaattttactatgaacatttcctaagcaaagatttttcttttaaacaagtatcacaaatatttgtgggattagaaaataatcccccccacacacacacaaacacacacatagcaaacttatataattggaaaagtatatttatctcttcctaatacttcaatgttagaaaaatattttactttaacatttatttaaaagcaatactatattctgttaaagtggtaaactgataatttcaataat

SEQ ID NO: 337431 - DNA, 448 bp, Homo sapiens
atagaaaagaaaggatttataaagattgggctaatcaattatcaaatgctactcgttgtaatttataatgcttaataattctttaagagggataatttgcccaagttccagcatcaacactgaggataatacacagatcacatgataacaaactggctttaggatcacgtgcagtggactttttatttaagaaaatagaagtgaaaattttactatgaacatttcctaagcaaagatttttcttttaaacaagtatcacaaatatttgtgggattagaaaataatcccccccacacacacacaaacacacacatagcaaacttatataattggaaaagtatatttatctcttcctaatacttcaatgytagaaaaatattttactttaacatttatttaaaagcaatactatattctgttaaagtggtaaactgataatttcaataat

SEQ ID NO: 337432 - DNA, 486 bp, Homo sapiens
gataaaatacacgtgacataaatttaccatcttaacgatttttaagtgtacagttcaccagggttaagtgtattcactttgttttacaaccaatctccagacctttttcatcttgaaaaactaaaactctttaccacatcaaacaaaaactccccatttcctcctcccctcagcccttgacaactgccattctacttcctgtttttatgtgtttgactacattagatacttcatataagtggaatcatatagtatttgattttgagggtgtggcttatttcacttggcataatgtcctcaaaccatggttcatccatgttttaacatgtatcagaattctctttctttttaaggctgaatacttcattgtatatatatacctcattttgtttatccattcattygttgacagacactcggtttgcatatacttttagctattgtgaataatactattatgaatatggatgtgttcatatgaaattt

SEQ ID NO: 337433 - DNA, 486 bp, Homo sapiens
gataaaatacacgtgacataaatttaccatcttaacgatttttaagtgtacagttcaccagggttaagtgtattcactttgttttacaaccaatctccagacctttttcatcttgaaaaactaaaactctttaccacatcaaacaaaaactccccatttcctcctcccctcagcccttgacaactgccattctacttcctgtttttatgtgtttgactacattagatacttcatataagtggaatcatatagtatttgattttgagggtgtggcttatttcacttggcataatgtcctcaaaccatggttcatccatgttttaacatgtatcagaattctctttctttttaaggctgaatacttcattgtatatatatacctcattttgtttatccattcatttgttgacagacactcggtttgcatatacttttagctattgtgaataatactatyatgaatatggatgtgttcatatgaaattt

SEQ ID NO: 337434 - DNA, 531 bp, Homo sapiens
aattttattcagaaaacttgtaattataaattatttatctgctctttgaagacgtaattttttttccaacctcttgccagttttacatttcaggaatatctttctcaaggacctgggaaccatctctctgaaatgtaatcatccaataaaaaagtgttcctatctcccagtttctgggggagggtagaagtaggtaggataccttgctccaaattgtgaagctactttctgttataaagacaggagaaggtttactttttctctgggaaaaaccaattcgyaaacactgatggcctataatctccctgaccttctccagcacttaaaacatttccagcactttgtcttgaaggaaccaggtatccagatgtgttctgtgacctctgctctatgctggcactagtatcagaataaaaacaactgttgtctgtctgctcatcttgtccggtacattttttttttctttaatagctagtaataacaacaagaaaaatcccacaaagaaaagtacaggaccagatagcttcaatg

SEQ ID NO: 337435 - DNA, 622 bp, Homo sapiens
gacagtctggcttcagtaatactttaatttgcaagactaaccaagctgaaccatcactgaaatgtatgtggacttwaatcaaaggaattgtgtaagaaataaacactattaagcctactgcaatatcattcctatcttactggataggaatatcagttaccctggatagctgaggccttcaaaatagcaaaattttgattttggccttttcttttttttaagctctttgtttttttcattttattcagagcatcctttttataatttgtcttttagtttatttactcgtatactcatttcttcagtgaattttgctgaacatagcaatgcatcagactttgggtatattgcttttggagatacaaagatgaaaaacaaattgcctttctttagatgttattattcctacaaaagaggaaatgaggcaacttatgattaattatatagttatcattcatgtttatacaaatgtgtatgtgtgtagtgaatgtagttacacaattttaaacttggtttattttttaaatttcataattcaaggggggatttacaagaattaacgttttaactcctcaaaatgcatcctatgaggcataaactattagtcatattctacagcaga

SEQ ID NO: 337436 - DNA, 459 bp, Homo sapiens
tgtgaacatcaagaaaaaagaaagaacactgtgagcaaaaatacgggtacataaaagtaggctttccttatactgagttttctaagttgtttgatggttgaagcaaaaaaaatctaacactgttgtgtgcagagtaaatcttgaagataattatattacaaacaggggaggctaaagaaacataaagggatgtaaagtttctatgcttcgctttactgggtaaatggtgatgcttgtagactgataagtaatgaatatatactgcagtacctaaagcaactgctaaaaaagttagacagagaatatacctgamgacactatagatatatgaaagacattttgtagatgtggatagattattctaaaacttatgcaaaatggcaaagaaaataaaataactaaaataactttgaaaatcaaggctgtgtgttattgacagagtggcaaactcattaaata

SEQ ID NO: 337437 - DNA, 638 bp, Homo sapiens
tgtattgctaattgcaaggcatgaggaagtggtcatgttttgtacacttagttgggtcctttttaagtgttttcaaatttagcatgatggtttgcacaggcgctgaagtgagatcaccaggggtagaatcaccttcctgctacgtatgtggctaggtgttccsgaacaagtactaaacttctttgtgcctcattttcttcatctgcaaatggggatcatcataataatgccttccacggggagggctataaaaacatgaaatataaagtgcttggcacagtatctagaacacaattagcaatcagtgatttagctagtagggcgattagtaaattgatacagtctgaagtcttaataaatctgcacaaagtctttaaaacagtccataaatagtccctaaattaacttttgcaaaataaagaatttttaaaatgtattgctcattttattaacaaaaatattaacttttaaaaattaatttgaattcatatgaggataaagatgaggtaatctagatgcatgtaagaatgcagtaaactttgaaatagttttctaacttcggggcccaatcagaaatcatcctgccttggacagggatggaaaatgatgagttgcaattaaacaatgcacatctttta

SEQ ID NO: 337438 - DNA, 638 bp, Homo sapiens
tgtattgctaattgcaaggcatgaggaagtggtcatgttttgtacacttagttgggtcctttttaagtgttttcaaatttagcatgatggtttgcacaggcgctgaagtgagatcaccaggggtagaatcaccttcctgctacgtatgtggctaggtgttcccgaacaagtactaaacttctttgtgcctcattttcttcatctgcaaatggggatcatcataataatgccttccacggggagggctataaaaacatgaaatataaagtgcttggcacagtatctagaacacaattagcaatcagtgatttagctagtagggcgattagtaaattgatacagtctgaagtcttaataaatctgcacaaagtctttaaaacagtccataaatagtccctaaattaacttttgcaaaataaagaatttttaaaatgtattgctcattttattaacaaaaatattaacttttaaaaattaatttgaattcatatgaggataaagatgaggtaatctagatgcatgtaagaatgcagtaaactttgaaatagttttctaacttcrgggcccaatcagaaatcatcctgccttggacagggatggaaaatgatgagttgcaattaaacaatgcacatctttta

SEQ ID NO: 337439 - DNA, 606 bp, Homo sapiens
gtttcttttccccaaaaagagaagaaaccaaaagcaattcattgcaacaccctttctactctgtaaacagactctctactcttgtgaaatttaaaaaacagtaataattactactgacatctaaattcagcmaagtataatagtactttagataatttacagatggctccaccatagcctcttactacagtctatcaaaatctccctgtatatactgacttccaattgtatcactttatcttttatattttattttgattaaaaagtgataggtgatttgtgtgtctgcatatatgtacaaaaaagcactgcatctcttcattgcactgacaatagaaagagagaaggggtaactggaagaaagggcttggaaagagacctcttttccattctccctgagccattatctatgccttttcctttatcatctttttgtactataagggagatatttggtggaaacacatttgcataatataagtctttatcagacagcccggcttatgggttatggacccagggaagtcttccttctatatcttgaaaggtactctacaaggacactatgttaataaacttaaaatgagagaaaaatcaaaactaaaa

SEQ ID NO: 337440 - DNA, 606 bp, Homo sapiens
gtttcttttccccaaaaagagaagaaaccaaaagcaattcattgcaacaccctttctactctgtaaacagactctctactcttgtgaaatttaaaaaacagtaataattactactgacatctaaattcagcaaagtataatagtactttagataatttacagatggctccaccatagcctcttactacagtctatcaaaatctccctgtatatactgacttccaattgtatcactttatcttttatattttattttgattaaaaagtgataggtgatttgtgtgtctgcatatatgtacaaaaaagcactgcatctctwcattgcactgacaatagaaagagagaaggggtaactggaagaaagggcttggaaagagacctcttttccattctccctgagccattatctatgccttttcctttatcatctttttgtactataagggagatatttggtggaaacacatttgcataatataagtctttatcagacagcccggcttatgggttatggacccagggaagtcttccttctatatcttgaaaggtactctacaaggacactatgttaataaacttaaaatgagagaaaaatcaaaactaaaa

SEQ ID NO: 337441 - DNA, 606 bp, Homo sapiens
gtttcttttccccaaaaagagaagaaaccaaaagcaattcattgcaacaccctttctactctgtaaacagactctctactcttgtgaaatttaaaaaacagtaataattactactgacatctaaattcagcaaagtataatagtactttagataatttacagatggctccaccatagcctcttactacagtctatcaaaatctccctgtatatactgacttccaattgtatcactttatcttttatattttattttgattaaaaagtgataggtgatttgtgtgtctgcatatatgtacaaaaaagcactgcatctcttcattgcactgacratagaaagagagaaggggtaactggaagaaagggcttggaaagagacctcttttccattctccctgagccattatctatgccttttcctttatcatctttttgtactataagggagatatttggtggaaacacatttgcataatataagtctttatcagacagcccggcttatgggttatggacccagggaagtcttccttctatatcttgaaaggtactctacaaggacactatgttaataaacttaaaatgagagaaaaatcaaaactaaaa

SEQ ID NO: 337442 - DNA, 649 bp, Homo sapiens
ggaaacacatttgcataatataagtctttatcagacagcccggcttatgggttatggacccagggaagtcttccttctatatcttgaaaggtactctacaaggacactatgttaataaacttaaaatgagagaaaaatcaaaactaaaagattcaagtaagagtaatctttcatccaaatagctacccattygtttatcctaaaggagctggtccattgaattaaattcactaatttctattaagtaataaagtatatgcttgtgtttccatgagaaattttagtttcaaatgtcctgcattcagcgtgaccagctttaaggcataagttttgcttgtttatttttaagatatccaactgttataattttaccataaaagaaaggttaagggagaagcttcatttgcaaaggcactgttctgcgcccaagagtatgactgagatagttataacacagaaatcaagagtttcgactaaaaaagaggaaatatctatttgagttattttattgttattcagcagctggtattgatatcattaggcagaataaaatctatttatattttagaagacttactgcttcaaccagccacataagaatttaataaacacctaccatacatgaggtattatatttcataaacccaaa

SEQ ID NO: 337443 - DNA, 417 bp, Homo sapiens
ggtttaaattataacagtagcacttagttaataaacataaaataaagttaaaaaatagatacgactctaaattgagtgagcctaaggccaaagaataatatttgggtggaaaatactcttaattccatattcatagcacaaaataataaaattaatacattggtgtatctttgctggaaaagtgtgaatctagtgtttctgtggccmtctatttggagtattccttaacaggatttaaacaattattctgtattttaaggaagaataaacgagttacactggcaaatctgaaattattatgcctttcagaattatcataaaaaagtacctgtatgtaaaattattttgtaaattatatatattttttaaattatggagtattatcattattttaaccttcaagagtacatatagaat

SEQ ID NO: 337444 - DNA, 417 bp, Homo sapiens
ggtttaaattataacagtagcacttagttaataaacataaaataaagttaaaaaatagatacgactctaaattgagtgagcctaaggccaaagaataatatttgggtggaaaatactcttaattccatattcatagcacaaaataataaaattaatacattggtgtatctttgctggaaaagtgtgaatctagtgtttctgtggccatctatttggagtattccttaacaggatttaaacaattattctgtattttaaggaagaataaacgagttacactggcaaatctgaaattattatgcctttcagaattatcataaaaaagtacctgtatgtaaaattattttgtaaattatatatattttttaaattatggagtattatcattrttttaaccttcaagagtacatatagaat

SEQ ID NO: 337445 - DNA, 585 bp, Homo sapiens
ataattaatttttttaatgtgaaagacctgcagtgagctacagtcaaatgctctagaatttaggacatgcatagcaagaatactcaacaaaacccaaaagaagtttgaaatctaacmctaagaaaacagaaaaaaaaaaaaaaaagaaaattcaggatttgaaagacaacatagcaggattaagaaagaactaaacagaacttttggaattaaaaaaaatcactgcagaatttcaaaatacaattgaaagccttaacaatagattagaccaagcagaagaaagaattccaaagctttaagactggtccttcatattaatttttttcaaaaataaaaaagaattttagaaaatgaacaaagcttttgagaaatataggatcaagaaaagtgataaaatctatgacttattgagattcatgagagagaagagaaagtatgcaacttagaaaacatatttgatggtataattcatgaaaatatccccaatcttgctagagaaatcaacagacagattcaagatagccagagatctcctgcaagatactgaacaagacaatcatccccaaggcacagcacacggtcatt

SEQ ID NO: 337446 - DNA, 585 bp, Homo sapiens
ataattaatttttttaatgtgaaagacctgcagtgagctacagtcaaatgctctagaatttaggacatgcatagcaagaatactcaacaaaacccaaaagaagtttgaaatctaaccctaagaaaacagaaaaaaaaaaaaaaaagaaaattcaggatttgaaagacaacatagcaggattaagaaagaactaaacagaacttttggaattaaaaaaaatcactgcagaayttcaaaatacaattgaaagccttaacaatagattagaccaagcagaagaaagaattccaaagctttaagactggtccttcatattaatttttttcaaaaataaaaaagaattttagaaaatgaacaaagcttttgagaaatataggatcaagaaaagtgataaaatctatgacttattgagattcatgagagagaagagaaagtatgcaacttagaaaacatatttgatggtataattcatgaaaatatccccaatcttgctagagaaatcaacagacagattcaagatagccagagatctcctgcaagatactgaacaagacaatcatccccaaggcacagcacacggtcatt

SEQ ID NO: 337447 - DNA, 558 bp, Homo sapiens
agcacacggtcattgggctatccaacatcaacataaaagaagtttgaaagcagctacaaaaattggccacatcacctgtaaagtgaaacctagcagactaacaacagacttctcagcagaaaccttaaaatctagaagagattggggacctatttttagcattcttaaggaaaataaatgccagttaagaattttacactaacctccatagataaaggagaaataaagtctttcccagacaagcaattgttaaaggactagatcaccaccagatcagtactagaagagagcctgagggggttctttgaatggaaatgaaagaatgatactaccacaaaagaacacataagcmcacagcccatgaaccctacaaagcaactacacaaatgacactaaaaatcacctagctaacaacactacaacaagaataaaatctcacatatcaatattaaccttcaatgtaaatggccttaaaagacatacagttgtaaactggataaaaaagcaaaacctatccttctgccatcttcaagagatctatctgacataatgacaccc

SEQ ID NO: 337448 - DNA, 583 bp, Homo sapiens
taaaatgagacccccaaaactatacaaggatcaatgaaatraaatgctggttcttttaaaggttagacaatgttgatggaccgcttgctagattaacaaaaaaaaaagagataagtctaaaacaagcacaatcagaaatgacaaaggcaacataacaactgatcccacaaaatatcatcagaaactattgtgaacatactctaaaatttagagaaaatgaataaatttctggaaaggcacaatctcccaaaattgagtaaggaagacattgaaaacatgaatagatcaatgagttctaaaactgaatcagtaataaaaaatatacaaataaaaaaagccctggaacagatatattcacagccaaattctaccagatgtacaaagaagagctgataccaatgctgctgaaactgttccaaataattaaggaggtgagatttctccctaactcattctatgaaatcaggatcatcctaataccaaaatctgacaaagatacaacaaccaccacagcaaaactacagaccaatatccctaatgaacataggaacaaaaacctttaacaaaatactagcaaaccaaa

SEQ ID NO: 337449 - DNA, 583 bp, Homo sapiens
taaaatgagacccccaaaactatacaaggatcaatgaaataaaatgctggttcttttaaaggttagacaatgttgatggaccscttgctagattaacaaaaaaaaaagagataagtctaaaacaagcacaatcagaaatgacaaaggcaacataacaactgatcccacaaaatatcatcagaaactattgtgaacatactctaaaatttagagaaaatgaataaatttctggaaaggcacaatctcccaaaattgagtaaggaagacattgaaaacatgaatagatcaatgagttctaaaactgaatcagtaataaaaaatatacaaataaaaaaagccctggaacagatatattcacagccaaattctaccagatgtacaaagaagagctgataccaatgctgctgaaactgttccaaataattaaggaggtgagatttctccctaactcattctatgaaatcaggatcatcctaataccaaaatctgacaaagatacaacaaccaccacagcaaaactacagaccaatatccctaatgaacataggaacaaaaacctttaacaaaatactagcaaaccaaa

SEQ ID NO: 337450 - DNA, 583 bp, Homo sapiens
taaaatgagacccccaaaactatacaaggatcaatgaaataaaatgctggttcttttaaaggttagacaatgttgatggaccgcttgctagattaacaaaaaaaaaagagataagtctaaaacaagcacaatcagaaatgacaaaggcaacataacaactgatcccacaaaatatcatcagaaactattgtgaacatactctaaaatytagagaaaatgaataaatttctggaaaggcacaatctcccaaaattgagtaaggaagacattgaaaacatgaatagatcaatgagttctaaaactgaatcagtaataaaaaatatacaaataaaaaaagccctggaacagatatattcacagccaaattctaccagatgtacaaagaagagctgataccaatgctgctgaaactgttccaaataattaaggaggtgagatttctccctaactcattctatgaaatcaggatcatcctaataccaaaatctgacaaagatacaacaaccaccacagcaaaactacagaccaatatccctaatgaacataggaacaaaaacctttaacaaaatactagcaaaccaaa

SEQ ID NO: 337451 - DNA, 583 bp, Homo sapiens
taaaatgagacccccaaaactatacaaggatcaatgaaataaaatgctggttcttttaaaggttagacaatgttgatggaccgcttgctagattaacaaaaaaaaaagagataagtctaaaacaagcacaatcagaaatgacaaaggcaacataacaactgatcccacaaaatatcatcagaaactattgtgaacatactctaaaatttagagaaaatgaataaatttctggaaaggcacaatctcccaaaattgagtaaggaagacattgaaaacrtgaatagatcaatgagttctaaaactgaatcagtaataaaaaatatacaaataaaaaaagccctggaacagatatattcacagccaaattctaccagatgtacaaagaagagctgataccaatgctgctgaaactgttccaaataattaaggaggtgagatttctccctaactcattctatgaaatcaggatcatcctaataccaaaatctgacaaagatacaacaaccaccacagcaaaactacagaccaatatccctaatgaacataggaacaaaaacctttaacaaaatactagcaaaccaaa

SEQ ID NO: 337452 - DNA, 485 bp, Homo sapiens
agaaaatattttccaactatgtatctggcaaagaaaaaatatccagaatctataaggaatttaaataaatcaataagaaataaaaaaaacaaataaccccattaaaaatgggtcgagtayagaaacagacacttctcaaaagaagacataaaagtggccaacaaacacataaaaaagtgctcaatatcactaatcatgagagaaatgcaaatcaaaaccacgaggtaccatctcatagtagtcagaatgccttttgtttaaaaagtcaaaaagtaagatgttggtgaggttgtcgagaaaaagaaacacttatacactgttgatcggagtgtaaattagttcagcccctgtgaaaagtagtttggagatttctcaaaaactaaaagtagaactatgatttaagccaatctcatcacatactcaaaggaaaataaagatacatgcactcatatatgtttattgaaatactactcacaatagcaaat

SEQ ID NO: 337453 - DNA, 485 bp, Homo sapiens
agaaaatattttccaactatgtatctggcaaagaaaaaatatccagaatctataaggaatttaaataaatcaataagaaataaaaaaaacaaataaccccattaaaaatgggtcgagtatagaaacagacacttctcaaaagaagacataaaagtggccaacaaacacataaaaaagtgctcaatatcactaatcatgagagaaatgcaaatcaaaaccacgaggtaccatctcatagtagtcagaatgccttttgtttaaaaagtcaaaaagtaagatgttggtgaggttgtcgagaaaaagaaacacttatacactgttgatcggagtgtaaattagttcagcccctgtgaaaagtagyttggagatttctcaaaaactaaaagtagaactatgatttaagccaatctcatcacatactcaaaggaaaataaagatacatgcactcatatatgtttattgaaatactactcacaatagcaaat

SEQ ID NO: 337454 - DNA, 607 bp, Homo sapiens
cctgatttcaacctcagtataaagtttatagtaataaagagagtttgaataagaatagacacagctacatgtaccagaaaagtccaatgagaaaaaaaattatctcaaatatatagtactcccaacaattgtatagccacatgtaaaagaatgatatttgattccttcttcatatcacacacacactcatacacccacacatataactaaaaatataccttaaacctaaacatagatggtagatgatgaaactcttaggataaaaaataggaagaaatcttcataactttgggttaagcaaagccttcttaaacatgacacaaaaaatacaaatgaaaaaagaaaaacagatgttagatctcatcaaaatgaaaaacttgtatgcttcaaaagacaaaaagtcaactgacagaatgggagacaatatttgcaaatcacttatgtgataatggacttgtatcttgaataaataatgaatgctttwtacactcaacaataaaacaacaactaatccaattaaataatgggcaaataatttgaataaatatttctccaaagaagatacacaaatgactgatgaacacataaaaaatgctcaacactatta

SEQ ID NO: 337455 - DNA, 607 bp, Homo sapiens
cctgatttcaacctcagtataaagtttatagtaataaagagagtttgaataagaatagacacagctacatgtaccagaaaagtccaatgagaaaaaaaattatctcaaatatatagtactcccaacaattgtatagccacatgtaaaagaatgatatttgattccttcttcatatcacacacacactcatacacccacacatataactaaaaatataccttaaacctaaacatagatggtagatgatgaaactcttaggataaaaaataggaagaaatcttcataactttgggttaagcaaagccttcttaaacatgacacaaaaaatacaaatgaaaaaagaaaaacagatgttagatctcatcaaaatgaaaaacttgtatgcttcaaaagacaaaaagtcaactgacagaatgggagacaatatttgcaaatcacttatgtgataatggacttgtatcttgaataaataatgaatgctttatacactcaacaataaaacaacaactaatccaattaaataatgggcarataatttgaataaatatttctccaaagaagatacacaaatgactgatgaacacataaaaaatgctcaacactatta

SEQ ID NO: 337456 - DNA, 563 bp, Homo sapiens
aacaaattcataagacatttgtgattattatgtgagttaacatttgtgaagtatttagaacagtgcctagcacaaaataagggttcaatatatgtcagcattgttgttattattattacattgctctacacaaagctacagccaattatgcttaacaatgttgaagctctgttggataaattatcatccccatttttctacaggtagaatactagaaataataggaattaygtgagtgagtttctgaactgtaagagactacaatctagatttataaatataattctgtttttattataagaagttgtgctccagtttatttgttccttatgccttgtaataagctcagtcatttgaaccacttacactgtctttaaattttagtataacttgtaggatggcaatgtgaatattttctgatcttttaggtggagaagtggtgagactactcgaaaattaaaatgttagaaaatatcaaattttgatggtataatgtgaaagacagaaggatagagaaacagagggaagaaagtaaataaaagactaaaagtgatttttttaaa

SEQ ID NO: 337457 - DNA, 536 bp, Homo sapiens
caaactggccctgacttgctgatatatgtttaacaaattcttctgaataaaatagcctgtacaacagctttagtgacaggttgctgtccacttaacagattttaaagttttatttactaaagctgtttgggaaagtttttatgtacagtttgggtgacagttctttttgtttcttaattccactactcatgatttgatgtgtrtaaccatttcttttctttttaaaggtgaggacacatggtgaatagagggcttgctggcaattggttcacaagctgaggagggcacaaaggccagatatttcatctgaagagttcacaggctattaaaaacattaacaagattttactgcctcacctaggatggaaataattgctttaaagtgaactggcattaaagtgaacacgtcaagactacctacttggaagctacaggagacagaaacagaaaacacgactcctgaatcatgttccattactttaatcgctaaacactgctccgtttaagctaaagagatataatggtacatttgacag

SEQ ID NO: 337458 - DNA, 503 bp, Homo sapiens
cataacgccttgtgtggagtaatcacacatcagctgtgtttcgcaagaacccaagattcttccctatctctgcatattttggaaagatgtgatttcctgctcattctcagagaaccatgaaccctctccagcctttcccccaagaaacacattttcccatcacgtgaaatggcacatcacatatctgctctgatgcaagacactctgtgagctcccattctataaacctcagacctgcaatctcttgttgtctattgctttctctttgcagctgacctgacctttccacgagggcgaataacactttctcccctacctttaaccatactaacttcacatttttatgtcccacacctatttgttctactgtgactcatgagcacagatggagatggaagctccccttcatcacagaaaagctcacttyctctccttttcccacacccctactttccctatttcccataccccagccacccccaaccctgggtgttcgcagtggg

SEQ ID NO: 337459 - DNA, 503 bp, Homo sapiens
cataacgccttgtgtggagtaatcacacatcagctgtgtttcgcaagaacccaagattcttccctatctctgcatattttggaaagatgtgatttcctgctcattctcagagaaccatgaaccctctccagcctttcccccaagaaacacattttcccatcacgtgaaatggcacatcacatatctgctctgatgcaagacactctgtgagctcccattctataaacctcagacctgcaatctcttgttgtctattgctttctctttgcagctgacctgacctttccacgagggcgaataacactttctcccctacctttaaccatactaacttcacatttttatgtcccacacctatttgttctactgtgactcatgagcacagatggagatggaagctccccttcatcacagaaaagctcactttctctcctttycccacacccctactttccctatttcccataccccagccacccccaaccctgggtgttcgcagtggg

SEQ ID NO: 337460 - DNA, 526 bp, Homo sapiens
tttctgtttttagttaattacttttatagtgatagtgttttattcctcgttttctttccttagctttgcaacctccaattccacctcattcagatattttatcatctaatttctgagctcctttaaagatctaatcaaattcttcttaaattgttgtgtagcatgaaatacagtcagccctctatatccacctgctygatatctcagattcaaccaatgtccaatcaaaaatatccagaaaaaaaattttaaaagataaatcataccagttttaaaaatacagtataacaactatgtatttacataacatttatgttggtattattaaaatctagagatgatttaaagtacttgggaggacatgagtaggttatatgcaaattctacattattttatatatgggacttgagcaggttataaaatacagtatttatgattgctttattttattacattttaatcaatttgtaattacatatttaatcattttattgttattgcatatttaatcaatgtgtgtatata

SEQ ID NO: 337461 - DNA, 634 bp, Homo sapiens
taatagccacctcaccaaagaagataaatatagatggcaaatagacatatgcaaagatatcacacatcatgtgtcatcagggaattgccaattaaaacaacaatgagatgccactactagatgtgtagtggcgtctagtaggtgtagacaccaccacacctactagaatggctaaaatccagaacaccaacaatagcaaattctggcaaggatatggagcaacaggaattcttatgcattgctggtggaaacacaaaatggtatagcccctttgaattcagtttggcacccaaaactaaatatactcttatcatatgagccagtaattattctgcttggtattaacccagagaagttgaaaacttatgtccacacaaaaacctggacacagatgcttacaacagctttattcataattgctaaaacttagaagcatccaggttgtccttctgtaggtgaatgaatacataaactctagtacatctgggcaatggaatatcactcagcactgaaaagaaatgagctatcaagccatgaaaaaacatgggggaaacttaaatgcawgttattaagtgaaagaagccaatctgaaaaggctacgtgccataggattccaaccacatgatgttctgga

SEQ ID NO: 337462 - DNA, 367 bp, Homo sapiens
taaattacccactctcaggtggttccttataccaatgcgagaatggactaatgcaaatgtgtctattttttctgtggttgcctgtacttcagtcttcctcttatgccacccaagctttgctgcagctaccggcttcagggaggtaagttgacaataccacctctcagctgcactgcccactttcacttatgatttctgatgccactgtgtggatgcctgctgggtcctatgtacattcacacatgcataccaacctgggagctcaaggtgggaaacacccatgtggcaagcattgaacaatggggcttgggaactggkggattaactcttgcctgttccttccctcaagtgggcaattttgaggtgt

SEQ ID NO: 337463 - DNA, 597 bp, Homo sapiens
aggacagctgctcagaagattcaggcccaagtgatcttggataggagctctgtttggcctttgttaccagcaggtttttaaaggcaaaagcaaggggataygtagggggatgatacaaagttgcttgtcaggaattctctttggtttacagaaatgtcattcattagttattgcctatacattgttgacatatagattatgacctaatgatatctatcatgtggtgtcattaggttaattttgagctacttgtgagaaaaggcctagagtccacatagcaagcaaattcaagagatgattatttagctcaggaggggaagtgggatgtgactgtagcctcattctcatgcctcactgggcctgataatttaaaggaggttcacattcctcagatagaaagtttcttttctttctcgctataagcctctgtctttcttgtctctctattgctaagtggtttggcataaaatcatgtgctctggtagaaacctaagggctttttattcagctgttgaaattcatacccactggagattctagagccatcagtggccatggttcctgccactggaggaaactgtctttagagagtgaagg

SEQ ID NO: 337464 - DNA, 597 bp, Homo sapiens
aggacagctgctcagaagattcaggcccaagtgatcttggataggagctctgtttggcctttgttaccagcaggtttttaaaggcaaaagcaaggggatacgtagggggatgatacaaagttgcttgtcaggaattctctttggtttacagaaatgtcattcattagttattgcctatacattgttgacatatagattatgacctaatgatatctatcatgtggtgtcattaggttaattttgagctacttgtgagaaaaggcctagagtccacatagcaagcaaattcaagagatgattayttagctcaggaggggaagtgggatgtgactgtagcctcattctcatgcctcactgggcctgataatttaaaggaggttcacattcctcagatagaaagtttcttttctttctcgctataagcctctgtctttcttgtctctctattgctaagtggtttggcataaaatcatgtgctctggtagaaacctaagggctttttattcagctgttgaaattcatacccactggagattctagagccatcagtggccatggttcctgccactggaggaaactgtctttagagagtgaagg

SEQ ID NO: 337465 - DNA, 617 bp, Homo sapiens
ctggttactgacagaccccagcaactacaatgaataatgagtgcacacgtgctcatctctaattcctttcctgtatgtsaatctgttagcacttcagtcaagctctgcctaattacatctgtaacctgctaatacaaccttctttgttgactgaaggaatcatcttatccagcttaggccaaattaaaatttaatacaacaccaagttgccacagaacaagaatgcaaatagcagttatttaattaacacctaaacctgattaggcagctccactgaaagaaattctccggaagaaaagcatgcaactcaagcccacaatagcgacttcatcaaagcatgactaaaacctcatgtgcggtcactgcaagccaggtttcggaaggtccacgagttaggatagacctggctggagtctctggctgattctcaatcccttggatagatctgttttctggatgtttggaaaggagatgggaatggagagggagacagagacagaaactgacagagtgggaaagacagacagataaagaaagagtgagaggctacgtgcctaaataaggagtcaaaggcagagaaacagaaagacagaaaggtaccaaagacacatgcagaa

SEQ ID NO: 337466 - DNA, 514 bp, Homo sapiens
cagagctgtgtgctcttctctaaaatgtgctactggctctatagggattgaggtctgagacagatgttctctagcggctgctcaggccctgcacagataagtgaccaccgaacagtgctgatgatgggtggacagggctctgaagacctcctgaagagaaagaaaatgagattatttacagatccctgggaacagaacaccaaagcagctcagcaatttattcagattaggctgctcccagaaataaatgcgtctaaattccatttggaagaggagccctggggtaatggttttggatgtttgatttgagctgatcctgtgaygagatagaaaaaaaaaatccatgcttccatttaatagatcaatttaagtggtggctttcttgatcaggaaggcaggtgaagcttgagggaggatagacacagagttattgaaccctgtaatttatgccagcaatgctcaaagaaatcgaggatgcccagagtgaatctaatttccatgtttatgtgtcatg

SEQ ID NO: 337467 - DNA, 604 bp, Homo sapiens
tacccctgcctcaaatagccgaaattcatgggataaaagctcacagactgtgtctgatttggatggtgaccttgtagatcaccttgtccgtcttaacctccgggacccaggtagggaggragattttgctcaggtcattatctggctcttcctggagttccgagagcatttgctcatcatcactcagccagtcgggaggtaaatgaccacagagctggtactaccggagttccagctctttcccgtgtagtctttttgcctctcggtgaggagggtaatgacctctattaggaaggctttactcatcttagtaccatgccccagcaattgtcaccatcacaggcaggagacacagcccattcgtgttagtggcagaacagctcattcatcgcaaatgactaacaattaagaagtcatttggatagaagccacttgcatttttcaccacaaggctcattctcatgttactgccaatctattcagctttcttctcccaggctgcagctgattgctccgtaatttcaatgtgagctccagttcaaagggcaccatttgtaactaacatctcgtatagcaaaatggatagacggcaaatggattcgtg

SEQ ID NO: 337468 - DNA, 538 bp, Homo sapiens
ttctccttagttcttctagaacacaggtcaacagatgtttgcgactccagtcctcatgatctgagacggggtcccagtggggatccatactggggatggcttggtgaccagtagggaatttgtccttttctttggctgtcattctatcatttacttgactaagataccaggtatctccaaactcttgggctgcagctaaagctgcattcttttattaaaggccagggtttgatctaagaatagcatgacatctctccaagtgagatcaaaggtttgtcctgtagaacatctatgtaactattaggatcacctgaaaatttccccaggtctactttgatctgctttaaatcagagagggagaaggggacatgttcccaggttgggccaaattccccttcccctacagcttgaaggggacaaaactgataacctggggtgggtsggggagggttgtggtgccttggagatttctttgcttgttttcttctgggtgggggagattagaggaggctcaccattaataggaaggggagctgta

SEQ ID NO: 337469 - DNA, 559 bp, Homo sapiens
taggaggatgtagctaaagtttgtttatgcttcccacaaccttcccctgtgcagtctggatggtttgtaattggggtttgcttattgcagcaagttctgataaatgaagtctgctggcttcaccatggtgcctagataagggcttagaaatgtaaaggggctcaggaggaagagtargtggcacagaaaagagttgcagagcataatggggaggggtgggcagcacggagagtgttgggggaagtgtcggcagtagcaagaagttattttggggcagtttgtctctaacaggaggcagaggttgcagtgagctgagattgtgccactgcactccagtctgggtgacagagcgagactctgtctcaaaaaaaaaaaaagtatgtgtttcacattaaccattctgatactgccaatgtgtattctaacatagaacaattaaactaatcaaatggctgagagcgggactttagagataagcagaggaagaggtgaaacaatccacatgtgaattgattacagttggagacaccctgagaaattcatgttgaacttaatgcag

SEQ ID NO: 337470 - DNA, 598 bp, Homo sapiens
catctgaaacatctatgcttatttttcatttttcttcttccttagccggcccattcattcttataagaatgagaatcttgtgtgtatgtatatacacacgacacacacagagatatataactattatttgtcaattaaaaagaacatttaaaatttaatccagtaratcaccaagctgtgcttgttgctggtttgcttatatggcaaagcagccgtagaaagcactgagaataggctgggcgcagtggctcacgcctgtaatcctagcactttgggaggctgaggcgggcggatcacctgaggttgggagtttgagaccagcctgaccaacatggagaaaccctgtctccactaaaaataaaaatttagccgggtgtggtgatgcatgcctgtaaccccggctacttgggagactgaggcaggagaattgcttgaacccaggagagggaggttgcggtgagccaagattgagccattgcactccagcctgggcaacaagagtgaaacggagaaaaaagagcctgggcaacaacagcgaaagggagataaaagaaaagaaagccctgagaatacaaagtaaataaagatacattgttgc

SEQ ID NO: 337471 - DNA, 598 bp, Homo sapiens
catctgaaacatctatgcttatttttcatttttcttcttccttagccggcccattcattcttataagaatgagaatcttgtgtgtatgtatatacacacgacacacacagagatatataactattatttgtcaattaaaaagaacatttaaaatttaatccagtagatcaccaagctgtgcttgttgctggtttgcttatatggcaaagcagccgtagaaagcactgagaataggctgggcgcagtggctcacgcctgtaatcctagcactttgggaggctgaggcgggcggatcacctgaggttgggagtttgagaccagcctgaccaacatggagaaaccctgtctccactaaaaataaaaatttagccgggtgtggtgatgcatgcctgtaaccccggctacttgggagactgaggcaggagaattgcttgaacccaggagagggaggttgcggtgagccaagattgagccattgcactccagcctgggcaacaagagtgaaacggagaaaaaagagcctgggcaacaacagcgaaagggagataaaagaaaagaaagcmctgagaatacaaagtaaataaagatacattgttgc

SEQ ID NO: 337472 - DNA, 623 bp, Homo sapiens
tgaccgtcacagtgaggtctcccctgaccatcctacgcaatgaagggcaaggacattatcttgcttactgttacatccccagaatctggcacgttcatggcacatatcagacacataataaatactattgaaatgawgaaaaaaagattatttttgaaagtaatttttcattcaaagcttcagtgatgggaaggttttaatggtggaaacgaggaagataagaaaatggtgatgcttagcaaatttatggaaaatggaaaaaaaaacctgagagatcacagaagtaaaaattgttgcacccagtccaacaatgaaccatcaggcaaagaaataatcagatttcccaaatatcaaaacctttgccattggtctgcaagcatacagaagagataacactcagctttctaaagtctagtgctgttgagctcattagaaattgaattttgaatttatgataagaattaatgcaattcaaatgcatgtcatgtgaagtatgacacagctcttaatttttaatattattctgccttttagatgtctctcctggaggaacagacaggcatttaagacatggcattatttatgaatatttaactacatggctagttacagaagaaggaaag

SEQ ID NO: 337473 - DNA, 623 bp, Homo sapiens
tgaccgtcacagtgaggtctcccctgaccatcctacgcaatgaagggcaaggacattatcttgcttactgttacatccccagaatctggcacgttcatggcacatatcagacacataataaatactattgaaatgatgaaaaaaagattatttttgaaagtaatttttcattcaaagcttcagtgatgggaaggttttaatggtggaaacgaggaagataagaaaatggtgatgcttagcaaatttatggaaaatggaaaaaaaaacctgagagatcacagaagtaaaaattgttgcacccagtccaacaatgaaccatcaggcaaagaaataatcagatttcccaaatatcaaaacctttgccattggtctgcaagsatacagaagagataacactcagctttctaaagtctagtgctgttgagctcattagaaattgaattttgaatttatgataagaattaatgcaattcaaatgcatgtcatgtgaagtatgacacagctcttaatttttaatattattctgccttttagatgtctctcctggaggaacagacaggcatttaagacatggcattatttatgaatatttaactacatggctagttacagaagaaggaaag

SEQ ID NO: 337474 - DNA, 533 bp, Homo sapiens
cacgtagaggggaacaacacacattrgggcctattgaaaggtggagggtgggaggggagaggggatcaggaaaaatagctaatggatactaggcttaatacctggaagatgaaatagtctgtataacaaagccttgtgacactagtttacctatacctatataacgaacctgcccatgagtccctgaacttaacataaagttttaaaaacagacacacacacacacacacacacacacacacacacacacacacacaaacctgacagtaatcctttctctcacagttctggagtccagaagttcaacctcagcttcactgcaccaaaatcagggtgtagccaggaccatgctccctccgaaggctctaggggagaatttgttcttccttcctccctctgccagggtgtgggcattccttggcttgtggccacatcactccaatctgcctcagaggctgcatggcctccccctcttctacacatcaatctccctctgtccctttcttgtaagcaggcacgtgatgtctcctagg

SEQ ID NO: 337475 - DNA, 487 bp, Homo sapiens
cctgctgatcagcacctcagatcttgaagggcctcccttgctgagagagtcacactgagaacatggagtctctgagcagcattttggggagctgtgtctgccttgggtgaggcagctgggggtgctgctattatttttcttctcgaaggttgaaagtggccttctgttggctactcttttacttacacatagcaggagacccaggtgtgcagtggaggactgtttcttatggctcaagagaagatcaccattgtcaactgttgtggggagaagagggcwggttgtaattttcaggtctataattaaaacagttatgaggctttctttggtgttaattttgtttggcgcagggagggattgtaggatggcctctttctctgtgaactccagtgaagccagagaacttcatgaggatggggaatatgggatggcgtgttgatttggtctcttctgtgattaaacatcaatccctgaaagactcttaagt

SEQ ID NO: 337476 - DNA, 577 bp, Homo sapiens
tgcttggtgctcagtgggcactcaatcaatatgtgttgaatgaatgaatgatcaaattatattactgagccttgccaagtgcctggactgatgttatctccttagtagctgaggaaccctgggttgctaaggtcacgcaggtagcaggaggtagacgcagatatgaacccaggcagaaatgctctgaatacttctgttgtcgcgatgatgctgctgtgcctcaccgtgaacttgtgttttcctctctgtgcatccaagcatgcataatacaaaggcccacaggtgcgcwcatccaggtgagcatgatgtaaatgccccacaggtgtgcacattcagataagcttgatgtaaaggcccacaggtgtacatgtccaggtgagcaggatgcaaaggcccacaggtgtgcatgtctaggtgagtgtgatgggagcagcaggaactgcgcttgacagacaggtgggaatcaggtgactcgagtgtcttcctaatggaaagcaaagcctactctgtgcatggcgtggggtgggggttaaacagagctgtggcaggatgcaggacaaggtggtggcacaaatat

SEQ ID NO: 337477 - DNA, 496 bp, Homo sapiens
gtaaatttaggtgctagaaaaaaactgcgtgtgtgtgtgtgtgtgtgtgtgtgtgtgtgtgtgtgtttcattgataaaccaggtgaaggaaagagttacctacttcagttcaataattcttctgaattctctctcatgaagcaaaagagtggattgagtgagaaagcaagaatatgtaccacaaatcagaataattgcattatttcactatctctttggctcagttttctttttttaattaagggattgttttttgcatttaaaaaccttttataatacactcagccacctctaaaaatagtaaaatatatatcattctaaaaagagggatacgaattcaagtttgattcaaaacttcaatgagaaatatggagttgaggccattaccatataaattatcatttgtgtggggttgaagagagactggttctgaaaggcrtggtagtaaatcataattagaatggccttctaagtctgattataagtgagcaggcat

SEQ ID NO: 337478 - DNA, 576 bp, Homo sapiens
gttccaatgttaatggtaaaatatatctatcagaaactggctgaaatgcttctaccaccagagatcatcttcaccaggacacaggacatcagagagcctcgggcagaagcaagaccagagttggtcttgaacttctttttttgmccagtccagaaagtcaaacgtcatctagatccctggctgggtcacctacctctttaacctctaactgggcaaaatgctagatttgacttcccttgtgcttgccatagctagtttaaatattgaaataaattactctttcatgctctcagataccatattttgtgatatgactgtggttctgagcctatattttcattttttgtgatgctcatatttaataagctctgcagtgaggaacctggagtcccagtgttgctcacagagttggtatgtaagagttgcttagtcactgtttgttgatttcatggcattgttttttctctgttttttcttttttctttctttcttttctttttaagagatggtgtcttgctctgtagcctaggctagagtgcactggtacaatcatagctcactacaaccttaaactcc

SEQ ID NO: 337479 - DNA, 589 bp, Homo sapiens
attttttttttatttctacaaatgttcctggggattgttttgcaaaaaagttgagttactttgaaatagttttattattttatgtccggtttttgtatttattaggcagttgctggcagttggtgtgatgctccgtctaraactaattattccccagtgccaggacaagacatttctgtatcactatttggtctccatgactccttaggttttccatggtatctggtgggaatagggactattctcagccacgtgtgagtgtcacctctgtactcactagtcctttccggtagttatttctgtattccctggtggctttctcacatctttgcattggtacccactgctgaataatcagggggtcctgctacatatctctggagatttctccctatgctgcttctctcccatactctgcgaactttaatccttttcatctccctggactccatctgtatctcttcaattcagggcatccactggctttcccctatataaactggaatcttgaaactccctataggcaataatctgggaccatcgtaggactcatttgtcttgtttccctttccttatggattactataat

SEQ ID NO: 337480 - DNA, 604 bp, Homo sapiens
agttcatttacttagggattcgaattcaaactggccttcattcactcgctctttccatccatctacaaggattcttcccattgtgatgaaacaaaaagttcaattcaaatgagcttaaacaaaagttaatgacagtcataaatggaatgtctagagatagagtgacttccaatcacagctgaaaatcaaagttcagaaaacttcatttagacatttttactcaactcataactgatttcaacggtgtcagatccttattcaatctccttttcatgggaagaaaaatatcrtgtttgatttccttcaagttcagcaagaactactaaaaactgatttccaagaagtacccaaagaagaattttgcgaatctccttgtatcatcagatgtgttatgtgcccatctttaaaccaatcacttgaattaggagaatagaatttgctgatgagcccagccatggtcatgtgacccaccctgggcacctgaagtatatcagttttccctgatccacaggctacgcgagaagtgcatcccccaaagtactcatcagagtatttttgtgacaagacagcaagcgatattaggtagagatgatcaaaaccaaca

SEQ ID NO: 337481 - DNA, 608 bp, Homo sapiens
agcttccactgggccccatttgggaccctcactcttgcaatatggccgccattctgtgagggaccccacaccacatgaggaagccacaggtaggcatctggccaatggtactggctggcaagcaactgccagacatgcgagcaaacgaccttccagatgacttcagccctggctataaggtcattcccacctcccacaactgtcccatatacctagctgcggcctcacatctygtaaagcagaaaaaatccatgcccatcattcacctcaaatcaaagatgcatgaactacataaatgcttgtccttgttttaagctactaagctttgtgatggtttattatgcagccatagatatccagaacaaaatccctcattccctattaaaggaagtccttaggaaagtagcagaagtctgtaactgggcagaacacacttcctgaagccctgttgcgctcacagatgctgagctctgggcactgttcgttggccagatccagccagaatcccagagactggggcacaggtctcagtcaacacttgctgagcaaatgactgactgttccttagagttgcacagcagcttgcagtttagaaggcagagtaggac

SEQ ID NO: 337482 - DNA, 661 bp, Homo sapiens
atgatcaactagttagaacaattcatatgtaactgtgaggacagctgtttgcaaaataccttgctccttctactttatgcaaaagcatgcagcatctacttgcctcaaggtcattctgcaaactaatggctttcaagcagactgccctggggtgcacagcttcaaacaatactgacaatgttgctttgggaggaagactataaaatcttacatagtaagagataattaaagataacttttgaagatatggaaactgatttcttgtcctaataaataaaaactaatcacactacataatgtgaaactgtactgttcttaatcacgatgaagatttattagtctgtgggagtcaaggttctatatttcagaggtcactggaaatttgaaaggtgtaggaaatttggctaatcctgtcatacaattcagatccaagaargcaagaccaggacacacctgctatccactcaatgcctgcactcgaggcagactttgctaatcaatcacatacactttctgtcagaggccaaatttgtcatctgaatttgttttaacttttagtttaggttcagagataggtgtgcaggtttgttaggcaaattttatgtcacaggggtttggtgtacagattattctgccacctacataaaaagcatagtaccca

SEQ ID NO: 337483 - DNA, 602 bp, Homo sapiens
ccaaaacattttatcatcagacctcacagaaaataataggtgaattacaaccttaacttgcatatatttctcrggcagtttctgaccattaggaggggagtaagaaatggaaatctactagatgatagtacagggattttcctgtttctcagctacatggatttttacatcacttttaaaaaatttactgactttttttgttatagagacagggtctcgctttcttggccaggctggtctcaaactcctgtcttcaagtgatcctcctaccttggtctcccaaagcactaggattacaggtgtgagccaccgtgcctacccctactgcctgtgtcttaactggtcaagaacagcaggtaactgcaggggctggacagggccaccccaggttgaaatttacttggtggaaacacaatgcctgaagcaaagaggggttgaggggtgatatttaatcaatagtaaggcacttgggatagaaactaaacctctggaaggacaccagaatcagacccaggacaactgaagatctgagatgacatccaccacgcagaacaaccacagaatatggtttgtaatgcctggtacgcaaatctctgatttta

SEQ ID NO: 337484 - DNA, 501 bp, Homo sapiens
agtgtgtgtgtatgtctgtgtgtgtgtgtgtgtgtgtgtgtatatatatggcttgcgagtctgtcatactgttgaaaagactgtccatattattctgcaattgacttttttctcatatgggacaaatgccaaatacaaagctgggcatcatttgctaacagtaaattttattgagatattgcctatttttcaggaaatgtgttgatattttatttcatcattgcaaaaacaaccaaagggaaacagtcattgatggaagagaaaatgtttgctatgttcaaagagagaggaaaaatatcataatattattgcgttaatataatattagcttaaacwgcataaattgttaagggcaagttttgtatccatttattttatagtctatagatatgcatgtagtaacacacatatatttcaaattttatttattaaaagggagataatgtatttgcagagtgttaatattaaaacacacacacatgcaagcacacacacatttca

SEQ ID NO: 337485 - DNA, 501 bp, Homo sapiens
agtgtgtgtgtatgtctgtgtgtgtgtgtgtgtgtgtgtgtatatatatggcttgcgagtctgtcatactgttgaaaagactgtccatattattctgcaattgacttttttctcatatgggacaaatgccaaatacaaagctgggcatcatttgctaacagtaaattttattgagatattgcctatttttcaggaaatgtgttgatattttatttcatcattgcaaaaacaaccaaagggaaacagtcattgatggaagagaaaatgtttgctatgttcaaagagagaggaaaaatatcataatattattgcgttaatataatattagcttaaactgcataaattgttaagggcaagttttgtatccatttattttatagtctatagatatgcatgtagtaacacacatatatttcaaattttatttattaaaagggagataatrtatttgcagagtgttaatattaaaacacacacacatgcaagcacacacacatttca

SEQ ID NO: 337486 - DNA, 446 bp, Homo sapiens
tcatgtggaccagaggagattcatcctgaatctactattagtctttgtcatgccagctttcaggcctttgtagacaggactgagggactaggcagtgagttaagcagccattcatctccctatagtcagttcactctttgtgtgttgtttcctgtcagcactctgttgtgaatacaagtggtgaaaacattcaagtccttcacccaatgtatctaaaagagaaagaagtgagttatttgacttaaggcagcattctgttgcctctgctctgacctagatatattactactggtaaggcaggcaaaagttaaccctaaccatgctcagtgcagatgtttcttcccttacaacctrtaattcatattttctgttctagagtaagcttctcaaccctgccaggtgcaagtaggtggtatttggagtagacgtgaaatttttgttaaaaa

SEQ ID NO: 337487 - DNA, 574 bp, Homo sapiens
tttcctattcagctctcttcgtcgttttcggaaactgctttttccaatcttctttctctcttcaaatctcccgtgccaccacctcttttattatgcttggtaggtagccttccttcatctttcactgtgagtataggattttcatttggggagaaccacgactcatgtcataaaaccagaaagcactgccatttgcatgggtgttttcccaattctctacttgcctcctgttactatggaaaaacatctctagctttaagataaatatggaacctctatccagactatgaatcacaactttctttaggaacgtccacatattttgtttttcttctcattcatttattttcagccttttcctctcaaaacatccctcacaataatatttaaacatgctgaggtttctccccctattggagggggtaggggagccattcctgactttccgtttctacccacctcaggctgaatctgactcctgctaatctgcattaacccctttcgccaatatcatcagcaatctctagttagttgtttcaaakccgcatatcattagtcgtattacttgttagaa

SEQ ID NO: 337488 - DNA, 573 bp, Homo sapiens
gcgttgataactagacaacagttttctggtyagagttgtgaaaactggaaaagtaaatactgttcctccacgcatttaatgaaggtgacaccatctcctcatatttctgtttcttcctttttcatagatgtcagcagcaaggttggctgtccataaattttagtttctaaaacacagagcacagcctttgccagggaccaaagtgagtaatgtttccttgggttttaaagcttcccagtgtggactataaaactacaattataaatatatgcttttatagcaacttattttttgacaattgcttagggaataacccacattgtaaaagcagcagcatattttgctattcattcatgttattaatttaacatgatttaattaacgtttatgaagttcctacatatctgtcactacactaagccataaatctacagaaattagaggttagaccttgtctgttcagtaaagtcagagatggccttcctgagaaaactacttttaacagacctgaaggatgtgcaggatttaggtacactacaaagtagaaagaacattccctgcagtgaggccatc

SEQ ID NO: 337489 - DNA, 573 bp, Homo sapiens
gcgttgataactagacaacagttttctggttagagttgtgaaaactggaaaagtaaatactgttcctccacgcatttaatgaaggtgacaccatctcctcatatttctgtttcttcctttttcatagatgtcagcagcaaggttggctgtccataaattttagtttctaaaacacagagcacagcctttrccagggaccaaagtgagtaatgtttccttgggttttaaagcttcccagtgtggactataaaactacaattataaatatatgcttttatagcaacttattttttgacaattgcttagggaataacccacattgtaaaagcagcagcatattttgctattcattcatgttattaatttaacatgatttaattaacgtttatgaagttcctacatatctgtcactacactaagccataaatctacagaaattagaggttagaccttgtctgttcagtaaagtcagagatggccttcctgagaaaactacttttaacagacctgaaggatgtgcaggatttaggtacactacaaagtagaaagaacattccctgcagtgaggccatc

SEQ ID NO: 337490 - DNA, 573 bp, Homo sapiens
gcgttgataactagacaacagttttctggttagagttgtgaaaactggaaaagtaaatactgttcctccacgcatttaatgaaggtgacaccatctcctcatatttctgtttcttcctttttcatagatgtcagcagcaaggttggctgtccataaattttagtttctaaaacacagagcacagcctttgccagggaccaaagtgagtaatgtttccttgggttttaaagcttcccagtgtggactataaaactacaattataaatatatgcttttatagcaacttattttttgacaattgcttagggaataacccacattgtaaaagcagcagcatattttgctattcattcatgttattaatttaacatgatttaattaacgtttatraagttcctacatatctgtcactacactaagccataaatctacagaaattagaggttagaccttgtctgttcagtaaagtcagagatggccttcctgagaaaactacttttaacagacctgaaggatgtgcaggatttaggtacactacaaagtagaaagaacattccctgcagtgaggccatc

SEQ ID NO: 337491 - DNA, 444 bp, Homo sapiens
cagcatgaccctgctgatacttcagtcatggatttcttgtgtttattgagatagtaaatttctgttgtttaagcctctcaaattgtggtaatctgttatagaagctctaataaatgagtacatccatttcttccctagtaatttaagatgaaggaagatcattacacaattaaaaataaaactaatttactttagcattattatattaatgtgtaataataaaatagtgaacaactacattaaaatatgtacaggtaaatacagtagtcccttcttatttgtggggagtatgtaaygatactcccaatgggtatgcctgaaaatgcacacagtacagaatcctatatttatcatgtttttcctatacatacctgcctagaataaagttcaatgtattaaaaaattacacatagtaacagactaacaattactactaatagaaca

SEQ ID NO: 337492 - DNA, 592 bp, Homo sapiens
cagaattgcaaggttattaaaataccaccatttcatttactaactattgcttggcaaatgaattcattagtacacaaaccagttagtgactgaataagtgtgtcagtaagtaatttcaacatttggatattgaaggtcattaagtattattcatrgaatggagaacagaagattaatgtctacaggttggagactagcaaacctgcagataggctggctacactatttcatgctgattgtttgaaatggagcaagaaagcaatagaccgcagagatctcaatcagctggaaacaagcatctccaaagaaagtccctgccacagcaaccatctctgactaaattgcttgttatctttacaaagcgcccctcctggtgccattaatttatatgcttcctattaccccaagtgcaattctcaatgttatatttgttcttggggaatcatttttcctaaacagaaatcaagtgctttctccagttttacattgtcacagctccgtatccagcacccacaagtgaaaagtgctctggtcatatctgctgttccaccttcgtaatctgtcacatcaacgaactgtctgataatattag

SEQ ID NO: 337493 - DNA, 589 bp, Homo sapiens
ttatgtgctaccataaaatacacaaaaaacaattataaaaagtaaaaagattatcacaagttataatacacttacagaccatacctggcaccattcacaatcaraagaaatgtaaacaaatataaagatgcagtattggattataattgcatgaaattaactgtaatacgtactgtactactgcaggaatttcatagccactccttgtgctattacagtgggttcaagtatcacgagcatctgcttaaaacactgtgcgatgctaatcacttggagaagtgagcagttcatctgtctagtaaatcgctatctcagtaaaacatgatatcacaattctctcatatttctggccatgcttagtgtaaaaccataaccttgaatagcaccatgggacccaaattaccactagtgatgctggaagtactcccaagaagcagagaagagtcatgacattacaagacaaagtagagttgtttgatacgtaccgtagatggaagtccacagctgcagttgcctgccacttcagacaattcatcttataaacaaacgaaacaaacttatggtattgataaacacaatgcagtacgct

SEQ ID NO: 337494 - DNA, 589 bp, Homo sapiens
ttatgtgctaccataaaatacacaaaaaacaattataaaaagtaaaaagattatcacaagttataatacacttacagaccatacctggcaccattcacaatcagragaaatgtaaacaaatataaagatgcagtattggattataattgcatgaaattaactgtaatacgtactgtactactgcaggaatttcatagccactccttgtgctattacagtgggttcaagtatcacgagcatctgcttaaaacactgtgcgatgctaatcacttggagaagtgagcagttcatctgtctagtaaatcgctatctcagtaaaacatgatatcacaattctctcatatttctggccatgcttagtgtaaaaccataaccttgaatagcaccatgggacccaaattaccactagtgatgctggaagtactcccaagaagcagagaagagtcatgacattacaagacaaagtagagttgtttgatacgtaccgtagatggaagtccacagctgcagttgcctgccacttcagacaattcatcttataaacaaacgaaacaaacttatggtattgataaacacaatgcagtacgct

SEQ ID NO: 337495 - DNA, 589 bp, Homo sapiens
ttatgtgctaccataaaatacacaaaaaacaattataaaaagtaaaaagattatcacaagttataatacacttacagaccatacctggcaccattcacaatcagaagaaatgtaaacaaatataaagatgcagtattggrttataattgcatgaaattaactgtaatacgtactgtactactgcaggaatttcatagccactccttgtgctattacagtgggttcaagtatcacgagcatctgcttaaaacactgtgcgatgctaatcacttggagaagtgagcagttcatctgtctagtaaatcgctatctcagtaaaacatgatatcacaattctctcatatttctggccatgcttagtgtaaaaccataaccttgaatagcaccatgggacccaaattaccactagtgatgctggaagtactcccaagaagcagagaagagtcatgacattacaagacaaagtagagttgtttgatacgtaccgtagatggaagtccacagctgcagttgcctgccacttcagacaattcatcttataaacaaacgaaacaaacttatggtattgataaacacaatgcagtacgct

SEQ ID NO: 337496 - DNA, 624 bp, Homo sapiens
aactgagcaggctactccagtcttaaatctctttattggactcttacagcttcagataaaagcttggtttctttgatacagcttaccccgagtcttcttgatatgcacscacatccgattgatcactatttcactgccaagactccctaagcctcaaccattttgagcttcttttagtttcctgggagtatcatactttttccccctggaatttgaagacattttctctgcagttttgcctggttaatttctacttttcgtcaagcggtctctgggaaactttcctaatctcccatgtttgcattagatacaacagtttgatgttatatcttctttttctgcccttataacggtacttatcagtctgaatatcaactacctgttcaggtagtttattctctattgatcagtaagtttcttaaacatactagtgggtagaatggtggcacctaagaagatatgctcatgtgctactccctgaaacctgtgagtattatcttatttggaaaaatggttatcgcaaatgtaattaatttgaagatcttaaaatgcagaggtcattctagattatctgccctaaattttgggccctaaattcaatcacaaatcttcttacaaaagaca

SEQ ID NO: 337497 - DNA, 624 bp, Homo sapiens
aactgagcaggctactccagtcttaaatctctttattggactcttacagcttcagataaaagcttggtttctttgatacagcttaccccgagtcttcttgatatgcacgcacatccgattgatcactatttcactgccaagactccctaagcctcaaccattttgagcttcttttagtttcctgggagtatcatactttttccccctggaatttgaagacattttctctgcagttttgcctggttaatttctacttttcgtcaagcggtctctgggaaactttcctaatctcccatgtttgcattagatacaacagtttgatgttatatcttctttttctgcccttataayggtacttatcagtctgaatatcaactacctgttcaggtagtttattctctattgatcagtaagtttcttaaacatactagtgggtagaatggtggcacctaagaagatatgctcatgtgctactccctgaaacctgtgagtattatcttatttggaaaaatggttatcgcaaatgtaattaatttgaagatcttaaaatgcagaggtcattctagattatctgccctaaattttgggccctaaattcaatcacaaatcttcttacaaaagaca

SEQ ID NO: 337498 - DNA, 624 bp, Homo sapiens
aactgagcaggctactccagtcttaaatctctttattggactcttacagcttcagataaaagcttggtttctttgatacagcttaccccgagtcttcttgatatgcacgcacatccgattgatcactatttcactgccaagactccctaagcctcaaccattttgagcttcttttagtttcctgggagtatcatactttttccccctggaatttgaagacattttctctgcagttttgcctggttaatttctacttttcgtcaagcggtctctgggaaactttcctaatctcccatgtttgcattagatacaacagtttgatgttatatcttctttttctgcccttataacggtacttatcagtctgaatatcaactacctgttcaggtagtttattctctattgatcagtaagtttcttaaacatactagtgggtagaatggtggcacctaagaagatatgctcatgtgctactccctgaaacctgtgagtattatcttatttggaaaaatggttatygcaaatgtaattaatttgaagatcttaaaatgcagaggtcattctagattatctgccctaaattttgggccctaaattcaatcacaaatcttcttacaaaagaca

SEQ ID NO: 337499 - DNA, 481 bp, Homo sapiens
cctcttggccaagggaaccccagaaaaaccttaaaaactgagtgcctagccataataagaaaggaagtcagacacgcctcattataccctctttgttttggagtttagacacaactaaccagcatttacattaaaacagagatcataagactaacatagcctactctttgtcgtaatgaaatgctaaattataaacagggtttaaggccatgctggcaagggtaaagtcacacacctgcacttaacaaaatgaactaggttctagttaccacaaggttttcctttttatttagcagttaaacaagcactggcttcgagataagcaatattaaaacaatttacagtcccaccagatgctgattaactgcgctccakcccctgttccacaagccataacaacagctttgattgaataagagactgatttcagtaactttctcctcctaagatcgctgaccatggactggttctggccagttta

SEQ ID NO: 337500 - DNA, 508 bp, Homo sapiens
gaatttaaaactgatagagagaatgaaatgtaaaaaaggaagaaaaatataaaatacatcaagaaaaaagaaacagagaagtaacctagaaaaagcaggacacatggaaagtataaaattaagttatagaaacrtatccaagtgtatcagtctatttaataaatgtaccaggaataaacacactatttgaaggaacagattgtcatattagacttaaaaacattccaggtgtgtgttgtatatgacagatacaattaaacatgagaaatagaaaggttgaaagaaaaaggaagaaaagaagttgctaaaaaaataacagaagaaagaattattttctaaatattaatatttggcaaatagacattggggcaaaaagtattactagagaggataaaattgactccataataatataactttaaacaagctagaaatatgtaagtattataatgcttataaatattgtaatgtttgtatgttatgcaatgtacatgataaaatgttttca

SEQ ID NO: 337501 - DNA, 655 bp, Homo sapiens
acacattcaatttttaaaaactggaattaagtaagaaatctgcggaaaaaattgctagaaaatatttaaaacacttttgaattactacrgaatcaagaaattacgctaaattatacacttctactaatagtatagaactttaataacatatcaaaacttgagggataaagctatagcaataatttagaagctagtttgtaacctgaactcttacagaaataagtagcacattattgagcaatgtatcccagagttacatgcccaataaactagtaaaatattttaaaaatgaaagtttggaaagaaataatgagtataaagtcagcaattaatgaaatagaatacaaagtgtaatagagtaacaaaaaaaccattctttgaaataaagtaactaatttaaagagtttgcaaaattgatcaagtaaaagtattggaatggagataaactagtgcagatggtgcagggatattaatggagataaatatatttgaaaacacatatgtcaataaatttaaaggcaattgaccaggctttatttatggaagtatatcactgattaaaacggagtcaaaaagagattgaaaatagaaacggccccataagcataaagtacatggaattgtgaatccaaaattttcctaaagcactgttttg

SEQ ID NO: 337502 - DNA, 532 bp, Homo sapiens
gtttcatgtgaggagtatttaagaacaagggataggccaggcgcggtggytcatgcctgtaatcccagactttgggatgctgaggcaggcagatcacgaggtcaggagttcgagaccagcctgaccaacatggtgaaaccccaccactgctaaaaatacaaaaattaacctggcgtggtggtgtgcacccataatcccagctactcaggaggctgaggcaggaaaatcgcttgaacctgggaggcagagggtgcagagagccgagatcacactattgcactccagcctgggtgacagagcgagactctgatcccaacccccaccccaccccgtacaataaaaaaatataacatgggagggcgattgcgaaggtggaacatcatacaagtctgacccagagttcactgactgacagaggacactggcaagacaggaaggtggataaacaaagcagttcttatcatctgaggctttctctaccacaagaaaagtgtggacttcaagttaaaaacaatgagtgctgtggtgggtc

SEQ ID NO: 337503 - DNA, 532 bp, Homo sapiens
gtttcatgtgaggagtatttaagaacaagggataggccaggcgcggtggctcatgcctgtaatcccagactttgggatgctgaggcaggcagatcaygaggtcaggagttcgagaccagcctgaccaacatggtgaaaccccaccactgctaaaaatacaaaaattaacctggcgtggtggtgtgcacccataatcccagctactcaggaggctgaggcaggaaaatcgcttgaacctgggaggcagagggtgcagagagccgagatcacactattgcactccagcctgggtgacagagcgagactctgatcccaacccccaccccaccccgtacaataaaaaaatataacatgggagggcgattgcgaaggtggaacatcatacaagtctgacccagagttcactgactgacagaggacactggcaagacaggaaggtggataaacaaagcagttcttatcatctgaggctttctctaccacaagaaaagtgtggacttcaagttaaaaacaatgagtgctgtggtgggtc

SEQ ID NO: 337504 - DNA, 536 bp, Homo sapiens
ggaagtttcatgtgaggagtatttaagaacaagggataggccaggcgcggtggctcatgcctgtaatcccagactttgggatgctgaggcaggcagatcacgaggtcaggagttcgagaccagcctgaccaacatggtgaaaccccaccactrctaaaaatacaaaaattaacctggcgtggtggtgtgcacccataatcccagctactcaggaggctgaggcaggaaaatcgcttgaacctgggaggcagagggtgcagagagccgagatcacactattgcactccagcctgggtgacagagcgagactctgatcccaacccccaccccaccccgtacaataaaaaaatataacatgggagggcgattgcgaaggtggaacatcatacaagtctgacccagagttcactgactgacagaggacactggcaagacaggaaggtggataaacaaagcagttcttatcatctgaggctttctctaccacaagaaaagtgtggacttcaagttaaaaacaatgagtgctgtggtgggtc

SEQ ID NO: 337505 - DNA, 536 bp, Homo sapiens
ggaagtttcatgtgaggagtatttaagaacaagggataggccaggcgcggtggctcatgcctgtaatcccagactttgggatgctgaggcaggcagatcacgaggtcaggagttcgagaccagcctgaccaacatggtgaaaccccaccactgctaaaaatacaaaaattaacctggcgtggtggtgtgcacccataatcccagctactcaggaggctgaggcaggaaaatcgcttgaacctgggaggcagagggtgcagagagccgagatcacactattgcactccagcctgggtgacagagcgagactctgatcccaacccccaccccaccccgtacaataaaaaaatataacatgggagggcgattgcgaaggtggaacatcatacaagtctgacccagagttcactgactgasagaggacactggcaagacaggaaggtggataaacaaagcagttcttatcatctgaggctttctctaccacaagaaaagtgtggacttcaagttaaaaacaatgagtgctgtggtgggtc

SEQ ID NO: 337506 - DNA, 412 bp, Homo sapiens
tagttatatgtggctagcatttttgttaatgtcagccacttgtttgattttaaatcagtccctctcttaatacggtaatttgagctcatggtaaaataagaatatttctgtttttcaataagtataattttaaatttatagaaagacctgggtgctgtcaaaaattttagtttaagccataaaataaacagattttaatkaaatgttttgttagctttcatatagacaaatgagttttagtttattttctattgttgtctttactactttacaaacataaatattgaaattactcaagtatctataaatgagaaatagttataagccaattaattgttattaactgattcaacaaatattaactttaggcactatgctagatagatatatagtttattagggatttatttag

SEQ ID NO: 337507 - DNA, 578 bp, Homo sapiens
aagtatctataaatgagaaatagttataagccaattaattgttattaactgattcaacaaatattaactttaggcactatgctagatagatatatagtttattagggatttatttagactattttatttcacataaaattctgcaaaacaatttgtgttgtatatttacttaactaagacagttaacaaacgattatgattggagataaaatgcaagaattattttaattattttactaattttttttctcttgttataatattggttcaggttaactagtagcagtcacacgaattataaacatcagatttactatgtcatctctctataacctatgattccagagccagttttcactaatagttactcaagattagayagcatttagaaaattcagttaatattcttttagtcataaaatttggaaacacattaaagattatttatagactatagttttttctcttttcaatgtaggggttttcaaatgttataaacaccacgggactttttaaaatttacattcctggactacaggttaaagtttttggcttcattaacttacaagaatctactt

SEQ ID NO: 337508 - DNA, 409 bp, Homo sapiens
tagagagtgaagtcattgtgaaactagaacagatgttttcttctaagaccaaaagtctaaaacattttctttcagaccactggaggcacatatctagggtaaccaaggcagccaccttcagggtggttggagccagcgttcttggagtctgkttcttcaatccttttgtcatgtttcattctcacacctggctatgcagccttgaagaatcttgaggaaagaatggacttaattaagcattttaaaattatttgtatgttgttgtactaatttctgcatacatgtttagggaaacaggtagattgaaaaaaagagagtttgaagaaatcattgtctcaatgttagtcctgtttaaaaaaaattccagtgatttctgtagtgtcatactggagcaaatttcaaagtcttt

SEQ ID NO: 337509 - DNA, 599 bp, Homo sapiens
ttacttattgacaaggtggctgtatggtttcctgacatctcctttcagtattatagtcgtcagtctttttcataagattatataaactataataaatatctgattacccatctatcatctttctagctaagacatctataatatatatatatgtgtgtgtgtatatatatatacatatatatatattcacagtttatagactatttcagaaacttttaattacctctctaaagtagtaagatatttgcatgggaaaaaaatctcagacatctctgccaggagaaacattcaaactattaaaagcacagactctaaatttgccttttggataataaccattgctgcttctctctttgctttatttcacttgactacctccattctccttgggactgtcccctcaatctctcagggcatcagccttctcctgacttgtatcttaccaaccagggtcccacatccagccatttasatcaatgctgacctcaccagtatccattatccgtcttaaaaatataagatattttagttaaatatttagtcttaccatttaatctagtataattttatttaaatttctacaattgtgtgtaactata

SEQ ID NO: 337510 - DNA, 510 bp, Homo sapiens
tatagcctgacatgatgacattctactttcatgtcggtcatgctgcagggaraattctgtgagtgtcctaataggctggaatcacttgctaaggtgaaccccatctttggtgctcacttttctgttatcttataattagctttattctaagcaaatccatgtctattttatttatctgtttattaacttatttttatgtatggaaaaacacatttttttatttgcttatttatttagagactgggtctccctctgtcatccaggctggaatacagtggtagagtggtgtgatcatggctcattgcagcctcaaactcttgagctcaaatgattctctcacctcagcctcctgtgccaccatgccctgctagttgattttaatttgttataaagaaagtgtctcattatgctgcccaggctggtctcaaactcctgggcccaagcaattctctcatctcagcctcccaaagcactaggattaaaaacatgagccactgtactgtgctgtgc

SEQ ID NO: 337511 - DNA, 510 bp, Homo sapiens
tatagcctgacatgatgacattctactttcatgtcggtcatgctgcagggaaaattctgtgagtgtcctaataggctggaatcacttgctaaggtgaaccccatctttggtgctcacttttctgttatcttataattagctttattctaagcaaatccatgtctattttatttatctgtttattaacttatttttatgtatggaaaaacacatttttttatttgcttatttatttagagacwgggtctccctctgtcatccaggctggaatacagtggtagagtggtgtgatcatggctcattgcagcctcaaactcttgagctcaaatgattctctcacctcagcctcctgtgccaccatgccctgctagttgattttaatttgttataaagaaagtgtctcattatgctgcccaggctggtctcaaactcctgggcccaagcaattctctcatctcagcctcccaaagcactaggattaaaaacatgagccactgtactgtgctgtgc

SEQ ID NO: 337512 - DNA, 510 bp, Homo sapiens
tatagcctgacatgatgacattctactttcatgtcggtcatgctgcagggaaaattctgtgagtgtcctaataggctggaatcacttgctaaggtgaaccccatctttggtgctcacttttctgttatcttataattagctttattctaagcaaatccatgtctattttatttatctgtttattaacttatttttatgtatggaaaaacacatttttttatttgcttatttatttagagactgggtctccctctgtcatccaggctggaatacagtggtagaktggtgtgatcatggctcattgcagcctcaaactcttgagctcaaatgattctctcacctcagcctcctgtgccaccatgccctgctagttgattttaatttgttataaagaaagtgtctcattatgctgcccaggctggtctcaaactcctgggcccaagcaattctctcatctcagcctcccaaagcactaggattaaaaacatgagccactgtactgtgctgtgc

SEQ ID NO: 337513 - DNA, 510 bp, Homo sapiens
tatagcctgacatgatgacattctactttcatgtcggtcatgctgcagggaaaattctgtgagtgtcctaataggctggaatcacttgctaaggtgaaccccatctttggtgctcacttttctgttatcttataattagctttattctaagcaaatccatgtctattttatttatctgtttattaacttatttttatgtatggaaaaacacatttttttatttgcttatttatttagagactgggtctccctctgtcatccaggctggaatacagtggtagagtggwgtgatcatggctcattgcagcctcaaactcttgagctcaaatgattctctcacctcagcctcctgtgccaccatgccctgctagttgattttaatttgttataaagaaagtgtctcattatgctgcccaggctggtctcaaactcctgggcccaagcaattctctcatctcagcctcccaaagcactaggattaaaaacatgagccactgtactgtgctgtgc

SEQ ID NO: 337514 - DNA, 524 bp, Homo sapiens
cttcaagccaaatgtttgagtccagtacaggcaatatggtgaaattctgtcactacaaaaaaataaaataaatatggctgggcatgttggctcacacctgtaatcccagcactttgggagtctgaggcaggtggataatgaggtcaggggttcgagaccagmctggccaaaatggtaaaacccattctctactaaaaataataataacaaaaaattagccagacatggtggtgtgcgcctgtaatcccagctactcaaaaggctgagacaggagaattgcttgaacctgggaggtggaggttgcattgagacaagatcatgccactacactccagcctagcccacagagcaagacactgtcttgaaaaaaaataaaaacaaaaataaataaagctagccagtcatggtggttcatgcctatagtcctaggtaattaagcggttgatgcaggaggactgctcaaacccaagaggttaaggttaccgtgagctatgattatgccattgcacttcaggctaagtaaa

SEQ ID NO: 337515 - DNA, 524 bp, Homo sapiens
cttcaagccaaatgtttgagtccagtacaggcaatatggtgaaattctgtcactacaaaaaaataaaataaatatggctgggcatgttggctcacacctgtaatcccagcactttgggagtctgaggcaggtggataatgaggtcaggggttcgagaccagactggccaaaatggtaaaacccattctctactaaaaataataataacaaaaaattagccagacatggtggtgtgcgcctgtaatcccagctactcaaaaggctgagacaggagaattgcttgaacctgggaggtggaggttgcattgagacaagatcatgscactacactccagcctagcccacagagcaagacactgtcttgaaaaaaaataaaaacaaaaataaataaagctagccagtcatggtggttcatgcctatagtcctaggtaattaagcggttgatgcaggaggactgctcaaacccaagaggttaaggttaccgtgagctatgattatgccattgcacttcaggctaagtaaa

SEQ ID NO: 337516 - DNA, 524 bp, Homo sapiens
cttcaagccaaatgtttgagtccagtacaggcaatatggtgaaattctgtcactacaaaaaaataaaataaatatggctgggcatgttggctcacacctgtaatcccagcactttgggagtctgaggcaggtggataatgaggtcaggggttcgagaccagactggccaaaatggtaaaacccattctctactaaaaataataataacaaaaaattagccagacatggtggtgtgcgcctgtaatcccagctactcaaaaggctgagacaggagaattgcttgaacctgggaggtggaggttgcattgagacaagatcatgccactacactccagcctagcccacagagcaagacactgtcttgaaaaaaaataaaaacaaaaataaataaagctagccagtcatggtggttcatgcctatagtcctaggtaattaagcggttgatgcaggaggactgctcaaacccaagaggttaaggttaccgtgagctatgattatgccrttgcacttcaggctaagtaaa

SEQ ID NO: 337517 - DNA, 490 bp, Homo sapiens
ctgagttatttctatgttcatgcaggaagacgagattatgatcaggtggcacagaaayctgggatggtgaaaaaaccaggttgcccctgcagattcggtgtctgaggtagaacatatgccaggggtcttgtaggcacgtgtgtgggtttttggtgggaaagtctatgaggataggtagcatgggcaacaatcttgatgccgaagccctgtgctgggaggggcttgaccacatcatatgttcagtgggtgaaaaacatgtggtggcctcaggttggcaggagggtagaaggcatctgttctcagaacttcttccctcagagtcgtcggtccttcttaccatgggaggatgcctggaaccacagggcagtgcatggcgtagcagcctgtgtgcagagcagagtctaccttccccgagacacctggagtctctctccagcaaaggcccccacattgtctttctccttacaacacttttgatcctaaatgtgta

SEQ ID NO: 337518 - DNA, 490 bp, Homo sapiens
ctgagttatttctatgttcatgcaggaagacgagattatgatcaggtggcacagaaatctgggatggtgaaaaaaccaggttgcccctgcagattcggtgtctgaggtagaacatatgccaggggtcttgtaggcacgtgtgtgggtttttggtgggaaagtctatgaggataggtagcatgggcmacaatcttgatgccgaagccctgtgctgggaggggcttgaccacatcatatgttcagtgggtgaaaaacatgtggtggcctcaggttggcaggagggtagaaggcatctgttctcagaacttcttccctcagagtcgtcggtccttcttaccatgggaggatgcctggaaccacagggcagtgcatggcgtagcagcctgtgtgcagagcagagtctaccttccccgagacacctggagtctctctccagcaaaggcccccacattgtctttctccttacaacacttttgatcctaaatgtgta

SEQ ID NO: 337519 - DNA, 490 bp, Homo sapiens
ctgagttatttctatgttcatgcaggaagacgagattatgatcaggtggcacagaaatctgggatggtgaaaaaaccaggttgcccctgcagattcggtgtctgaggtagaacatatgccaggggtcttgtaggcacgtgtgtgggtttttggtgggaaagtctatgaggataggtagcatgggcaacaatcttkatgccgaagccctgtgctgggaggggcttgaccacatcatatgttcagtgggtgaaaaacatgtggtggcctcaggttggcaggagggtagaaggcatctgttctcagaacttcttccctcagagtcgtcggtccttcttaccatgggaggatgcctggaaccacagggcagtgcatggcgtagcagcctgtgtgcagagcagagtctaccttccccgagacacctggagtctctctccagcaaaggcccccacattgtctttctccttacaacacttttgatcctaaatgtgta

SEQ ID NO: 337520 - DNA, 490 bp, Homo sapiens
ctgagttatttctatgttcatgcaggaagacgagattatgatcaggtggcacagaaatctgggatggtgaaaaaaccaggttgcccctgcagattcggtgtctgaggtagaacatatgccaggggtcttgtaggcacgtgtgtgggtttttggtgggaaagtctatgaggataggtagcatgggcaacaatcttgatgccgaagccctgtgctgggaggggcttgaccacatcatatgttcagtgggtgaaaaacatgtggtggcctcaggttggcaggagggtagaaggcatctgttctcagaacttcttccctcagagtcgtcggtccttcttaccatgggaggatgcctggaaccacagggcagtgcatggygtagcagcctgtgtgcagagcagagtctaccttccccgagacacctggagtctctctccagcaaaggcccccacattgtctttctccttacaacacttttgatcctaaatgtgta

SEQ ID NO: 337521 - DNA, 585 bp, Homo sapiens
agagactatccctatctatacacctggtaacattcccaacagtaagccgtgagattctgcttgaaatcacctctcagacaaataaaaaacagtcctgggaaatgtacracactcattctgctaaagaaataggcaagtaacaatttttaacaagtgaaatatattactacttaattttattcaaaattcaccaacttaatgtgctttataaatattttcatacctttcaagctctactgataaaacataatttacagttaattaaaaagtgaagttaaagtaagtacaaaaacattttcaaggtgacaaaattagaaggtgacagtgccgattgaaacacagacatatcagacccaagggtcaagtcaagccattctattacttgggatattttccccactcacatctggttcagtgaagtgggtcatgaccatcctaccaggagccgctaccctgtgctcctctgtgtccctgaggtgcattttactttgcaggtttttgcactgcctcactaggttgggtttctttgtcctttgaaatattttctctcccttcaccaatctgagaacattttttcctcaatat

SEQ ID NO: 337522 - DNA, 585 bp, Homo sapiens
agagactatccctatctatacacctggtaacattcccaacagtaagccgtgagattctgcttgaaatcacctctcagacaaataaaaaacagtcctgggaaatgtacaacactcattctgctaaagaaataggcaagtaacaatttttaacaagtgaaatatattactacttaattttattcaaaattcaccaacttaatgtgctttataaatattttcatrcctttcaagctctactgataaaacataatttacagttaattaaaaagtgaagttaaagtaagtacaaaaacattttcaaggtgacaaaattagaaggtgacagtgccgattgaaacacagacatatcagacccaagggtcaagtcaagccattctattacttgggatattttccccactcacatctggttcagtgaagtgggtcatgaccatcctaccaggagccgctaccctgtgctcctctgtgtccctgaggtgcattttactttgcaggtttttgcactgcctcactaggttgggtttctttgtcctttgaaatattttctctcccttcaccaatctgagaacattttttcctcaatat

SEQ ID NO: 337523 - DNA, 585 bp, Homo sapiens
agagactatccctatctatacacctggtaacattcccaacagtaagccgtgagattctgcttgaaatcacctctcagacaaataaaaaacagtcctgggaaatgtacaacactcattctgctaaagaaataggcaagtaacaatttttaacaagtgaaatatattactacttaattttattcaaaattcaccaacttaatgtgctttataaatattttcatacctttcaagctctactgataaaacatartttacagttaattaaaaagtgaagttaaagtaagtacaaaaacattttcaaggtgacaaaattagaaggtgacagtgccgattgaaacacagacatatcagacccaagggtcaagtcaagccattctattacttgggatattttccccactcacatctggttcagtgaagtgggtcatgaccatcctaccaggagccgctaccctgtgctcctctgtgtccctgaggtgcattttactttgcaggtttttgcactgcctcactaggttgggtttctttgtcctttgaaatattttctctcccttcaccaatctgagaacattttttcctcaatat

SEQ ID NO: 337524 - DNA, 574 bp, Homo sapiens
acacaagggatgctatttactagacacttcaagagtcatggccactgttggcatcttggggaatcctcaaacagttttgaaattcaaaaccaagaaaataacaggatggctgaggawgtattgccctgtgaagtttccaaaatgaaacctgaacccaaaggctttctgatggggtgtctgtgccaagagaagtttaaacaaaggggcacaaaggttttccgctttttatttattttttttacagtggggtgtcaggggattattctctgctttcatctcctgtaaaatgtttacaaatgagaaaaaatttttttaaatgacatccactgctttttgacaaaaagaagaattgaaatactgtgtctgaaatgtacaataaagaacagttgataatgttgtgaactatggaaggttagttagtgttggtgagtgtcaggaaagaactggaaatttaaaatctgattgcaagccagagttaggctggggcaacagggagttagatttgagtctctgcctgccacacatttggaaaatgcatgagaaaactagttcccttttggagtgttaaaataac

SEQ ID NO: 337525 - DNA, 574 bp, Homo sapiens
acacaagggatgctatttactagacacttcaagagtcatggccactgttggcatcttggggaatcctcaaacagttttgaaattcaaaaccaagaaaataacaggatggctgaggaagtattgccctgtgaagtttccaaaatgaaacctgaacccaaaggctttctgatggggtgtctgtgccaagagaagtttaaacaaaggggcacaaaggttttccgctttttatttattttttttacagtggggtgtcaggggattattctctgctttcatctcctgtaaaatgtttacaaatgagaaaaaatttttttaaatgacatccactgctttttgacaaaaagaagaattgaaatactgtgtctgaaatgtacaataaagaacagttgataatgttgtgaaytatggaaggttagttagtgttggtgagtgtcaggaaagaactggaaatttaaaatctgattgcaagccagagttaggctggggcaacagggagttagatttgagtctctgcctgccacacatttggaaaatgcatgagaaaactagttcccttttggagtgttaaaataac

SEQ ID NO: 337526 - DNA, 594 bp, Homo sapiens
tcacaggggattccagaacacgcctactgttgtctgaatgtttctccctcacatagctttccagaacactgctatgagtgtctgaatgtttgtctctcacacaaaattccagaacactcttacgagggtctgaatgattgtccctgacttgggattccacaataatgctgttgyggtctgaatgcttgtccctcacataggattcccgaacacagctgctgaggtctacatgtgtgtctgtcatagaggattccagaacactgcttctgggttcagagtgtttctgcctcacacagaattccacaaaactgcgacgaggttctgaatgtttgtccctcacatgggattccagaataactctactaaggtctgaatgtttgtgcctctcataggattccacaacactgctgctggtttctaaatgtttgtccattacctaggattgcagaacactctcgctgttgtatgaatgtttgtctctcacataggattccagaacattggtgctgagttctgaatgtttgtctctcacataagattccagaacattggtgctgagttctgaatgtttgtctctcacataagattccagac

SEQ ID NO: 337527 - DNA, 524 bp, Homo sapiens
tccagaacactcctgctgttgtctgaatgcttttccctcacacaggttcccagaacactcctgttgggttgtgagtgtttgtccctctcctaagattccagaaaactgctacgaggttctgaatatttgcccctcacataggamtccaggacactgctgctgtgttgtaaatgtttgtttctcacataggatttcagaagactcctgctgttgtcttaaagtttgtcccacacataggattccaaaacagtcccgctgttgtttgaatgtttgtcccttacataggattccaaaacaatgctgctggcgtctgaatgtttgtccctcacgtaggattcaagaacaccgttacgaatgtctgaatgtttgttcctcacataggatttcagaacaatacagctgtgatctgactgtttgtccctcaaatagggttccagaacactgctgctgggttctgagtgtttgtccctcacatcggattcctgaacaccgctgcgagtgtctgaatgattgctcctcacata

SEQ ID NO: 337528 - DNA, 524 bp, Homo sapiens
tccagaacactcctgctgttgtctgaatgcttttccctcacacaggttcccagaacactcctgttgggttgtgagtgtttgtccctctcctaagattccagaaaactgctacgaggttctgaatatttgcccctcacataggactccaggacactgctgctgtgttgtaaatgtttgtttctcacataggatttcagaagactcctgctgttgtcttaaagtttgtcccacacataggattccaaaacagtcccgctgttgtttgaatgtttgtcccttacataggattccaaaacaatkctgctggcgtctgaatgtttgtccctcacgtaggattcaagaacaccgttacgaatgtctgaatgtttgttcctcacataggatttcagaacaatacagctgtgatctgactgtttgtccctcaaatagggttccagaacactgctgctgggttctgagtgtttgtccctcacatcggattcctgaacaccgctgcgagtgtctgaatgattgctcctcacata

SEQ ID NO: 337529 - DNA, 347 bp, Homo sapiens
tttccatcacataatattccagaaaactgctacgagcgtctggaagttwgtgcctcacataggaccaaagaactctgctgctagaatgcgaatgtttgttgctaacatacaattccagaacactcctgctgtgtctgaatgtttgtctttcacaaaagattccagaacactcctaccggggtcttaatttttgtccctcacataggattcaacaacactgttgctggggtctcaaagtttgtccctcaggtaggattccagaacactgctactggggtctaaaagtttgtctgtcacataggatgccagaaaactgctgttagtttctgagtgtttctccgtcacat

SEQ ID NO: 337530 - DNA, 543 bp, Homo sapiens
gcatattgtgtaaactatggtagagaaattgtcaccacagggctcgccacactggtgagattatacttctcagatgcacaccacaccaatattcaggatggtctctatcacacgtggagagagcccactcttgaggtcctgaattacacatgcagacatagtccacaactgggattctgactttcatatgtgaacatccagccacaggtgggatggtgactcatttttaaacgcagctcataggcagttaagaactcttatttggacccatccaagtagaaagatgttgactgtcataccasggcttaaagctaaaggtacaaggaggagtccgtgcctgcttaaggtttcagagagaattgttacactcatgcatactctataaaggcttcatatggtgaagagagtgtcctgctagggcccagaacaaatgtgagattgtgatactcatatgtacactgagccaagagcaaaaattgtcatcttttcacatgaacacagcccaatgttaaggttccgaatctcacacctgttgatctacct

SEQ ID NO: 337531 - DNA, 543 bp, Homo sapiens
gcatattgtgtaaactatggtagagaaattgtcaccacagggctcgccacactggtgagattatacttctcagatgcacaccacaccaatattcaggatggtctctatcacacgtggagagagcccactcttgaggtcctgaattacacatgcagacatagtccacaactgggattctgactttcatatgtgaacatccagccacaggtgggatggtgactcatttttaaacgcagctcataggcagttaagaactcttatttggacccatccaagtagaaagatgttgactgtcataccacggcttaaagctaaaggtacaaggaggrgtccgtgcctgcttaaggtttcagagagaattgttacactcatgcatactctataaaggcttcatatggtgaagagagtgtcctgctagggcccagaacaaatgtgagattgtgatactcatatgtacactgagccaagagcaaaaattgtcatcttttcacatgaacacagcccaatgttaaggttccgaatctcacacctgttgatctacct

SEQ ID NO: 337532 - DNA, 567 bp, Homo sapiens
aagaactcttatttggacccatccaagtagaaagatgttgactgtcataccacggcttaaagctaaaggtacaaggaggagtccgtgcctgcttaaggtttcagagagaattgttacactcatgcatactctataaaggcttcatatggtgaagagagtgtcctgctagggcccagaacaaakgtgagattgtgatactcatatgtacactgagccaagagcaaaaattgtcatcttttcacatgaacacagcccaatgttaaggttccgaatctcacacctgttgatctacctgctgatggaatagtctgtcaagagaaagcagagatgcatgagcatcaatctggaaaacagcaataatggtagtgtgcaccaggattcagatatcttcctagtattgttttctccaaacctctttattcgtaattcaccatttgtttcattgccattcgggcaactaggtagtaagaccattttctgctaagcaagagtaggtatacaagtaacaaatccctctggcctcctcctgaatagttcagagaacagattctagttcagccagctggc

SEQ ID NO: 337533 - DNA, 432 bp, Homo sapiens
atcatatggtgactttaggtgtacattttttagttattatactgttattttatagcagctgcarcattttacatttccaacaacagtgtacaagggttctaattgctccacgtcctcaccaacacttgtgattttctgttttgtttcttttggtagtaactatgctgatgtgtattaagtgatatatcatttggagttatatttgcattttactaatgattagttttgttgagcaccttttcatggacttattagccatttcacataatttttaaagaaatgtctgtttaagtattttgcccatattttaaacaagtagtttgttttattattgctgaattgttctttgtatattctggatagagtcatctttatttttctttcgtttcttgcgttttttgtgtcctgttaaaaaaaatcactgccaaatcc

SEQ ID NO: 337534 - DNA, 432 bp, Homo sapiens
atcatatggtgactttaggtgtacattttttagttattatactgttattttatagcagctgcagcattttacatttccaacaacagtgtacaagggttctaattgctccacgtcctcaccaacacttgtgattttctgttttgtttcttttggtagtaactatgctgatgtgtattaagtgatatatcatttggagttatatttgcattttactaatgattagttttgttgagcaccttttcatggacttattagccatttcacataatttttaaagaaatgtctgtttaagtattttgcccatattttaaacaagtaktttgttttattattgctgaattgttctttgtatattctggatagagtcatctttatttttctttcgtttcttgcgttttttgtgtcctgttaaaaaaaatcactgccaaatcc

SEQ ID NO: 337535 - DNA, 432 bp, Homo sapiens
atcatatggtgactttaggtgtacattttttagttattatactgttattttatagcagctgcagcattttacatttccaacaacagtgtacaagggttctaattgctccacgtcctcaccaacacttgtgattttctgttttgtttcttttggtagtaactatgctgatgtgtattaagtgatatatcatttggagttatatttgcattttactaatgattagttttgttgagcaccttttcatggacttattagccatttcacataatttttaaagaaatgtctgtttaagtattttgcccatattttaaacaagtagtttgttttattattgctgaattgttctttgtatattctggatagagtcatctttatttttctttygtttcttgcgttttttgtgtcctgttaaaaaaaatcactgccaaatcc

SEQ ID NO: 337536 - DNA, 436 bp, Homo sapiens
caaactttggtatttttttttcaaaattatttttgcaatttagggtcccttgagattcctcataaacttaaaaattgattttttaatatctacacaaaataactggcattttgcttcttggttacttcctaagtattttattcttttgatgctattgtaaattgagttgttttcataattttcttctcagattattcgtattactacataaaatacagtttatttttctatgttgatttkgtatgctactactctgctgaatttattaattttaatattttttgtgtggaatctttaagattttctacataaaagaatatattttctgtacacactttgatgaagtttatttcattgtcttttttaatttctctgaatgaaacttctaatacagtgttgaataaaagtggttggcaagagcagacattctgtcttc

SEQ ID NO: 337537 - DNA, 436 bp, Homo sapiens
caaactttggtatttttttttcaaaattatttttgcaatttagggtcccttgagattcctcataaacttaaaaattgattttttaatatctacacaaaataactggcattttgcttcttggttacttcctaagtattttattcttttgatgctattgtaaattgagttgttttcataattttcttctcagattattcgtattactacataaaatacagtttatttttctatgttgatttggtatgctactactctgctgaatttattaattttaatattttttgtgtggaatctttaagattttctacataaaagaatatattttctgtacacactttgatgaagtttatttcattgtcttttttaatttctctgaatgaaacttctaatacagtgttgaataaaagtggytggcaagagcagacattctgtcttc

SEQ ID NO: 337538 - DNA, 489 bp, Homo sapiens
taaaatacagtttatttttctatgttgatttggtatgctactactctgctgaatttattaattttaatattttttgtgtggaatctttaagattttctacataaaagaatatattttctgtacacactttgatgaagtttatttcattgtcttttttaatttctctgaatgaaacttctaatacagtgttgaataaaagtggttggcaagagcagacattctgtcttctgagcttagacgaaataattttggtcttttcctctagaacatgtagtttgctgtgggtttttatacgtgaattttacaaagatggttttcttttattcgtaatttattgtgtttttattataaaatattttgaattttgtaaaatacattttctgtattaatgagataatgttttctaaaaatwttcttaatgtgtcatatgcattgattatttttcatatgctaaaacttttgttaagaaaggctagctaagtgaaccag

SEQ ID NO: 337539 - DNA, 489 bp, Homo sapiens
taaaatacagtttatttttctatgttgatttggtatgctactactctgctgaatttattaattttaatattttttgtgtggaatctttaagattttctacataaaagaatatattttctgtacacactttgatgaagtttatttcattgtcttttttaatttctctgaatgaaacttctaatacagtgttgaataaaagtggttggcaagagcagacattctgtcttctgagcttagacgaaataattttggtcttttcctctagaacatgtagtttgctgtgggtttttatacgtgaattttacaaagatggttttcttttattcgtaatttattgtgtttttattataaaatattttgaattttgtaaaatacattttctgtattaatgagataatgttttctaaaaatattsttaatgtgtcatatgcattgattatttttcatatgctaaaacttttgttaagaaaggctagctaagtgaaccag

SEQ ID NO: 337540 - DNA, 581 bp, Homo sapiens
ccgtgttcataagggatattagtctatgggtttttgtagtctctttgtctggctttggtatgagctaatgctggcatcatggaataagtttggaactgctctcttcaggcttttggtagattttggaaaggatttttgttctataaatgcttgatctamatcaccagtgaagtcaacaaaacaagggcttttcttcatgagaggtttttaattactgattccatttccttagtagttttgtatctattcagattttgtatttctttgtaatcaagtcttgcataagtaggaatctgcccactttatctaggttttccaatttatcatcctatcatagttcacagtacacttttttaaacattttatttctttgaattagtagtaatgtcccactttcattactcattttagtatgtgaatatgctgttaatttttcgtgtgtgtagctgaaggtttgccaattgttaattttttgaagaactgagagtgaacttttggttttttggaattctgttgtgtgtgtaatctctattgcatttatctctgctaaaatcttcaatactttcttctttctctttgct

SEQ ID NO: 337541 - DNA, 581 bp, Homo sapiens
ccgtgttcataagggatattagtctatgggtttttgtagtctctttgtctggctttggtatgagctaatgctggcatcatggaataagtttggaactgctctcttcaggcttttggtagattttggaaaggatttttgttctataaatgcttgatctaaatcaccagtgaagycaacaaaacaagggcttttcttcatgagaggtttttaattactgattccatttccttagtagttttgtatctattcagattttgtatttctttgtaatcaagtcttgcataagtaggaatctgcccactttatctaggttttccaatttatcatcctatcatagttcacagtacacttttttaaacattttatttctttgaattagtagtaatgtcccactttcattactcattttagtatgtgaatatgctgttaatttttcgtgtgtgtagctgaaggtttgccaattgttaattttttgaagaactgagagtgaacttttggttttttggaattctgttgtgtgtgtaatctctattgcatttatctctgctaaaatcttcaatactttcttctttctctttgct

SEQ ID NO: 337542 - DNA, 581 bp, Homo sapiens
ccgtgttcataagggatattagtctatgggtttttgtagtctctttgtctggctttggtatgagctaatgctggcatcatggaataagtttggaactgctctcttcaggcttttggtagattttggaaaggatttttgttctataaatgcttgatctaaatcaccagtgaagtcaacaaaacaagggcttttcttcatgagaggtttttaattactgattccatttccttagtagttttstatctattcagattttgtatttctttgtaatcaagtcttgcataagtaggaatctgcccactttatctaggttttccaatttatcatcctatcatagttcacagtacacttttttaaacattttatttctttgaattagtagtaatgtcccactttcattactcattttagtatgtgaatatgctgttaatttttcgtgtgtgtagctgaaggtttgccaattgttaattttttgaagaactgagagtgaacttttggttttttggaattctgttgtgtgtgtaatctctattgcatttatctctgctaaaatcttcaatactttcttctttctctttgct

SEQ ID NO: 337543 - DNA, 581 bp, Homo sapiens
ccgtgttcataagggatattagtctatgggtttttgtagtctctttgtctggctttggtatgagctaatgctggcatcatggaataagtttggaactgctctcttcaggcttttggtagattttggaaaggatttttgttctataaatgcttgatctaaatcaccagtgaagtcaacaaaacaagggcttttcttcatgagaggtttttaattactgattccatttccttagtagttttgtatctattcagattttgtatttctttgtaatcaagtcttgcataagtaggaatctgcccactttatctaggttttccaatttatcatcctatcatagttcacagtacacttttttaaacattttatttctttgaattagtagtaatgtcccactttcattactcattttagtatgtgaatatgctgttaatttttcgtgtgtgtagctgaagktttgccaattgttaattttttgaagaactgagagtgaacttttggttttttggaattctgttgtgtgtgtaatctctattgcatttatctctgctaaaatcttcaatactttcttctttctctttgct

SEQ ID NO: 337544 - DNA, 426 bp, Homo sapiens
tgaacttttggttttttggaattctgttgtgtgtgtaatctctattgcatttatctctgctaaaatcttcaatactttcttctttctctttgctttgcatctaatttggtcttatttttctaatttactaggtgataaagttattatttatttgaaatctttgttctttttaaatgtatcttagatgcaaacttttcatcttaacactgtttttgctgtttcccataacttttgatatgttgtgttttcatttttcttcctctgtatgttcctacttcttctgtgatttcttcctttacttaatttayacaattttgtaattctttaagttgtaattgtgtagttgtttaatttgtacaattttgtaaactttctagcatttcatctgttattgatttaatttgagatctactatacagcccatcc

SEQ ID NO: 337545 - DNA, 578 bp, Homo sapiens
agttgtaattgtgtagttgtttaatttgtacaattttgtaaactttctagcatttcatctgttattgatttaatttgagatctactatacagcccatcctggagaattccccatgtgcatttgagaagagtgtgtactctgttttgttggatggagtatatkgtatatatctgttagatcaatttagttcattgagttagtcaagtcctctatttcctaatttatcattcatctcatttttctattcattactcagagtggagtattaacatcttcaactattattttagaactgtctatttgtccctttaattctgtcaacttagtctttctatatctaaatgttttattattaggtatgtaagtgtttaaactatttctatcttcttgccaaatgcacattctatgattatataatgtcttattgtctcttgtaactttttaagtctattttgtctgctattaatatagtcatccccagtctctttttcctactattggtataaaataattattttcttcccttttttataaccctgaattgctgtggaaagctaacagtagcattacttaattta

SEQ ID NO: 337546 - DNA, 578 bp, Homo sapiens
agttgtaattgtgtagttgtttaatttgtacaattttgtaaactttctagcatttcatctgttattgatttaatttgagatctactatacagcccatcctggagaattccccatgtgcatttgagaagagtgtgtactctgttttgttggatggagtatatggtatatatctgttagatcaatttagttcattgagttagtcaagtcctctatttcctaatttrtcattcatctcatttttctattcattactcagagtggagtattaacatcttcaactattattttagaactgtctatttgtccctttaattctgtcaacttagtctttctatatctaaatgttttattattaggtatgtaagtgtttaaactatttctatcttcttgccaaatgcacattctatgattatataatgtcttattgtctcttgtaactttttaagtctattttgtctgctattaatatagtcatccccagtctctttttcctactattggtataaaataattattttcttcccttttttataaccctgaattgctgtggaaagctaacagtagcattacttaattta

SEQ ID NO: 337547 - DNA, 578 bp, Homo sapiens
agttgtaattgtgtagttgtttaatttgtacaattttgtaaactttctagcatttcatctgttattgatttaatttgagatctactatacagcccatcctggagaattccccatgtgcatttgagaagagtgtgtactctgttttgttggatggagtatatggtatatatctgttagatcaatttagttcattgagttagtcaagtcctctatttcctaatttatcattcatctcatttttctattcattactcagagtggagtattaacatcttcaactattattttagaactgtctatttgtccctttaattctgtcaacttagtctttctatatctaaatgttttattattaggtatgtaagtgtttaaactatttctatcttcttgccaaatgcacrttctatgattatataatgtcttattgtctcttgtaactttttaagtctattttgtctgctattaatatagtcatccccagtctctttttcctactattggtataaaataattattttcttcccttttttataaccctgaattgctgtggaaagctaacagtagcattacttaattta

SEQ ID NO: 337548 - DNA, 563 bp, Homo sapiens
cacacaacctgttccaggacttggtgaccattgtttgagtccagattcaattgagttcaaatttaatatttaaattttactccacaaagtgtcaaaagtaattccttcaaatgcagraaattatgtaactactcacaaactaaacttctcaaccaaaagtcataaattgagtataggaattaaaaaaaaaaaagaaagaaaatctaactacatctgtctaaagggactcaatttatttatttatttattttagagacttggtattgctttgtttcccaggctggtctcaaactcctggtttcacgtgatcctcccacctcaatctcctaaaatgctaggatgacagatatgagccatcttactctatagtaacaaaaacagactaaatgtggcaagatgcatccaaaaaattatgcaaatcataaccaaatgaggacagactatgtcacaattatagtatgcaaaatgctttttaaataactgtcttagtttataaaatatattatgaaatcaaattgtcagaaaaacaaaggacaaaataataaaagggtttattcactgga

SEQ ID NO: 337549 - DNA, 586 bp, Homo sapiens
gattcttttaaagaaactatacaggtgtggtagtgtgcccaactgtggtcatatttactcaggagacataggaggcatgactgctttacttcagaaatttgaggttacagtgagctgtgattgcaccactgcaatctgtcccaggagatagagtaagatcctgtgtataaaatgaaaaaataaagaaaaataaaatgattttaagttaaaaaataattcatagatctccacttctttagggtcacttgaatatatatttttctcgtttcattaggctatatttcctggttgcttttatgtactgtggttttgttaaggttttgrtcaattaagaaaccactacctattttatcctttatgaaaaagctttgtacatgggaaaattgacaatattcagccacactagtcattccaggagcttctccaatctgttgtcaaaatgtgtcttctttggactactgtatgtattttcttgttaataaggtttacctctctttcctcttaggagcctttagtctcttctctttgtcactgttgcaggcactacagtctctttgttgtaagaaacatttatctttattctcag

SEQ ID NO: 337550 - DNA, 635 bp, Homo sapiens
ttgctcacccaattgcagttaagttcatacatccattgagagaaacaggatctcaggttcttcttcaactatcattgtgttctcagctggcctcattttgttcattagatttataaaatatatttaccttaatttcatcaccgaattttttaaaaaattattattttccagctcttttagcattatatccaacaagacccagasaaaacagtacataggagcttcttttcaaaaagtaatattgggaagatatgggagctctggctttgaaaatttacacttaaggagagtgggaaattgaaggataagtgtaaagggtacaaaggatgctatgatgaatataccagatatagagcaactacctacagcaaaaatgtcactgctagaagagctcaaaaccataaagtattttggaaaaagcataattaatgttgattcttttttctgaactatatatttgtataattacatatcaataacaatttttgaaacatcatgtttttgaaacaaaatttagaaaatcgcaatagtggcctaggccaggaatatatcttctaatgctatccctcccatagtcccccacttcctgacaggctccagtgtgtggtgttccccttcctgtgtccctgtgttct

SEQ ID NO: 337551 - DNA, 635 bp, Homo sapiens
ttgctcacccaattgcagttaagttcatacatccattgagagaaacaggatctcaggttcttcttcaactatcattgtgttctcagctggcctcattttgttcattagatttataaaatatatttaccttaatttcatcaccgaattttttaaaaaattattattttccagctcttttagcattatatccaacaagacccagagaaaacagtacataggagcttcttttcaaaaagtaatattgggaagatatgggagctctggcyttgaaaatttacacttaaggagagtgggaaattgaaggataagtgtaaagggtacaaaggatgctatgatgaatataccagatatagagcaactacctacagcaaaaatgtcactgctagaagagctcaaaaccataaagtattttggaaaaagcataattaatgttgattcttttttctgaactatatatttgtataattacatatcaataacaatttttgaaacatcatgtttttgaaacaaaatttagaaaatcgcaatagtggcctaggccaggaatatatcttctaatgctatccctcccatagtcccccacttcctgacaggctccagtgtgtggtgttccccttcctgtgtccctgtgttct

SEQ ID NO: 337552 - DNA, 526 bp, Homo sapiens
ggtccacagcctagccttttcctccagtaatgcgcactgtccctgagctgggtgcatgctgggattgtagtcctgcagcccggtgatgaaaggtctgggagtgtttatgagactacatctcctaccaagcccaggaggtgcacacaaccctgcctctttctccagtgacgccaactttccctgagcccggtgcatgctaggattgtagcgctgcagccctgtgacaaaagggctgtgagtgtttatgagactgcatcttccaccaagcccagagaggcgtgcagagcctcgcyccttcctccactgattagcgcatgctccctcagtcccatgcatgctaggattgtagtgctgcagccctgtgaccaaagggcagcccagtgaccaaagggctgcgagtgtgtgagaatacatctccgaaaaagcatagcgagaagagcacaggtccacttcttcgtccactgaggcgcgctctccttgagcacggtgcatgctgggattgtagtcctgaagccctgtgacaaaa

SEQ ID NO: 337553 - DNA, 526 bp, Homo sapiens
ggtccacagcctagccttttcctccagtaatgcgcactgtccctgagctgggtgcatgctgggattgtagtcctgcagcccggtgatgaaaggtctgggagtgtttatgagactacatctcctaccaagcccaggaggtgcacacaaccctgcctctttctccagtgacgccaactttccctgagcccggtgcatgctaggattgtagcgctgcagccctgtgacaaaagggctgtgagtgtttatgagactgcatcttccaccaagcccagagaggcgtgcagagcctcgctccttcctccactgattagcgcatgctccctcagtcccatgcatgctaggattgtagtgctgcagccctgtgaccaaagggcagcccagtgaccaaagggctrcgagtgtgtgagaatacatctccgaaaaagcatagcgagaagagcacaggtccacttcttcgtccactgaggcgcgctctccttgagcacggtgcatgctgggattgtagtcctgaagccctgtgacaaaa

SEQ ID NO: 337554 - DNA, 526 bp, Homo sapiens
ggtccacagcctagccttttcctccagtaatgcgcactgtccctgagctgggtgcatgctgggattgtagtcctgcagcccggtgatgaaaggtctgggagtgtttatgagactacatctcctaccaagcccaggaggtgcacacaaccctgcctctttctccagtgacgccaactttccctgagcccggtgcatgctaggattgtagcgctgcagccctgtgacaaaagggctgtgagtgtttatgagactgcatcttccaccaagcccagagaggcgtgcagagcctcgctccttcctccactgattagcgcatgctccctcagtcccatgcatgctaggattgtagtgctgcagccctgtgaccaaagggcagcccagtgaccaaagggctgmgagtgtgtgagaatacatctccgaaaaagcatagcgagaagagcacaggtccacttcttcgtccactgaggcgcgctctccttgagcacggtgcatgctgggattgtagtcctgaagccctgtgacaaaa

SEQ ID NO: 337555 - DNA, 609 bp, Homo sapiens
tccctgagcccggtgcatgctaggattgtagcgctgcagccctgtgacaaaagggctgtgagtgtttatgagactgcatcttccaccaagcccagagaggcgtgcagagcctcgctccttcctccactgattagcgcatgctccctcagtcccatgcatgctaggattgtagtgctgcagccctgtgaccaaagggcagcccagtgaccaaagggctgcgagtgtgtgagaatacatctccgaaaaagcatagcgagaagagcacaggtccacttcttcgtccactgaggcgcgctctccytgagcacggtgcatgctgggattgtagtcctgaagccctgtgacaaaagggctgggagaaataatgagacaacatctcccagaaagcccagcgagacgcatgtacccctttctcttcctccattgaggcgaactgtcccggtaccccgtgcatgctggaattgtagtcctacagctatgtgatgaaagggctgggattggttatcagaatgcatctcccagcaagcccagcgaggcacgcacagctccacgtcttcctccagggacacacacacacacacacacacacacacacacacacacacagag

SEQ ID NO: 337556 - DNA, 423 bp, Homo sapiens
tggttatcagaatgcatctcccagcaagcccagcgaggcacgcacagctccacgtcttcctccagggacacacacacacacacacacacacacacacacacacacacagagtccctgaactcgctgcatgctgggattgtagtcctgcagccctgtgaccaaagggccaagagtgtttatgagatacatctcccagaaaacgtagggagasgcacacagccccacatcttttcccagtgacgcatactgtttttgatcctgatacatactgggattgtagtcctgcagccctatgacaaaaggtctgagaggctttatgaaactacatttcccaggaagcgcagcgaggtgcgcacaaccttcccatcgttatccagtgaaggggaatgtccgtgagccccaagcatgctgggattgtagtct

SEQ ID NO: 337557 - DNA, 582 bp, Homo sapiens
gctctacctcttcttctagcgacgcgcactgtccctgattccgttgtatgctgggattgtggtgctgcagccctgtgacaaaggggctgggagtctttataagactacatctcccagcaagcccaagaggctctcacagccatgcaccaccccctcccgccccacttttccttcagtgacgcgcactgttccctgaacatggtgcatactggaattctcctgttgcgggattcaggaggacgagacagacctcaggttgaaacaggagaatctttattgagtgcactcaggaccagctgactcacgtcaaaaagaccgggcccggaacasagacaacacctgacttttatacacacttcacaaaagggggtgggctagcttgaagcgagcttacagtggcgtgaaagcaggaatacagaggcaggacaaagacaggattgcacatgaccgttgccaagcaacccacatgtccattatctaggtttccctgggcatgggcttatcctataaccctcactatggttcccaaacagctgtagttcagcctactcaggcttctcatgactttcattgtacttcttc

SEQ ID NO: 337558 - DNA, 582 bp, Homo sapiens
gctctacctcttcttctagcgacgcgcactgtccctgattccgttgtatgctgggattgtggtgctgcagccctgtgacaaaggggctgggagtctttataagactacatctcccagcaagcccaagaggctctcacagccatgcaccaccccctcccgccccacttttccttcagtgacgcgcactgttccctgaacatggtgcatactggaattctcctgttgcgggattcaggaggacgagacagacctcaggttgaaacaggagaatctttattgagtgcactcaggaccagctgactcacgtcaaaaagaccgggcccggaacagagacaacacctgacttttatacacacttcacaaaaggkggtgggctagcttgaagcgagcttacagtggcgtgaaagcaggaatacagaggcaggacaaagacaggattgcacatgaccgttgccaagcaacccacatgtccattatctaggtttccctgggcatgggcttatcctataaccctcactatggttcccaaacagctgtagttcagcctactcaggcttctcatgactttcattgtacttcttc

SEQ ID NO: 337559 - DNA, 600 bp, Homo sapiens
  misc_feature (1)...(600): n = A,T,C or G
gaacaatctactctacttcattattactggaagccagaacctcagttgtgttcactttctggattttatataagtgaaattgtacaacatgtatacttttactctactttcttctatgcaactttatatttatgatattaattcatcctattgcagatagctatagtttgtttaaaaaatattttttatattgtggcaaagtatacataaaattaaccattttagctattttaagtgtgcagctcagaaaaattaactacactcacattgttttgcaactattattcycattcatagggaccttctttcaacttccaaaaccaaaatttaatgcacattaaataacagctccctgttactccccctccagctcctaggaaccactcttctacttggatttctagaatttaactactctaagtatctcataagtggaatgatacagtatttgtccttttatgactggctcatgtcactttgcacaatgtccttaaggttcatgcataacgtaccatgtgtcagaatttttttattttacataactgaataacgttccaatgtatgtataaatcacattttatctatttattaaatgannnn

SEQ ID NO: 337560 - DNA, 600 bp, Homo sapiens
  misc_feature (1)...(600): n = A,T,C or G
gaacaatctactctacttcattattactggaagccagaacctcagttgtgttcactttctggattttatataagtgaaattgtacaacatgtatacttttactctactttcttctatgcaactttatatttatgatattaattcatcctattgcagatagctatagtttgtttaaaaaatattttttatattgtggcaaagtatacataaaattaaccattttagctattttaagtgtgcagctcagaaaaattaactacactcacattgttttgcaactattattcccattcatagggaccttctttcaacttccaaaaccaaaatttaatgcacattaaataacagctccctgttactccccctccagctcctaggaaccactcttctacttggatttctagaatttaactactctaagtatctcataagtggaatgatacagtatttgtccttttatgactggctyatgtcactttgcacaatgtccttaaggttcatgcataacgtaccatgtgtcagaatttttttattttacataactgaataacgttccaatgtatgtataaatcacattttatctatttattaaatgannnn

SEQ ID NO: 337561 - DNA, 600 bp, Homo sapiens
  misc_feature (1)...(600): n = A,T,C or G
gaacaatctactctacttcattattactggaagccagaacctcagttgtgttcactttctggattttatataagtgaaattgtacaacatgtatacttttactctactttcttctatgcaactttatatttatgatattaattcatcctattgcagatagctatagtttgtttaaaaaatattttttatattgtggcaaagtatacataaaattaaccattttagctattttaagtgtgcagctcagaaaaattaactacactcacattgttttgcaactattattcccattcatagggaccttctttcaacttccaaaaccaaaatttaatgcacattaaataacagctccctgttactccccctccagctcctaggaaccactcttctacttggatttctagaatttaactactctaagtatctcataagtggaatgatacagtatttgtccttttatgactggctcatgtcactttgcacaatgtccttaaggttcatgcataacgtaccatgtgtcagaattttyttattttacataactgaataacgttccaatgtatgtataaatcacattttatctatttattaaatgannnn

SEQ ID NO: 337562 - DNA, 600 bp, Homo sapiens
  misc_feature (1)...(600): n = A,T,C or G
gaacaatctactctacttcattattactggaagccagaacctcagttgtgttcactttctggattttatataagtgaaattgtacaacatgtatacttttactctactttcttctatgcaactttatatttatgatattaattcatcctattgcagatagctatagtttgtttaaaaaatattttttatattgtggcaaagtatacataaaattaaccattttagctattttaagtgtgcagctcagaaaaattaactacactcacattgttttgcaactattattcccattcatagggaccttctttcaacttccaaaaccaaaatttaatgcacattaaataacagctccctgttactccccctccagctcctaggaaccactcttctacttggatttctagaatttaactactctaagtatctcataagtggaatgatacagtatttgtccttttatgactggctcatgtcactttgcacaatgtccttaaggttcatgcataacgtaccatgtgtcagaatttttttattttacataactgaataacgttccaatrtatgtataaatcacattttatctatttattaaatgannnn

SEQ ID NO: 337563 - DNA, 541 bp, Homo sapiens
ttccagaacaatgctaccagggtctgaatgtttttcccacacttaggattccagaacacctcagctgtgttctgaatgattgtccctcccataggattccagaacactgctgctgggttctgagtgtttctccctcacatacgattccagaacactgctaygagggtctgaatgattgtagttcacataggattccagaacactcctgctctgttctgaatgtttgtcactcagataggattccagaaaaaaggtgctgggttctgaatgtttgtccctcacataggatttcagaacactcttgctgtggtctgaatgtttgtccctcacataggattgcagaacactactgctgtggtctgaatggttgaccctcacataggattccagaacatccctgctctggtctgggtgtttcccccttaaataggattccagaacactgctgctgggttctgagagtttgtccaacacacaggatcccagaactctcttgctgtgttctgaatatttgtcactcatataggattccagaaccctg

SEQ ID NO: 337564 - DNA, 541 bp, Homo sapiens
ttccagaacaatgctaccagggtctgaatgtttttcccacacttaggattccagaacacctcagctgtgttctgaatgattgtccctcccataggattccagaacactgctgctgggttctgagtgtttctccctcacatacgattccagaacactgctacgagggtctgaatgattgtagttcacataggattccagaacactcctgctctgttctgaatgtttgtcactcagataggattccagaaaaaaggtgctgggttctgaatgtttgtccctcacataggatttcagaacactcttgctgtggtctgaatgtttgtccctcacataggattrcagaacactactgctgtggtctgaatggttgaccctcacataggattccagaacatccctgctctggtctgggtgtttcccccttaaataggattccagaacactgctgctgggttctgagagtttgtccaacacacaggatcccagaactctcttgctgtgttctgaatatttgtcactcatataggattccagaaccctg

SEQ ID NO: 337565 - DNA, 574 bp, Homo sapiens
atgtgtggcgcaaacccccacaccacagcaggagtgttctggaatcctatgtgaggacaatcattcagaccacagctgggatgttctggaatcctacgtgtggggcaagcatgcaaaccctcatagcattgttctggaatcctatgtgaggaaaatacattcagaacaccgctggagtgttctggactccyttgtgtgggacaaacattcagaccattcatagcagtgttcagaaatcctatgtgagggacaaactttcagactctcgtagcagtgttctggaatcttatgtgagggaaaaacattaagaccctcttagaagtgtcctggaatcctatgtgagggaaaaacactcaaaacccagcagcagtgttgtggaatcccatatgagggacaaacattcagaccggggcaggagtgttctggaatcctatgtgaggtataatcattcagaccgtcaaggcagtgttctggaatcctatgtgaaggagaaacagtcagaacccagcagcagtgttctggaatcctatatgagggacaaacatcagaccctcatatcagtgttctggaatcc

SEQ ID NO: 337566 - DNA, 452 bp, Homo sapiens
tggggtttgaatctgagcattgcaggtgttataattcggcatcataaattgcaaaccagtaaattagggaaaggcttgtcagccagacatctgccccccagccagcagtgggggtcatctcggcagggctggagatgtgcagcgctggtgagagataggatggtgtatggcacatgcctatgacctcctagagcttcagttaatggggtctcgmggggctgtgctggacaccttggtggttccacttgtcccattgtgatgcccatggcctcctggactttagtacatgttctgacgttgcaagattccgtcagcaccatgggagccgcttcctctactgtcattgaaacacccctgggatgtatatttaaaaattgaaacagcttttggctagatgaaccaaaaaaaaaaaaaagaaaagaaaaaacttatcttcttttgtaatactattt

SEQ ID NO: 337567 - DNA, 452 bp, Homo sapiens
tggggtttgaatctgagcattgcaggtgttataattcggcatcataaattgcaaaccagtaaattagggaaaggcttgtcagccagacatctgccccccagccagcagtgggggtcatctcggcagggctggagatgtgcagcgctggtgagagataggatggtgtatggcacatgcctatgacctcctagagcttcagttaatggggtctcgaggggctgtgctggacaccttggtggttccacttgtcccattgtgatgcccatggcctcctggactttagtacatrttctgacgttgcaagattccgtcagcaccatgggagccgcttcctctactgtcattgaaacacccctgggatgtatatttaaaaattgaaacagcttttggctagatgaaccaaaaaaaaaaaaaagaaaagaaaaaacttatcttcttttgtaatactattt

SEQ ID NO: 337568 - DNA, 452 bp, Homo sapiens
tggggtttgaatctgagcattgcaggtgttataattcggcatcataaattgcaaaccagtaaattagggaaaggcttgtcagccagacatctgccccccagccagcagtgggggtcatctcggcagggctggagatgtgcagcgctggtgagagataggatggtgtatggcacatgcctatgacctcctagagcttcagttaatggggtctcgaggggctgtgctggacaccttggtggttccacttgtcccattgtgatgcccatggcctcctggactttagtacatgttctgacgttgcaagattccgtcrgcaccatgggagccgcttcctctactgtcattgaaacacccctgggatgtatatttaaaaattgaaacagcttttggctagatgaaccaaaaaaaaaaaaaagaaaagaaaaaacttatcttcttttgtaatactattt

SEQ ID NO: 337569 - DNA, 452 bp, Homo sapiens
tggggtttgaatctgagcattgcaggtgttataattcggcatcataaattgcaaaccagtaaattagggaaaggcttgtcagccagacatctgccccccagccagcagtgggggtcatctcggcagggctggagatgtgcagcgctggtgagagataggatggtgtatggcacatgcctatgacctcctagagcttcagttaatggggtctcgaggggctgtgctggacaccttggtggttccacttgtcccattgtgatgcccatggcctcctggactttagtacatgttctgacgttgcaagattccgtcagcaccrtgggagccgcttcctctactgtcattgaaacacccctgggatgtatatttaaaaattgaaacagcttttggctagatgaaccaaaaaaaaaaaaaagaaaagaaaaaacttatcttcttttgtaatactattt

SEQ ID NO: 337570 - DNA, 622 bp, Homo sapiens
tttctgttctagaaagcatgtacattttgatttcacctgtcctcaaacttaactttcgcttattttaatagcaaaaaatataggccctagccaggcaaggtggctcatacctgtactcccagcactttgggaggctgaggaagatggatcacttcaaaccagaagcttgagactagactggccaacatagtgaaatcccgtctcaactaaaaatacaaaaattagcagggtatggtggtgcatgcctgtaatcccagatactctggaggcagaggcatgagcatggcttgaactcaggaggtggaggttgcagtgagcagagatcacaccactgcactccagcytgggcaacacggggagactctgtctcaaacaaacaaacaaacaaacaaagaaacagaaatacactcctgggtggagatctaagatgctaacgagacatgcaacatatgaacaagcatgtatagtcactgcgtatgtgcacccagaatatcactcataacatgcttataagcaactcctcttccccttttcttattaataataatgtaaaactcccgtaagggggtttctccagcgacaatccacgctgtctcactcttatgagcagtctgccctggag

SEQ ID NO: 337571 - DNA, 622 bp, Homo sapiens
tttctgttctagaaagcatgtacattttgatttcacctgtcctcaaacttaactttcgcttattttaatagcaaaaaatataggccctagccaggcaaggtggctcatacctgtactcccagcactttgggaggctgaggaagatggatcacttcaaaccagaagcttgagactagactggccaacatagtgaaatcccgtctcaactaaaaatacaaaaattagcagggtatggtggtgcatgcctgtaatcccagatactctggaggcagaggcatgagcatggcttgaactcaggaggtggaggttgcagtgagcagagatcacaccactgcactccagcttgggcaacayggggagactctgtctcaaacaaacaaacaaacaaacaaagaaacagaaatacactcctgggtggagatctaagatgctaacgagacatgcaacatatgaacaagcatgtatagtcactgcgtatgtgcacccagaatatcactcataacatgcttataagcaactcctcttccccttttcttattaataataatgtaaaactcccgtaagggggtttctccagcgacaatccacgctgtctcactcttatgagcagtctgccctggag

SEQ ID NO: 337572 - DNA, 622 bp, Homo sapiens
tttctgttctagaaagcatgtacattttgatttcacctgtcctcaaacttaactttcgcttattttaatagcaaaaaatataggccctagccaggcaaggtggctcatacctgtactcccagcactttgggaggctgaggaagatggatcacttcaaaccagaagcttgagactagactggccaacatagtgaaatcccgtctcaactaaaaatacaaaaattagcagggtatggtggtgcatgcctgtaatcccagatactctggaggcagaggcatgagcatggcttgaactcaggaggtggaggttgcagtgagcagagatcacaccactgcactccagcttgggcaacacggggagactctgtctcaaacaaacaaacaaacaaacaaagaaacagaaatacactcctgggtggagatctaagatgctaacgagacatgcaacatatgaacaagcatgtatagtcactgcgtatgtgcacccagaatatcactcakaacatgcttataagcaactcctcttccccttttcttattaataataatgtaaaactcccgtaagggggtttctccagcgacaatccacgctgtctcactcttatgagcagtctgccctggag

SEQ ID NO: 337573 - DNA, 622 bp, Homo sapiens
tttctgttctagaaagcatgtacattttgatttcacctgtcctcaaacttaactttcgcttattttaatagcaaaaaatataggccctagccaggcaaggtggctcatacctgtactcccagcactttgggaggctgaggaagatggatcacttcaaaccagaagcttgagactagactggccaacatagtgaaatcccgtctcaactaaaaatacaaaaattagcagggtatggtggtgcatgcctgtaatcccagatactctggaggcagaggcatgagcatggcttgaactcaggaggtggaggttgcagtgagcagagatcacaccactgcactccagcttgggcaacacggggagactctgtctcaaacaaacaaacaaacaaacaaagaaacagaaatacactcctgggtggagatctaagatgctaacgagacatgcaacatatgaacaagcatgtatagtcactgcgtatgtgcacccagaatatcactcataacatgcttataagcaactcctcttccccttttcttattaataataatgyaaaactcccgtaagggggtttctccagcgacaatccacgctgtctcactcttatgagcagtctgccctggag

SEQ ID NO: 337574 - DNA, 569 bp, Homo sapiens
aaactcacacccagaggcagtcaaaagttggaaaattggctctaataagtggatgttgtccttaagtgggtttgtgactccctgaccaagatccaaaacacttgtgaggctgtgagtccactaagataactcagttttcaaaagggattaaggctctcatggaaaaaacccattcctccattgagattgtgacttatgcacatagatacaacatacaggaggcgttcactctcatatccagaactggcacttatgagggattgttaatctcatccatggaccttcctgcaggtgtgattctgacgtacacctctarccagctcctgagtgatttgacttttttgcctgggtgtagcccacagatgagattgtgatatatccttgaatccagcatctaattaatatgcttctaatctcctgtcttggcactgcccataaagggtatcctgacctaacactggtcctggcactttgttatatgactgtgtcctgtgctttgcccacatgagccattgtgacatattgctgggtccaacacccaggtgatgtaactcttgtctagactttac

SEQ ID NO: 337575 - DNA, 603 bp, Homo sapiens
tgttcacatggggacctctccatgtcaatttcaagatgacaggactggggttttgcatccagctctgagggcacctggaagtaaaatgagctatgctccacctcagcctaatgtagagaatgcctgcaggaaagcctgttttcttcctcataaatagggctgtttgaactgggtgacctcgacgatttcacatactcataagtgtcttccagccctgattcttgctctgagactgtgcaraaatgcatccactctctgtaggtccttcaaatcagagggaggcatggccacttcagaggcatcttgggtagatgaagatgagacggagctaaatgttccagagcattggactctgaggctgaagtccacggaaaatcccagctcctgttgggttcttaaggtcctcatttgaaagtggtagaaactaatttcactggataaggggaggatatctcatggataaatagcacaacccaaaaggtagaggcaaatagaaggcaaagggggattccaaggtcactcattgtacttggggccttcagattctgctactttatcccctaggaccttgaagaaccagtgtcttgaggacagaaaaatcaa

SEQ ID NO: 337576 - DNA, 624 bp, Homo sapiens
tttcaagatgacaggactggggttttgcatccagctctgagggcacctggaagtaaaatgagctatgctccacctcagcctaatgtagagaatgcctgcaggaaagcctgttttcttcctcataaatagggctgtttgaactgggtgacctcgacgatttcacatactcataagtgtcttccagccctgattcttgctctgagactgtgcagaaatgcayccactctctgtaggtccttcaaatcagagggaggcatggccacttcagaggcatcttgggtagatgaagatgagacggagctaaatgttccagagcattggactctgaggctgaagtccacggaaaatcccagctcctgttgggttcttaaggtcctcatttgaaagtggtagaaactaatttcactggataaggggaggatatctcatggataaatagcacaacccaaaaggtagaggcaaatagaaggcaaagggggattccaaggtcactcattgtacttggggccttcagattctgctactttatcccctaggaccttgaagaaccagtgtcttgaggacagaaaaatcaagatacctgatttgttccatagtgctcctgcattgggccatagagttagt

SEQ ID NO: 337577 - DNA, 624 bp, Homo sapiens
tttcaagatgacaggactggggttttgcatccagctctgagggcacctggaagtaaaatgagctatgctccacctcagcctaatgtagagaatgcctgcaggaaagcctgttttcttcctcataaatagggctgtttgaactgggtgacctcgacgatttcacatactcataagtgtcttccagccctgattcttgctctgagactgtgcagaaatgcatccactctctgtaggtccttcaaatcagagggaggcatggcsacttcagaggcatcttgggtagatgaagatgagacggagctaaatgttccagagcattggactctgaggctgaagtccacggaaaatcccagctcctgttgggttcttaaggtcctcatttgaaagtggtagaaactaatttcactggataaggggaggatatctcatggataaatagcacaacccaaaaggtagaggcaaatagaaggcaaagggggattccaaggtcactcattgtacttggggccttcagattctgctactttatcccctaggaccttgaagaaccagtgtcttgaggacagaaaaatcaagatacctgatttgttccatagtgctcctgcattgggccatagagttagt

SEQ ID NO: 337578 - DNA, 624 bp, Homo sapiens
tttcaagatgacaggactggggttttgcatccagctctgagggcacctggaagtaaaatgagctatgctccacctcagcctaatgtagagaatgcctgcaggaaagcctgttttcttcctcataaatagggctgtttgaactgggtgacctcgacgatttcacatactcataagtgtcttccagccctgattcttgctctgagactgtgcagaaatgcatccactctctgtaggtccttcaaatcagagggaggcatggccacttcagaggcatcttgggtagatgaagatgagacggagctaaatgttccagagcattggactctgaggctgaagtccacggaaaatcccagctcctgttgggttcttaaggtcctcatttgaaagtggtagaaactaatttcactggataaggggaggatatctcatggataaatagcacaacccaaaaggtagaggcaaatagaaggcaaagggggattccaaggtcactcattgtacttggrgccttcagattctgctactttatcccctaggaccttgaagaaccagtgtcttgaggacagaaaaatcaagatacctgatttgttccatagtgctcctgcattgggccatagagttagt

SEQ ID NO: 337579 - DNA, 556 bp, Homo sapiens
ccaaatgaagtccatgaagaatcagattgcatatgttagagcccaaatttccattgtgtgtttcatactaactctccctgaatttgcatgtgacttgagaggaagcaagaagagatgacwgtatatgtctcatgactttccatattcccactttccttccagcaatcccttacagaacccacctcttaggccttttctaatcactgccttaaagccagtataagaaaacaaatttcagctggactgctatctccttgttggccaacctacaacatgatattttcctcaaaacccaagggccatattactgtcatcaggctgtaggccattttattcaataaaaaactgagtcactaaccacctagtactgtgagattttgtgaagagtttccctgtcatagacgtgagaaggcacatggatatgattctaaatataaagagaaagcactagaaagttgaatggctgtattaggtctttgtcatactgcaatgatgaagtacttgagactgggtaattgataaagaaaagaagtttaattgactcacagttccacat

SEQ ID NO: 337580 - DNA, 556 bp, Homo sapiens
ccaaatgaagtccatgaagaatcagattgcatatgttagagcccaaatttccattgtgtgtttcatactaactctccctgaatttgcatgtgacttgagaggaagcaagaagagatgactgtatatgtctcatgactttccatattccyactttccttccagcaatcccttacagaacccacctcttaggccttttctaatcactgccttaaagccagtataagaaaacaaatttcagctggactgctatctccttgttggccaacctacaacatgatattttcctcaaaacccaagggccatattactgtcatcaggctgtaggccattttattcaataaaaaactgagtcactaaccacctagtactgtgagattttgtgaagagtttccctgtcatagacgtgagaaggcacatggatatgattctaaatataaagagaaagcactagaaagttgaatggctgtattaggtctttgtcatactgcaatgatgaagtacttgagactgggtaattgataaagaaaagaagtttaattgactcacagttccacat

SEQ ID NO: 337581 - DNA, 556 bp, Homo sapiens
ccaaatgaagtccatgaagaatcagattgcatatgttagagcccaaatttccattgtgtgtttcatactaactctccctgaatttgcatgtgacttgagaggaagcaagaagagatgactgtatatgtctcatgactttccatattcccactttccttccagcaatcccttacagaacccacctcttaggccttttctaatcactgccttaaagccagtataagaaaacaaatttcagctggactgctatctccttkttggccaacctacaacatgatattttcctcaaaacccaagggccatattactgtcatcaggctgtaggccattttattcaataaaaaactgagtcactaaccacctagtactgtgagattttgtgaagagtttccctgtcatagacgtgagaaggcacatggatatgattctaaatataaagagaaagcactagaaagttgaatggctgtattaggtctttgtcatactgcaatgatgaagtacttgagactgggtaattgataaagaaaagaagtttaattgactcacagttccacat

SEQ ID NO: 337582 - DNA, 592 bp, Homo sapiens
tggctcaagtgggggagatgagccagtgacaggagggcctagtgcagccaggccaggggctcccacagtgtcagcagggtcttgtccttcggtccttctcaccctgctccccacacaagactcagtagctccaggctcctgctggctcattcaccccagtgggttgggggacagagtcttttgcccaaaacttccaggcagcgtcccagccctgatcattctcagaaggaagtcaaggggctacagacaccastagacctacagaaagggacccttgagcagaaacacataacactccagggcacctggtctcctcaccaaagactcaccactgggggcaccaaggcaggcaaggagagagccccaattcatgcaggaaggcagccagtttcctctgctggccctccagggcagtggtgtgtgcccttgacctaggccagcaagaccaggtgtccacggaacaagtggcctgaaggccctgtgctccccgctgtgtgtggcgtgaccagcagaggccagcagggctccagctcagtggatatgtctgtgctgtcatctctcagctcacagatcccagagcttctctttctgg

SEQ ID NO: 337583 - DNA, 592 bp, Homo sapiens
tggctcaagtgggggagatgagccagtgacaggagggcctagtgcagccaggccaggggctcccacagtgtcagcagggtcttgtccttcggtccttctcaccctgctccccacacaagactcagtagctccaggctcctgctggctcattcaccccagtgggttgggggacagagtcttttgcccaaaacttccaggcagcgtcccagccctgatcattctcagaaggaagtcaaggggctacagacaccactagacctacagaaagggacccttgagcagaaacacataacactccagggcacctggtctcctcaccaaagactcaccactgggggcaccaaggcaggcaaggagagagccccaattcatgcaggaaggcagccagtttcctctgctggccctccagggcagtggtgtgtgcccttgaccyaggccagcaagaccaggtgtccacggaacaagtggcctgaaggccctgtgctccccgctgtgtgtggcgtgaccagcagaggccagcagggctccagctcagtggatatgtctgtgctgtcatctctcagctcacagatcccagagcttctctttctgg

SEQ ID NO: 337584 - DNA, 596 bp, Homo sapiens
aaaatgttatccctcctccaaaattccattttcctcattagagaaaaatttactgaattattgttttgaattctgtcaattaaaaaagtgaaactacaaaacctctagaagaaaacttaggtggaaatcttcatggctttgggataactaaagatttcttaagatacaaaaaagtactctgccaccataaaattttttaaactgatattgatttctaaaaattaaaaacttaggatttccaaaagtcatcattaataaaataatatgaaaggaaagatagttgcgatacatatatctgagaaaggtcttgcatccagaatacacacaaaactttcacaactcaacagtaagaagacaaacaactcaattttttttaatgggcaaaatatttgaacygacattccatgaaaaaagatacatgaatggccaataaggacatgaaaagatgttcaacatgttcatcagtgaaattcaagtgaaaacaatgaagaattatcaccacataccgaccaggatggctaaaatttaaaagactgaaaataccaaatattggagaggatatacagcaattgatactgtcatacaatgcgtggagt

SEQ ID NO: 337585 - DNA, 629 bp, Homo sapiens
agtgaaattcaagtgaaaacaatgaagaattatcaccacataccgaccaggatggctaaaatttaaaagactgaaaataccaaatattggagaggatatacagcaattgatactgtcatacaatgcgtggagtggaaaatggtgcaaacatttcaagaaacagtttgacaatttcttaagaaattgaacacaccccctctatgagccagcaatctacccctaggtatttaaccaagkaaaatgaaagcatgtgttcataaagatacatgcacaagaattttcatatgagctttattcataatagccaaaaactggaaataatacaaatgtctgtcatcatttaaacagataaattgtggcatttttatacagaggaataattataagcaataaaaaaatgtggcatgcaacccagatgacagacattatgttgagtgacagaagccaggcacaaagagtactctagggtccatttccatgacgttctgagtcagggggcactgagctggagtggtcgatgtcccaggaatcatttctgctgccagggaggagaatagactgggaagtggcacaggtagcttcctggatgagggaggtttctttatcttgattgaggtggtggttacata

SEQ ID NO: 337586 - DNA, 629 bp, Homo sapiens
agtgaaattcaagtgaaaacaatgaagaattatcaccacataccgaccaggatggctaaaatttaaaagactgaaaataccaaatattggagaggatatacagcaattgatactgtcatacaatgcgtggagtggaaaatggtgcaaacatttcaagaaacagtttgacaatttcttaagaaattgaacacaccccctctatgagccagcaatctacccctaggtatttaaccaaggaaaatgaaagcatgtgttcataaagatacaygcacaagaattttcatatgagctttattcataatagccaaaaactggaaataatacaaatgtctgtcatcatttaaacagataaattgtggcatttttatacagaggaataattataagcaataaaaaaatgtggcatgcaacccagatgacagacattatgttgagtgacagaagccaggcacaaagagtactctagggtccatttccatgacgttctgagtcagggggcactgagctggagtggtcgatgtcccaggaatcatttctgctgccagggaggagaatagactgggaagtggcacaggtagcttcctggatgagggaggtttctttatcttgattgaggtggtggttacata

SEQ ID NO: 337587 - DNA, 629 bp, Homo sapiens
agtgaaattcaagtgaaaacaatgaagaattatcaccacataccgaccaggatggctaaaatttaaaagactgaaaataccaaatattggagaggatatacagcaattgatactgtcatacaatgcgtggagtggaaaatggtgcaaacatttcaagaaacagtttgacaatttcttaagaaattgaacacaccccctctatgagccagcaatctacccctaggtatttaaccaaggaaaatgaaagcatgtgttcataaagatacatgcacaagaattttcatatgagctttattcataatagccaaaaactggaaataatacaaatgtctgtcatcatttaaacagataaattgtggcatttttatacagaggaataattatwagcaataaaaaaatgtggcatgcaacccagatgacagacattatgttgagtgacagaagccaggcacaaagagtactctagggtccatttccatgacgttctgagtcagggggcactgagctggagtggtcgatgtcccaggaatcatttctgctgccagggaggagaatagactgggaagtggcacaggtagcttcctggatgagggaggtttctttatcttgattgaggtggtggttacata

SEQ ID NO: 337588 - DNA, 629 bp, Homo sapiens
agtgaaattcaagtgaaaacaatgaagaattatcaccacataccgaccaggatggctaaaatttaaaagactgaaaataccaaatattggagaggatatacagcaattgatactgtcatacaatgcgtggagtggaaaatggtgcaaacatttcaagaaacagtttgacaatttcttaagaaattgaacacaccccctctatgagccagcaatctacccctaggtatttaaccaaggaaaatgaaagcatgtgttcataaagatacatgcacaagaattttcatatgagctttattcataatagccaaaaactggaaataatacaaatgtctgtcatcatttaaacagataaattgtggcatttttatacagaggaataattataagcaataaaaaaatgtggcatgcaacccagatgacagacattatgttgagtgacagaagccaggcacaaagagtactctagggtccatttccatgacgttctgagtcagggggcactgagctggagtggtcgatgtcccaggaatcakttctgctgccagggaggagaatagactgggaagtggcacaggtagcttcctggatgagggaggtttctttatcttgattgaggtggtggttacata

SEQ ID NO: 337589 - DNA, 594 bp, Homo sapiens
ctggcagctgggccaaactggaaagtccaagaaggcattagtcacatgtctggtacctcagtgctcctccacatgatctccccatgggagcttcctcatagcatggtggtctcagagtcatcagactttctacatcgtggctggcttcgagagagaragctaaaattctgaaattgatatgcaaatgcacaggacctaaaatatcaaaacaaacttgaaaaagaataacaaagttggaagactcccagtatctaattttcaagactcactatagtaatccaaattagaatcattgtagcaaaaagatagacacatagatcaacaggaaaaaatagagtccagaaatagacccaaacatagtacccttaattgattttcaacaaaagtgctaatgcaatttaacggggaaaatgcattctttctctattgctgcataacacattatcacaaatttatcagaataaaacaacactgatttattatttgacatataattatatatttcacatttttctatatgtcagaagtctttgcatagtgtaagtgagttctcggcttatggtctcaaaaggctaaaaccaaactgtcagcctg

SEQ ID NO: 337590 - DNA, 584 bp, Homo sapiens
tgggttggtcatgcggtaaccaagaaggggagcaagtagttgggtgacaaaccctgtacatctgctcctaactttcgaaacctggctgatgggaggccaatgtcaccctctaacgccctcccatagcagcctcggcttgtcttctgacagtggcactgtccacccacaggcatcacgcatcctgcccgcacattgcttccgccagtggagccccagctgaaacactagacaggagagaagtccagagatcctgctcactmtagggaaggagaaagacctcttcagcttgtcctgcctcggcaaaggcaaagcctcatgcatttgctcactcctccctcccagggctcagccggcacctgaagctagtgtagcagaaagagcccaattctgcatcaggcgggcctgggttcaaatcccagatcctccactttctaattgtgccatctctgagccttccatcccttacctagaaacagagttctttccacccatgcccttgtgagacagcgtaagtgaaaatgacatccacacggtactggaagcagagctgctagaaacccagccaggcagggtttgaacttgtt

SEQ ID NO: 337591 - DNA, 463 bp, Homo sapiens
tcatttgctcccttatctgacaacattttgccagcacctgtacaagacattagcaagagataaataaaacatagctccagaaattatctaatccatctgcagtcttggtgatgttatccatgttaatctttcaggacratatgctcacttatagaggatatggagttcagttgcagatgcagaccagggctcttaaataattgctctgcaggttccaaacattttatgggttcagaatgggttacaaggctgttaatatactgagcaaaatgcttaaaacaatcatagatgttgagacacttactaattgcaaatcctttgcaagatatcgaacctcagttccagttgtcatatggaaataatggtatgaagggaattaaattagagaacacatataaagtacttaacactctatctgacatttaggaagcagtcaataagtgctgttgacaatgacaacaat

SEQ ID NO: 337592 - DNA, 463 bp, Homo sapiens
tcatttgctcccttatctgacaacattttgccagcacctgtacaagacattagcaagagataaataaaacatagctccagaaattatctaatccatctgcagtcttggtgatgttatccatgttaatctttcaggacgatatgctcacttatagaggatatggagttcagttgcagatgcagaccagggctcttaaataattgctctgcagkttccaaacattttatgggttcagaatgggttacaaggctgttaatatactgagcaaaatgcttaaaacaatcatagatgttgagacacttactaattgcaaatcctttgcaagatatcgaacctcagttccagttgtcatatggaaataatggtatgaagggaattaaattagagaacacatataaagtacttaacactctatctgacatttaggaagcagtcaataagtgctgttgacaatgacaacaat

SEQ ID NO: 337593 - DNA, 590 bp, Homo sapiens
tttattacaagaatgggattatattgtacctgctgctttacaagtggcatcttttatataacatcaaactgtctttctgtgtcattatttctctgtgccaatgatttcaatatcctttgtgttcacaacacactttcgagtcctataatttttgtggcatgtttgaagagataaaaggacacttagctactaaaaagatgacaataagtatagcaatgtctttcactctcaaaaccattgtcccactttttgctccatccccgtttggaaccatgttccaagcagtagagctgtttacggctcccctctatgcactcttayatcctcaaaaagcaaagtttagcacagtctgggctttattctgagattttatctcttcctaacagcaagatggcctctacactgcctgatgatccaatcagcttcgtgttccatttccacaagagtacgtgttctgggagggcaaatgaattttacctgttgatccaaatgtgatggcacgcttatgaagggttgatagtctacgtgttgccactattcgctgccgtcattttcaatgatgcacagctttccagtgtgtggatgcgccg

SEQ ID NO: 337594 - DNA, 548 bp, Homo sapiens
actattgacagtgaactagttttcatctggccatttgtagttcttttgtgaatagccttttcatggcttttgctcagtgtttttatattttcctattacttaataattgctctttctataccacatataaccccttgtcacgtgtatttacaaaatatgtctgtgtgataaatgaattaaccagtatacktttgttactggagtggaactttacagaagagcacaaaaagaaaaccttgttaagcctgttggaaatgtgattattccctgaatgtttatgtcctttgcacatttaggaatatcatagcaataatgaacttagtagtagggacaatcagcaactaaatgaagtagaagacagataatataattgcatgggaagaacatagaaattagatccagaaaactgggttctagacatgacctcactgctctttacctccatgatcttgattaaaccatatattctctgtgagtcttaatatcttcatctgtatagtgggtgcacttatacttatttatcttccaggtctaagatgagatcatat

SEQ ID NO: 337595 - DNA, 548 bp, Homo sapiens
actattgacagtgaactagttttcatctggccatttgtagttcttttgtgaatagccttttcatggcttttgctcagtgtttttatattttcctattacttaataattgctctttctataccacatataaccccttgtcacgtgtatttacaaaatatgtctgtgtgataaatgaattaaccagtatacgtttgttactggagtggaactttacagaagagcacaaaaagaaaaccttgttaagcctgttggaaatgtgattattccctgaatgtttatgtcctttgcacatttaggaatatcatagcaataatgaacttagtagtagggacaatcagcaactaaatgaagtagaagacagataatataattgcwtgggaagaacatagaaattagatccagaaaactgggttctagacatgacctcactgctctttacctccatgatcttgattaaaccatatattctctgtgagtcttaatatcttcatctgtatagtgggtgcacttatacttatttatcttccaggtctaagatgagatcatat

SEQ ID NO: 337596 - DNA, 592 bp, Homo sapiens
ctgctacccaaaatgcaactgctccacaagtgttttaaattactctcttaaacgatacttcttgggatctgcttcctaccagacattgtgctaggggctagctgtgaacaagaaagatacagctctcatcttcctttaactcttagttcactgcggtatatgccacatgctttcatgctgagttaatacctgcttgcaggttmgcgtctttgggtagaccctgtgatcaggctttgcctgcatctgtctgtatcacatgcagtcaggtcactgatttggaagtggtctgtttgattgatgtggattctgtgagacagtcatcttccttgttcctgattccaaacttgtgtgttaatggaaccaagtttgctgtcaagtttttggttggttttgggttttttgctagggtgatagtgtatttgcagtcagtgaaaacatctgaacctttccttctgaacagcattatagccaggttgaaaacattgtatacatttatgattgatttttttaacttgatgatatcacatttatcccatgacaaatcttgttaggatcattccatcaatctaatgaagttattttgattcttaat

SEQ ID NO: 337597 - DNA, 592 bp, Homo sapiens
ctgctacccaaaatgcaactgctccacaagtgttttaaattactctcttaaacgatacttcttgggatctgcttcctaccagacattgtgctaggggctagctgtgaacaagaaagatacagctctcatcttcctttaactcttagttcactgcggtatatgccacatgctttcatgctgagttaatacctgcttgcaggttagcgtctttgggtagaccctgtgatcaggctttgcctgcatctgtctgtatcacrtgcagtcaggtcactgatttggaagtggtctgtttgattgatgtggattctgtgagacagtcatcttccttgttcctgattccaaacttgtgtgttaatggaaccaagtttgctgtcaagtttttggttggttttgggttttttgctagggtgatagtgtatttgcagtcagtgaaaacatctgaacctttccttctgaacagcattatagccaggttgaaaacattgtatacatttatgattgatttttttaacttgatgatatcacatttatcccatgacaaatcttgttaggatcattccatcaatctaatgaagttattttgattcttaat

SEQ ID NO: 337598 - DNA, 592 bp, Homo sapiens
ctgctacccaaaatgcaactgctccacaagtgttttaaattactctcttaaacgatacttcttgggatctgcttcctaccagacattgtgctaggggctagctgtgaacaagaaagatacagctctcatcttcctttaactcttagttcactgcggtatatgccacatgctttcatgctgagttaatacctgcttgcaggttagcgtctttgggtagaccctgtgatcaggctttgcctgcatctgtctgtatcacatgcagtcaggtcactgatttggaagtggtctgtttgattgatgtggattctgtgagacagtcatcttccttgttcctgattccaaacttgtgtgttaatggaaccaagtttgctgtcaagtttttggttggttttgggttttttgctagggtgatagtgtatttgcagtcagtgaaaacatctgaacctttccttctgaacagcattatagccaggttgaaaacattstatacatttatgattgatttttttaacttgatgatatcacatttatcccatgacaaatcttgttaggatcattccatcaatctaatgaagttattttgattcttaat

SEQ ID NO: 337599 - DNA, 556 bp, Homo sapiens
cccaggctggactgcagtggcacaatcttagctcaccacaacctctacctcccaggttcaagtgattctcctgcttcagcctcccaagtagctgggactacaggcmtgcgccaccacatccggctaattttgtattttcagtagagacggggtttctccatgttggtcaggctagtctcaagctgcccacctcaggtgatccacctgcctcggcctcccaaagtgctgggattacaggcgtgagccaccatgcccagcctaaaattagttttatatttaaatgaattcagtgcccagtactaatctttttcctatggctttcctggtactgatattgaggaacagatcaaggggcttagtggagactgcctggcagaggggaggggtattttatcatttgcattgtttagaattgcctgcacatggtgatgtgaaaaacagacagacttttaatggttttgttactaatttaaaattctctataaacactgcatcctttattgcctgcatctgaagcaaaccattttcactggcccccccattggtatgcactgct

SEQ ID NO: 337600 - DNA, 556 bp, Homo sapiens
cccaggctggactgcagtggcacaatcttagctcaccacaacctctacctcccaggttcaagtgattctcctgcttcagcctcccaagtagctgggactacaggcctgcgccaccacatccggctaattttgtattttcagtagagacggggtttctccatgttggtcrggctagtctcaagctgcccacctcaggtgatccacctgcctcggcctcccaaagtgctgggattacaggcgtgagccaccatgcccagcctaaaattagttttatatttaaatgaattcagtgcccagtactaatctttttcctatggctttcctggtactgatattgaggaacagatcaaggggcttagtggagactgcctggcagaggggaggggtattttatcatttgcattgtttagaattgcctgcacatggtgatgtgaaaaacagacagacttttaatggttttgttactaatttaaaattctctataaacactgcatcctttattgcctgcatctgaagcaaaccattttcactggcccccccattggtatgcactgct

SEQ ID NO: 337601 - DNA, 554 bp, Homo sapiens
gtgccttcatagcattagagcaattacaccctgcattattaaactccgtggtayacagttcaacttgctaaataataagaattaaatacagcccaaatagtagcactttgcctcaaccgtgaaagagtggcactcaccaatgaaactctctagctaaattaccaagtgtgaggcctaaatttaggacggggcaattcaggaacagttgattactggatctaagattatagatgttcttgtgaactgttgaaactgatggaataaatataaaataatggattattacagaattaggaaaaaaacctcgcctgggctggctggaattgttctgcactgttataagaaatgattgctgaaaagcagttgcaacttgtgcctacaaaaggcagcacaaatgacatccatcttctgtaagaaatttgatatggagactgaatagaacaatatattttactatcaaatttggcccttaagatgtgatgttatgctttaggaggctggaacttctcttatgctttatttggatgaaaacagaaacaacagaaactcgcagc

SEQ ID NO: 337602 - DNA, 594 bp, Homo sapiens
attcaattatttatggggctgttatgaaatgtaatatccaagaaatcaagatgaagttacaaatgggaagggtgtggaggggaggaaaaactgttaatcttcactgatacagaaagttaatttttcaaatyagcctccagtgggaatgcaatttataggaaaataagtcctaatcttccacaatgttttgactagatcattgacgagatgagtttttgagaacaactgtgtttctacaattttctttttgctacagatggagcaatttcattgttcattcagcaaatactgagtacctacttgtgtcattctggtttttaaggatttattagcccaatatatgtttattgaatgtcccctatgtcaactgcttcaccgctttcattatggtgtatatttgtaccctggagttgggggtggggggtgggagtgccagatgattcattaggatatgacaaggaaatagactgtatattaaaatttatttactttttatctaaagaaataagattagttggaaggtcaggatgtataaagtattcccaagagaggtgataaatccacaggcttaaggtgaaggcagtgttggccaca

SEQ ID NO: 337603 - DNA, 594 bp, Homo sapiens
attcaattatttatggggctgttatgaaatgtaatatccaagaaatcaagatgaagttacaaatgggaagggtgtggaggggaggaaaaactgttaatcttcactgatacagaaagttaatttttcaaattagcctccagtgggaatgcaatttataggaaaataagtcctaatcttccacaatgttttgactagatcattgacgagatgagtttttgagaacaactgtgtttctacaattttctttttgctacagatggagcaatttcattgttcattcagcaaatactgagtacctacttgtgtcattctggtttttaaggatttattagcccaatatatgtttattgaatgtcccctatgtcaactgcttcaccgctttcattatggtgtatatttgtaccctggagttgggggtggggggtggkagtgccagatgattcattaggatatgacaaggaaatagactgtatattaaaatttatttactttttatctaaagaaataagattagttggaaggtcaggatgtataaagtattcccaagagaggtgataaatccacaggcttaaggtgaaggcagtgttggccaca

SEQ ID NO: 337604 - DNA, 615 bp, Homo sapiens
acttttacttatactggaatcataggttcatgtcatgcagcactcttaactatatgctcaacttggtcatctacaaatttcttccctgagctacttccttgtctataaagcagaaaatgtaatacctgcctcatactacaggagtaaaaattaaacaaaatgatatcagcctgtaatttagtgagcaccaaataaacrttaactaatattgattaagaaatgcaataccttacgttgagtgcagcgcaatgatgggcacaaagtagacactggatagatcacagccactcttagtgtcatggatccaggccttgcttgttttacttttatcttgatctcctggagacaactgttcctacctgaggactgtacttgtttccatgatgctatttccacaggatacattccttgaggcaggttctccagtttcccatctgtgtgcctgtactcactaatacagctcactgttgctggggttcagaatgttcactggattgaatcaacccctccgccctgccttcctttaaggccatgtattgacagtctgtttcacaacaatccttatccaatgtctcagagttcatcatggggccactctgggagggtctcccgaac

SEQ ID NO: 337605 - DNA, 615 bp, Homo sapiens
acttttacttatactggaatcataggttcatgtcatgcagcactcttaactatatgctcaacttggtcatctacaaatttcttccctgagctacttccttgtctataaagcagaaaatgtaatacctgcctcatactacaggagtaaaaattaaacaaaatgatatcagcctgtaatttagtgagcaccaaataaacattaactaatattgattaagaaatgcaataccttacgttgagtgcagcgcaatgatgggcacaaagtagacactggatagatcacagccactcttagtgtcatggatccaggccttgcttgttttacttttatcttgatctcctggagacaactgttcctacctgaggactgtacttgtttccatgatgctatttccacaggatacattccttgaggcaggttctccagtttcccatctgtgtgcctgtactcactaatacagctcactgttgctggggttcagaatgttcactggattgaatcaacccctccgccctgccttcctttaaggccatgtawtgacagtctgtttcacaacaatccttatccaatgtctcagagttcatcatggggccactctgggagggtctcccgaac

SEQ ID NO: 337606 - DNA, 572 bp, Homo sapiens
gattcatctttaattatgggcatctgacatctttatgtaggttttatgagatattagatatattttcactagacatccattgaagccatatggcagtcttgaatatgtagaacaaatgaggcataataaagcattatttatttatttattttagaatggcaagacatactgttgagggtgatttttttacaagttgaggatggaaattcaggagtttaaacagtagagaagacattctttatgtattgcttcaggatgaatggaggtgaatacaagcacagacacaatccaaaatgcaataaaggaaagtgatccagaatgagttmcccttattccaagaggaatatcaaagatgtaagataaaatagtgtattggctgtgtgtccttgttttcaccaaataaatcagttggaactagattccctctctttggatcattcagtcatttatttcaacactaatttagaatctagtatgataaataatagggatcagacttataataggctcatggatacttaagtggtccatgaatgggcatcaagagaacctgtgattctcttaaagtatat

SEQ ID NO: 337607 - DNA, 603 bp, Homo sapiens
gtgagtccaagtaagaatcatctagtaagaatcagagctaagttcaaagggctaacttcaaaatccgtgatcttcccagactaaactcatagatgacacagagtctgagcaagggaarcttagttaccttgacttggtattaaatgaaataacagtattcccatagttactactaaggaatcttgtcctttcttaagatgactaaaccacattggtagggagacaacccatagaaaaactgagaatttgcatccacaaagaggagattatattacataggtctcaaaattggagttttccctccatcaagagccactggtacaaaaccattaatggaagtatttaagagatgccctctctgtcacatatctgctgtgggatttaaggaaggaattttctcttctaaacactcacacatccaaactagaaatccatgtggaatataagccacgttatgcccctatattgacatattagttcaaaactctgatggcatgcagttgtgagagcagcagggaggaaaattatataacctgatggcaacttgataatttatactttgagataacttattctggattttcctcacttgtatttctccac

SEQ ID NO: 337608 - DNA, 603 bp, Homo sapiens
gtgagtccaagtaagaatcatctagtaagaatcagagctaagttcaaagggctaacttcaaaatccgtgatcttcccagactaaactcatagatgacacagagtctgagcaagggaagcttagttaccttgacttggtattaaatgaaataacagtattcccatagttactactaaggaatcttgtcctttcttaagatgactaaaccacattggtagggagacaacccatagaaaaactgagaatttgcatccacaaagaggagattatattacataggtctcaaaattggagttttccctccatcaagagccactggtacaaaaccattaatggaagtatttaagagatgccctctctgtcacatatctgctgtgggatttaaggaaggaattttctcttctaaacactcacacatccaaactagaaatccatgtggaatataagccacgttatgcccctatattgacatattagttcaaaactctgatggcatgcagttgtgagagcagcagggaggaaaattatataacctgatggcaacttgataatttatamtttgagataacttattctggattttcctcacttgtatttctccac

SEQ ID NO: 337609 - DNA, 521 bp, Homo sapiens
gtgactccccaactccccctaaaaagcctaaataaaaatgaggaatgttttctttcaatgtgctacatgtacagcaaaagtaaaatccaaataaacatttacaagagaaggctgaaaactcaagaccatcataccctgtggggaatttacaatctaaatataacaaacatatagagtgagataggagaaaagaaacgggatggtartgatattgctggtactaaagtctattcaggaaatggaaatatatagcaagaggactcggctacttcttgggcattgatcaaagaaaaatacacaaacatataaaaggaaagaaaagtcgttttattttataacattttccttctgattctaggtgattatatagctagtctactcttccacccccaagattctggggtattttggctaatgttatttgcaatgtccataaactcagaagaagttagtattaacagggatatgaaagaacctccagttattgtgcaagaaacctcaaatccatttagggagcagac

SEQ ID NO: 337610 - DNA, 521 bp, Homo sapiens
gtgactccccaactccccctaaaaagcctaaataaaaatgaggaatgttttctttcaatgtgctacatgtacagcaaaagtaaaatccaaataaacatttacaagagaaggctgaaaactcaagaccatcataccctgtggggaatttacaatctaaatataacaaacatatagagtgagataggagaaaagaaacgggatggtaatgatattgctggtactaaagtctattcaggaaatggaaatatatagcaagaggactcggctacttcttgggcattgatcaaagaaaaatacacaaacatataaaaggaaagaaargtcgttttattttataacattttccttctgattctaggtgattatatagctagtctactcttccacccccaagattctggggtattttggctaatgttatttgcaatgtccataaactcagaagaagttagtattaacagggatatgaaagaacctccagttattgtgcaagaaacctcaaatccatttagggagcagac

SEQ ID NO: 337611 - DNA, 521 bp, Homo sapiens
gtgactccccaactccccctaaaaagcctaaataaaaatgaggaatgttttctttcaatgtgctacatgtacagcaaaagtaaaatccaaataaacatttacaagagaaggctgaaaactcaagaccatcataccctgtggggaatttacaatctaaatataacaaacatatagagtgagataggagaaaagaaacgggatggtaatgatattgctggtactaaagtctattcaggaaatggaaatatatagcaagaggactcggctacttcttgggcattgatcaaagaaaaatacacaaacatataaaaggaaagaaaagtcgttttattttataacattttccttctgattytaggtgattatatagctagtctactcttccacccccaagattctggggtattttggctaatgttatttgcaatgtccataaactcagaagaagttagtattaacagggatatgaaagaacctccagttattgtgcaagaaacctcaaatccatttagggagcagac

SEQ ID NO: 337612 - DNA, 514 bp, Homo sapiens
aaacgtcttgcttccacctcattgcatccttgtccatattgatcagctgtaatagagcatgacagaaggtattgattgactgaggcaactctcaggtatttggaacctgaaagcagccatagactatcaagaaggcaatgctctatggaagcctaaaattagaaaggttaagtgaaaagggggcctgggcataaggtgttcaatatctacatcaatctggcagatgacttacttgaagcagaatgggcctcattttcttcacatataagttacaaataaacatgttggttattgtcttataaatagctgttgataaaatgcctgcttaaagtattttcctaggtttctatgatattgatttctaaaacattctcaaaaacagcgaaagcaggtcgaatgcacacttctacatttgtttcctgcttacacacacacacacacacacacacacacacacacacacasagagagagagagagagagagagagagaacaaaagcaaagaagaatgtga

SEQ ID NO: 337613 - DNA, 607 bp, Homo sapiens
agcacctgattttcttgttctagttttgttctactacatttgacagtgaaaaatctcatctttctctaccttctgttattgtttttatgtgtccacacataaggattaaaatgaacatttatttgaatacttcactttcgtgaggttttattcttaaaactttacaacttgtcttccaaccgtcgcctaaatgaagtagagacattttgcaaacaggaaaactaataaagggcatttcacccaaactgctttaaaatatcaaaaaatatatctggagagggaatgagagataaaacaagggtggcaggcactgatggttgttgaagctgggcaatgggcaatgtgggttcatagtactatcctaattttgtatatgtttgagagtgtcaataaagcaaaagttttaaaattataaaaataaaactaatgaattaaagaaaacttttcagaagaagtaaacctcttctatgtctaatcttgggttaaagttatttgagtgcctcccccagtatakaaaatactcataacaactgagctctattctagaagcctattaaaaccttgggtagtatgtttccaacgattattacctaccatggccctaaag

SEQ ID NO: 337614 - DNA, 551 bp, Homo sapiens
aaggaagaacacttataattttttctaccaagcacatgtactataaactccatgactacaacaacagctgagaagcacaagggtgacaaatcttgaaacatcctctgtatctcctaaaagtcattttgaaactttcatacgttttcagatggagacattactaaggcactgtcccttcccacccagcagcaagcagaaccaattttacaagaacctctgagctcctgcatgtctaactgaacaggaagactctatcttggaatggtcttcccagggttctacctgtccataacccaaggcagtagagatgacctcatctgagagccctacatctggagttatcctggttttatagctgttggttaggtttgtcaacttctctagaggcagtgattataaattctactgayatggtttggctgcatccgcacccaaatctcatcttgaattgtagttcccataatccccatgtgtcatgggtgggaccaggtggagaaaattgaatcatgggggcagtttcccccatcgtgttctcatgatactgagttagt

SEQ ID NO: 337615 - DNA, 609 bp, Homo sapiens
acacgtgtgagatgatacctcactgtggtttttatttccatttccctgaagattagtgatatttcacattttttataaacctgttggctatttgtatgtccccttcggaaaaatatccatgcgggtccgttgctcattttttaattgggttattttacaggggagggtactattgagttgaatgggtttcttatgtattttggaayttaatcccctgtctgatatatggtttccaaatatgctctcccattttgtaaattgtctcttcactatgttgcttgttttctttgctcttcacaaacttctttttattgctaaataatattccattgtatggctaggccatattttacttatctgttcatcatttgatagacagttgagttgtttctactttttgcttcttatgaataatcgttctgtgaatgctgctgttaatattacaagtgtttgtgtggatatatgttttcatttctctagggtatataactaggaatagaatttctgggtcataaggtaaccctatgtttaatttttgaaggtacttccagaccattttcaaagcagcgttgccattttacattcttaccaatagtgtaagaagattct

SEQ ID NO: 337616 - DNA, 570 bp, Homo sapiens
aatgacattttctttcaaataaggtgaatagatcatatgaaaggaaagcagacaagggaatcatacagaaggaagggcatttatgacacgagagatgaatttcagccagaagaacaggagagaattcacatgtaggagagaaagcaaaagaaagagaaattggcaaaacaacatggaaaagagcaagaaatgagaaagactgacttactgctagaaggggaaaaaatgaagataygtctcatgtcagagtacagagacctgactcaaaataaggcagctggggaagaaatgaaattctttctaacatcatgaatttctgtttccttaggttattaccagaaaggtagaaaggagatgaattttcagacctccaaaagatcaccaatcaataaaataccaatcaataagcattgattgagtacctaatgtgtgctcaacaaccaagtacaaaattagacatggccttcttctgaggtaccttactatggagttgagatgaggagatgctgaaacaatgaatgagagtggaaatgtattctatgctgtggagtgaagaaaacacacagctca

SEQ ID NO: 337617 - DNA, 524 bp, Homo sapiens
atttgtgcaagaatgtcctttgtagtattgcccataaaaacaaacaaaaaaatggagaagaaaacccatataccatccattgggttaaacgcgttttgatttatcaatacaaaacaatatgtacagctattaagaataatgaggtaggtctgctcttcaagatatactatgctttgaaacaagctaagtgtgaagaatgtatataatatgccatttaagtaaagattttaaaggctccgtgtcrttttgtttagatgtcaacatgtgcataatttctttttctgaaaagctacagaagaaacttcacaatggtaatatttggaggacaagaggccagcatgtcagagaagagaaggaaaggaaagttttcattttcctcttatacctttccttcctgcctgaagttataggtatggctaatttgatttaaatcaataatattaatgaaacataaaagtaaaataattacctagtaataataaaactatgttgtttataactcttatttgatgtttggattctca

SEQ ID NO: 337618 - DNA, 524 bp, Homo sapiens
atttgtgcaagaatgtcctttgtagtattgcccataaaaacaaacaaaaaaatggagaagaaaacccatataccatccattgggttaaacgcgttttgatttatcaatacaaaacaatatgtacagctattaagaataatgaggtaggtctgctcttcaagatatactatgctttgaaacaagctaagtgtgaagaatgtatataatatgccatttaagtaaagattttaaaggctccgtgtcgttttgtttagatgtcaacatgtgcataatttctttttctgaaaagctacagaagaaacttcacaatggtaatatttggaggacaagaggccagcatgtcagagaagagaaggaaaggaaagttttcattttcctcttatacctttccttcctgcctgaagttataggtatggctaatttgatttaaatmaataatattaatgaaacataaaagtaaaataattacctagtaataataaaactatgttgtttataactcttatttgatgtttggattctca

SEQ ID NO: 337619 - DNA, 616 bp, Homo sapiens
gtgtgatgtggctcaataaccacttggggaaaaacaatgagagggtttttattgaccaaagtggtttaacaaatgacacttaagtgatctactggcattttagaacagaggcaagactgctcactcattaagtcattttaaaaatagtcattatagagcttttgccataaatcaagaacaaaagattccaggaaataattttttataattcatamacacatagtaatgtggaaagaaggactctagagttgaacagggttatcaattacattttccagttgtatatcatagagaccacactctttctgtgagttcacactttacacatccagatgaggtattgtgggtaaacttgaggattcacacacttcagcagactaccagctccatgagatcaagggccacatctgttttatttagcgagaagcagaattaggccatgtgtgacagtgggtgttactcagcaggtgctcagtgaataatgaatggattaatgacattgtatagtagtgtctgactttgcaaacagaaaatcacagcctttgtgaatgtaaatttacacagtaaacccaataccatatagacttttagtgatattttggtatttagaaaaaag

SEQ ID NO: 337620 - DNA, 616 bp, Homo sapiens
gtgtgatgtggctcaataaccacttggggaaaaacaatgagagggtttttattgaccaaagtggtttaacaaatgacacttaagtgatctactggcattttagaacagaggcaagactgctcactcattaagtcattttaaaaatagtcattatagagcttttgccataaatcaagaacaaaagattccaggaaataattttttataattcatacacacatagtaatgtggaaagaaggactctagagttgaacagggttatcaattacattttccagttgtmtatcatagagaccacactctttctgtgagttcacactttacacatccagatgaggtattgtgggtaaacttgaggattcacacacttcagcagactaccagctccatgagatcaagggccacatctgttttatttagcgagaagcagaattaggccatgtgtgacagtgggtgttactcagcaggtgctcagtgaataatgaatggattaatgacattgtatagtagtgtctgactttgcaaacagaaaatcacagcctttgtgaatgtaaatttacacagtaaacccaataccatatagacttttagtgatattttggtatttagaaaaaag

SEQ ID NO: 337621 - DNA, 616 bp, Homo sapiens
gtgtgatgtggctcaataaccacttggggaaaaacaatgagagggtttttattgaccaaagtggtttaacaaatgacacttaagtgatctactggcattttagaacagaggcaagactgctcactcattaagtcattttaaaaatagtcattatagagcttttgccataaatcaagaacaaaagattccaggaaataattttttataattcatacacacatagtaatgtggaaagaaggactctagagttgaacagggttatcaattacattttccagttgtatatcmtagagaccacactctttctgtgagttcacactttacacatccagatgaggtattgtgggtaaacttgaggattcacacacttcagcagactaccagctccatgagatcaagggccacatctgttttatttagcgagaagcagaattaggccatgtgtgacagtgggtgttactcagcaggtgctcagtgaataatgaatggattaatgacattgtatagtagtgtctgactttgcaaacagaaaatcacagcctttgtgaatgtaaatttacacagtaaacccaataccatatagacttttagtgatattttggtatttagaaaaaag

SEQ ID NO: 337622 - DNA, 511 bp, Homo sapiens
cctatgttgtttgaatacgttcaatcgcatgttagtgagaaataagaaaaatttaatcacgtgtcactctatccatagcatccatagtaaatccactctatcaaaccactccatgtggtcctctctcattatttcacgaatcaggctttcttgtgcagagtcctatctgccctccacagtgaattctcgctccaamcagatacattccatcagaaagctctaaggtgcttgccggtgaaggaggaaaatgcctcctccgaggtgtccttgttgctggagtccatctgtcttcctacctgcttctcacagttctgctctcagtctcacagtggctgctgcaatgaaacctaagtttaactacagtgcttgaataatgggctgtttcagtgtttaaaaaaatcttaggtttacattcaaggttcttgacatagctattaataaacagtcacttaaaattgtccaaaaagttttgataagtttggagttaacctgctaaagcaaactaccaaga

SEQ ID NO: 337623 - DNA, 511 bp, Homo sapiens
cctatgttgtttgaatacgttcaatcgcatgttagtgagaaataagaaaaatttaatcacgtgtcactctatccatagcatccatagtaaatccactctatcaaaccactccatgtggtcctctctcattatttcacgaatcaggctttcttgtgcagagtcctatctgccctccacagtgaattctcgctccaaccagatacattccatcagaaagctctaaggtgcttgccggtgaaggaggaaaatgcctcctccgaggtgtccttgttgctggagtccatctgtcttcctacctgcttctcacagttctgctctcagtctcacagtggctgctgcaatgaaacctaagtttaactacagtgcttgaataatgggctgtttcrgtgtttaaaaaaatcttaggtttacattcaaggttcttgacatagctattaataaacagtcacttaaaattgtccaaaaagttttgataagtttggagttaacctgctaaagcaaactaccaaga

SEQ ID NO: 337624 - DNA, 561 bp, Homo sapiens
agaaaactcatatattacccaacctcaggattcagcctgggggttggggaaaaggcaagggtagagcacacccygccccagtgcacacatgcacacacatgcatgcacgtgcccactcatgtacacatgcactctttcttgctttatctctcttgactctgtccattatccagcttgaaactctattttaaactctgggggtgggcagttagaactcttctgtgtccttatccctgcatgaatcatttctctctcacactggggcagcgccttttgaattaaaggctaagctggtgagtgaaggagactactgctaagcaatagatgcacttccctttagccaagagatggtcaggaaggaaatggcacaccagtgattactttgaaatattagcctgctacacatgggtaagaaattagtgacagtaactgtgctacaaagttgaaaccgctaagtaacatgggatggtggtctctgataaagggccatggaagtgtggggaaggaagtgaccacctgatatggggccatcagaaaggcttcctatcgaggttcaactcc

SEQ ID NO: 337625 - DNA, 561 bp, Homo sapiens
agaaaactcatatattacccaacctcaggattcagcctgggggttggggaaaaggcaagggtagagcacaccctgccccagtgcacacatgcacacacatgcatgcacgtgcccactcatgtacacatgcactctttcttgctttatctctcttgactctgtccattatccagcttgaaactctattttaaactctgggggtgggcagttagaactcttctgtgtccttatccctgcatgaatcatttctctctcacactggggcagcgccttttgaattaaaggctaagctggtgagtgaaggagactactgctaagcaatagatgcacttccctttagccaagagatggtcaggaaggaaatggcacaccagtgattactttgaaatattrgcctgctacacatgggtaagaaattagtgacagtaactgtgctacaaagttgaaaccgctaagtaacatgggatggtggtctctgataaagggccatggaagtgtggggaaggaagtgaccacctgatatggggccatcagaaaggcttcctatcgaggttcaactcc

SEQ ID NO: 337626 - DNA, 634 bp, Homo sapiens
tcaatagttataatttaggttgtatagctgacaaggagatttctcacagtagatgaaaaccaaaggcgacttcttagagcagatgagatttaaactggactttaaaaattggggagtgatttaaccagtggattgggctggcaacctactcactcatccatcccaacactgcagtctcctctcagtccagggtctatgctggaacttaggatgctaagatgaccaggacagagtagctgaccttgaagagttcacattctaatgtccgcaactgtcatgcagtgtaaacagatcattacaacacagagagatgaatgctattggtagaaatcagtatagaaagctgtgggagcacaggggaggtcagatctaattctgcctcagggtgttagataaacttttccatcycattttacatttcaccttttaaagtagaacaatttctccacacctagaccaaaatctgtccttaaaaatggtccagaaacttaaggttagcttcaaagaaagttgttaagcgttcctcctttggcccaaatcaccatttcacttttgtacgtactcttacttactcaatctttccaacaaacccataaactattaatactattataattcccatgttgaagatgaa

SEQ ID NO: 337627 - DNA, 586 bp, Homo sapiens
gagaagcaaacagttgcctttcaaagaaagtaaattgacaggggagyccgcagcccgatagcattctggtacagattctttggttgaatttcacatatttttctgtgaacttttcaatgcaaagtaatcttatactgattgagggaagagcatcatatctggaaaaaaatatgctcatataaactaagtatgtgggaaagaagtaaatgatatcattaaaggaaagaaacaatatataacatttgtttgctgcctagtatggtctagtgataatcaataaccctttgagttaggataatatcacctcccaatgtccagattcagaagttgaggccaaaaaagtttaactgcataaccaaggtcacgtagctattaagtgaaaatcccagccaggggcatgtgctacaacactgttacaatgtccatgctgtttcaatgcctctcaaggttataaaaacctccatgtataatacctactgcagtgtttactagagtgggatagcagagccctgcttccacgggatgctgttatacattatacagaaaaaaaactgtgcggtcaaagaagattgagaaacactgcatg

SEQ ID NO: 337628 - DNA, 633 bp, Homo sapiens
tatactgattgagggaagagcatcatatctggaaaaaaatatgctcatataaactaagtatgtgggaaagaagtaaatgatatcattaaaggaaagaaacaatatataacatttgtttgctgcctagtatggtctagtgataatcaataaccctttgagttaggataatatcacctcccaatgtccagattcagaagttgaggccaaaaaagtttaactgcataaccaaggtcacgtagctattaagtgaaaatcccagccaggggcatgtgctacaacactgttacaatgtccatgctgtttcaatgcctctcaaggttataaaaacctccatgtataatacctactgcagtgtttactagagtgggatagcagagccctgcttccacgggatgctgttatacattatacagaaaaaaaactgtgcggtcaaagaagattgagaaacactgsatgaaatgaagtaaaatagctctctttaccgcagtattcatcagcatatttactgtactactatgcattctggcttctcaaaaataagaaatagtatgcagcactgctcaaatttgcttatctacaaaataataatgattattaattattagtaatattgtagaacactacacaggacac

SEQ ID NO: 337629 - DNA, 259 bp, Homo sapiens
taacagagtagaaatgctgagaggtaaagagatggccactagctagttaattrgctgtttaactattccagcctctaatatttatagtaaggcatttaataatatttaaaatatttacatcatgggtataactaattatacatgagtgattttgggactctaaagcatagtaatattgtagatatctaatggtttattttccatttcaggaagaaataacgtactttaaattttaaataaggttgtaattggcatgtaa

SEQ ID NO: 337630 - DNA, 259 bp, Homo sapiens
taacagagtagaaatgctgagaggtaaagagatggccactagctagttaattggctgtttaactattccagcctctaatatttatagtaaggcatttaataatatttaaaatatttacatcatgggtataactaattatacatgagtgattttgggactctaaagcatagtaatattgtagatatctmatggtttattttccatttcaggaagaaataacgtactttaaattttaaataaggttgtaattggcatgtaa

SEQ ID NO: 337631 - DNA, 535 bp, Homo sapiens
gagaacacggcttttcttttattattcttccttctcttgggcactgtgtagcaaatcatctgtcattttggggttggggtacaacttggcctaatagacaggcaatggtaactctctggagtcataacagttccctttggcttgcctttatggccagtatagattgctaaggctatagcaattatgaggcagtccatatcagttgttgaaaacaatgccatttttgcccaagagaaccatattcttccttatatgtggcacaaactagttttgtgggttttttttttcttttctttatcccctacaaatcattgtacttgaagatgccacactacccctgtgaagtactgctgctctggtcctacttaatagtaccacaagaagaaataggaagcttttamacattacacgtgtattttcattggtggtgaacagttagttatggaacctctcctttgtgccagaaatcagtgggctgagaagaaaaatgaaacctggtctttggcccaaaataacttcaatcagcaaatattta

SEQ ID NO: 337632 - DNA, 535 bp, Homo sapiens
gagaacacggcttttcttttattattcttccttctcttgggcactgtgtagcaaatcatctgtcattttggggttggggtacaacttggcctaatagacaggcaatggtaactctctggagtcataacagttccctttggcttgcctttatggccagtatagattgctaaggctatagcaattatgaggcagtccatatcagttgttgaaaacaatgccatttttgcccaagagaaccatattcttccttatatgtggcacaaactagttttgtgggttttttttttcttttctttatcccctacaaatcattgtacttgaagatgccacactacccctgtgaagtactgctgctctggtcctacttaatagtaccacaagaagaaataggaagcttttacacattacacstgtattttcattggtggtgaacagttagttatggaacctctcctttgtgccagaaatcagtgggctgagaagaaaaatgaaacctggtctttggcccaaaataacttcaatcagcaaatattta

SEQ ID NO: 337633 - DNA, 558 bp, Homo sapiens
aacacagtaaatatgcgtagaacagctcaaatccctttggatttaaatgcagaggacttctattgttgttttccctacgagtgaaggataatttcacagagaataatgtgtttgtgcagaaaatttaatgtgtgagcaatgaacgaaacatggatttctcacatgacctagctgacctcttctttgtatatttcccaaaatatgttcattagagcagttgactgtgatgatgctcagcaaaattcgaagatgaagagaccctagtgaagaatgtgtgggaaatgttgcattcttggtctctttcctgcactgccacaggctgcattggcatctgaaaggctcccagaaatctggcagcaaataaacaactttagctttgtttaactctagcatctctcaaaagcatttgacagcaagcgcttttgttcacagagcgtgttttagcatctagcagcgttgagtgcttgtggaaacacactttggcamatgctgacctatactggtatcttctaggcttatgtaactaatggacttaatggggagtaatggattaaaagt

SEQ ID NO: 337634 - DNA, 537 bp, Homo sapiens
tcacatatatatgcatgtgtttaaatcagatatatctcctgagtggagtctgtatttcccatacactatattttctatgaacctccatccatatatcatacttcaagctgtgttctgctagacaatttaaagccctacaaatttagaaagtaatgttttaataaaaatgcatgctattattgattgctgtcataatataaccattgttttgctaactctctgatttacatgactgaaaactctcctataattagttatttcytaaaatttaaggataatagagcagagggccacaagtgtttttttgtttgtttaattcctatgaacatgattttcccttgaataagactttgtgctataatagattttctcctaatgttaatatgatttatgaaactggtattgaatattttccttcaaatttatggcccgatggatatcatgctgagtttaagatgctgagcctaatgatattcacattggtggcattatattgatttgttttggtttgatatatagggcttttaaaaataataa

SEQ ID NO: 337635 - DNA, 537 bp, Homo sapiens
tcacatatatatgcatgtgtttaaatcagatatatctcctgagtggagtctgtatttcccatacactatattttctatgaacctccatccatatatcatacttcaagctgtgttctgctagacaatttaaagccctacaaatttagaaagtaatgttttaataaaaatgcatgctattattgattgctgtcataatataaccattgttttgctaactctctgatttacatgactgaaaactctcctataattagttatttcctaaaatttaaggataatagagcagagggccacaagtgtttktttgtttgtttaattcctatgaacatgattttcccttgaataagactttgtgctataatagattttctcctaatgttaatatgatttatgaaactggtattgaatattttccttcaaatttatggcccgatggatatcatgctgagtttaagatgctgagcctaatgatattcacattggtggcattatattgatttgttttggtttgatatatagggcttttaaaaataataa

SEQ ID NO: 337636 - DNA, 537 bp, Homo sapiens
tcacatatatatgcatgtgtttaaatcagatatatctcctgagtggagtctgtatttcccatacactatattttctatgaacctccatccatatatcatacttcaagctgtgttctgctagacaatttaaagccctacaaatttagaaagtaatgttttaataaaaatgcatgctattattgattgctgtcataatataaccattgttttgctaactctctgatttacatgactgaaaactctcctataattagttatttcctaaaatttaaggataatagagcagagggccacaagtgtttttttgtttgtttaattcctatgaacatgattttcccttgaataagactttgtgctataatagattttctcctaatgttaatatgatttatgaaactggtattgaatattttccttcaaatttatggcccgatggatatcatgctgagtttaagatgctgagcytaatgatattcacattggtggcattatattgatttgttttggtttgatatatagggcttttaaaaataataa

SEQ ID NO: 337637 - DNA, 520 bp, Homo sapiens
tgttgagtatctcgtatgtgacagacattttgctaagggctagggacacaaagatgcaaaaggcagaagtctctgacataatggtgagggcaacagtttagaagtgaaagaataaaatgtttatggwctgacatatatatatgtatctagagagaaaataattgggatagcctactttaggtggtgtggttagggaaggcctctctatggaggtgacatctaaactggtatttgaaagaagagaagaaaccaaccacgctaagaaagagggaaaacacattctaaatggaaagaagatacagaagccaaggtgctaagatgggatggagcttggcattcttattctcattctcactggtcagcatgcctgaagcatggggaacaatgcagagctcacactaagatgaaagccagagaaaatataatactgaagactctattttaagtgtaattttatattttaagtgctttgggctggcaggtttaactgccataaatttgactttctgataaataacac

SEQ ID NO: 337638 - DNA, 591 bp, Homo sapiens
atcagctgggtcggacttttttgcttaatatgttatgtcactgatggagatgtgagaaaaagccataactgtctaatcagtgggaggtttattgcattagtcatagattttggggggagaaaatagatattttatctatctatctatctgtctatctataacatgcacagaatatgtgtacacatatactgggcagttgtcataagtgctcaggttcaaaaggttgaaagagacactattgtgtaaggctcaagagcatggggttgattttctagacaccttgatttcagatttaacctttactctgtattagctggtagctttagcaagacatgtaatctctccatctgtaaaatggagctagtaatatcagtctcaccttgtgaaaatggcataaaattatcatggtaagtgcctggcacggtgctagaaaaaaagtrcagttcgtagaaaataggaggtattgttacttattatctccaaccaggcaagaagaatagtttgtcatcattattggttcacacagaattatattaaaagtattatcatgggtttaatgtcccaaagaattggcaaaagcagactggccac

SEQ ID NO: 337639 - DNA, 591 bp, Homo sapiens
atcagctgggtcggacttttttgcttaatatgttatgtcactgatggagatgtgagaaaaagccataactgtctaatcagtgggaggtttattgcattagtcatagattttggggggagaaaatagatattttatctatctatctatctgtctatctataacatgcacagaatatgtgtacacatatactgggcagttgtcataagtgctcaggttcaaaaggttgaaagagacactattgtgtaaggctcaagagcatggggttgattttctagacaccttgatttcagatttaacctttactctgtattagctggtagctttagcaagacatgtaatctctccatctgtaaaatggagctagtaatatcagtctcaccttgtgaaaatggcataaaattatcatggtaagtgcctggcacggtgctagaaaaaaagtacagttygtagaaaataggaggtattgttacttattatctccaaccaggcaagaagaatagtttgtcatcattattggttcacacagaattatattaaaagtattatcatgggtttaatgtcccaaagaattggcaaaagcagactggccac

SEQ ID NO: 337640 - DNA, 591 bp, Homo sapiens
atcagctgggtcggacttttttgcttaatatgttatgtcactgatggagatgtgagaaaaagccataactgtctaatcagtgggaggtttattgcattagtcatagattttggggggagaaaatagatattttatctatctatctatctgtctatctataacatgcacagaatatgtgtacacatatactgggcagttgtcataagtgctcaggttcaaaaggttgaaagagacactattgtgtaaggctcaagagcatggggttgattttctagacaccttgatttcagatttaacctttactctgtattagctggtagctttagcaagacatgtaatctctccatctgtaaaatggagctagtaatatcagtctcaccttgtgaaaatggcataaaattatcatggtaagtgcctggcacggtgctagaaaaaaagtacagttcgtagaaaataggaggtattgttacttattatctccaaccaggcaagaagaatagtttgtcatcattattggttcacacagaattatattaaaagwattatcatgggtttaatgtcccaaagaattggcaaaagcagactggccac

SEQ ID NO: 337641 - DNA, 508 bp, Homo sapiens
cttttcaaaaatgtgaaggtcatgaaagacaaagtctggggaattgtttgagattaaagaacactaaaagacaagacaactaaacacaatgtgtgatcctggaatgggtcctggacccaaataaaagacaactggcagcatttccataaggtgtgcagaccacaaatagctttatatcaaggtgaatttcctgggtcagtaattacactatgtttttctaaaaaaatgtgttgtttaaatacactaaaggagcaaagaggcatcatgtaacttgctttcaaatatttcactaaaaattatatatacatttatacacatataacatatatggtrcacacactcatatatatgtgagagagagaaaatataatggaagtaagtaaagtattaatatctggggatctgagggaggagggtagagggattctttacattatgctcgcaactttttttttttgcaactctaaaattatttcagaattaaaagttaaaaaagaaaagagaggga

SEQ ID NO: 337642 - DNA, 554 bp, Homo sapiens
gtagatagcaaatatatttatattaggggaaatatctaaaaaatggcacttatagatacatttgctaaatagatatggaagtctatctgaagacctagcactatgccagccatacaacaatctcttcacaaatatgtattgaatgaatgaatgaatgaatgaatgaatgaataagcacacatacacagcagaaaaacagactatgaatgaatatatatcctttcccctaaagaaagatactctaaaacaaatgggcagtcaaaactacaatctctcatttaactgggaaaagtaaagaaccctctatttcatctttgatttcctccttacatgatgtacaatgcaaagggcttgctagtcayatttgtcaagagagcccacaggtactatctggctcatcacagcttaacttatcaattgccattgttgtttggtggatattgatctgggaagaccttgtatcttgcgaaagtcacttctacagcaactcatcactttttctttttagtcgacatgaaggctcaagtgttgtggtatactgggaatttccacgc

SEQ ID NO: 337643 - DNA, 511 bp, Homo sapiens
acacaaattaaaatttgcttattcattcattcattcattcattcagcaaatgtctggattttaraaatgagtttctgtctcaaaggtatttaatacaacacctggctcagcttcatggactagagacacattatcactgaggtcacgttgttactgtttttgctactcctgctaactgttccaaaggggaaaaaaaaacaacatgcactttaaaagcatgatgttcttgttggcagaaattacaatagtttcttctcttggtgtttactcccccaacactttcctcagctctttatttctgatattcaattaccctttttctgcctggcttttctcactttcccagaagacttaccctgggaaactttactgttttcactggtgtacatttgcactagttggtttaattaccaagtgaatctacagcctctcagaacatttgacacgtctccctttcactggatccaagacatgaagcaatgaaaacgaatgggtgaatgttacagcaaac

SEQ ID NO: 337644 - DNA, 332 bp, Homo sapiens
tgagacaggaatctgagtacaaatggattatttgagagatgggcccaggaagcaccattaggggagaagtggaagtaagacaggggaaaaaagaaatctactacaagaaacatttataagaatrttagtgcttcaagcaattggggctcaaatccactggggggggctctggaagacagcgtggaacatgctaccctctgagttttcgcacttacgacataggaagctggggaatttatcctcaaattcccactggtattggctaaacattgttcctaaagtcaataattcctgacactttaggcctacactctacaccagcaagagaaagc

SEQ ID NO: 337645 - DNA, 584 bp, Homo sapiens
  misc_feature (1)...(584): n = A,T,C or G
gatgtggtgtgaagtatatcatatataagacttgagagtnttagctttcgcagatgtgattttggacaaatcgttacacagtcatccagtaacttttttctcaccgaagaaacaatgaargtaacttagtaatttctaaggcccagtctaatagtctctgattgttaataatagcaccataacttgtattgttttgtatattcaaatttttaggttaaaagttctcaaaattaagtacactgacatgaagcttctgcctggggaccatctcttttggattttgtttttataggttgtccttaatgacctggaattgttataacagctgtcaactgaggtaagcttcacagaaggggagctgccttacctccagagagcagcttttaatttcctatttttggaaataacagaaagcaaagaggactcttctgaaagggaaacaacaggccaccccaaggcactgggagaacagacctggtgctgaacggggatatttgagagcaagtcctctgagaagcagagacagcatcagcctgctcttttcttctgtaattaatggggagtccctggatctttgtattaga

SEQ ID NO: 337646 - DNA, 596 bp, Homo sapiens
tctcatccgtgagatagggggacgtgaccgtcaggggtcgctgaggaaatgaatgagtaaatttatcttacagaggtcagtaaataagggaatgggatgtgtaagaaacagctcctgtctgtaaaaggagcagatggataaatctaggttttccaaacagaggggctcacagttgtgagctgttgaagaaaggtatttagttraaacgtctgtctcaaggttattggtaaatagccaaaactagggcgcaagaattctgggaaaattagataagatgaatttagtttcacaatggctaaggggccgtgtatttctattagggaaggctatatatgcttcattcagcagcatttaatgattacatttggaacatgcaattgctgtttctgttttgggggctatcacaatttaatgaaatatctggtctggatttcttcaggcagttggtctcttcagtttccacagatttaagattctatcctctccctgctttcttccaatgaagttgacgtactgtgattccaactggataaacttaatagtcacacataacttttgactagaaataggtggactgtaagtaatcatttagtctt

SEQ ID NO: 337647 - DNA, 596 bp, Homo sapiens
tctcatccgtgagatagggggacgtgaccgtcaggggtcgctgaggaaatgaatgagtaaatttatcttacagaggtcagtaaataagggaatgggatgtgtaagaaacagctcctgtctgtaaaaggagcagatggataaatctaggttttccaaacagaggggctcacagttgtgagctgttgaagaaaggtatttagttgaaacgtctgtctcaaggttattggtaaatagccaaaactagggcrcaagaattctgggaaaattagataagatgaatttagtttcacaatggctaaggggccgtgtatttctattagggaaggctatatatgcttcattcagcagcatttaatgattacatttggaacatgcaattgctgtttctgttttgggggctatcacaatttaatgaaatatctggtctggatttcttcaggcagttggtctcttcagtttccacagatttaagattctatcctctccctgctttcttccaatgaagttgacgtactgtgattccaactggataaacttaatagtcacacataacttttgactagaaataggtggactgtaagtaatcatttagtctt

SEQ ID NO: 337648 - DNA, 499 bp, Homo sapiens
ttgtgccggggtgtggagctgatgtcagcgtctagaatgctggttggaatcacctggttacgcagctggaccggaataaggcaagtctgtatctgaactcattaatttttacaaccaactgaactgttctgcctttttttgcgggggaggcggtagggggaggtggtgcaggaggagaacaagggaagaaaggcaaaggggaggagctagtatgtatggagcagggggcttcccaccagcagacactatctcattattccccagcaaacgccagcttcgaacccccagcccctgggacagtcargcctaaccgcggcagcaggtcctgccaggggaaggagagaaacgggccagtaagacataaggataattagagtggcacaagccgctcctaggcgttcaggttatgtcaatgtttccattatatgcctcacttttcaggggtttataacggagctataaaaactcacgccagctgagaatttggcaggccaggtca

SEQ ID NO: 337649 - DNA, 499 bp, Homo sapiens
ttgtgccggggtgtggagctgatgtcagcgtctagaatgctggttggaatcacctggttacgcagctggaccggaataaggcaagtctgtatctgaactcattaatttttacaaccaactgaactgttctgcctttttttgcgggggaggcggtagggggaggtggtgcaggaggagaacaagggaagaaaggcaaaggggaggagctagtatgtatggagcagggggcttcccaccagcagacactatctcattattccccagcaaacgccagcttcgaacccccagcccctgggacagtcaggcctaaccgcggcagcaggtcctgccaggggaaggagagaaacgggccagtaagacataaggataattagagtggcacaagccgctcctargcgttcaggttatgtcaatgtttccattatatgcctcacttttcaggggtttataacggagctataaaaactcacgccagctgagaatttggcaggccaggtca

SEQ ID NO: 337650 - DNA, 499 bp, Homo sapiens
ttgtgccggggtgtggagctgatgtcagcgtctagaatgctggttggaatcacctggttacgcagctggaccggaataaggcaagtctgtatctgaactcattaatttttacaaccaactgaactgttctgcctttttttgcgggggaggcggtagggggaggtggtgcaggaggagaacaagggaagaaaggcaaaggggaggagctagtatgtatggagcagggggcttcccaccagcagacactatctcattattccccagcaaacgccagcttcgaacccccagcccctgggacagtcaggcctaaccgcggcagcaggtcctgccaggggaaggagagaaacgggccagtaagacataaggataattagagtggcacaagccgctcctaggcgttcargttatgtcaatgtttccattatatgcctcacttttcaggggtttataacggagctataaaaactcacgccagctgagaatttggcaggccaggtca

SEQ ID NO: 337651 - DNA, 596 bp, Homo sapiens
tctcatccgtgagatagggggacgtgaccgtcaggggtcgctgaggaaatgaatgagtaaatttatcttacagaggtcagtaaataagggaatgggatgtgtaagaaacagctcctgtctgtaaaaggagcagatggataaatctaggttttccaaacagaggggctcacagttgtgagctgttgaagaaaggtatttagttgaaacgtctgtctcaaggttattggtaaatagccaaaactagggcgcaagaattctgggaaaattagataagatgaatttagtttcacaatggctaaggggccgtgtatttctattagggaaggctatatatgcttcattcagcagcatytaatgattacatttggaacatgcaattgctgtttctgttttgggggctatcacaatttaatgaaatatctggtctggatttcttcaggcagttggtctcttcagtttccacagatttaagattctatcctctccctgctttcttccaatgaagttgacgtactgtgattccaactggataaacttaatagtcacacataacttttgactagaaataggtggactgtaagtaatcatttagtctt

SEQ ID NO: 337652 - DNA, 507 bp, Homo sapiens
gtcaccgccaaatagtcccaggaggcagtcttgcatttcctcaagatcttatacggtcactggtttttttcttgaactttccactgaagtagacttagaccttctgcccagcaacctgagactctggggagatgccagcatgacttgtggggagacccctgccctcgaacatactctccaacccagccatcatcttaccctgctcagggactctatgggatgaacgtcgttagtgaggccggtgagggacacacacattcctaaagctcactttggaaggcaagtctcatcttgtctcttgtcttttcattttaacaagctagagggaatcttgctgtgctccgaagtctctcttgtctgggggagaaaataatactaaagtgctcactattcaaaatgaaatccttaaacacaacatgagygtcacctggagctcgtttgcaattctgatttcagggccccactcgagaccaactggatcagcatctctgggggtaggacccaaga

SEQ ID NO: 337653 - DNA, 602 bp, Homo sapiens
gtcgttgtaaagcacacaaacactagagatagtttgggtttgaattttggctcaaatacatatgaattgtgtaataacatttaatctctgtaaatcttggtcttctcttctgtacagtgggggtgagatatcacctaactggttgtatttaacataaaatgaagtaaggttcttaacatagcaattgtacatagtatgtgctcaataattattagttatctgtgtgcatgtgtatgtctgtgtgcgtattctgctaagaatactcccccaagtgttcatgttcacttaatattttgattgtcatttattcacctatctatctattgagtgttggatacccacatagcaatataatgtagcaagcttctatcataggcccaggagatacagaaatgaacaaggcccagactgtgtccttaaagattcctatcacctttgctatatttcagctactcctcaactaaatcaattctgaaagcgcagtatttctacccagtgatgggaacaaggctacagtagccaacaaaaaattcattttatgattctatatacyatttcagaaggtgaacaaaaagataaatatgttgagtaattttggtgag

SEQ ID NO: 337654 - DNA, 606 bp, Homo sapiens
ggctaatgcagtcacttggctcagcagcaacaactcaatatttgaagaagtaaattataacagctccctaactggcctcctcatattccctcacctcccttcacatctgttattagcccagcagccagagttgtctttttaaaaacataaataaaattatgtcactccctatccttgcaaaaaaccgttttaagagacagttcaaaataagttatgcatccttgtccaagcacaggcccttgcctaccttccaactctcattatggactatctcagtctctatcttgttgycacattggtctgtttctctaaggcaccatgctgtcccccacccaagggcctttgctcatgctatatcattagcttagtacttgctccctttactggttagcttttacttggcctttaggtctctgagctagatagtctccatttcacctagatccaccctctaccttcacctccctattctctatctcagagggataatctctatgatctacatcaatggtcgtctttgccctctagctctgtaaggatattgaatggagaaaacagagtgaaaccagagcatttattttcctggatcactcttcgtgaaaatca

SEQ ID NO: 337655 - DNA, 434 bp, Homo sapiens
tggggactcaaaacctctcactgttgctcctaagcattttcatccttggacttctgagggtggaggaaacatgtccctaccccctcatcactcttgtgccttttcatggacttttccttcatttttcaggatggatcagagagcaacatctaccctccaccctcccctccctgacggggctgggacacatagcccaaggtgccaccagctactggctgacattttctaccacacatccacagagtctcctcctccccacaccagggggaggccagctctgactcacagccattaaacttgtgtctatggtggagaaaccacttgcgtaagastaagaggttcttccccaggcatttttaaactgtttcttttctttccccttctctaccctatcagcaagttaacttttaaagtttttttttttcttttagaaa

SEQ ID NO: 337656 - DNA, 498 bp, Homo sapiens
gtggaagaacagtaaaatgttttttcttttttgtaaaagtttataagaaggtatggaaatgttaactttggcctagggttaaaggattgttttaaattaggaaaaagctgaaggttcaaagaagtggtagaagaattctagaaattaatcttgcaraagaggttctctgtgtgaacatattgactaaattcctaaaaggatattatatggtttttctgtaaatttaacattgaaataaaagaataataaggttttcctaaggggctaatctgttctttggcaaaatttctaaagggttataaaagctttttgcttctttaaatttctgagtcattttggcaaaataaataacttatggtaacctggaattctatttcataacattcagtgttttaaacccccgaacatatatagcagccctcccaaaatcaaactttaagttttcaaaaatgtcttccctggcacctggctttttgaatatttcagagggcccctgaa

SEQ ID NO: 337657 - DNA, 569 bp, Homo sapiens
ttaccttatataaaaatcaattcaagatgggatcagacttaagtctaagacctgaaaccattaaaattctagaagattacatcagaaaaattcttgtagacrttggcttagacaaaaaattcttcatgaagaccccaaaagcaaatgcaacacaaacagaaataaatgggacctaattaaactacaaaagcttttgcacagcaaaagaaacaactggcagagtgtacagatgacccatagagtgagaaaaaatatttacaaactatgtatccaacaaatgactaaaatccagaatctccaagaaagtcaaacaaatcagcaataaaaaaaacaaataatcccatcaaaaagtgggcaaaggacatgaatagacaattctcaaaagaagctatacaaacagccaacaaacgtgaaaaaaatgctcaacatcactattaaaaccataatgagatactaccttactactcctgcaagaatggacataactaaaaagtcaaaaaaaaacagatgttggcatggatgtggtgaaaagggaacacttttacactgctggtgggaatgtaaattag

SEQ ID NO: 337658 - DNA, 569 bp, Homo sapiens
ttaccttatataaaaatcaattcaagatgggatcagacttaagtctaagacctgaaaccattaaaattctagaagattacatcagaaaaattcttgtagacattggcttagacaaaaaattcttcatgaagaccccaaaagcaaatgcaacacaaacagaaataaatgggacctaattaaactacaaaagcttttgcacagcaaaagaaacaactggcagagtgtacagatgacccatagagtgagaaaaaatatttacaaactatgtatccaacaaatgactaaaatccagaatctccaagaaagtcaaacaaatcagcaataaaaaaaacaaataatcccatcaaaaagtgggcaaaggacatgaatagacaattctcaaaagaagctatacaaacagccaacaaacgtgaaaaaaatgctcaacatcactattaaaaccataatgagatactaccttactactcctgcaagaatggacataactaaaaagtcaaaaaamaacagatgttggcatggatgtggtgaaaagggaacacttttacactgctggtgggaatgtaaattag

SEQ ID NO: 337659 - DNA, 595 bp, Homo sapiens
atataatggttatagccagtttttaaaatctattataaatgtgcttaagaatctcatcatctttcagatattccacaagtgattgctattgaggaggattatatgattccctgcctccaaaccagatgggtatttcctattccacccatgatttcagtgttgtaaaccctccaatggagagatcttttttgattcaagtactgagatctataagccattaaccacagacttgggtcaacacttcctcttaaaccgtaccctgtatccacatctctgtatttttttttttaaagatgaytttatgtaaatctacacttcacttggtggcaccaaaaactttatacaaatggaaggtgtcactgacaaagaataattagaaacaagtgactcctttctcagatgtgaaagtggcaagtttccactccaatgtcccaagccctgcctgtgtctaccaggcacctgtaggcaaatcaccagtgcaggaggaggcttgccagtagcccttgtctcagtaaggatctatgagtagctatttaaggagcaaatgctggccaaagtgacaaaacttctcttcaggaaagcattaccatgtgtg

SEQ ID NO: 337660 - DNA, 423 bp, Homo sapiens
tttgggaagttcttggttatcatccttttgaataaactttctacccctatctctttatctacctcctctttaaggccagtaactcttagattttcctttttgaggctattttctagatgctgtagacatgcttcattgttttttattcatttttattttgtctcctctgatcatgtattttcaaatagcttgtcttcaagatcattaattgtttcttctggttgatcaattatgttcttaaaggactctgatgcattcttcagtatataaactgcatttttcagctccagaatttctgcttgattcttyttatttaagtctgttaaatttatctgataaaattctgaattccttccctgtgttatcttgaattttttgagtgtcctcaacacatatattttaaattttctgtctgaaagatca

SEQ ID NO: 337661 - DNA, 355 bp, Homo sapiens
tgagtttgtacccaaccaaattatcttattatttcctccttccactccatgcacacaccattttatgttctataaagagagccctattgaaatattttatttcaatttgtctgctctcagttacagctgtgaataacaatgactaacactacgactaccaccaccgaaacaatcaataatgtgcatgacacattatgtaaatttttgcaaaactcattcatatataggcttttctcattttcacagcaataattaaggcatataatatcccattttatagggaaaaacagcaargctcaaagaggttgaacaaataggaggtctccagttcatttcattccaaattttacttccc

SEQ ID NO: 337662 - DNA, 601 bp, Homo sapiens
gttttatttaccctagaatgtcatgtaaatgggattgtatgtagcctcttgagtcaggcttctaacacttagtataatacatttaagattcatccacattattgcttgtttgaatagtttgtttcttttcactgctgaatagcacttcattgtatgattataacacagtttatttatccatacactagctgaaggacattttggttatttccarttttgagcaattatgaaataaactgctataatcattcgtatataagtttttgggggcactagctaaatcatatagaaagtataagtttaactttacaagaacctgccagactactttgtaaagtaacgataccactttccagtctcacaaataatgtataagaattccagatgttcagcatctttgacagcacttgatacttgatattgtccatagctttctttcaaaaattttggtaagtgtgtagtggtatctcattgtgatttcacttttcatttctttaatgatattaaagatattttatgtgcttcttagccaaatatatatatatcaactttggtaacatgtctgaatttcatgacaatattaaaactgtttttttctatt

SEQ ID NO: 337663 - DNA, 478 bp, Homo sapiens
gataactattataaaacaatagtgcatgtaatcatcttattccacttgacgggatgaacatagccatttttcacacagaaaagacagtaaagtactcatttactgctgtgtaatcaatttaaaatttctcattcatatgagctgcagactcattgattagacatggaaactacataagctgtggmaaccctgaattttcctttggctgtcttctctgtgccttatggaacacaattgaaatgacctagaggccagtaaaatggaattactcatcagctttccccagacccattcatacctgctcaaacattgctccatgggacacaatcttttctttggggagaaaatctaagtcacacgcatcttttaaattcccaaatccttgttttcctctcctaggcaggaatctgatttcagaagagggatttgaccttatggaagtccaaaaaataaaatattgatagatagcgaccacata

SEQ ID NO: 337664 - DNA, 478 bp, Homo sapiens
gataactattataaaacaatagtgcatgtaatcatcttattccacttgacgggatgaacatagccatttttcacacagaaaagacagtaaagtactcatttactgctgtgtaatcaatttaaaatttctcattcatatgagctgcagactcattgattagacatggaaactacataagctgtggaaaccctgaattttcctttggctgtcttctctgtgccttatggaacacaattgaaatgacctagaggccagtaaaatggaattactcatcagctttccccagacccattcatacctgctcaaacattgctccatgggacacaatcttttctttggggagaaaatctaagtcacacgcatcttttaaattcccaaatccttgttttcctytcctaggcaggaatctgatttcagaagagggatttgaccttatggaagtccaaaaaataaaatattgatagatagcgaccacata

SEQ ID NO: 337665 - DNA, 602 bp, Homo sapiens
caacatttgtttgtcatcacaagacaatgttttatccttacatatatgtgtgtgtgcatattcatgctttttattcactggcccactactgttattatccrttttggaatatgacagctcaaaaggtggtaactactttctatttgctttatgttctgtctcacatctcagtttagatgtattcctataaaagaatgggaaatctagtaggtatataattcccaagagcatataatgcctaatttgaacactaaagaaaatcctttagacacaaatccaacacatgaggaggtttaaataaaatgggaaaatgtggaaggacagaattctcaatgaacctattcagatagaagaggcttttagagtctatgtgcctacagcctcttctgaaaaaaaaagcacagaacaagaggagaatcccaccctccaggaataaaggcccagtggctgtggctattgcaaacagtcacttgattcctgattgtagggacttctcccagattggctgtgggagttattgcagcagtgtaggaaagggacaggttctgaacccagaaagccctgtgatggacccctgcttttgctgagcatttgctatttgg

SEQ ID NO: 337666 - DNA, 602 bp, Homo sapiens
caacatttgtttgtcatcacaagacaatgttttatccttacatatatgtgtgtgtgcatattcatgctttttattcactggcccactactgttattatccattttggaatatgacagctcaaaaggtggtaactactttctatttgctttatgttctgtctcacatctcagtttagatgtattcctataaaagaatgggaaatctagtaggtatataattcccaagagcatataatgcctaatttgaacactaaagaaaatcctttagacacaaatccaacacatgaggaggtttaaataaaatgggaaaatgtggaaggacagaattctcaatgaacctattcagatagaagaggctttyagagtctatgtgcctacagcctcttctgaaaaaaaaagcacagaacaagaggagaatcccaccctccaggaataaaggcccagtggctgtggctattgcaaacagtcacttgattcctgattgtagggacttctcccagattggctgtgggagttattgcagcagtgtaggaaagggacaggttctgaacccagaaagccctgtgatggacccctgcttttgctgagcatttgctatttgg

SEQ ID NO: 337667 - DNA, 568 bp, Homo sapiens
aatgcatgcaattaaatgcataaatcctaactgcacgtgcatcaaatttgacaaatgcatacacatttgtaaaccaaacttttatcaagatgtagaacatgacccttcctcaccaactcttgccccccatcacagtcaaccactgttctgatattttcaccatagaaaaatttgcctattctagaactttatgtacacagaaccagacaatatatactttattgtataagatttcttttactcaaaataacattcttagaattattcatattgttgcctgtatcagtagctcattccattttattgttgaatagtgatttgtcgtatggatataccatagtttgattattctcatattgatggggatacctgggctgtttccagtttagagttattrtgattaaaattgaacattcttacatgtctttttgtgaagatatttaatttctcctgggtaaatacctaacagtaaaactgttctgtcagaggattaagtatttagttaagggtttcatttgataagaaactgtcagatcttttccaaaatggttgtactattttatacccc

SEQ ID NO: 337668 - DNA, 513 bp, Homo sapiens
agtgcaattttgttacatggatacattgtgtagtggtgaagtttgttttcagtgtatctatcacctgaataatatacgttgtacccattaagtaatttctcatcatccacccctctccgaccccttcacccttctgagtctccagtgtctaccactctacactctatgtccatgggtacacattatttagctcccacttacaagtgagaacatgcagtctttgtctttctgtttctgagttgtttcacttaagataatggcctccagttctactcatggctgcaaaatacacgatttcattcttttttatgtagacttgactgcaggctaggacttcaattcactctacttcacctgactcattcttctggcacaagagggctccctggggcaagttcttccaggataatagcagatgtgcagygcaatagagcaagcccagtcatgctagaatatttcaagccttgacacaatctatgtccagtaagatcttatgtccaaagcaaactatat

SEQ ID NO: 337669 - DNA, 573 bp, Homo sapiens
tggtagtttgtatcttttgaaatatttttctatttcacctaagttgtcaagtgtctggtcatggagttatttatttgtccttattttgttagtatctgtagggtttgtagtgatatatcctcttttattcttgatatagataacgtatatcttctttgttccatggttatctatggctagaagtttattgattttgttgatgttttcaaagaactacgtttttgttttattattattttccattgctttcctttattcaatttcattgatgtctgctaattttttattttctcttttttgctggctttatgtttaatttattctcctttttctagttttttaaatggcyatgtaagattattgattcgaggcttctttcctaatacaagcatttaatgctattaatttccctgtaaatacagctttagcagcataccacagtttttcttaggttgtatttttattttcatcatgttctacatattttataactccccttgaaaactttacgtttgactcattatctatttagaaatgtgtggtttaatttccaaataatcagggaatttccag

SEQ ID NO: 337670 - DNA, 453 bp, Homo sapiens
cccaaggatgcatagctcctcagtagaaccagggctccaagtgagcctcttgactccaaaagtactgctacttctaccttatgacattacctgaggtagaagtttctggcgaaagatctatagagccttgtaatacacaayaagaaaagtcacataggttgcatgtagctacagtcagcttctgctgttgtaaataaaaatcactctgaaattaaggtgaaaacagcaaaggcccaggagattgagtaggggatctgtttcctactgagttgacatctaaccctcgcctaccctcctccctgccagcccccgcaaaatcccttaagtgctctctataattgtaagactggtaaaagctagaactctggggccagacacactggagtccaaatccttaattcttttcttacttgggcaataagtaaattcctacatgtctctcttactttgcag

SEQ ID NO: 337671 - DNA, 379 bp, Homo sapiens
gcctccagggatattcaaccaagatgaattcccttttcttcttccagttgacatctctttaacakcagctaattatactggtgccaagtggatggaagaatgagtacaaaatgaataaggatttacaacccacacagcttttcaaggtagttaagggcttaccacagttagctttaccttgtaaatgtgctctttacatttaccccccaccccccaactaaaaaaaaaattagccagtctataaccttacatgcagtctcactgctaggaaaatgacctgctaagaaattgatccttatttatataaaggagtaaatggctgcttccaatgccaaaatacaattatgtgaggaaataccgttcttgaaaactcagtctc

SEQ ID NO: 337672 - DNA, 401 bp, Homo sapiens
aaaaaaaattagccagtctataaccttacatgcagtctcactgctaggaaaatgacctgctaagaaattgatccttatttatataaaggagtaaatggctgcttccaatgccaaaatacaattatgtgaggaaataccgttcttgaaaactcagtctccactttatttctgcttttcttctctggcagcttaacaagkagaaagattatgagctttgaaaacagataggcaagggttcagatcccagtcctgctatttgtcttcatacgtctaatctcagtttctggatctataaaattggcataatacttcttaccttgatgtattcttggtaggcctggagatcccatagcacaggctataaaaggtgctcagtaaacaagagctttaatccctcctcc

SEQ ID NO: 337673 - DNA, 401 bp, Homo sapiens
aaaaaaaattagccagtctataaccttacatgcagtctcactgctaggaaaatgacctgctaagaaattgatccttatttatataaaggagtaaatggctgcttccaatgccaaaatacaattatgtgaggaaataccgttcttgaaaactcagtctccactttatttctgcttttcttctctggcagcttaacaaggagaaagattatgagctttgaaaacagataggcaagggttcagatcccagtcctgctatttgtcttcatacgtctaatctcagtttctggatctataaaatkggcataatacttcttaccttgatgtattcttggtaggcctggagatcccatagcacaggctataaaaggtgctcagtaaacaagagctttaatccctcctcc

SEQ ID NO: 337674 - DNA, 401 bp, Homo sapiens
aaaaaaaattagccagtctataaccttacatgcagtctcactgctaggaaaatgacctgctaagaaattgatccttatttatataaaggagtaaatggctgcttccaatgccaaaatacaattatgtgaggaaataccgttcttgaaaactcagtctccactttatttctgcttttcttctctggcagcttaacaaggagaaagattatgagctttgaaaacagataggcaagggttcagatcccagtcctgctatttgtcttcatacgtctaatctcagtttctggatctataaaattggcataatacttcttaccttgatgtattcttggtrggcctggagatcccatagcacaggctataaaaggtgctcagtaaacaagagctttaatccctcctcc

SEQ ID NO: 337675 - DNA, 622 bp, Homo sapiens
actcattcatgattaactccttgttttacttaagcaaattatgtttctttcactatcaaatatagtaccttgaataaaacatacaggtatgcacttgctgtgtcctcaagacaacaaggaactcagcctagctagagagcagtctccaaggtgaatgatggtgtcagaaaagtctgcagaggcagggcagcaaatatcatgagggttcttgactgccaagctttctgacttgattctgttccaagaagcagtaaacagccagagcaggttaaggaaagaagtgacataatgaaaagattacttgggggaaataagcctggcagctrtatcaggactgattaaagcaaaggctcttaacatggtgttcatgtacttaggttggaaagacttgacagctttatttacactaatctcaatcaaaatgtggcattttgttctattttgaatgtagcaaccaacttcagtagtatcagcagtacttgtatgtttgccaacataaaaggtacagataattttatatcctgttaccattgttgcaggtatatcaaaataccaattatacctattactgccttaaaattataatgcttactgaacctatcactgcatattgttgtataag

SEQ ID NO: 337676 - DNA, 343 bp, Homo sapiens
tgtctccacctgctgagaccttcaggaaaattctgctgaaagcaactgaataagatttgggaataaatttaaattatcattggaaaatctgtccatgacccagctaataccaggaacataaatatcctgtgcattgatttaaagctcctggttatttaatactgtaaggcaaatgctgatcttttaattttgtaaataatacgggtaaaatgaattcaccccactacaacaaaatgaccagatatttgaaattttatagaataaaaatcatttgttattggatrtcattgcagatttttctagaatgctgagtttttctatcatcaaatttcaccttctgttg

SEQ ID NO: 337677 - DNA, 502 bp, Homo sapiens
gctgagggactaagtccctgagaacagagataagcagtcttttcagggttttgccattttgatactgaggagatttaggagaggcctttccagcatttggggatatctgttaagtatcagaaatcacagaacttggtcctgtgggagactttggtcacagaaggtcaaactgagaagttccagcaccctggtcatctctgatgaaatctgaggaaatccacggatttgtccacacgcaccctgcctcccttgaagccctgcaatgggcagtaggagggcctgtgggaaacactgccattgcaggtragaggctgcaacagagggccccaccagctcgcctcagaattactccttggattataagaaagcctcgggcacgcccacaaagttcaaaaaaagtgccacctgggacttcctagtcagttcagagctcttttcaaactaaatgaccactctgaactgctgcattttgaatccaccagctgcagaatcaaccagcact

SEQ ID NO: 337678 - DNA, 387 bp, Homo sapiens
aatccacactcatcttgtccatttcccaccccaaatacgaaatcagccatttcttcaagttctatttcatttctgtgaakagtggtatttagaaaccatcatctgggctccagtgctcagtgttacaagattggtgttgcttcaaggcctttttagaagatgtcgttaggaaaaatgttgtaaatgagaaaaataaaagttaacattacagtattttaatctctttgattttatacctttctcgtttctttcacactaacaatcctggtagccaacaacattaacataatgacttatttcatttcccatcctatatacacagaatagtttcaaaacaactatgccaatatggttaataacagcagtcctgcagaattctttgcagct

SEQ ID NO: 337679 - DNA, 519 bp, Homo sapiens
gctttgttgttccatttatagagcacaggcagagtagatttagcataatttctaagggctctaggattttcagaatggcaaatgaacattggctgcaacttaaagtcatcagttgcattagcccctaacaagagaatcagcccatcctttgaagctctgaagccaggaattgacttctctctaggtatgaaagaaccgatagcatctgcttcccatagaaggctgcagtgaaaatctgttgcttagtgcagccatcttcatcaatgawcttagataggtcttctcagtaacttgctacagcttctacatcagcacatgctgcttcatcttgcccttttatgttatggaaatggcttctttccttaaacgtaatgaactaacctctgctagcttccaacttttctcctgcagctttctcacctctttgccttcataaatggcgttaaagtcttgttttcgattaggccttggtttaagggaatgtgctggtttgatctatccagaccactaaaactttct

SEQ ID NO: 337680 - DNA, 519 bp, Homo sapiens
gctttgttgttccatttatagagcacaggcagagtagatttagcataatttctaagggctctaggattttcagaatggcaaatgaacattggctgcaacttaaagtcatcagttgcattagcccctaacaagagaatcagcccatcctttgaagctctgaagccaggaattgacttctctctaggtatgaaagaaccgatagcatctgcttcccatagaaggctgcagtgaaaatctgttgcttagtgcagccatcttcatcaatgaacttagataggtcttctmagtaacttgctacagcttctacatcagcacatgctgcttcatcttgcccttttatgttatggaaatggcttctttccttaaacgtaatgaactaacctctgctagcttccaacttttctcctgcagctttctcacctctttgccttcataaatggcgttaaagtcttgttttcgattaggccttggtttaagggaatgtgctggtttgatctatccagaccactaaaactttct

SEQ ID NO: 337681 - DNA, 519 bp, Homo sapiens
gctttgttgttccatttatagagcacaggcagagtagatttagcataatttctaagggctctaggattttcagaatggcaaatgaacattggctgcaacttaaagtcatcagttgcattagcccctaacaagagaatcagcccatcctttgaagctctgaagccaggaattgacttctctctaggtatgaaagaaccgatagcatctgcttcccatagaaggctgcagtgaaaatctgttgcttagtgcagccatcttcatcaatgaacttagataggtcttctcrgtaacttgctacagcttctacatcagcacatgctgcttcatcttgcccttttatgttatggaaatggcttctttccttaaacgtaatgaactaacctctgctagcttccaacttttctcctgcagctttctcacctctttgccttcataaatggcgttaaagtcttgttttcgattaggccttggtttaagggaatgtgctggtttgatctatccagaccactaaaactttct

SEQ ID NO: 337682 - DNA, 444 bp, Homo sapiens
cactctctcctctagccttctctgcatttttattagaaaatgctagaaatctgttaaaagagatgatcaagcatggatgggaatgaaggcattctcaatctccaggacaacgactttagggcaaattgatagatttgagagcagatggtacccaccacacatgcctttcccaagggaaatgaggcccagcctttggcattgtcgcatctatatktagcagcctgaatttgcctcattgaggtctcgatgtgcactttacaaagtgtcttggtactgctcacaatagagaagtatcaaaccaagaatattcctttcagccacagggccctgctttccactggacatggcatattcccatggcatgccttcatttttgctctgtgtgtgcatttttacccttttcttccctctaatactctcccttatgtagttttttaaggcagg

SEQ ID NO: 337683 - DNA, 444 bp, Homo sapiens
cactctctcctctagccttctctgcatttttattagaaaatgctagaaatctgttaaaagagatgatcaagcatggatgggaatgaaggcattctcaatctccaggacaacgactttagggcaaattgatagatttgagagcagatggtacccaccacacatgcctttcccaagggaaatgaggcccagcctttggcattgtcgcatctatatttagcagcctgaatttgcctcattgaggtctcgatgtgcaytttacaaagtgtcttggtactgctcacaatagagaagtatcaaaccaagaatattcctttcagccacagggccctgctttccactggacatggcatattcccatggcatgccttcatttttgctctgtgtgtgcatttttacccttttcttccctctaatactctcccttatgtagttttttaaggcagg

SEQ ID NO: 337684 - DNA, 514 bp, Homo sapiens
gaatcttagaattgctcagaaatatattaaaatccagccctcctgcatccaccactgaacctacccatcatgccttcaaagaacctatatctgaaaagtagtaaagaacatacartgtatgttttgcatgttacggctttttaatgtactcaaaggagagtatattatacatggagacggatgatcataattctctaaggctcctggaaggcagaaatctttcccctgacatctctccaagggggtagaggtgatctttgaatgcaaaaggaaagaaggtcggtaacttcaattaagtagtccttttcatgaagacagaggaagcatccaaaggtttctggcaattcctttgttttatagagatagttaaaaggaaaccaagaaggaagagaaatcttttcacttcttgtgacaggccttgccaattgtcttattttaaggaaacactggttttttgttttgctacccagttccagtaaatgatgcctagaaaatggcacagccattgtaatcc

SEQ ID NO: 337685 - DNA, 498 bp, Homo sapiens
tacctttttggagtttacctggtgatattcaaaataaggccttgaattaaattaggcatcaacatcgtgattctatagaaaaggaaactgaggctaatgacttgtccaaggatctgactccaaaacatgttctcttttctgttataccctcctgagcagaaactcaatgaatgcagagcatagtcagtagtagaaatacttagcagagaattagaaacatctttcttcagtccaacaaaatcccagggcaaaacctaccattacttttatttctttgtaattttgaaggaaatacaaagtacataaagaaaaaaaaaatgggagcaatataaaaccgcaaaagccatgttttytactagcttacgggattccagttctttcctcagatgatgttcctgggagtcaggaaaggaaagcctggattccttttaatgtcttgtaaaaagctagaaaatttatcattttttctgatattttttctaaatatagacaatacat

SEQ ID NO: 337686 - DNA, 576 bp, Homo sapiens
gtgactgctaaaaacacaagcaaattattcaattcaatctacatgtactaaggagcactttctatgaactgttatttttaaaacccaaggggttcacaggaccactgctgttgtaggaacaaccatgtactgcaataattctcctacccaccccagaatgaccacagtggcctctgggcagcagggaaatgaggaacatagatttgcttacttgggttaattacatcatgataggtgtrtaggtttcctacttccacccaatttatgcaccaagtttcaggaccaattctattatacaaggtcacataatgaaagttaagaaattaattttactgaggaatgagaaaattcacaaggtcaaggtcagcaatatagaaatgcatgttgtactttagtctttcattttcccactgaaaggcaggccagagccagtgaggcaggtgtggagatgtgtccctcagacctcacctcaagggagacctgccataaagagtacaactagtgatgggtttctctttggaggcctctgagttctaccacagtaaggtcgtgctcttcctgaacagctcccaacca

SEQ ID NO: 337687 - DNA, 576 bp, Homo sapiens
gtgactgctaaaaacacaagcaaattattcaattcaatctacatgtactaaggagcactttctatgaactgttatttttaaaacccaaggggttcacaggaccactgctgttgtaggaacaaccatgtactgcaataattctcctacccaccccagaatgaccacagtggcctctgggcagcagggaaatgaggaacatagatttgcttacttgggttaattacatcatgataggtgtgtaggtttcctacttccacccaatttatgcaccaagtttcaggaccaattctattatacaaggtcacataatgaaagttaagaaattaattttactgaggaatgagaaaattcacaaggkcaaggtcagcaatatagaaatgcatgttgtactttagtctttcattttcccactgaaaggcaggccagagccagtgaggcaggtgtggagatgtgtccctcagacctcacctcaagggagacctgccataaagagtacaactagtgatgggtttctctttggaggcctctgagttctaccacagtaaggtcgtgctcttcctgaacagctcccaacca

SEQ ID NO: 337688 - DNA, 576 bp, Homo sapiens
gtgactgctaaaaacacaagcaaattattcaattcaatctacatgtactaaggagcactttctatgaactgttatttttaaaacccaaggggttcacaggaccactgctgttgtaggaacaaccatgtactgcaataattctcctacccaccccagaatgaccacagtggcctctgggcagcagggaaatgaggaacatagatttgcttacttgggttaattacatcatgataggtgtgtaggtttcctacttccacccaatttatgcaccaagtttcaggaccaattctattatacaaggtcacataatgaaagttaagaaattaattttactgaggaatgagaaaattcacaaggtcaaggtcagcaatatagaaatgcatgttgtactttagtctttcattttcccactgaaaggcaggccagagccagtgaggcaggtgtggagatgtgtccctcagacctcacctcaagggagacctgccataaagagtacaactagtgatgggtttctctttgraggcctctgagttctaccacagtaaggtcgtgctcttcctgaacagctcccaacca

SEQ ID NO: 337689 - DNA, 607 bp, Homo sapiens
cgactcttattccacttgttcagaccgaacatatgcggtcacttgtgtcccctcttattctcctagtcaacatccaattgagcagcaagtccagtgctctctgccttcaagttagttatattgagaatgaccacttttaggcccctcctctgatactacattgggtcaagccagtgtcatctctcagcattactgggacttgggttaattaggtaagatgaaacatgaaggattagaaataaaggctgaatacagacttaaaaccaggaatccagactaaacactcaaacatggagtccatcgtggccccagggcctttgcgcttggcattctctccatctggaacactctgcccattgygttagttgttctctaaatgccttcaggcattctcagaaacgtcctgactttgtcttccttcatggtacatgtcatcacctgcctgtgtattgtttccttatttttttctctttctttcctactaggctgtcagcccatcagaatggagatttctgcctgcttctccccttggtgtgccttggtttctggaacaggcccagcatgcagtggggtctcagtgaatgtgcactgaaggagtagatactgg

SEQ ID NO: 337690 - DNA, 554 bp, Homo sapiens
cactacctatttactattctaagtaattagaacataattctctactattggttttttaaactaataaatccttaagtattttatatcatcttttagttaatattaactttgagaagcatcacaaaccatacttactaaatttacaaagacaattctagctaatttaagaatcatcatctatacagtttcaaaaaaaataaaattggctgctagacaattttatagatgttcagtggttcatgtgtctatttctgcattttattacagttaaattgcccaataaaagctaaagggcaargcagagataccatgtgctctttagaaaaagctataaaatttaagacagaagaaatttggtctgtaatgacaatttttatgtttttctggctttaataacttgattatataaaatgttttcaaatacagttgataaaatctataagtataatgttttggcaaataccatattcatttgaaaaagtaatcgaattgaatatttaaaataacattataaacaaatttgtaagtggggtacagagtaaacatgtaagtat

SEQ ID NO: 337691 - DNA, 353 bp, Homo sapiens
ttttcatacatcatccctatctctactaacataagccttttttctgtcttcctgttatccaatatttttgtatgaaaaaaggcttggtcttttttgttagatcaatattcactttttacattaatatgacaaggtagatatttaccccagccaaacaatagaatatgttatgcttactttttcctttcctgcagaacattttcctgatattggcaattgcttcatatatratatttcacatagctttctccacatgaatcgttaacttatccacaagccctgaaatgtctaagttttgattcaatatgtacagatccatcaggttctctatgaactttaccttcctctggatt

SEQ ID NO: 337692 - DNA, 596 bp, Homo sapiens
aatgctgcataaggctatgaagcttttgagagagtccttgttcatcaatgtctgtttttttgcattcacacttaatgtatagctagagttggtagaaacttttaggctggaaatgttttcttcttatgaattttgaagatactttttcactattttctatttttcagcattgccattgaaaagcccaaagccattttgtagatgacctgtttttctttctgaaaataaataggatgtttcatttgttccaatattttttaaaaactatttcattagttagaatggtctaaaatatcatttgaagttgcaatttacatttatttgattactggttcatgattttcatcttaatttgcttttcaacctattctctagatggctatttatcttgctgaattaaggtagaggaaaaatcaataaaattatttaaaaataaagtttaggtttcaaaggcctttaaatcctatrctacacattgaaatcacctggcaatctttacaaaccatagatgcttaattctcacctatgttacttggtatggcatgcaaccaaggcatcagtatttttaaaagcttcctaggtcattataatgtgca

SEQ ID NO: 337693 - DNA, 584 bp, Homo sapiens
cagatgcccacatattaaatatacaaaatgaggccaggcgtggtggaatcccaacactttgggaggctgacgtgggcatatcacctgaggtcaggagttccagaccagcctggcgaacatgacggaaccccatctctgctaaaaaatccaaaaattacatggacgcagtggcaggtgcctgtaaccccagctacttgggaggctgaggcaggagaatcgcttgaaccagagaggtggaggttgccatgagcagagttggcaccactgcattccagcctgggagacagagccatgctccatctcaaaaaataaataaataaatatacaaaatacaaactaatgtcttatgtgtaaacgattatgtttattttaacatgtaaattgtgtaattaacatcaagyagcaataaaatcaatccagagacaatattctgttggaatgagtggatttgtgatgcaaatttcaggtcatgagcaaaagtattagtagacttccatgtccatgttgtctaaaccaggagaagtagatgagcttcctcttcctagtgggtttgacacaaaatggagtaaattggagtttaggag

SEQ ID NO: 337694 - DNA, 584 bp, Homo sapiens
cagatgcccacatattaaatatacaaaatgaggccaggcgtggtggaatcccaacactttgggaggctgacgtgggcatatcacctgaggtcaggagttccagaccagcctggcgaacatgacggaaccccatctctgctaaaaaatccaaaaattacatggacgcagtggcaggtgcctgtaaccccagctacttgggaggctgaggcaggagaatcgcttgaaccagagaggtggaggttgccatgagcagagttggcaccactgcattccagcctgggagacagagccatgctccatctcaaaaaataaataaataaatatacaaaatacaaactaatgtcttatgtgtaaacgattatgtttattttaacatgtaaattgtgtaattaacatcaagcwgcaataaaatcaatccagagacaatattctgttggaatgagtggatttgtgatgcaaatttcaggtcatgagcaaaagtattagtagacttccatgtccatgttgtctaaaccaggagaagtagatgagcttcctcttcctagtgggtttgacacaaaatggagtaaattggagtttaggag

SEQ ID NO: 337695 - DNA, 568 bp, Homo sapiens
tataatgtaccttttagtttagtagtccacagattaatcctttgtgtttagttttcagccctaccatcttcatccatgaaggtacaagagataagatacacattcaggagagtcatgaaaaatccctggttctctgaccatgccttaatatgagaatttaattttctgcaccagattttattttttcttttagctccccaatgcaatcagaagcaggcaacccatttctcagtccctgactccctcatgcctgtgacattattctttgctatggctttcaatacttggtttgcaaaatcatgtacttcaattcaggtggccataggtaaaaaatttaactgattttgccactggtttctgtgtacttctagtatcctrtcatttaatggattcagatatgcctggccttcaaacacaaataggccaactgaacagtacaaagtgcctattcccacaactcctctgatggcaaagattgctccagttgcattcagtggttgtaacagaaaccatgccagccacctcacagaaaggaatttatttctgggaatcagatgtttataaaagt

SEQ ID NO: 337696 - DNA, 593 bp, Homo sapiens
acacatatgctctgtatgtacatttatccttgtccttggctttatggccatccacatgtatagtggtaattgtccagtcaatagctatagcccaagtgtctccatgtgaaaggcatggggaagtataaaacaaaccaaaataacattaaaacatagtatttggaacagcatatatatatgctataatgttattggaacagcatatatatatgctataatgttaaaggcaagattaactgtacactgacacagtagtctaatcagtaagttggtttctcaaatatctgaactgattatctccctcaattgtacaaattcctggagctcatcatatccaaatctgcttcacctgtttgctatctcattgagtcagccagaaaattgaggacctatttcttcctgccttaagcycaatatctaatgaatcacaaaggcacagcaattctaccccgcaaatatttcccagatatgtcactttttcaccactttggggatcacctctcactgttgtgacaggaaccgtcacagaatctaactctgctcctcccttactacccacccaatcactaccctggatctttctaaaactcaaa

SEQ ID NO: 337697 - DNA, 578 bp, Homo sapiens
acagtgatactctaaatcaaatcaagggtgtttttattgctstctggaattacacaaaagtttgaagagttgaagaatcactgcctttgtcaaatagcatcactgaaacatttcctcatttaaactatcctcttgaagacccaacttctataatatccataaaaataataaatgttatggtttattgaaaatttactgagttctatatcaacctgttttattattatgcagaaacttcttggtaaaaaatactttttattaccctgatatttaagtggcttaaaacaacaataaatacctgtaagcctcaaagtttctgtgagtcaggaattcaggagctgcttaagtaggtgtcctagctctgaatctttcatgaggtttatgtcaagatctcagtcaagtcagaggaagtcttgactgaaatagagaagctgattccaagatggctcagtgaaatgggcaggaagtcaatgaagcctactggtagaagcccttggtttctcccttgtagcttcttgagtgttctcacaacatgatgattagcttcccagagtcagtgatccaaaagagtgcaagat

SEQ ID NO: 337698 - DNA, 594 bp, Homo sapiens
taagtctttcctaagtaattttcagtgtattctgaaacacttaattagtttcctttaaaataaataagtcattaagaagctacaaatcagtgagttaattagctgcattatggtcttttagctctttcagttgaaataagctgatgccaaatctataaagaaataaactattacccacgagaagagacaatttttaggaagttataacaattaccatgaatttcaagtttagcattttcaaagcttagtcaaaatgaatgagtgcatgatgaaaataaatcttatagataaaaccaataaattgtataaagattagatttaagaaatctcaaataattacactaatttttgtcatatatttcactattgaatggagtcctccttccccaccccaaccccaccataacccaatattaagtcttcacactcaaatatgctatgttcatgtacaaacgatatataatttatcactggcaactggcaagcactgaatatagatacccctaataagcamtaatttatgtaagtcctgaatgtaacactactgcaatatcaagcctggttaaaaagatactgacagcatttcaattcaca

SEQ ID NO: 337699 - DNA, 665 bp, Homo sapiens
cttctcttttgtaaactttccttctcatcaggaatgggggtatttgatttggagttcatatgcccaatatcagggataaaatagtaggattctaaaatgtaatcttaatagcttagtgattttgaaaatgtttttttctgcaaagtggttttataaataatgctttatcccatgtctgctcttcatctctgcatcccaatacattatgtctgcttttcacatttacctagttcatgwgaacagatttcttttccatagatttattgatttctaaaagtgacagggtgacatcactctattgtgaattgaccctttcatcagaattctgagaaacaactaatatgtactaatataatcttaagtgattaactgctacatatggcacaaaggaagatttcaggttccaccactaataagccctatactcccatatggatgagtaaattaatggtgaattccaggtctatgcaagataattttgcaccttttaaaaaaaattaccaaaagtccacccctcccccaaccccgccccaccactaaatatcaaaagatagcaagaatctcacttcggggaagatggaacagacatacttttttctattctacctgctaagtacaactaaaaaacctggacacagtatgtataacaaacttagggagatgcc

SEQ ID NO: 337700 - DNA, 665 bp, Homo sapiens
cttctcttttgtaaactttccttctcatcaggaatgggggtatttgatttggagttcatatgcccaatatcagggataaaatagtaggattctaaaatgtaatcttaatagcttagtgattttgaaaatgtttttttctgcaaagtggttttataaataatgctttatcccatgtctgctcttcatctctgcatcccaatacattatgtctgcttttcacatttacctagttcatgagaacagatttcttttccatagatttattgatttctaaaagtgacagggtgacatcactctattgtgaattgaccctttcatcagaattctgagaaacaactaatatgtactaatataatcttragtgattaactgctacatatggcacaaaggaagatttcaggttccaccactaataagccctatactcccatatggatgagtaaattaatggtgaattccaggtctatgcaagataattttgcaccttttaaaaaaaattaccaaaagtccacccctcccccaaccccgccccaccactaaatatcaaaagatagcaagaatctcacttcggggaagatggaacagacatacttttttctattctacctgctaagtacaactaaaaaacctggacacagtatgtataacaaacttagggagatgcc

SEQ ID NO: 337701 - DNA, 665 bp, Homo sapiens
cttctcttttgtaaactttccttctcatcaggaatgggggtatttgatttggagttcatatgcccaatatcagggataaaatagtaggattctaaaatgtaatcttaatagcttagtgattttgaaaatgtttttttctgcaaagtggttttataaataatgctttatcccatgtctgctcttcatctctgcatcccaatacattatgtctgcttttcacatttacctagttcatgagaacagatttcttttccatagatttattgatttctaaaagtgacagggtgacatcactctattgtgaattgaccctttcatcagaattctgagaaacaactaatatgtactaatataatcttaagtgattaactgctacatatggcacaaaggaagatttcaggttccaccactaataagccctataytcccatatggatgagtaaattaatggtgaattccaggtctatgcaagataattttgcaccttttaaaaaaaattaccaaaagtccacccctcccccaaccccgccccaccactaaatatcaaaagatagcaagaatctcacttcggggaagatggaacagacatacttttttctattctacctgctaagtacaactaaaaaacctggacacagtatgtataacaaacttagggagatgcc

SEQ ID NO: 337702 - DNA, 665 bp, Homo sapiens
cttctcttttgtaaactttccttctcatcaggaatgggggtatttgatttggagttcatatgcccaatatcagggataaaatagtaggattctaaaatgtaatcttaatagcttagtgattttgaaaatgtttttttctgcaaagtggttttataaataatgctttatcccatgtctgctcttcatctctgcatcccaatacattatgtctgcttttcacatttacctagttcatgagaacagatttcttttccatagatttattgatttctaaaagtgacagggtgacatcactctattgtgaattgaccctttcatcagaattctgagaaacaactaatatgtactaatataatcttaagtgattaactgctacatatggcacaaaggaagatttcaggttccaccactaataagccctatactcccatatggatgagtaaattaatggtgaattccaggtctatgcaagataattttgcaccttttaaaaaaaattaccaaaartccacccctcccccaaccccgccccaccactaaatatcaaaagatagcaagaatctcacttcggggaagatggaacagacatacttttttctattctacctgctaagtacaactaaaaaacctggacacagtatgtataacaaacttagggagatgcc

SEQ ID NO: 337703 - DNA, 571 bp, Homo sapiens
cttcaacaggtggtcatcccttaatctttaaaattcctagtgataaggacttgtttactcagaaggaaaatatttattgtttttaattagtaaaaaataaaatgtcctctgttttctcctagacaaaatgaactattttttcctatatgtgcttccataaatgtttgtttctgtgttctttggggattttctccacttatgatgaccttcctgttcataaaaattgggcctatatttgagccatgattttaaatgataatgtccatggaggtgctccatgcatgaagtttggattctctagtttcagagagcccatggcattctacctgaatatctctataacttctataataatgtatggarcaatggctacatccaaagcagtgtgttaagtactggggaagcaaaaccccaacttttaacactgtatcactgtggagaggagaacctgtgatatccatttccaatttgtgttttagattttcatgcaagttgtctctgtgtatctaaattttaactcccatggggatagaatcatttctggtctttgttttacctccataatgtttaa

SEQ ID NO: 337704 - DNA, 485 bp, Homo sapiens
atggcaaattattagccaattaataactacaaagacctttaagtagtcgctgaaaggaaaagcaacacatctctcactttaaatcaaaagctagaaatggttaagcttagtgaggaaggtatgttggaagcttagataggatgaaagctaggcgtctggcacctaagagttaaccaagttatgatggtaaaggaaaagttattgaaggaaattaacagtgctactgcactgaacacatggacaataagaaagcaaaacaaccttwttgaagatatggagaaagtttgagtggtctgcatagatcaaaccagcaacaacatttccttaagcctaaaccaaatctacagcaagatcctaactcatccatattatgaaatctgagagaggtgaagaagctgcagaattaaaattggaagctagcagaggttagtttatgaggattaagcaaagaagccctctccacataaaagtgcaaggtgaagcag

SEQ ID NO: 337705 - DNA, 525 bp, Homo sapiens
aggtggttggatcacttgagatcaagtgttcgagaccaacctgggcaacatggcaaaaccccatctctatcaaaaatacaaaaattagccagatgtagtggtgtatgtctgtagtcccagctacttgggaagctgaggtgggaggatcgcttgagcctggaggtggaggttgcagtgagctgaggtcacaccactgcactccagcgcgggcaacagagtcagaccctatatacaaaaaatggtgacagctctgagtagtaaagaatagcagcaaatggcaggatcacagaaataaaatgctttaaattacaggtgatctagggtgttctaaaaagtctactgattctcacacaaagaagatggctactatctgaatcacacatcctaacaagtgttggcaagggtgtaaagaaattggaactctagtgtactgctggtggagtataagatggtgcagctgctataaaaaatatggstgctttttaaataattaaaaatgaatgaccatattatctagcaatttta

SEQ ID NO: 337706 - DNA, 364 bp, Homo sapiens
agactctctctaaaaaaaaaaaaatatatatatatatatataattaggaaaatctaagtatgtaaccatataacttctaaatataataagcaaaagcaggatgaactgcataaaaaacagataaatcaacaatttactggattgtacaagcacagtatatttgaacaaaacaaatcatagagagagagaatttttattctttgttaaattttgttttyagcatatggaaacatttatttatgttatacaccaccaaggaagtttcagtaacctcttatgaatcaacatgttataaaatgtgatttctaactaaaatgcaataaaattagaaaccaataacaatatagaattactgtaagttgct

SEQ ID NO: 337707 - DNA, 657 bp, Homo sapiens
tttaataaaaatgatttcactaagcattctattcaaaaagaccaaaaagacacaatagagtgtccaaagaatcacaaaaacccctaaacctggtgctttgaaaaatctcagaacctagacacatccctggagaaattatttaaagaaaaaaaaattaggttgattgaatatcaaaaatacagaatgaagaaatagaaataatcgtagtatgccagcttaaaagcaatgaaagaaaatcctgagcaattctatctttttcagtcatagttatggaaaggaaactcagccaaaacctttatttgaaaacaagaaggaagactgggggaaaaacgtccgygtaaagagctaactttgttataaattaatgagaatttccaagagcggagacaataatgataggaacaacaacaatcattttgaaaacctgttcaaatatgtgctatataaaaagaagaattatgcataaagatgatttcctcaagtttcctctcaatcgggagaactggatatttagctttgtttacattaatctgaaaaaagaaggtgattcatggaaaaagtagatcagagctgatgtctgcttaactgtgctgtgttttttgtgaaaatttttgttcaactaaaaatttactttgagttatgggaaattttaggata

SEQ ID NO: 337708 - DNA, 532 bp, Homo sapiens
tttggaactttctctgtgggaattcttcccttcagacttgaacttaagatatagtcctccagggagaattatggttgtttctaccagatttctgggacattaaaatcacagcaccagttaaatacatatttstaacctggtgtttctgtggccataggtggtgttaattctggctcaaaaactgtatatgtttttggtaaatgacattttagcgagattttgctggcctcattcagagctaaagctgagacagacaagtttccttctttcctttgggatataaatagtttttctagattgtgtcctgtggttattcactccagggattgctggttttaaaagacatagtgtttagggctttgtttgggctgtagtcattgctccaattctgcgggcctcgagttaaaatggaagctctagtcgaagagagatcagttgtttccccttgggcacccttcagcttcagtcctcacttctttttttgcttcattccttttcaatagtttggtcctgtgggtattttttattattt

SEQ ID NO: 337709 - DNA, 532 bp, Homo sapiens
tttggaactttctctgtgggaattcttcccttcagacttgaacttaagatatagtcctccagggagaattatggttgtttctaccagatttctgggacattaaaatcacagcaccagttaaatacatatttgtaacctggtgtttctgtggccataggtggtgttaattctggctcaaaaactgtatatgtttttggtaaatgacattttagcgagattttgctggcctcattcagagctaaagctgagacagacaagtttccttctttcctttgggatataaatagtttttctagattgtgtcctgtggttattcactccagggattgctggttttaaaagacatagtgtttagggctttgtttgggctgtagtcattgctccaattctgcgkgcctcgagttaaaatggaagctctagtcgaagagagatcagttgtttccccttgggcacccttcagcttcagtcctcacttctttttttgcttcattccttttcaatagtttggtcctgtgggtattttttattattt

SEQ ID NO: 337710 - DNA, 590 bp, Homo sapiens
catatcattagatactgtgatgataccatatgcagcctacttgttatccagttaaaatgctataataggtaagttcttaacgtttctttttagtgtggttctgaccaaagctgtggacatcaatagatgcattattaacatgttatcttccaatgtaatggaattgccatatttagacttcaaaaaagtctaagctattgcccaagcctgagtcagactcctctgagtcttctttctgactaggccctgaccttgggctttgtccttagttccagtggctctgcctgtttagagcacttttagcaagaatcttgctgggctagtctagtgaaaatcccctgcccttacataaacacccttgatatctgatcaaattccttattccttaccctcaatatcttgtcatgctggtttaccttcaataaaaatcctgtcaagtcagtgtaagaagaatccccttatccctgatgttttctcttagtaacttttcattcaccagcccctactccttgaccatagattcgcayttgttcctcttgtaatcagagtcaagaccaatgtctctaccacactataagacccattgcaac

SEQ ID NO: 337711 - DNA, 533 bp, Homo sapiens
attcatatgatttcatttttttaaattgtttgagatttgtttgtggcctaccacatggtctattcttcaaaatgttccattgctgaggagaagaaggtatgttctgcggctgttgaatgaaatgttctgtagatgtctattaggtccatttggtctatagtgcagattgatatttctttgttggatttctgtctggatgatgtgttcactgctgaaagtagggtgttgaagtcaccagctattattgtattgggtctctctctctctttagctctaataatatttgcttaatatawctggatgctgcattgagtgcatatacatagacaattgctgtattctcttgctgaattgactcctttatccttatataatgaccttctttgtctctttctaccatttttatcttgaaatctgtttaactgataaaagtatagttactcctgctctttattcatttacatttgcatagaatatctttttccatcccttcattttcagtctatgtgtgtttttataggtgaattgagttt

SEQ ID NO: 337712 - DNA, 533 bp, Homo sapiens
attcatatgatttcatttttttaaattgtttgagatttgtttgtggcctaccacatggtctattcttcaaaatgttccattgctgaggagaagaaggtatgttctgcggctgttgaatgaaatgttctgtagatgtctattaggtccatttggtctatagtgcagattgatatttctttgttggatttctgtctggatgatgtgttcactgctgaaagtagggtgttgaagtcaccagctattattgtattgggtctctctctctctttagctctaataatatttgcttaatataactggatgctgcattgagtgcatatacatagacaattgctrtattctcttgctgaattgactcctttatccttatataatgaccttctttgtctctttctaccatttttatcttgaaatctgtttaactgataaaagtatagttactcctgctctttattcatttacatttgcatagaatatctttttccatcccttcattttcagtctatgtgtgtttttataggtgaattgagttt

SEQ ID NO: 337713 - DNA, 562 bp, Homo sapiens
accttctttgtctctttctaccatttttatcttgaaatctgtttaactgataaaagtatagttactcctgctctttattcatttacatttgcatagaatatctttttccatcccttcattttcagtctatgtgtgtttttataggtgaattgagttttttgtaggcagcatattgttgggtcttgttttaaaaaatctacttagccactttgtcttttgattggagaatttggtccrtttacattcagtgttattatttataggtaagcacttactactgctttttttattatgtgttttctggtagttttgttggtcctgtcttttttattttctttctgttttcttttgtttataagtaatttttctctcacagtatcttttaatttcttgctttttactttttgtgtctgtgttatagatttttgctttgtgtttagcatgaggcttgcaaataacatcttataaccaattattttaaaacgatgaaaactttaatcacaaagaaaaaaacacgcaaggaaaaaactaaaaatctcatgctttaaattcattcatttca

SEQ ID NO: 337714 - DNA, 464 bp, Homo sapiens
gcacaatttcaattcctggcctgttagatgttaaaatctagtggacacttgccacttgtaccactgtttcataaggaagattaatatgaaattccaagtaacgaacttataagtacagtttttaaagctggacaaggcgttaatttatcctcacagacaggaactccatggactgaggaagatatactgagaaaataaagaagaacaagaatttctgcccttgcctaaatgagagatatgytatcaagataattgaggtaatgtatttgaaagcactctcggtccatgataatctgaatgtttctgtgcccctaaaatttgtatatttaaatccaaaccccctgggtgctggtattgggagacaggactttgggaggtgattaggtcctgagggtggagaccttatgaatgaattagtgctcttataaaagaggccctagagagctgccttgccctttccacct

SEQ ID NO: 337715 - DNA, 540 bp, Homo sapiens
tcccttctcccagcccctgggagtctgtagtctattgggtgaaacagtaattgtaacatgatgttagtgctgtgacagtgtaaatacagtgatggcacaatggaagaaatgactgatcagaaataggccactttatgcagtccttgagcaaatttagtccttctacaggagaataagcaattattaaacaatgtcaacataactagaaatgtttatccattcataagtgttattttgtaacatcgctataattgcacagcatgtataatctccgtatgatgataacagaacccagagtacttggaatatttacagaggtaaaaatatacaaaacctttgcaacaaagccytttgtcagattagatttttttttttctcttatcccatgcctttagagagtttgaatgccttctctaagattgggagacatttttctttctaggtttagaaatcattattttctgtgtagtcttctataaactattgatactgcaaatgcttctttaagtcactgaaatgtctgtttttgtagattttaga

SEQ ID NO: 337716 - DNA, 550 bp, Homo sapiens
aggaggctattcaggactccaggcagaagatgatctgggctaaggcgatgggatcttagtcatcaagatggaccaacagaacagattcaaaacgtatttgaaaactagactagtagactgttcaattaagtttgtggggagagtgtcaaaacagaaggaagaacagtttcttagttttctgagttaagtgattcttgaccaaacaggagatcatagagccaattactgagccagagtggaactggggatgcacagactcatttttcttgggaaagatgatgagtttgaggtatctgcaaggcctccaactagagatactgtgatagctggatttatgggactgaaactcaraatagggtctggacagtgaaaacagctgagtagtcctcagcatatagcttggtgtggtgatttactgctacagaaaataagttaagaaatgtagactatagattgaagcttattgaaggctagatgaaaacaatttcaatagatgactagtgtgaaagttaaattggagtacatggagggctgagtaaggagggaaaag

SEQ ID NO: 337717 - DNA, 585 bp, Homo sapiens
cagaagtctagctgtaaagaggaggagagaaacaacagcagcaatgtaagaagaatgaaagtgtggtaaatggagttcgttgtttttggttttgttgtttgctttgttttgaaagaatcttgaggattcttaaaattcatagaaaagaggcaaaagggggtcacaggaatagagatttagtaaagagaaggaattttacctgttgcaactaaagaggcagcagggaagragccctagcacagctagagggtttaacttgtagaacagcagagggtaggtatctctttattgtaaaagaagagcagaggttatagtaggtacagatgaacataggcttgaatgcttgatgttggaaagttgaagacattttcatgtaagactttctcttttctctgttttgtagaacatgaagaattttactaaaatgaggggaagatgggtgcagaggaaggggaaagtcagtgattgggaacctgtgttacgactattgggaaagagtctaagttggtgaagggtctgagattaccacactttcaagatgacaagtcggcctgccacacattcaagtatgctggcagaaggctc

SEQ ID NO: 337718 - DNA, 584 bp, Homo sapiens
tcaagttggaatgacacaaacacctttccttcttttatgtactctataatgtagattgagcattatggcataatttaatttcttctctgaaaattcatgaaatcattccagtmtaggctgtccttagcaccctggtaatcttggttgagtgtgtctcttcaaactgtggtttgatcagaagaaagactggttatctttgtgattcagtttctgtggattaggaaattggagctgtattgtggattatgttttttatttaagaccagaacattatcgttattctcccatgttttctaaaataagaagagagagagagagattataattttctctatagctaggcagatgaactgttgataacgaagcagattcatgcccttttttggcgcaagaaagcatccctgcacacttagaagcaaagtagcagactcttaaattctggtctttgttgtcatcactagacctcatgcctccctctgaaagaactgcatccaaaaccagtcttttccacctaaaacgcatactctttcctttgttccagtagccctggcatagatgctctaagaatagagacagcatgagta

SEQ ID NO: 337719 - DNA, 584 bp, Homo sapiens
tcaagttggaatgacacaaacacctttccttcttttatgtactctataatgtagattgagcattatggcataatttaatttcttctctgaaaattcatgaaatcattccagtataggctgtccttagcaccctggtaatcttggttgaktgtgtctcttcaaactgtggtttgatcagaagaaagactggttatctttgtgattcagtttctgtggattaggaaattggagctgtattgtggattatgttttttatttaagaccagaacattatcgttattctcccatgttttctaaaataagaagagagagagagagattataattttctctatagctaggcagatgaactgttgataacgaagcagattcatgcccttttttggcgcaagaaagcatccctgcacacttagaagcaaagtagcagactcttaaattctggtctttgttgtcatcactagacctcatgcctccctctgaaagaactgcatccaaaaccagtcttttccacctaaaacgcatactctttcctttgttccagtagccctggcatagatgctctaagaatagagacagcatgagta

SEQ ID NO: 337720 - DNA, 573 bp, Homo sapiens
tcattactaggtagtcagtgcagagtgggactggaaacacttctaactttctgaccagcatctttccaccaagatacacaaactctaatagcaaataccatgtctaaggaaatcaaattataatagaagtacatcattggatggattaccataggatactcaatatatattcaataatggaaattcttctgattatgtcatatctataatcaatttagctgttaaatcaggagtgcctcacatactcactaggaggattgtgcacttttttaaaaggcatgatatacttacttctcaaattaatcttcatagtcaagccaaatataagatttattaaatgatctagatgctgttgggtctgagcacaaagcaatattactgtsaccccttaacacccctttacactttctctgtgaatccatttcttctccttctttgataaaatattagaataaacccatagttcttccagggattttcaggtaataaaaaatccagtacactagaaaaaaacgtacgtgaacatcttaagtcacaaaaacgtaactatatatggaaaagattgattaattg

SEQ ID NO: 337721 - DNA, 621 bp, Homo sapiens
tttgcctaacttcgaatgtccttttgagtttcatttgtattaatctggttaaacaacagtatttggatgtaaaagtatgccagtattttattaatataaggtataatctaggccaggcacggtggctcatgcctgtaatcccaraactttggggggcggaggctggtggatcacctgaggtgaagagattgagaccatcctggccaacatggtgaaaccctgtctctactaaaaatacaaaaactagccaggcggggtggcaggcacctgtaatcccagctacttgggaagctgaggcaagaaaatcacttgaacccgggaggcagaggttgcagtgatccaagatcatggcactgcactccagcctgggtgacagagtgagactccgtctcaaaaaaaaaaaaaaaaaaaaagtataatctgaacaaaagagaaccacccatttagtgcccaaaatacctagcactccctccagaagcagcttgctttctttaaaatcatgtcttcctggcaagctgagggcaaaactgaagcatatttaaaataaattcaaaatgccatttgaaagttatccttatataaatccctttatgaaaggggacctaggtgatttttttaaaa

SEQ ID NO: 337722 - DNA, 609 bp, Homo sapiens
aggagtgcaggaaatgcgaccccttgaacattccactctctttcagatttctwtctggtccaagttgcccatggatccctgctagtgtactgcatgccactccaacaccaggcagtgctatgctgtgtggcaccatatctcacccaggagtgaaaccaaatcatgccctcagggaaaatgagccggttcctttttattttttaaatagcagagaataaagttatgaaaagaaaaagaaaagtaagggaaatacctgcctggataatcccccatgactggggcaaccactctctgaagctggcagctggaaaacaaagagaatagccattagctgccagctgggcgctgggcggtgtggcattatgaagcctgtgtcctgtgagggtcagcaggcaaggcttcctgcttgggatggcttcttgatcttccctattcccacagatagagccaagtctctgccaagagcttttcttcttgacatgattgtagtcaggaagattttcatgtcattccagatcacagttcccagtttaattctctagcaaatgctagaagctaccacttccatcttggctgtgtgttcttttgtaccaactgatgcttgtatct

SEQ ID NO: 337723 - DNA, 586 bp, Homo sapiens
cttttcttgagctactttatgcaagacacattctaagctctttacctgcataactyatttaatcttcacagtcaacccattttacataccaggaaactgaggtagagagaggttaagcaatttgcccaaagtcacatagctagttaggaggagagctggaagtgaacccaagcagagggctccagaagtgccgttacccacccactctgatgcagacaataacagacatcacctccaagcacctgctctgagcaagcaatgggctaagtcctttataggattatctcatttaatcttcagagaagccctatgaagtgggtgctaacatcatccacattttaaaaaaagaaattgaggctcacagagatgatgtgatttgcctagggccacccaactaatttaaagtgacagagctgggataggacccttggtttgactgatcatagggcccaagttcttaactgcctcactgggtagcctgcacatttagacacttctcttgctctgtctgcagctcccctggtttggctcagcacctgagtctttgtccacagtctggggaggggctgggatgtggagaccccta

SEQ ID NO: 337724 - DNA, 603 bp, Homo sapiens
gggctgtgagacttgggtactgaaggatgatcaggaggttgccaggcagaaaaggaggcagacggttctccaaggaaactgggtggaggtgtgaaagggcctgatttggtgtttagaagtaaggaggagtagtgkgcatgcttttttcttagctgagggtgcaaggaatgagacattcagttgagagatcagctctgaagtgggagaggaggggagttcagaagtagactgtcaagggctttgcaaaatacttgctgctaggtgagattcattgaaagacacattagcagagaccaggaaagcttctccaaatatgaattctccagctgcgctgatggatgtttccatatagagaaaggaacttctgctgggggctcattttcagagagtttgtgtccgttttctgcattttgtgtctcacacaccaatggaagtgattattgatggggcaaagtgaatggggtgggacgggccacaccaacagttcatatttaaaatgtctcagattcctcttgccagataagctgatagcaaacacccttgtgagttcctgcgcagattgactctccagggatcattttgcattccagacagggtcacata

SEQ ID NO: 337725 - DNA, 603 bp, Homo sapiens
gggctgtgagacttgggtactgaaggatgatcaggaggttgccaggcagaaaaggaggcagacggttctccaaggaaactgggtggaggtgtgaaagggcctgatttggtgtttagaagtaaggaggagtagtgggcatgcttttttcttagctgagggtgcaaggaatgagacattcagttgagagatcagctctgaagtgggagaggaggggagttcagaagtagactgtcaagggctttgcaaaatacttgctgctaggtgagattcattgaaagamacattagcagagaccaggaaagcttctccaaatatgaattctccagctgcgctgatggatgtttccatatagagaaaggaacttctgctgggggctcattttcagagagtttgtgtccgttttctgcattttgtgtctcacacaccaatggaagtgattattgatggggcaaagtgaatggggtgggacgggccacaccaacagttcatatttaaaatgtctcagattcctcttgccagataagctgatagcaaacacccttgtgagttcctgcgcagattgactctccagggatcattttgcattccagacagggtcacata

SEQ ID NO: 337726 - DNA, 586 bp, Homo sapiens
ctcctgaggttgtacctaagaactgtccagctgggttcatgtagcacatcgctkggcacatggtaatcagtgttgaatgaatgaccagcaaggaaatccttctgttttccagcagaacaaaatggaagtgaacaggcctcagactatgtggcctgcatgctatcaggacccagcatgcacttcagaaaagacccctttggtgtttggcataaacgaagttacccgataaaggcatcttctaggccggggcctggaaagacagatgatgtttaatccacatcacctcaagatgacgagtcctgttttcagggcttaaaacaaacaaacatcaatagcgacaatgatctactgggaatgctggccctggagaaagcagggggagtcattctgctggcaacccctgcatacctagccaaccctagctggcccaatgtcctatgcttggacaggtctcccaggaacctcatgatggggctcttcctttgtcatgctgcctctctgcagcacaggcaattttacatctaaatcttagatcctgacttcccaagtgtgttgacattttggtaggcttcgaatagccattagt

SEQ ID NO: 337727 - DNA, 586 bp, Homo sapiens
ctcctgaggttgtacctaagaactgtccagctgggttcatgtagcacatcgctgggcacatggtaatcagtgttgaatgaatgaccagcaaggaaatccttctgttttccagcagaacaaaatggaagtgaacaggcctcagactatgtggcctgcatgctatcaggacccagcatgcacttcagaaaagacccctttggtgtttggcataaasgaagttacccgataaaggcatcttctaggccggggcctggaaagacagatgatgtttaatccacatcacctcaagatgacgagtcctgttttcagggcttaaaacaaacaaacatcaatagcgacaatgatctactgggaatgctggccctggagaaagcagggggagtcattctgctggcaacccctgcatacctagccaaccctagctggcccaatgtcctatgcttggacaggtctcccaggaacctcatgatggggctcttcctttgtcatgctgcctctctgcagcacaggcaattttacatctaaatcttagatcctgacttcccaagtgtgttgacattttggtaggcttcgaatagccattagt

SEQ ID NO: 337728 - DNA, 586 bp, Homo sapiens
ctcctgaggttgtacctaagaactgtccagctgggttcatgtagcacatcgctgggcacatggtaatcagtgttgaatgaatgaccagcaaggaaatccttctgttttccagcagaacaaaatggaagtgaacaggcctcagactatgtggcctgcatgctatcaggacccagcatgcacttcagaaaagacccctttggtgtttggcataaacgaagttacccgataaaggcatcttctaggccggggcctggaaagacagatgatgtttaatccacatcacctcaagatgacgagtcctgttttcagggcttaaaacaaacaaacatcaatagcracaatgatctactgggaatgctggccctggagaaagcagggggagtcattctgctggcaacccctgcatacctagccaaccctagctggcccaatgtcctatgcttggacaggtctcccaggaacctcatgatggggctcttcctttgtcatgctgcctctctgcagcacaggcaattttacatctaaatcttagatcctgacttcccaagtgtgttgacattttggtaggcttcgaatagccattagt

SEQ ID NO: 337729 - DNA, 439 bp, Homo sapiens
aggccaggagttcaagatcagcctgggcaacagagcaagaccttgtctctgcagaaaaaaaatctttttattacctgggcagaggatcacttgagcccaggagactgaagctgcagtgagctatgttcatgcctttgcactccagcctgggcagaaagagtgatatattatctttaaaaattaaaaaattattattatttttgagacagagtctcactctggttgcccaggctagggtgcagtgccttaattgcagctcaatgcagctcaggttcctgggctcaggtgattctcccacctcagcctccgagtagctgggacaacaggcacgagccaccaaccccrgctaattgtttttatttttagtagagatggagtttcgccacgctgtccaggctggtctcaaactcatgggctcaagtgatccactcaccttggc

SEQ ID NO: 337730 - DNA, 556 bp, Homo sapiens
cagttgtctaaaaaagagagcaaaggcactacaacttggaaaacaatgtgttgttatctggtaaaggtgaagaaacacataccctatgacctagcaattccactcttagatataaaccctggggaaatatgtgcacatttacttcaggatatacataccaagaatacttattgcagcatcactcatagtacttaaaacctggaaacaacccaaatgttcatcagtagtagtatggataaataaatatggcatatttagccagtggaatactatacagccatgaaaattaattcamtatagctaccacaacaacatggatgaatctcttagacacaattgagcaaaaaaagccagatatggagaaaccccataaactccataatgtgattctattcatgtaaagctcaaagtaggtaaaatgaaactattttctttagggatgcaaactcaggtggtaaaactaaagggaaaggaccgagacaccacatattctagggaagaggggatgagtatgatcagatagggccacgcaaggggtttggggtgctggcaatga

SEQ ID NO: 337731 - DNA, 556 bp, Homo sapiens
cagttgtctaaaaaagagagcaaaggcactacaacttggaaaacaatgtgttgttatctggtaaaggtgaagaaacacataccctatgacctagcaattccactcttagatataaaccctggggaaatatgtgcacatttacttcaggatatacataccaagaatacttattgcagcatcactcatagtacttaaaacctggaaacaacccaaatgttcatcagtagtagtatggataaataaatatggcatatttagccagtggaatactatacagccatgaaaattaattcactatagctaccacaacaacatggatgaatctcttagacacaattgagcaaaaaaagccagatatggagaaaccccataaactccataawgtgattctattcatgtaaagctcaaagtaggtaaaatgaaactattttctttagggatgcaaactcaggtggtaaaactaaagggaaaggaccgagacaccacatattctagggaagaggggatgagtatgatcagatagggccacgcaaggggtttggggtgctggcaatga

SEQ ID NO: 337732 - DNA, 556 bp, Homo sapiens
cagttgtctaaaaaagagagcaaaggcactacaacttggaaaacaatgtgttgttatctggtaaaggtgaagaaacacataccctatgacctagcaattccactcttagatataaaccctggggaaatatgtgcacatttacttcaggatatacataccaagaatacttattgcagcatcactcatagtacttaaaacctggaaacaacccaaatgttcatcagtagtagtatggataaataaatatggcatatttagccagtggaatactatacagccatgaaaattaattcactatagctaccacaacaacatggatgaatctcttagacacaattgagcaaaaaaagccagatatggagaaaccccataaactccataatgtgattctattcatgtaaagctcaaagtaggtaaaatgaaactattttctttagggatgcaaactcaggtggtaaaactaaagggaaaggaycgagacaccacatattctagggaagaggggatgagtatgatcagatagggccacgcaaggggtttggggtgctggcaatga

SEQ ID NO: 337733 - DNA, 556 bp, Homo sapiens
cagttgtctaaaaaagagagcaaaggcactacaacttggaaaacaatgtgttgttatctggtaaaggtgaagaaacacataccctatgacctagcaattccactcttagatataaaccctggggaaatatgtgcacatttacttcaggatatacataccaagaatacttattgcagcatcactcatagtacttaaaacctggaaacaacccaaatgttcatcagtagtagtatggataaataaatatggcatatttagccagtggaatactatacagccatgaaaattaattcactatagctaccacaacaacatggatgaatctcttagacacaattgagcaaaaaaagccagatatggagaaaccccataaactccataatgtgattctattcatgtaaagctcaaagtaggtaaaatgaaactattttctttagggatgcaaactcaggtggtaaaactaaagggaaaggacsgagacaccacatattctagggaagaggggatgagtatgatcagatagggccacgcaaggggtttggggtgctggcaatga

SEQ ID NO: 337734 - DNA, 634 bp, Homo sapiens
ccactttcttttcacttccaaatttaccactgtggtcccagaagagaagtccctgcttggtgctcatgtccccacccttctcctggatcccccatmccctggggatcagtccggagacctccactgtcagaagcaaactcatccttgactgcgcctgactcagccatccctgattgcatcttctgggctcttgtgctcccaaggatgtaattgagtgtgctatgtggggagacagtctcatgatttcctcggatggaaaccaagtggaaataaaaatagttgtgccagattgttggtgtgcatcacagctcaggagtggccctgggatgcctgggcctgggctggaacctggcatccatgttgtatgcccgatttcctccacctcctccgctcagggtgctggtgtgtatgccacctctctgagtgagacaggaagattgcgtttagctcaggcaccttctcatcaagactatttcggagggttcagagggcttgtttctgaagcactcagcaggcagcctggcataaagcaggtgctcagtgaccagtgggtatcagttggtcccttgctgctttgagttgggcaacactgaggttgggactacagaggtcattgccccttaagaagagccta

SEQ ID NO: 337735 - DNA, 634 bp, Homo sapiens
ccactttcttttcacttccaaatttaccactgtggtcccagaagagaagtccctgcttggtgctcatgtccccacccttctcctggatcccccatcccctggggatcagtccggagacctccactstcagaagcaaactcatccttgactgcgcctgactcagccatccctgattgcatcttctgggctcttgtgctcccaaggatgtaattgagtgtgctatgtggggagacagtctcatgatttcctcggatggaaaccaagtggaaataaaaatagttgtgccagattgttggtgtgcatcacagctcaggagtggccctgggatgcctgggcctgggctggaacctggcatccatgttgtatgcccgatttcctccacctcctccgctcagggtgctggtgtgtatgccacctctctgagtgagacaggaagattgcgtttagctcaggcaccttctcatcaagactatttcggagggttcagagggcttgtttctgaagcactcagcaggcagcctggcataaagcaggtgctcagtgaccagtgggtatcagttggtcccttgctgctttgagttgggcaacactgaggttgggactacagaggtcattgccccttaagaagagccta

SEQ ID NO: 337736 - DNA, 634 bp, Homo sapiens
ccactttcttttcacttccaaatttaccactgtggtcccagaagagaagtccctgcttggtgctcatgtccccacccttctcctggatcccccatcccctggggatcagtccggagacctccactgtcagaagcaaactcatccttgactgcgcctgactcagccatccctgattgcatcttctgggctcttgtgctcccaaggatgtaattgagtgtgctatgtggggagacagtctcatgatttcctcggatggaaaccaagtggaaataaaaatagttgtgccagattgttggtgtgcatcacagctcaggagtggccctgggatgcctgggcctgggctggaacctggcatccatgttgtatgcccgatttcctccacctcctccgctcagggtgctggtgtgtatgccacctctctgagtgagacaggaagattgcgtttagctcargcaccttctcatcaagactatttcggagggttcagagggcttgtttctgaagcactcagcaggcagcctggcataaagcaggtgctcagtgaccagtgggtatcagttggtcccttgctgctttgagttgggcaacactgaggttgggactacagaggtcattgccccttaagaagagccta

SEQ ID NO: 337737 - DNA, 625 bp, Homo sapiens
ggagcgagcgaggcggcccggcgcaggcttagccagccgagcgcctgcggttctgcgccgcgcggtggaccgggctggggaacgcccccgacagcggcgcggccaatgacaggacagcacggagcccgccccgcccccgtggggccggctgtcaccgccgctgccgccggcgcacgtgggctgtagcccggcccagaacgcagggagtggccgggcgctcccaccctgacccgcacagggcggagaccaggggagggctgctgggagtggggcgtggtggcgctgcgagatgaaacccccggtgttggtaagcgggtatcaagggagcggcgagggcctgggcctcacgcttcttggtctaggcggctggaaagcaagmcacggcatccccttttggacatgggggagcagcatggcacttctagtaccgactgtgtacgtcctgtggacctccctctttgctcggctccttgaccaccctgagcttccgcaaacctccttgctagctaataggatcttcccctcacctggccttgcttggctaaagctagtgggaagggggcggtggtgcagactacctgtgttaccttggtcagatcacctaaacaccctctacctttggctg

SEQ ID NO: 337738 - DNA, 600 bp, Homo sapiens
catcagttggtacaaaagcacacacagccaagatggaagtggtagcttgtagcatttgmtagagaattaaagtgggatgtgtgatgtggaatgacatgaaaatcttcctgactacaatcatgtcaagaagaaaagctcttggcagagacttggctctatgtgtgggaatagggaagatcaagaagccatcccaagcaggaagccttgcctgctgaccctcacaggacacaggcttcataatgccacaccgcccagcgcccagctggcagctaatggctattctctttgttttccagctgccagcttcagagagtgggtgccccactcatgggggattatccacgcacgtatttcccttacttttctttttcttttcataactctattctctgctatttaaaaaataaaaaggaaccggctcattttccctgagggcatgatatggtttcactcctgggtgagatatggggccacacacaatatcactgtctggtgttggagtggcatgcactacactatcacggatccatgggcaacttggaccacatataaatctgaaagagagtggaatgtgcaaagggtcgcatttcctgcactcct

SEQ ID NO: 337739 - DNA, 600 bp, Homo sapiens
catcagttggtacaaaagcacacacagccaagatggaagtggtagcttgtagcatttgatagagaattaaagtgggatgtgtgatgtggaatgacatgaaaatcttcctgactacaatcatgtcaagaagaaaagctcttggcagagacttggctctatgtgtgggaatagggaagatcaagaagccatcccaagcaggaagccttgcctgctgaccctcacaggacacaggcttcataatgccacaccgcccagcgcccagctggcagctaatggctattctctttgttttccagctgccagcttcagagagtgggtgccccactcatgggggattatccacgcacgtatttcccttacttttctttttcttttcataactytattctctgctatttaaaaaataaaaaggaaccggctcattttccctgagggcatgatatggtttcactcctgggtgagatatggggccacacacaatatcactgtctggtgttggagtggcatgcactacactatcacggatccatgggcaacttggaccacatataaatctgaaagagagtggaatgtgcaaagggtcgcatttcctgcactcct

SEQ ID NO: 337740 - DNA, 600 bp, Homo sapiens
catcagttggtacaaaagcacacacagccaagatggaagtggtagcttgtagcatttgatagagaattaaagtgggatgtgtgatgtggaatgacatgaaaatcttcctgactacaatcatgtcaagaagaaaagctcttggcagagacttggctctatgtgtgggaatagggaagatcaagaagccatcccaagcaggaagccttgcctgctgaccctcacaggacacaggcttcataatgccacaccgcccagcgcccagctggcagctaatggctattctctttgttttccagctgccagcttcagagagtgggtgccccactcatgggggattatccacgcacgtatttcccttacttttctttttcttttcataactctattctctgctatttaaaaaataaaaaggaaccggctcattttccctgagggcatgatatggtttcactcctgggtgagatatggggccacacacaatatcactgtctggtgttggagtggcatgcastacactatcacggatccatgggcaacttggaccacatataaatctgaaagagagtggaatgtgcaaagggtcgcatttcctgcactcct

SEQ ID NO: 337741 - DNA, 603 bp, Homo sapiens
ttgagcacgggagttaacctccttgtgcagcaggtagtaggggaatattaatggggagatgcatgctgctaacaacgccaggcacataataaatcatatgtaaggggttgtgagtaaatatactcggtgatgataccactaaggtgtggagaactatagtctgtaggaggcatcaattctgtaagcaactcctggtcagggacttgcctagtccccagcctcagacttgtgtgtatgttataaaggcaggtactattttcatccactccttatagatgagaaaatgggattttggagaagtgaaatcactggcccacagtctcctatgggccagcatctggcaaaatgaatcgaattggtggacttccaagcccgtgctctttacaattcccaatactgcctccccagatctatctggggtgctgggggacaccgaggaggctgaggggagtgggaaaacttcacagaggtggcatcccttccactgagccttgagagatgagtggcasgcacatgggaaagagtatggtgagcgctcatgacaggcagcaactgaaacacggaatcatggatgaggggcagagccaggaactgcaagagatt

SEQ ID NO: 337742 - DNA, 603 bp, Homo sapiens
ttgagcacgggagttaacctccttgtgcagcaggtagtaggggaatattaatggggagatgcatgctgctaacaacgccaggcacataataaatcatatgtaaggggttgtgagtaaatatactcggtgatgataccactaaggtgtggagaactatagtctgtaggaggcatcaattctgtaagcaactcctggtcagggacttgcctagtccccagcctcagacttgtgtgtatgttataaaggcaggtactattttcatccactccttatagatgagaaaatgggattttggagaagtgaaatcactggcccacagtctcctatgggccagcatctggcaaaatgaatcgaattggtggacttccaagcccgtgctctttacaattcccaatactgcctccccagatctatctggggtgctgggggacaccgaggaggctgaggggagtgggaaaacttcacagaggtggcatcccttccactgagccttgagagatgagtggcacgcasatgggaaagagtatggtgagcgctcatgacaggcagcaactgaaacacggaatcatggatgaggggcagagccaggaactgcaagagatt

SEQ ID NO: 337743 - DNA, 603 bp, Homo sapiens
ttgagcacgggagttaacctccttgtgcagcaggtagtaggggaatattaatggggagatgcatgctgctaacaacgccaggcacataataaatcatatgtaaggggttgtgagtaaatatactcggtgatgataccactaaggtgtggagaactatagtctgtaggaggcatcaattctgtaagcaactcctggtcagggacttgcctagtccccagcctcagacttgtgtgtatgttataaaggcaggtactattttcatccactccttatagatgagaaaatgggattttggagaagtgaaatcactggcccacagtctcctatgggccagcatctggcaaaatgaatcgaattggtggacttccaagcccgtgctctttacaattcccaatactgcctccccagatctatctggggtgctgggggacaccgaggaggctgaggggagtgggaaaacttcacagaggtggcatcccttccactgagccttgagagatgagtggcacgcacatgggaargagtatggtgagcgctcatgacaggcagcaactgaaacacggaatcatggatgaggggcagagccaggaactgcaagagatt

SEQ ID NO: 337744 - DNA, 564 bp, Homo sapiens
gaggtttcattgactcacagttctgcatggttggggaggcctcaggaaacttacaatcttggtggaaggggaagcaggcacgtgttacatggcggcaggtgagacagcgcgtgtgtcagcggaggaaaactaccatttataaaaccatcagatcttgtgagaattcacttagtctcatgagaccagcatggggagcagggggcaaaccacccacataatycaatctcttcccaccaggtctctctctgggattacaattcaaagcctaaccatatcagaatcatagtttcaagctgggcctgacatgattgtgataggtagaaattaggaggagaggcatctgaggctgaaggagagcatgagcaatgtggaaacactgactccagggcaacgtgagtggtgtgtggccctttctcaagacgactaattttattgctcccatgcccagtacatctgattttgataatagctaacttttattaaacaattgctctatgccagttattatgctgtgttcttgacattctttgtcttatgtaatcctcaaaagaaccctaaggaagt

SEQ ID NO: 337745 - DNA, 550 bp, Homo sapiens
tcatcttgaattgtaatcccataatctctatgtgtcaagggagggaccctgggggagctaattgaatcatgggggtggttccccccatgttgttctcgtgatagtgagtgagtcacacaggatctgatggctttatgagagtctggcattttctctgcttgcattcattccttcttctgctgccatgtgaagaaggacatgtttgctccactttccaccatgattgttaagtttcctgaggccatgctgaactgtgagtcaattaaaactttttaatttataaattacccaggctcaggtatgtctttattagcaacgtgagaatggactaatacatcttctgcatactgtatgtaattgtaaaacaatggtaagtatttgtctatctaaacatagaaaatgtgcaktaaaaatatggtattataatcttatgggaccaccatcctatatatagtctttcattgatggaaacattgttatgtggtgtatttaacacctttaaggtcttaaaataaattactcattgtttcatacatacatttgtattatc

SEQ ID NO: 337746 - DNA, 550 bp, Homo sapiens
tcatcttgaattgtaatcccataatctctatgtgtcaagggagggaccctgggggagctaattgaatcatgggggtggttccccccatgttgttctcgtgatagtgagtgagtcacacaggatctgatggctttatgagagtctggcattttctctgcttgcattcattccttcttctgctgccatgtgaagaaggacatgtttgctccactttccaccatgattgttaagtttcctgaggccatgctgaactgtgagtcaattaaaactttttaatttataaattacccaggctcaggtatgtctttattagcaacgtgagaatggactaatacatcttctgcatactgtatgtaattgtaaaacaatggtaagtatttgtctatctaaacatagaaaatgtgcagtaaaaatatggtattataatcttatgggaccaccatcctayatatagtctttcattgatggaaacattgttatgtggtgtatttaacacctttaaggtcttaaaataaattactcattgtttcatacatacatttgtattatc

SEQ ID NO: 337747 - DNA, 424 bp, Homo sapiens
atcctgttaaaatataaaaagacttttactcaagtagatcagaatattttatcattatatgrcaagtagtttactgattctaaatctttatagacactaaaaggctgctaatctacatacaaataacaaatactgatgaaactaataaaaaagaccatgagaaccagaaaaacctagggtctaagaatcccatattatcagctctcttaaacaacttagttcaaaaaaactcttgagtgtctacattaatactaagcttgtcacaaacagaacttttattttttatgacaggtaaaattctaattaaaaagtaaatactaaattccaaatatgcacacatatctgaagacagattttgcataaaggatatcaaatcttaggttctaagaaactgactgaaactgaggtatactggcacatgaaa

SEQ ID NO: 337748 - DNA, 570 bp, Homo sapiens
tatgtgtaaaatatatgttccagtaagagtatatactaaataattagaatttatttaaatagattatgttatctaacttacgtaaatggagattttcctaggactagwtacgttttttttcctcaagcaaaatactgtatttgcattgttgctaaacaagtgatgatcaggaaataaatattttatgttaatcaagtctaaatgttgtgtaaaaaatacctatatggggaagaaaaaggcataccatggcaactgaagaaggttgaaaataattactccttcctagggacaatattcagactcagtagcaggcattttgccagcccagcagatagacatattgaagcccctacttgttggtatgaaatattaatagtgagggcatgagtccaacctgaaaacataaaaacaaattactttggaggttaaggggatataccattactaatccatctctgagctgaattagcctttaaatataaaaatggctcccaataacatgtctagcccaacattagagttatttttaaccaagtggggttttggagagactataaaaaattatgattt

SEQ ID NO: 337749 - DNA, 570 bp, Homo sapiens
tatgtgtaaaatatatgttccagtaagagtatatactaaataattagaatttatttaaatagattatgttatctaacttacgtaaatggagattttcctaggactagtwacgttttttttcctcaagcaaaatactgtatttgcattgttgctaaacaagtgatgatcaggaaataaatattttatgttaatcaagtctaaatgttgtgtaaaaaatacctatatggggaagaaaaaggcataccatggcaactgaagaaggttgaaaataattactccttcctagggacaatattcagactcagtagcaggcattttgccagcccagcagatagacatattgaagcccctacttgttggtatgaaatattaatagtgagggcatgagtccaacctgaaaacataaaaacaaattactttggaggttaaggggatataccattactaatccatctctgagctgaattagcctttaaatataaaaatggctcccaataacatgtctagcccaacattagagttatttttaaccaagtggggttttggagagactataaaaaattatgattt

SEQ ID NO: 337750 - DNA, 570 bp, Homo sapiens
tatgtgtaaaatatatgttccagtaagagtatatactaaataattagaatttatttaaatagattatgttatctaacttacgtaaatggagattttcctaggactagttacgttttttttcctcaagcaaaatactgtatttgcattgttgcyaaacaagtgatgatcaggaaataaatattttatgttaatcaagtctaaatgttgtgtaaaaaatacctatatggggaagaaaaaggcataccatggcaactgaagaaggttgaaaataattactccttcctagggacaatattcagactcagtagcaggcattttgccagcccagcagatagacatattgaagcccctacttgttggtatgaaatattaatagtgagggcatgagtccaacctgaaaacataaaaacaaattactttggaggttaaggggatataccattactaatccatctctgagctgaattagcctttaaatataaaaatggctcccaataacatgtctagcccaacattagagttatttttaaccaagtggggttttggagagactataaaaaattatgattt

SEQ ID NO: 337751 - DNA, 570 bp, Homo sapiens
cattttgccagcccagcagatagacatattgaagcccctacttgttggtatgaaatattaatagtgagggcatgagtccaacctgaaaacataaaaacaaattactttggaggttaaggggatataccattactaatccatctctgagctgaattagcctttaaatataaaaatggctcccaataacatgtctagcccaacattagagttrtttttaaccaagtggggttttggagagactataaaaaattatgattttccaagttcatgaaatgtgaaataagcagtttgatgcagaagaagatatagtgacacgaatatgctaaaagtgaacagaatgcggatctagcctttaatgaactttagaggtagaaccatgtagtaattttacagatgcaaaaatattatgttgtacctccttaatcctaaaccaataatccttctcatccttgatgttacaaagaattagtggtcaaggtcatgcataaaatgttctgcaatgtgggaaaataataagggaaaataacctgtataaatgtctctaaatttaccacagagagtcttcccaag

SEQ ID NO: 337752 - DNA, 570 bp, Homo sapiens
cattttgccagcccagcagatagacatattgaagcccctacttgttggtatgaaatattaatagtgagggcatgagtccaacctgaaaacataaaaacaaattactttggaggttaaggggatataccattactaatccatctctgagctgaattagcctttaaatataaaaatggctcccaataacatgtctagcccaacattagagttatttttaaccaagtggggttttggagagactataaaaaattatgattttccaagttcatgaaatgtgaaataagcagtttgatgcagaagaagatatagtgacacgaatatgctaaaagtgaacagaatgcggatctagcctttaaygaactttagaggtagaaccatgtagtaattttacagatgcaaaaatattatgttgtacctccttaatcctaaaccaataatccttctcatccttgatgttacaaagaattagtggtcaaggtcatgcataaaatgttctgcaatgtgggaaaataataagggaaaataacctgtataaatgtctctaaatttaccacagagagtcttcccaag

SEQ ID NO: 337753 - DNA, 625 bp, Homo sapiens
taagaagattcattgagaagaattctgcaaatgtaacattccctttcaaggtctacgctaacgcttttaactgggactcagcgacctgtgaaatctctgcctggtttcttaacctttgtcaagtcatttaaactctgggtcatatctataaatcagacagaagaaatacaggtcctaaccgtgctatccagggattctagcaggagatttttttaataataaatattaatggaggggtggaaatagagatggaaaaacaggatcaaaggagcaacatattcagtgacttaaaaaaataattatatgtggtaagaagttttctaaagtaaactgtatgtggggagaagcatacagaaaaaaatgaaatacatatattttaaggtttgaaagaaaataattttgarttgtaccagtttattgctattaaagaatgaatgaccaatgaagacattattgtagataacaactttttaagcccctgagaagaagagctgtgagttttattgggaaaatatatttcttaaataacgccacaataaatcattgctgtacacaccaggtgcaaggaaatgctaagaagaaagagaaagaactagaaattaatgttctttgtaagatgacagat

SEQ ID NO: 337754 - DNA, 625 bp, Homo sapiens
taagaagattcattgagaagaattctgcaaatgtaacattccctttcaaggtctacgctaacgcttttaactgggactcagcgacctgtgaaatctctgcctggtttcttaacctttgtcaagtcatttaaactctgggtcatatctataaatcagacagaagaaatacaggtcctaaccgtgctatccagggattctagcaggagatttttttaataataaatattaatggaggggtggaaatagagatggaaaaacaggatcaaaggagcaacatattcagtgacttaaaaaaataattatatgtggtaagaagttttctaaagtaaactgtatgtggggagaagcatacagaaaaaaatgaaatacatatattttaaggtttgaaagaaaataattttgagttgtaccmgtttattgctattaaagaatgaatgaccaatgaagacattattgtagataacaactttttaagcccctgagaagaagagctgtgagttttattgggaaaatatatttcttaaataacgccacaataaatcattgctgtacacaccaggtgcaaggaaatgctaagaagaaagagaaagaactagaaattaatgttctttgtaagatgacagat

SEQ ID NO: 337755 - DNA, 327 bp, Homo sapiens
agtcaaagccaagacccagggyttctggagcacaaagctgcctggcagcttcatcagctgccttcttcctttgggctctctttccagttcttaggcaagcctgcttgagaaaaaaagtcaacagggtctttcctgcaggcttcagagatagaatagagaaggagggactttatatgagggaagttttatttatttattttccagcagtcaggccctaaaaaaaagcaggttgtcatttctgtcttcacagggaataacactgatacacacaagaagcaaacatattataaattctacaaaaatattttgttctaatacttatttatt

SEQ ID NO: 337756 - DNA, 327 bp, Homo sapiens
agtcaaagccaagacccagggcttctggagcacaaagctgcctggcagcttcatcagctgccttcttcctttgggctctctttccagttyttaggcaagcctgcttgagaaaaaaagtcaacagggtctttcctgcaggcttcagagatagaatagagaaggagggactttatatgagggaagttttatttatttattttccagcagtcaggccctaaaaaaaagcaggttgtcatttctgtcttcacagggaataacactgatacacacaagaagcaaacatattataaattctacaaaaatattttgttctaatacttatttatt

SEQ ID NO: 337757 - DNA, 635 bp, Homo sapiens
acaaataagtacacaaataaagatttcatctcaattgtgatatgtgtgatagaagataaaaggaaggcactgtgaaagtgtgtgactggatgaatttaactcaggttaaggaaggcatccttgaggaaatgggctaggtacagtggtagaagatagaggtcagactagacacaagtagagcccattagaccgggcctyggaaaggtcttcacacacctggattaactgctcaaggctcccaatgatctgggtatctcctgcaagaagctatgtccattttccattgccaattgcaagtactccacctctccccagttaattgttcattatagtaccatagactgttacaggtggaagtgggcgagcagattttccagcaagtatttgtgatctgcttgaggtcagggggcaccatgtattacctcagtgatgagcatctcatagatttaatctacttgtttggaataaaatgttgtaagtgtaataagaacaattttaattacaatatttactctgtgattcttctaatgttattctggaaagtattttgtttgtctataatcttataggctagatatttccctcattcattttgcaaattctctccttcacatcacctcaacccacttcaggga

SEQ ID NO: 337758 - DNA, 657 bp, Homo sapiens
ctgttgaaattttgtcagtcatccaccttaggtgaaaaacagagcatacagggattaaaatggccttgctttcaaatggaagtgccaagtggaaagagcactggagtcagagtccagaaattagggttccagtcttgggtgtgcagtttactatttgtaggactctggaaagttcccttaactcaaaatcactataaaaataagaacttggatgactagaattagtgaaaatatctaagcagttttgatattgggaagctcagaataaatagcagaactagaccaaatttattgagggtgcctgacctaaacaagttgagtctttcaacacacacacacacacacacacacacasagagagacacacacacacagtcttaagagaaagccaatatataaagccacataaaatgaagcgagttcgttgaatctggggaagtgtacaggtctcaatgctgtgtctccttggtccccattctccttttcagcatcctgtatgctaaggagcacaagtttcaaaactattcaaacaattgctttaagacagtttcatatgctcttaaggaagttttcctccaaaattgctacaataataatgtggtgaagaaaccagagagaccgcaataagtcaggatgcatcctaacttattcatacaa

SEQ ID NO: 337759 - DNA, 534 bp, Homo sapiens
aaatgtgtgatgtgagaagagcaaaaatcacttggtgatcattgaacatgcctcagatacaaaaactccttatctgaggaatttagaaggtagcaaagaccaccatcaatcaggccatccagaggcaaaactccttatctggggaaaattagaagtaattagactttcccattatcaaaagcaggcatcttgttccagatctctttccctcctaaaagcttataagtaacaaaactttctatacatctctggaatgccatgctgaaactcattttacaatcctacactcccaccataaggtccataaatatcccaaaagaaaaatctgcgctcagtcctctcactgaggtgccccactgcactgttttgcagtgttcttcctttctaataaactttcccttttcaaacttatactrttgccagtaattctttttaccaacccatgagtcgaccacttcccagtgccagggctccgacaccttgcccggcataacgaacatataaaacccaacaggtgctttttaacagaattac

SEQ ID NO: 337760 - DNA, 507 bp, Homo sapiens
ctaactttttatatttcctactcttgtaattatttattatttctatctacatgtggtctcttttttttttacggttttcattatttctaatttatgtatctcataacttactttggaaatattacttaatgattaatctactttttcattggtttattaacaaaattatatactatgtttcacaaaaattacattgtacattttatamagtccaaattactctacttttcttaattgtacaatacacaattatgctaactttctaatcagtgaagccatgtcaaccaaagtacagattacaattcactaggtaacaaccagcactgggctcaattcatccatttcaaacttgaatttgtgcagttggaggtctatttagtattttgctgcatagttgattgtagggaactcaatttcatttgtttgtaatcatttttcaagcagttaaggtcatttttaattctagtcctgtctttcaaggtgctcacccatcctgatgatgtgatg

SEQ ID NO: 337761 - DNA, 482 bp, Homo sapiens
gtacctttttgaagttggtcaatatgttcacacacagaatttcttttgcaagattcttttttacaaatcttccaccatttgtttaaaccttcagctttatcttttctatttcaaaactattctctaaccctaagcaaaaatttacattctcatgccttcttataaccttttactaaaaacgcattttactttccttacacagcttgtatataaatctattttmagtagtctcaattacatgttatgatggcaactcttagcaatttttaattttagtgtaaaacctggtaagttattttaattatgtactaggcacagataagatctgactccagcatagttagtgacgtggttaattccatatgtccctaggccttaccaaattgtaaagcaggcaagttgagcagttctcaaaggctaaagaagcagcttataaccttaaaacatttagcaaacctagtatctgacctgcatactttaga

SEQ ID NO: 337762 - DNA, 462 bp, Homo sapiens
tgtttaatttaactgtgctagagtgaaagctgcctcacatcaatcatttcagttgcaaggatattgttttgtatagggacaattcagtgagtcatgctgagtaatggtgcgcattgtattcrttgaggttataagcagaatctgactatagttaactgggtatatcaatattgtacatttacaaaaaatccattaagtatcatgtaaaggtgcatcctgttgtggggtcatgcactcctttatcccatttttattttttctctatgaatttttaagcagctatggatccaaaggaggcatctattttcccagatgatagactgcccaccattaattacttttaaactccatcatcaatattccattttatagcatgttgttttgaactaaactcaacctgtgaagatattcagaatttacccagtattgcatggaatcagacttaacatctcatctgtgtac

SEQ ID NO: 337763 - DNA, 425 bp, Homo sapiens
ttgtctgccttccgggaggctatgcaagattgatggagatattaaatccccaaactaaaagagaaaagyatgtgaatgtgagttttcagttgacttgagaggaaatatattgcttaatagaaatgtacaggaaacaatgatagtgggcaataaatcccagattaattacatttatttaatatgctttagagccaatgcagatagctgaacttttatataaagcactataattttatgatttttagtactatgatttttagtaattcagtaaattactaaatcagaaaatttactgatttagacagtaaattttcaaacacttgtattagaaaacatgattttgccccttattaccaaaagcaaaactgctctattacaagcctattagatctctatccccacatattttatttcttgatttctca

SEQ ID NO: 337764 - DNA, 570 bp, Homo sapiens
tgaatatggtttgctagtgtaattgtctcttggtatctgtgggggattggttctggaatccctcatggataccaaagtccacagatactcaagtttcttatataaaatggtgtarcatctgcatataacctatatatatcctccagtatactttaaatcatctctagattaatttcaatgtaaatactatgtaaattgttgttatattgtattgttcagggaataaggacgagaaaagtctgtacatgttcaatatagacacagcacagccatccttcttttctcaatttatttataatatacagtttacttaatctatggatgtggaaccaacagatatgaagggctaactgtgttttttatgactgttatatctttattcatcagagatattggcctatatttttctttccctctagtattctcaactagctgtgttattacagtaatgctggcctggtaaaattaatttggaagtagtctctgttttaaacttttctaaatgtaaatttaggttagctataatctcttttccttgccctcaactcaaagccccttcccacaagaaac

SEQ ID NO: 337765 - DNA, 565 bp, Homo sapiens
tctaaaactctgatttaggtgggacaaaactattttcaggtgtatttctacataaaaggctctaaaaaccaattattttccagcttctgtattctaaaattgtatatatcctttccctcttctgcccccgacttgcacccagagttactcacttagagctcaactagcattttgtcccttaacaaacactttctgaattgaattaaaataatctaattttccatrtaccatgcatggttttcttttttgtggattttattttcataagttcattcctcaatatgtcggttcttaccttaatatactgactttaacaagaacataactgtttaagggaacatacgtacccatggatattccacacctaaataatacagttagtagcagacatagtactttcaaaatcatcattacttgtcactttttgtattagaagccacccaagtataaaatctgaaaatttggtgtcttcttatgttaaattcatggttttattttgaaactcattttaccagtagactccttcctcagatagaatcctatgtgggattccaatccctggtac

SEQ ID NO: 337766 - DNA, 681 bp, Homo sapiens
gagatgggctgtctaagatggctccactaatagatttgagggctcacctgggatggctgggatggccagggagcctgggcctttctccccacgtggttcattgtcctaaggtttttcagagtctggtgctctcaacgttccaaagggcaaaatagaagctataaggaaggccttttgaggtctcatctcaaaagttgcacagtgtcacttcctgcacattctattagtcaaagcaagatgcaagatcagcccagattcaaggagagtgggattagagactccagcccttgagggtaaagcagtgatgtcacattgaaaatgggcctataatgtgcatataaagatggaagaatttatggccacatttaataatctgtcacaatcagcaaactaaaaggatattactttgatgaactgatagtaatctaatcataactatatrggaagaaaatcagaaaatttaatttttttaaaaggaaaattttattatgtgaaaatacatttcagggtttgataaacgctttaaggtattgtgagattctggacaaatcattctgtggctttatgagttcacacatttattgcatttctgtataatatatatgatttattcattttaaataaatatagataagacttgtcaacatgatcaactccaacactattcttatttgccttaat

SEQ ID NO: 337767 - DNA, 681 bp, Homo sapiens
gagatgggctgtctaagatggctccactaatagatttgagggctcacctgggatggctgggatggccagggagcctgggcctttctccccacgtggttcattgtcctaaggtttttcagagtctggtgctctcaacgttccaaagggcaaaatagaagctataaggaaggccttttgaggtctcatctcaaaagttgcacagtgtcacttcctgcacattctattagtcaaagcaagatgcaagatcagcccagattcaaggagagtgggattagagactccagcccttgagggtaaagcagtgatgtcacattgaaaatgggcctataatgtgcatataaagatggaagaatttatggccacatttaataatctgtcacaatcagcaaactaaaaggatattactttgatgaactgatagtaatctaatcataactatatgggaagaaaatcagaaaatttaatttttttaaaaggaaaattttattatgtgaaaatacatttcagggtttgataaacrctttaaggtattgtgagattctggacaaatcattctgtggctttatgagttcacacatttattgcatttctgtataatatatatgatttattcattttaaataaatatagataagacttgtcaacatgatcaactccaacactattcttatttgccttaat

SEQ ID NO: 337768 - DNA, 636 bp, Homo sapiens
tatcataccttcacttccagtctatgggtgtccctaaagccaaatttactcacttgtagacagcatatgttaggactttttaaaaatatatttgtccactttatgtattttgactagaaactgcgtcttgttggttattgagataactatgacaatagacttaaggttttcttttttcttcttttttttttttcttgcttcctcctctgctaaccatacaaaagaagagaaagtcattcctagcagaagttgcatgtcttcagaaatgaatgaatagaccatcataatttcaggattgatttagctaacttgcctaagaaacatgcataattagcatctctccataaaaaaattaaattagaacataaattttatgtattcacttatttttgtctttgtcttcttagaattaatttttaarttatcaattctttataagggcttttcttttaaaaatcaattttccaaacttcagcatttttttgcaacattatttgtactacagacatacttagttacaactataactgttagtttcatctcagtggttagattttgaaatatttttactgaaaatattttgaaaatactaaaaaagtagatagactaaacaagcatttgggtttataccactaa

SEQ ID NO: 337769 - DNA, 636 bp, Homo sapiens
tatcataccttcacttccagtctatgggtgtccctaaagccaaatttactcacttgtagacagcatatgttaggactttttaaaaatatatttgtccactttatgtattttgactagaaactgcgtcttgttggttattgagataactatgacaatagacttaaggttttcttttttcttcttttttttttttcttgcttcctcctctgctaaccatacaaaagaagagaaagtcattcctagcagaagttgcatgtcttcagaaatgaatgaatagaccatcataatttcaggattgatttagctaacttgcctaagaaacatgcataattagcatctctccataaaaaaattaaattagaacataaattttatgtattcacttatttttgtctttgtcttcttagaattaatttttaagttatcaatyctttataagggcttttcttttaaaaatcaattttccaaacttcagcatttttttgcaacattatttgtactacagacatacttagttacaactataactgttagtttcatctcagtggttagattttgaaatatttttactgaaaatattttgaaaatactaaaaaagtagatagactaaacaagcatttgggtttataccactaa

SEQ ID NO: 337770 - DNA, 579 bp, Homo sapiens
tttcattaaaatttcataggtcactgtgcaaaacacaccactaagaaaacaaaaagccacagagaggaaatatttgcagaaaacatatctgattaaagacttttctctaaaaaatgcaaaaaatgttataacacaacagtaagaaagaaccacattamaaaaataggcaaaaatctgaacacacacctcaccaaagaaaatatacagacagcaagtaagtgttgcaggatctttggggcatcgattttctggccacaaacctctgtggctggtggcacctttgtccaagctcttgtcttgcatccaggaggaatgaggtaagcagacaagtggagggtgaacaagacaaagaggagctttattgagtgttagaacagctcagagcggacccacagtgggtagctccactgtgtaggcaggtcgttctgtcgagtgttcagctctcagtagagaggaggccctggagagggtagctcctctctgcagtgggttgtaccatcctctgctctgctcgggatgcacctggggctgttgtggtcttcagagcaggaagcgtgtgctaattgttccatgggcagc

SEQ ID NO: 337771 - DNA, 576 bp, Homo sapiens
caccctccacctgcccctcagcttccccactcaagctcctcagtgctcaaattccagaggggacccaggcggtagggggctggcatgtcagtagtgccccaagagtgcacacccagcagggctgtgacagcgcccaggttcagcaccatccctgctctgagatccgagcaagtgcccttgagaagccaggcagtgagagctttgtacccattgatcaatctctccccatcctcctgcctcactatgrtgactataattaacaataatgtattgcatatttcaaaacagctaggagagaggcttttgaatgttctcatcaaaaataaatcatacaagtttaggatgatagatatgctaattatcttgatttaatcattaaacaatgtatatagacatatattgaaatatgttgtaccacatatatatgtataaattattatgtcaatcataaaaaaaggaaaaccaaaataaactacatatgcatttaatcttgttagtaaagttatccccaagagaatacaggttaaaagtttggatattgctatatatacattctagaattgcataattttgtaa

SEQ ID NO: 337772 - DNA, 495 bp, Homo sapiens
atagttaagtaagttacccaggttcatgtggttattaagtgatagacttgggatttgaacccatgtagtcaaagcacaaagatcaagtgcttgacaatgattcctaattcctcaggtgaaagtagattgaaagacacctactctgcctaagtataagagcagacccatgtcataatagatgtaggactattaatagataaatagctgttattaatagctagctgattaatagttagtagattaatagctgttaagaagtgaattaatgatcaagctaagactacctgtggataacatttcaaattttgtctttgtagactcttcctttctttccaaaatttgtctacactaagttaaggaacagctgtraacttacaccaaagatggtcaacaggaaggcttatgaatagaaattcttcacaagttggtaaaaaaatatattttgaaaacagtagacaaacatacaatgaaatcagcttgggcacttgtgcttac

SEQ ID NO: 337773 - DNA, 418 bp, Homo sapiens
aacaaaacaatcataagcagttaaacagtgtactgttctctagaggatgttgacttgaaaaacttccaacccattctcaaataatttccatgacagtatgatatagtcaatacctggtttggcttggaaaagttggatcgtctccctcttaaatcttctatataaacctagataactacaataaacctactcttagtacagcacggcatttgcttagccatctgttatatttacataaccagagtccaggctgttccctggggctctacaacttaatcaagtactctgtttacacagtcatgtattccctgagagctgcctctagtgatgaagtttayactgctaaatctatcaattagtcctaactactagccaatcagttaataaaactggaaagctaggccagagttcctccgac

SEQ ID NO: 337774 - DNA, 623 bp, Homo sapiens
ttgttatcatcatttaaagaaaagcagcaacacatatggacacaattcaaagaggaaaatagatgaaataagagccaagatcacagattaaaacgttatctgtttggtaaatgaacaatagtttcagggagccattcacatacaagttcagtgaccttgcctcacttagcaaaccaggaaatatttccttccccacagctctctctgcatgccctagagtacttactgctatctctagaatatagttgtctcaattttcacaaactgtcagacactgagatatgtccttttctttttatatttatgggtagcttaaattcctgaggggatgaattaccgaagatagttaaagattgtaagacaagaagtaatggcctgaaacatgaagaaagaatgcttaagctagataagatgaagaaattcttagtcatgaggtctatgaggcaatcaaatagggtacccagggargtagtcaagatatcatcaccaaactctattcagactcaagggaaaattagacagctctggatgagagaacaataaatcatattatttggcaaggaagaaataatctactatagataactcaagatgcagcttttgaatagttagcctatgcaaaa

SEQ ID NO: 337775 - DNA, 493 bp, Homo sapiens
tactatattataatttccaaactccaattctgtgcaccaatatacgatttagatgcagccctgtgagttgtgtttcataatataatgtatatagattaactagagggcataaggaatcattcattcattcttccatacccatattttgcctatgaaaatttagagttatgaaaggagctacttcttgacctttatattcccattatgttaatagtcagtctcatgttatacaaatcatacttcttgataaatgaaaatcagccctacaacatcatcaataatttcataaacatagtattagcatgttccttctctgagaaaaaaaattctggaaaaaattcatagtkttcctgataaattatttccatttttccaaattagttctacttaatttgtaattaataagtacatcttgaagttacaaagaactcctatagcaaaaacattatttaaagtacttcctatgcgtttaatagattttatctagatttct

SEQ ID NO: 337776 - DNA, 616 bp, Homo sapiens
ttttgtttgtttgtttgtttttgtcaggcttcacctacataaccagggcccccaatttgttttttctttttcttcttttccctttcccttcttttcccttttccttctttttcggggggttgtatttcttacatgagcagccacacagcacatcacagtagtaagctggtactaaagttaaaacagcattcaggcatttgccaaattctgtgacctgttaaagcrataaggttattgttttaacaataaggacatgtcagggaaaggagataagtccccaagcacacaagttgggtggttggaacttggatgccttacacaagctaggaccctcagggtttactaaggtgaactaagagaagtccaccttccaataaacagagatggtgaaaacttgcctgtctcagactagactctgaatgggagataaagacagcttcctaaaaattttctaaatgtagacttgaatatacataggtataaagttcaactttttactaacagtatggcccaacacattaccctcaaatttaaaaactaaattgaagcaatcctttattgggaaaagtactctgacgaaaaaataagcctactgaatgaaaaagccaactcacaa

SEQ ID NO: 337777 - DNA, 559 bp, Homo sapiens
ggagtcttctacatatagaatcatactgtcagtgaacagagataatttgacttctttttctatttgaatgccttttgtttcttctcttgactgattgctgtggctaggacttccagtaccatgttcaaaaggagtattgcaagtaggcatccttgtcttgtttctattcttaaggggagtgcctccagcttttacctgttcagtatgatgtaggctgtggttttgtcttagcagctcttattatttttarcatctttcttcaatgactagttggttgatggtttttatcatgaaaggatgttggattttatagaaatgtttctctgtgcctactgaagtgatcatatgatttctggctattatttaaaagaaaaatataacagctgctgggaggctgtggagaaaaggggatgtaactgttagtggaaacataaattagttcaccccctgtggaaaccaactggagatttctcaaaagtaaaaattgaaatatcattaggcccagcaatccattactggttatataagaaaagaagaataaattattctataaaataga

SEQ ID NO: 337778 - DNA, 556 bp, Homo sapiens
cctctcaaatctagacagaggttccttaaccttaattctttttttttttttttttttttttttgagatggagtctcgctctgtcgcccaggtgcagtggtgcaatcttggctcactgcaagctctgcctctaattcttgacttctgtgtatccaaaggcccaacaccacatgaaagccatcaaggcttggggctaccaccctctgaagcaacagcytgagctgtaggttgaccccttttagccatggttgtgacgcagggcacctagtcctatgactgcacaatgcagcaaggtcctgggcctggcccacaaaatcaattttttcctcctaggtttcctggtttgtgatgggacgggctgctgtgaagacctctgtcatgccctggagacattgtccttattgtcttggcaattaacatttggcatgtcattacttatgcaaatttctgcagctagcttgaacttctcctcagaaaatgggtttttcttttctgttgcattgtaaagctgccaattttcctaacttttatgccctgccttctgtttaaacgttagt

SEQ ID NO: 337779 - DNA, 553 bp, Homo sapiens
atattacaaatatatggccttatatatagagatctttatactgtrtctttacacatacacagacacacacacacatatatacatatatatgcatagttgtatgtgtagacacacacagatataatctcggcgttcctttatatatatataattactaaatataatttagaaggcattgaattgtactgtaaaaccatgccctatatttcattatttaacattatttcatcattaatttaacaaccatttcttaaaatatatttatttgggtgtcacatgcttacatacatacatatgctatatatatgtgtatgtgtgtacataaacatgttacatacaaacaagttgcttataatcacatttatagccaaagaatgatttctctgtgttttggtaacacattccctaatgtgtctattattatgctccattgggaccaatttaaaactatccacccatgttctcatggattgaataaagctatatatcattgtttaaatgtactactcaaaaaattggaatccacggggaaaacatataaacactatgtaaa

SEQ ID NO: 337780 - DNA, 553 bp, Homo sapiens
atattacaaatatatggccttatatatagagatctttatactgtgtctttacacatacacagacacacacacacatatatacatatatatgcatagttgtatgtgtagacacacacagatataatctcggcgttcctttatatatatataattactaaatataatttagaaggcattgaattgtactgtaaaaccatgccctatatttcattatttaacattatttcatcattaatttaacaaccatttcttaaaatatatttatttgggtgtcacatgcttacatacatacatatgctatatatatgtgtatgtgtgtacataaacatgttacatacaaacaagttgcttakaatcacatttatagccaaagaatgatttctctgtgttttggtaacacattccctaatgtgtctattattatgctccattgggaccaatttaaaactatccacccatgttctcatggattgaataaagctatatatcattgtttaaatgtactactcaaaaaattggaatccacggggaaaacatataaacactatgtaaa

SEQ ID NO: 337781 - DNA, 444 bp, Homo sapiens
tatgcaagtctaaaatctatctgggcastaaaatcttaaagctccaaaatgatcttctttgactccatgtctcacatacaggacacactgatggaagaggggggctcccatggtcttcgtcagctccacccctgtggctttgcaaggtacatcccccctcctggctgcttttatatgctggcattgagtgcctgcagcttttccaggtgtactgtgcaagctgctggtggttctaccattctatagtctggaggaccactggccctcttctcatggctccactatgcactgcccctgtggaaactgagtgtggggtctcccactttacatttccctgctgcactgtcctatcacaaattctccatgagggctccgccccctgcagcacaccgctatctggacagccaagtgtgtccatacatcctctcaaatctatacacaggt

SEQ ID NO: 337782 - DNA, 444 bp, Homo sapiens
tatgcaagtctaaaatctatctgggcactaaaatcttaaagctccaaaatgatcttctttgactccatgtctcacatacaggacacactgatggaagaggggggctcccatggtcttcgtcagctccacccctgtggctttgcaaggtacatcccccctcctggctgcttttatakgctggcattgagtgcctgcagcttttccaggtgtactgtgcaagctgctggtggttctaccattctatagtctggaggaccactggccctcttctcatggctccactatgcactgcccctgtggaaactgagtgtggggtctcccactttacatttccctgctgcactgtcctatcacaaattctccatgagggctccgccccctgcagcacaccgctatctggacagccaagtgtgtccatacatcctctcaaatctatacacaggt

SEQ ID NO: 337783 - DNA, 444 bp, Homo sapiens
tatgcaagtctaaaatctatctgggcactaaaatcttaaagctccaaaatgatcttctttgactccatgtctcacatacaggacacactgatggaagaggggggctcccatggtcttcgtcagctccacccctgtggctttgcaaggtacatcccccctcctggctgcttttatatgctggcattgagtgcctgcagcttttccaggtgtactgtgcaagctgctggtggttctaccattctatagtctggaggaccactggccctcttctcatggctccactatgcactgcccctgtggaaactgagtgtggggtctcccacttyacatttccctgctgcactgtcctatcacaaattctccatgagggctccgccccctgcagcacaccgctatctggacagccaagtgtgtccatacatcctctcaaatctatacacaggt

SEQ ID NO: 337784 - DNA, 605 bp, Homo sapiens
gtgctcttaaaaacattgttttattcattcacagagatatggtttggatttggaactaacgcttaaacacaaggcggggcatataagttaggaaaattggcagctttacaatgcagcagaaaagaaaaacccattttctgaggagaarttcaagctagctgcacaaatttgcataagtaatgacatgccaaatgttaattgccaagacaataaggacaatgtgtccagggcatgacacaggtcttcacagcagcccgtcccatcacaaaccaggaaacctatgaggaaaaaattgattttgtgggccaggcccaggaccttgctgcattgtgcagcacatatgactactgtgccctgcgtcacaaccatggctaaaaggggtcaacctacagctcaggctgttgcttcagagggtggtagccccaagccttgatggctttcatgtggtgttgggcctttggatacacacaagtcaagaattataggcacagcttgcagtgagccaagattgcaccactgtacctgggcgacagagcgagactccatctctcaaaaaaaaaaaaaaaaaaaaaaagagttttggtgaaagaacctctgtctatatt

SEQ ID NO: 337785 - DNA, 605 bp, Homo sapiens
gtgctcttaaaaacattgttttattcattcacagagatatggtttggatttggaactaacgcttaaacacaaggcggggcatataagttaggaaaattggcagctttacaatgcagcagaaaagaaaaacccattttctgaggagaaattcaagctagctgcacaaatttgcataagtaatgacatgccaaatgttaattgccaagacaataaggacaatgtgtccagggcatgacasaggtcttcacagcagcccgtcccatcacaaaccaggaaacctatgaggaaaaaattgattttgtgggccaggcccaggaccttgctgcattgtgcagcacatatgactactgtgccctgcgtcacaaccatggctaaaaggggtcaacctacagctcaggctgttgcttcagagggtggtagccccaagccttgatggctttcatgtggtgttgggcctttggatacacacaagtcaagaattataggcacagcttgcagtgagccaagattgcaccactgtacctgggcgacagagcgagactccatctctcaaaaaaaaaaaaaaaaaaaaaaagagttttggtgaaagaacctctgtctatatt

SEQ ID NO: 337786 - DNA, 605 bp, Homo sapiens
gtgctcttaaaaacattgttttattcattcacagagatatggtttggatttggaactaacgcttaaacacaaggcggggcatataagttaggaaaattggcagctttacaatgcagcagaaaagaaaaacccattttctgaggagaaattcaagctagctgcacaaatttgcataagtaatgacatgccaaatgttaattgccaagacaataaggacaatgtgtccagggcatgacacaggtcttcacagcagcccgtcccatcacaaaccaggaaacctakgaggaaaaaattgattttgtgggccaggcccaggaccttgctgcattgtgcagcacatatgactactgtgccctgcgtcacaaccatggctaaaaggggtcaacctacagctcaggctgttgcttcagagggtggtagccccaagccttgatggctttcatgtggtgttgggcctttggatacacacaagtcaagaattataggcacagcttgcagtgagccaagattgcaccactgtacctgggcgacagagcgagactccatctctcaaaaaaaaaaaaaaaaaaaaaaagagttttggtgaaagaacctctgtctatatt

SEQ ID NO: 337787 - DNA, 392 bp, Homo sapiens
acaccatccaattactatatagttgaaaaacatttttgaaaaaaaaaattttgccaaatggagtttaaaagtattggctaaacacatttcaaagtattaattgtatccatagttattcagatatatgtggttatatacaaaaaatgttttggaaaacagaagtactaaatggctataaactttgaagaaaatattatgtgtcaagtttttttctctgtaaagattagtttgcattttatagcatttatatcaatggaatcatacacatgtattttttagaggaagggctgccttttgtcattcagcatacttatttttagattatgcatccatttgatcaatagtttatttrttttatttctgattagaaatcaattgcatgaatatattaa

SEQ ID NO: 337788 - DNA, 605 bp, Homo sapiens
gtgctcttaaaaacattgttttattcattcacagagatatggtttggatttggaactaacgcttaaacacaaggcggggcatataagttaggaaaattggcagctttacaatgcagcagaaaagaaaaacccattttctgaggagaaattcaagctagctgcacaaatttgcataagtaatgacatgccaaatgttaattgccaagacaataaggacaatgtgtccagggcatgacacaggtcttcacagcagcccgtcccatcacaaaccaggaaacctatgaggaaaaaattgattttgtgggccaggcccaggaccttgctgcattgtgcagcacatatgactactgtgccctgcgtcacaaccatggctaaaaggggtcaacctacagctcaggctgttgcttcagagggtggtagccccaagccttgatggctttcatgtggtgttgggcctttggatacacasaagtcaagaattataggcacagcttgcagtgagccaagattgcaccactgtacctgggcgacagagcgagactccatctctcaaaaaaaaaaaaaaaaaaaaaaagagttttggtgaaagaacctctgtctatatt

SEQ ID NO: 337789 - DNA, 436 bp, Homo sapiens
ccaatgaaatgcaagtgcaactttcagattgcattcctaaataaaatggatataacctctactttcaacattgaaacattttgctcaggaatcttcatggatgtatataaacaattgcaatatcctagggatgacagaacaagaagttagaagacagggtccctatctctggagtattttcacttgtactattttgtaagaaataaaaacatataactttttaaagccacttttagcttgatattgttrtatcacttgaaattataaacaaacttaaacaacatttgatccagaagtagagttgctgttacgaagtctcaaaaggaatcatcagcatggtgtttctgtgtctcaaggacacagatgttgtagactagaaggtcagctaccctgattatgtaaaagcaaaccatttgttaccagatttgtccaatag

SEQ ID NO: 337790 - DNA, 585 bp, Homo sapiens
cggtttacttatgtatctctccaatgtatctgtatttagaaaagtgctgacacctagaagtcactcaacaattcttgtcaaatgaakgggccattaacaatataaaccctttaattttagctgggaacaagcacacctaaaggaaagactatattttatagactcttttgaaattaaacatggtcatttgttatctactggccaatgggatattgccagaagtgatgtgttcaattattttactatgcttttattggaaagacatgagccttcaaacaatttagagaacagatatggtcatgtagcatcttggaccattcctgtggggtagcactgtagagatttcagtgtcaaaacatgaattggtcctggacccctgacgcagtggtgctgcaataatagttctggtcagattgtgcttagattgttatttaagaaagaaataaaactctatcttgtttaatccattgattcaactgtttttcacattatggcacacttagaaaatgctgtttgtataacctgctgagtcaatagatgaagtaataggctcagtggtttcactatcagtggcatgtaattgcc

SEQ ID NO: 337791 - DNA, 564 bp, Homo sapiens
cacagtttttaaaccagttatgaggtyaggcgcttttttatatttttactggtaactgaatttccttctctttgaattgcctgctcatgtctttcccatagttttccaacaggtttctctccttttcttcattgcttttcaagagctttttatatagtagggatccacaaacattccactgggtccataatcctaggccagccatgcgttgtcctggtggatggactttattataaaaattatgtagctgctctacagtacctaagttcactctactgggcagaggccgaactgcagatgattcagccttgggtcatgcagagaacttgaactcgtcaattgaagatccagaactgacttgaggaacttgactcaactatcctgtgtccagttccagcaagctctttataggactggaaaaaagtgtccatggctagagaactcccacagatggggaaacataccacacatccacgtaagtctggtcatcaaaattcatttcctgaataggatcagaggaagcatggcctgtccctggttagttatttgagggaatagaaggga

SEQ ID NO: 337792 - DNA, 564 bp, Homo sapiens
cacagtttttaaaccagttatgaggtcrggcgcttttttatatttttactggtaactgaatttccttctctttgaattgcctgctcatgtctttcccatagttttccaacaggtttctctccttttcttcattgcttttcaagagctttttatatagtagggatccacaaacattccactgggtccataatcctaggccagccatgcgttgtcctggtggatggactttattataaaaattatgtagctgctctacagtacctaagttcactctactgggcagaggccgaactgcagatgattcagccttgggtcatgcagagaacttgaactcgtcaattgaagatccagaactgacttgaggaacttgactcaactatcctgtgtccagttccagcaagctctttataggactggaaaaaagtgtccatggctagagaactcccacagatggggaaacataccacacatccacgtaagtctggtcatcaaaattcatttcctgaataggatcagaggaagcatggcctgtccctggttagttatttgagggaatagaaggga

SEQ ID NO: 337793 - DNA, 564 bp, Homo sapiens
cacagtttttaaaccagttatgaggtcaggcgcttttttatatttttactggtaactgaatttccttctctttgaattgcctgctcatgtctttcccatagttttccaacaggtttctctccttttcttcattgcttttcaagagctttttatatagtagggatccacaaacattccactgggtccataatcctaggccagccatgcgttgtcctggtggatggactttattataaaaattatgtagctgctctacagtacctaagttcactctactgggcagaggccgaactgcagatgattcagccttgggtcatgcagagaacttgaactcgtcaatygaagatccagaactgacttgaggaacttgactcaactatcctgtgtccagttccagcaagctctttataggactggaaaaaagtgtccatggctagagaactcccacagatggggaaacataccacacatccacgtaagtctggtcatcaaaattcatttcctgaataggatcagaggaagcatggcctgtccctggttagttatttgagggaatagaaggga

SEQ ID NO: 337794 - DNA, 354 bp, Homo sapiens
tcctttttagcagaatgtaatgcccctttttatgctggagcttttctttgctccaaagtygactttgtctgaaattaatgtagctactcaacacacagcgagtttttaattttagtaattacatttttcatttctagaaattctgccttttttcaaaacttgttggtcattttttatggatccctcgatcatgttttaagtttcacttttatttctttaaacatattaaacgtatttatattattttttatgtttgataatttcaattttgaactctttgtgggtttgattttgctgtctcttacttctgctagatttattctaatgtgttgcaatttttgtctgtgagctact

SEQ ID NO: 337795 - DNA, 354 bp, Homo sapiens
tcctttttagcagaatgtaatgcccctttttatgctggagcttttctttgctccaaagttgactttgtctgaaattaatgtagctactcaacacacagcgagtttttaattttagtaattacatttttcatttctagaaattctgccttttttcaaaacttgttggtcattttttatggatccctcgatcatgttttaagtttcacttttatttctttaaacatattaaacrtatttatattattttttatgtttgataatttcaattttgaactctttgtgggtttgattttgctgtctcttacttctgctagatttattctaatgtgttgcaatttttgtctgtgagctact

SEQ ID NO: 337796 - DNA, 689 bp, Homo sapiens
tggctctctcctgggggcttgccagataccccattcccagatggtaaatacgctcctgaagaaggtccccggggtcttagctcgggaccagccactgcagtcgggcaaggacaggccgctggacatgctcagatgaggaaggcagaactttgagaagcaagttgaaaaccggaatctctcatttgggtattctgagtggcatgatacgttacgtgtgggctacctggagaggcgggcctgtcaggctatttgggttccctgtaagtgtgggcagcatggggccgtgggagggagctgacatgagtggccagggctgaccatgccgaccatctccaccaggactcaggatgctggcagggccccacccagacttctcccagtttctacatgctggatttagcacatagaagcactgtgcccccctgggtgtccagagcctggcacgtggccggctgtgaatacacaagtgctgaacacataagtactgaacaaatgaatggatgtgccagtgccaggcttgttgagmtggccgcgggctctgctcgaatccttgatgtttttgtgcagaaactgctccacttcctgcatccccctgccaggaggcctggacctcagtctgggctgaactgggcactgttatccctgggcatgggtagggtaccaaatccttaggagggaagagcagcagt

SEQ ID NO: 337797 - DNA, 641 bp, Homo sapiens
atatatgaaaatagatgaattagatttcatcaaaattagatgagttggttttcatccaattcaaaaaatcatagattaatttcatcaaaattaaaaacttggctgctatggtggctcacgtctgtaactccagcactttgggaggccaaggtgggtggatcacctgatgtcaggagttgaagaccagccttgccaacatggtgaaaccctgtctctactaaaaatacaaaaattagctgggaatgatggcggacacctacaataccagctacttgggaggccgagggaggagaatcacttgaacccaggaggcagaggttgcaatgagctgagattgagccactgcactccaacctgggggacagagtgagattctgtctcaaaaamacaaaaattaaaaactcgtgtatttcaagggagacaatcaagaaagtgaaaagacaacccacagaatgggagaaaatatttgcgaatgtcatatctgataaaggtctagtatccagaatatatagaggactcttacaattcaacagtaaaaagacaaaccaaatagaaatgggcaaagggcttgaatagacgtttctccaaagaaaacatgcaaatggccaataagtccatgaaaagatgctcaacattattag

SEQ ID NO: 337798 - DNA, 551 bp, Homo sapiens
caaatctcacacagagctgcaaaagcaaggcgatgcctgtggacagcatcaatgtggtgagtgacatcttgctgggtccaaggtgctgtctgtgtggcaggtgagggactgacggacggcttgggtgccatttctttgacgtggggcattcagtgccacccyagccactttctgttttttcagcctgggaatcttccctgagattgcgatgccagtgggccttcctgggtggatgcgtctttcatctccatgctgcgttctcatcccagctcacaacccacagcattccaggaggcttcagtgtgagctcagaggtcagcaggtcctctttaacccccgtacagtttcctatggctgctgtgacaaataccacaattgcagtggcttaaaacagcacacgtgttacctcacggttctggaggtcgggaatcggacacggtgtcaccgttctgcagtcgaggtggcagcggggctgggttctgctggaggctccgggaagaggccttgccctttctggcttccagaggccgcccatgctccttggctcatat

SEQ ID NO: 337799 - DNA, 551 bp, Homo sapiens
caaatctcacacagagctgcaaaagcaaggcgatgcctgtggacagcatcaatgtggtgagtgacatcttgctgggtccaaggtgctgtctgtgtggcaggtgagggactgacggacggcttgggtgccatttctttgacgtggggcattcagtgccaccccagccactttctsttttttcagcctgggaatcttccctgagattgcgatgccagtgggccttcctgggtggatgcgtctttcatctccatgctgcgttctcatcccagctcacaacccacagcattccaggaggcttcagtgtgagctcagaggtcagcaggtcctctttaacccccgtacagtttcctatggctgctgtgacaaataccacaattgcagtggcttaaaacagcacacgtgttacctcacggttctggaggtcgggaatcggacacggtgtcaccgttctgcagtcgaggtggcagcggggctgggttctgctggaggctccgggaagaggccttgccctttctggcttccagaggccgcccatgctccttggctcatat

SEQ ID NO: 337800 - DNA, 551 bp, Homo sapiens
caaatctcacacagagctgcaaaagcaaggcgatgcctgtggacagcatcaatgtggtgagtgacatcttgctgggtccaaggtgctgtctgtgtggcaggtgagggactgacggacggcttgggtgccatttctttgacgtggggcattcagtgccaccccagccactttctgttttttcagcctgggaatcttccctgagattgcgatgccagtgggccttcctgggtggatgcgtctttcatctccatgctgcgttctcatcccagctcacaacccacagcattccaggaggcttcagtgtgagctcagaggtcagcaggtcctctttaacccccgtacagtttcctatggctgctgtgacaaataccacaattgcagtggcttaaaacagcacacgtgttayctcacggttctggaggtcgggaatcggacacggtgtcaccgttctgcagtcgaggtggcagcggggctgggttctgctggaggctccgggaagaggccttgccctttctggcttccagaggccgcccatgctccttggctcatat

SEQ ID NO: 337801 - DNA, 646 bp, Homo sapiens
ctggtatattctttcaaacttagagtattgaaaccaataggtttggcccttttgtggcaaacactgacctgggtgctcttaaagaatctttttttttttcagtcctcacagtatttctctaagttgctctgtgctgggcatcgtgcaaggcattttatacacatgattccgtcaaatattcaccatagttctatgatatagttaacatagcatgatgtagttgctactgggcccccttttacagatgaggaaacagaggtgcagagacgttgattgacttaagtgcccaaggtcctacagctaagaagtgcaggagaacctgcgaagatgcacagggtttccaaggccaggaaccctgctctcccccgcagcccccactacactggctcagctagagcctccttggtaggagctcatcaggagcctgcaggccactactcyagggccattctcccccagcctgcctgctgtcagcctgcagctccagcgtgccgcttgggcagggtgggtggcttgcagagaaggaggggcagtcattgaggttctctgaccctgtgacccttctcaaccggcccccaccggcccagcctgagcaccaggaccccaaggagcccctgcccatctgtaatccccttgtgaccaattc

SEQ ID NO: 337802 - DNA, 499 bp, Homo sapiens
tccccctctccaagggcccccatccttccttggaaaaacagatgctgccctcccaaaaagtgggggtatagaaatcaggggaaagttctcacacaagagagggggaaatggtcaaaaaaaaaatcaatgtttgcattaatggagttgcctgttcagcatttctcctcttttatagatttagataacatgctcgtcagggatatatcttcatttcccagagcaaagaaattrattactcactaatggcacaattcagaaattaatttgtgctaccgtctcaaatatgttgttattaatcaattgagagtgtggggctggcaggggaaaaggtgtccaccagggtctgaggctctcaaggctgacctatatttgatggacatttccagaggctcaacttgggccactcaaaaccaggggccagagggtacagacccgaaagacgattccgaggatgctgtgggaagaacattagaccggaagttggatgactcaaaatcta

SEQ ID NO: 337803 - DNA, 587 bp, Homo sapiens
gttccactcatttttggacttgttacctcccaggtctttcaggtgcctgccttggcgcaggccacactggagtgtgagaaccgagggccagcctgctgtcgtatggtaggaagcatgcatgtgttccccatgggcttggacatacccctggtggtggaaactgggtgagggcaggagaggagagtataacaggaggccatcccgagctgcattctgcacagccaccatcagagaagggggcagaaggtggtccatgtaatgtctcaaaaggaccaacaaaaacaccatcccaaacaccagcctcggagaacctgacacccaggacatcagcagtgggttacaacagtgacggggacctaagacttttagcccctttttctactattcctctatctccttgctctgactctcaaggagccagcagcagcagaagggcaagaaagcagaagtgaagcaaaagaayagaccaatcttatctccaagccatgggtcagccctgagctgaaggaaaggaagaagttttcaactggatgtgagcataaatctctgaggctggactggccctgaaagtgagtcctaattactaa

SEQ ID NO: 337804 - DNA, 587 bp, Homo sapiens
gttccactcatttttggacttgttacctcccaggtctttcaggtgcctgccttggcgcaggccacactggagtgtgagaaccgagggccagcctgctgtcgtatggtaggaagcatgcatgtgttccccatgggcttggacatacccctggtggtggaaactgggtgagggcaggagaggagagtataacaggaggccatcccgagctgcattctgcacagccaccatcagagaagggggcagaaggtggtccatgtaatgtctcaaaaggaccaacaaaaacaccatcccaaacaccagcctcggagaacctgacacccaggacatcagcagtgggttacaacagtgacggggacctaagacttttagcccctttttctactattcctctatctccttgctctgactctcaaggagccagcagcagcagaagggcaagaaagcagaagtgaagcaaaagaacagaccaatcttayctccaagccatgggtcagccctgagctgaaggaaaggaagaagttttcaactggatgtgagcataaatctctgaggctggactggccctgaaagtgagtcctaattactaa

SEQ ID NO: 337805 - DNA, 602 bp, Homo sapiens
tcttgttcaccaccatatccccagcacccagaaaagtacttgacactgagcaggtggctcaataagcatgtgttaagtgaataaatgacagaggtatacacacacgcgcgcgcgcrcacacacacacacacacacatacacacatgtaactttttgtatctaagcctcagaatctgtttctgaaaaatggagagtgattggatagtccttggcaagctaaggatcttccaattctgttactttctaagtttaagagtgggttctggaaccctagcatttatttgtctcaaagtctgaaaactgaacgaaaagaagaaaaaaaaattcaggagataaggggaaatcctaatctcctttgtgctacagtccatcttctacaataccttccctgtccccaccccttatactctgtaaggactagatttacttttagggattaatataatttggagagcaaacagaagcctatatgctcacatttcccttcaccacctgttattgctcccactctcctacaggaaatgaacctgaagatacctatctctgggagagttagcacagcgatctgaatggatttcagccaaaggttaaagataactggc

SEQ ID NO: 337806 - DNA, 595 bp, Homo sapiens
caggcctgccctgaccccggccagtgcttgttccgggacccttccgggggcggggcctacgaccttcctgggccggggaagacagtcgtggaggagtccacggatctcgtccccttggtggcccgattctgctttatactggggtgggagcgagagggaggctgagtttgcgcgctcgtgtgcgtgcctgtccgctgccccttcccgctggcactctgggtacggggtctgcctgggactcacgctctgcgccggtatgctggccccagagccagtccccgcgccggcttgaggcccgtgccaggccacgggggcttggtggcgctggagcagccctcctcccgtgagcttcccccacccacccccggggcgggggcgggggcggggcccttgctctgctgtaagctcgsgagcttcatcagaccatttctggtccacaggccttcggagcaggcaagactgggagggccttttgataggagagggacttgggggagggaggatgagtggggctgtttgtgaggggcgctgaggtcccagagatgcaggcttgggaaatcggtaaccactccccacacctcgccagaggaggcaa

SEQ ID NO: 337807 - DNA, 538 bp, Homo sapiens
aattatagatcaacagagtcagaaataagaagatttctgaaaaaatattaaatctttcttgtctcaaaattgtctttaaaaattaattttgatataggaaagatgttaatttcatcaaatggtttgagtttggaatatctaactctctattcctctgtacctcttgtattttctttagtgttgagaggcaatatttttgacattgtaccaccataataataattataagtaatacttaaatcgtgcttactatgtaccagggaattcastgagagatttgtgtagactaaacaatttaatcctcagaacaacctcatgaagtaggcacaatcattatcccagttttacagcaagacagactaaggcacagcaaatgtttggtaaattgatcaaagtgacaaaggtggtatagcaccagagtctttacacataaacccaagttaagtatagaccaagtcattgagtgtttccactgagggttacataataatatcagcattcaattattctttcccctacctgaatacttgctaaactc

SEQ ID NO: 337808 - DNA, 538 bp, Homo sapiens
aattatagatcaacagagtcagaaataagaagatttctgaaaaaatattaaatctttcttgtctcaaaattgtctttaaaaattaattttgatataggaaagatgttaatttcatcaaatggtttgagtttggaatatctaactctctattcctctgtacctcttgtattttctttagtgttgagaggcaatatttttgacattgtaccaccataataataattataagtaatacttaaatcgtgcttactatgtaccagggaattcagtgagagatttgtgtagactaaacaatttaatcctcagaacaacctcatgaagtaggcacaatcattatcccagttttacagcargacagactaaggcacagcaaatgtttggtaaattgatcaaagtgacaaaggtggtatagcaccagagtctttacacataaacccaagttaagtatagaccaagtcattgagtgtttccactgagggttacataataatatcagcattcaattattctttcccctacctgaatacttgctaaactc

SEQ ID NO: 337809 - DNA, 643 bp, Homo sapiens
acccggactgaactaggcctgaaacattacatcactcctagctaagaaagtcatcaatgtcctaacaagaaagaatgcgtagaaccacattataactagatgtatatatttagactgaactacatgtttgtaaaatacatatagtctctctatgatgtgtattcagttcttctctcttcaccaatttattgtccatgtaaattctcaagatacagcaagttatttgactcatacactgaaaggaagatccaaaggtccaaacaaaataaataaggaaagcttactctatataacaaaccatgtaagtgttccttrtagattgtcttcaagctaaatccaattatatatttgaaaaagaaataagataatcaatcattacatagcaaatgaacaaagaattcctgaccctccacttggatgccaaagatccaactcaacttttgctgtttattcaattgcaaaaatatttgttgagagcttattaagtgccaagcactgttgaaagtgctggttaaacattattgaatcaaattccttgccctcatggaacttacattctactcatgatttgataaaggcttgaagcaagaagtattaattgtaatgaatttgaaattatttgtaataataattgatattgtga

SEQ ID NO: 337810 - DNA, 643 bp, Homo sapiens
acccggactgaactaggcctgaaacattacatcactcctagctaagaaagtcatcaatgtcctaacaagaaagaatgcgtagaaccacattataactagatgtatatatttagactgaactacatgtttgtaaaatacatatagtctctctatgatgtgtattcagttcttctctcttcaccaatttattgtccatgtaaattctcaagatacagcaagttatttgactcatacactgaaaggaagatccaaaggtccaaacaaaataaataaggaaagcttactctatataacaaaccatgtaagtgttccttatagattgtcttcaagctaaatccaattatatatttgaaaaagaaataagataatcaatcattacatagcaaatgaacaaagaattcctgaccctccacttggatgccaaagatccaactcaacttttgctgtttattcaattgcaaaaatatttgttgagagcttattaagtgccaagcactgttgaaagtgctggttaaacattattgaatcaaattccttgccctcatggaacttacattctactcatgatttgataaaggcttgaagcaagaagtattaaytgtaatgaatttgaaattatttgtaataataattgatattgtga

SEQ ID NO: 337811 - DNA, 346 bp, Homo sapiens
tttttttatatatggggcttataagagaatttttacattgtttttacttctggatcacttcacttataataaaaattttacttaaaacaaccataccaaattaactctgagcaagtaattgttttaatatgacaacttccagtttatttttactagttacaaaataagtccatctcttatctattatttactgcttaataggtatayataaaaatagcaatttctttcttttgtttttggtgaaggttatttatttgaagtgctcactatttaagagcatatggaggcggctgaccaccttgaaaattcacctgtagtaggactgttcctttttttttttattttt

SEQ ID NO: 337812 - DNA, 580 bp, Homo sapiens
tttttttttaattattttttcttttgtttcttctgactgtgtattttcaaataacctgtcttcaagctcacaaattctttcttctgcttgattaattctgctattaagactctaatgcattcttcagtatgtcaattgcatttttcagctccagaatttctgcttgattctttttaattattttaatttatttgttaaatttatctgatagaattctgaataccttctctatgctaccttgaatttagttgagtttcctcaaaacagytattttgaatcctgtctaaaagtttacatatctttgtctttgcaagacaaagtctttgtaagacaaagtcctccccactcttccctctcctctcctcaagcagaaagaaggggtctcttttggagctgcaagctgtgctgcatggggttaggtgaagtgtgctgccagcactaccctagccaccacaactggtgtctcagtagatcacgcaccctcccaagtcccttggctgtaagcccagtttagcactaggacttgcctaggagttgcagtccttatggcctagacagcttttcaagtttatttagagcc

SEQ ID NO: 337813 - DNA, 509 bp, Homo sapiens
cgaccaccatgttttctggcaagatcttctcccgggaaaaagtcacacttgctttatatagatttctgcatttgtccaattttctccacagcttacttattacccttctacaacaggaaagtttcagcttctctttttgggatttcctcattaraaaaagacaggcaagtttttctgagaagtttctctgtcaaagccattgccaggccttgtcacagatcttcatgttctgacatgacacattccaccacacagggagctgtacacggtgtgcatgaaaatgtcagatgctgacctgtgggctgtagcctttgagcccaggcattccattccaaactgtatgcaagtcttaggcaggtcatcacgaaagggcaaaaagagaacatctttaaaaaaaaaaaaaaaagagagaaacccaattttattatcaactccgaaggctttccttttgaaaattttagggtgaaaggtgatttggcaatttgggaagttactgagtcaatttgaga

SEQ ID NO: 337814 - DNA, 617 bp, Homo sapiens
atgatttttctttttaaatgagttttcatagaagagatttgcataaatcagagtttatttgtaacactccatagtcaattccaagatttctcaaaaaagcaaaaacaaacaaacaaaaacaatgtagtggatgctgccttgtactcctttatcccatgtccaagatgaggcacacataagcccagctgccaggagygcaggtttcacaaggctaacagctgtgcccacatcctggaatgattataccctcatatcagacagccattgtgtcatggctgcccctccctctgggaatgtatttaaacttgggcaagggagctctttttagccaaaggatttctcagtcttcatttctgtctgtgcttcagcctggatagattctattgctgcattttcaagttcactaatcttttcttctctagtttctaatctgttcttaatcctatccagcaaatgttcatttcagttatagtatttttttatttctaggacttttatctttcatttatcttttcattatgctcaaattcatcaaatccctgagcatttgagcatatttatatgttttaatttgtgtctgctaattccatcatctctgtcatttctgggtctgtttc

SEQ ID NO: 337815 - DNA, 586 bp, Homo sapiens
gatgcagacttgaactgttctaagttacccaaatgtttccaagtagtggccttctaggactttattattttgaaacactttttagattgcactcaagagaatagacaaaagttgccaagtattagatctartaccttgcatgtaagaacttctgtgttccacgtttgataaacttgttcttggtgttcaaaggtcaccaaactaccactaccaaaaatcaagcaaaaaaggattcgtaatacttcattgtaggcattggaataatatttacagaattcttgaggccagcttatcttttatcccttccccagccttcaatatctaccagaggtaaatgattaggaagttaccaaaatagagtagatcatccaatcatggaggagattgctaccagttcttagctttggaatgcatttttgtgtcttatattttatatggaaagagttttatatggaagaaaatatatattcttcatatattttatatggaagagttgctttctagttacaaagtcattcaaatgaaatttttaaaacaaatagaaataatcctggctttagccataatcctagaagtaatgtcaaaa

SEQ ID NO: 337816 - DNA, 625 bp, Homo sapiens
ttataagctgaaatcccttggatattttatttgaatcaaaagttccattggtgagaaaaataaaactttggaaaccacgacaataaaatttgaatctactcatgtacaagactatcttcacttttctgaagtgagtatgatggaattatttgcactgaattctggagagatattaaaaatattttgagagggagagagaaagagagatcacatacacataattttattatagtatattgttataactgttctgttttattattaattatggtgcctaatttaaaaattaaactttattgtaggtatttatgtttagaaaaaaaacatagtatgtataagattcggtactatctgtggtttcagtcacccaccgggggtcttagaaygtacccctgtggataagggggaactactgtatatactcctctcttgcaacgcactaagacagagcgggtataaaatgtgagcacttgggccagcttgctgtggacaatttcactacatttaaaactaccttaggtttctgagatacacctacttaactgtagctatggtaaagaaggatttaatattcagtaatggtacatacttgttatctcctacctagggaaatccatagatatcc

SEQ ID NO: 337817 - DNA, 625 bp, Homo sapiens
ttataagctgaaatcccttggatattttatttgaatcaaaagttccattggtgagaaaaataaaactttggaaaccacgacaataaaatttgaatctactcatgtacaagactatcttcacttttctgaagtgagtatgatggaattatttgcactgaattctggagagatattaaaaatattttgagagggagagagaaagagagatcacatacacataattttattatagtatattgttataactgttctgttttattattaattatggtgcctaatttaaaaattaaactttattgtaggtatttatgtttagaaaaaaaacatagtatgtataagattcggtactatctgtggtttcagtcacccaccgggggtcttagaatgtacccctgtggataagggggaactactgtatatactcctctcttgcaacgcactaagacagagcggstataaaatgtgagcacttgggccagcttgctgtggacaatttcactacatttaaaactaccttaggtttctgagatacacctacttaactgtagctatggtaaagaaggatttaatattcagtaatggtacatacttgttatctcctacctagggaaatccatagatatcc

SEQ ID NO: 337818 - DNA, 518 bp, Homo sapiens
aacatttaagagacctagagaagaagggatttctctctttctccagatacctattttgcaccttcttcataatatgccactagacctatctcttccaggagctcttattttattaaccttgactcaagaagagagaacattaatatctataatttctcaaaatcccttggtgtctaaaatgtatggctgggtgatcacttcttcatttgctaccttaaatcttgttttcaacctaacgaagattttggacacagtgctattgtatcaatttatactatattttcacagtgctattgtaccaatttatactatattttcacttgatatggtaaagtcatagtcacagacatccaatttaatggtaattattawcatttttttctgcagagcagaattatcaaattcagaaatgggagaacctagagaaagcatctgtcatgcttttattttacacagggaatttgtacttactcaagattatttggcggcagaatggagattcgaatacagagtttcta

SEQ ID NO: 337819 - DNA, 577 bp, Homo sapiens
tgactgggtcttgaagcaaattggtaagaccaaaaagaggtcctaaagccagtgaggagacgtctctgctcccctgaatcttccttgtgtgaatatagattttaaaaatcatgctcttattgcttctcagccttttggttaagatcaaatgtaaaaattatgatcttgatcactgaatacctacatgaaataacctgttggacagagggcatagtattatggtttttatggggagaaaycaaaaacttcatcagagctgttctcatggaagaaaacctatatgtactactacagtgatttctttaaggcctttggcaagatttcctgtcattttctatagtctcacctgcccttctatgctcagtagtagaataggagcaccagtatatcagaaggtatggctagaaggggtgccatggatttctagtgtggaaaagtcacaatgtctatctcctaaaccagtacatacagatgttttccagtatggtccaaccagagtcctagaaataatcacaaatacatagccaacaaatgcccctgagtggctttgttacagacaccaaaagcctggttttat

SEQ ID NO: 337820 - DNA, 577 bp, Homo sapiens
tgactgggtcttgaagcaaattggtaagaccaaaaagaggtcctaaagccagtgaggagacgtctctgctcccctgaatcttccttgtgtgaatatagattttaaaaatcatgctcttattgcttctcagccttttggttaagatcaaatgtaaaaattatgatcttgatcactgaatacctacatgaaataacctgttggacagagggcatagtattatggtttttatggggagaaaccaaaaacttcatcagagctgttctcatggaagaaaacctatatgtactactacagtgatttctttaaggcctttggcaagatttcctgtcrttttctatagtctcacctgcccttctatgctcagtagtagaataggagcaccagtatatcagaaggtatggctagaaggggtgccatggatttctagtgtggaaaagtcacaatgtctatctcctaaaccagtacatacagatgttttccagtatggtccaaccagagtcctagaaataatcacaaatacatagccaacaaatgcccctgagtggctttgttacagacaccaaaagcctggttttat

SEQ ID NO: 337821 - DNA, 577 bp, Homo sapiens
tgactgggtcttgaagcaaattggtaagaccaaaaagaggtcctaaagccagtgaggagacgtctctgctcccctgaatcttccttgtgtgaatatagattttaaaaatcatgctcttattgcttctcagccttttggttaagatcaaatgtaaaaattatgatcttgatcactgaatacctacatgaaataacctgttggacagagggcatagtattatggtttttatggggagaaaccaaaaacttcatcagagctgttctcatggaagaaaacctatatgtactactacagtgatttctttaaggcctttggcaagatttcctgtcattttctatagtctcacctgcccttctatgctcagtagwagaataggagcaccagtatatcagaaggtatggctagaaggggtgccatggatttctagtgtggaaaagtcacaatgtctatctcctaaaccagtacatacagatgttttccagtatggtccaaccagagtcctagaaataatcacaaatacatagccaacaaatgcccctgagtggctttgttacagacaccaaaagcctggttttat

SEQ ID NO: 337822 - DNA, 550 bp, Homo sapiens
ccagctctgctgcttcctaactctgggaccttatgcatattactttacctctctgagctccagattcttcccatgtaaaatgtgggaataatgaaacccatctatcttagtccattttgggttgctataacagaacacctgagtctgsgtaatttataaagagcagaaatttgttgtctcacagttctgaaggctaggggaagacataaggcctgtgacttagggagtaaccctgaaacccaagcaaaagtgactcttgccccaagctctagaggaggtgctatagaggagtccactctggtcttctgctgtggtctcggtgtttgtgtctccctaaattcatatgtagaaatcctaattcccaatatgatggtattaggaggtgggggtctttgagaggtgattaggttatgaggacagagccctcatgaataagattagtgcttttataaaagagacccagagagctagctaatctctttcaccatgggaagacatagtgaaaagacagccatctatgaaccagaaagcaggccctcaccagacactg

SEQ ID NO: 337823 - DNA, 550 bp, Homo sapiens
ccagctctgctgcttcctaactctgggaccttatgcatattactttacctctctgagctccagattcttcccatgtaaaatgtgggaataatgaaacccatctatcttagtccattttgggttgctataacagaacacctgagtctgggtaatttataaagagcagaaatttrttgtctcacagttctgaaggctaggggaagacataaggcctgtgacttagggagtaaccctgaaacccaagcaaaagtgactcttgccccaagctctagaggaggtgctatagaggagtccactctggtcttctgctgtggtctcggtgtttgtgtctccctaaattcatatgtagaaatcctaattcccaatatgatggtattaggaggtgggggtctttgagaggtgattaggttatgaggacagagccctcatgaataagattagtgcttttataaaagagacccagagagctagctaatctctttcaccatgggaagacatagtgaaaagacagccatctatgaaccagaaagcaggccctcaccagacactg

SEQ ID NO: 337824 - DNA, 521 bp, Homo sapiens
cttggcaaaagtagaggctgacttggtggccagaatttgccctcaagccaggtatctgtagctctcccttgattaggagaccggcctaatcatggctgtcattttgtacctcactttgaaatgtttcagcctgaaatatgaaagagttaaaatgaacaaatamttgggaaagggtgacaaacttggaatgaatttagagaattgtttaaaaaaattgtcctttatcttggcacactgtttgcactcaatgtattttaaaacataataataattcttgataataattataattttctcattattcagaggagggcagccgctaccctggagatagcaccgctgctgccaagagcttttggaaaaatacaatgctttctgattgttcaaggatattcccacttttaaggcaggctgaggcccaaatgtcttccctttcacaactgggccactttggaacacagtggccagaatccctcttttctggggtctgcaactggtgaataatgtcttagcctcctctc

SEQ ID NO: 337825 - DNA, 634 bp, Homo sapiens
ttgacccaggccatcaaacagactacacgccaatgctggaagctgacatcttgtattctgaatgaaacagcctttgcacatttcccctagtcatccaaattccaagttctcttgcctgtcataccactctcactatattttatggattgaattgtatctggcaaaaagatttgctgaggtccgaatgcctggtctttgatcctgtgttgaaawagggactttgcagatataatcgagttaagataatgtaatattgcgttagggtaggcccttgtgattagcctccagaacggtgagagaatcagtttctgttgttttaagacatccagtttgtggcattttgttatggcaaccctaggaaactaataacaccatatccaaggcattgcacccaggcaggaagagatggaataagaggaaggggtgtcaggctcagatttcacaagggacaaagacagaaagtcttaaagaatagatgtgttctgctcctcattttctggccggaagaggaacacagtacccaagttagtctttagcaagcaagtatctgccaccatcagcctgggtattagagcataacatacttgtgcactgcactgtgtaagcaggagaaggtgccctgttaggtactatc

SEQ ID NO: 337826 - DNA, 506 bp, Homo sapiens
tgcccaaccagtacgtactctgcaaatattccaggatctgaaaaaatccaaaatctcaagcacttctggtccctagcattttggataaaggatactcaacttgtaataggtaaggcattytgagactattaatggcactcggccaggttttgccactccatgaaaacagatgtggagatgtactaaatcagggctggctggctgctgctcttttttatgtttgttttactacctatagcccctttctatgaactggcacagaaatgcaaaaaaaaaaaaaaggctcatgtaatattaaataagcagaactcttacaaatatatgctggttttcctgactacagtttccttcaagtgatgtaatgttttagaactcctatccaactgaagctggcatttctacacacttatagaaagaaaaacaatccagctttcaaattcagtaacagacatctgtgagcacttaacatgaagaagtccagaaaatgtctagaaatactggtgctg

SEQ ID NO: 337827 - DNA, 441 bp, Homo sapiens
tagtcacatataactacactataccctcagatcaaagttaatgatgtcaatggaaagtataggccggcgggttcactggtgataagtcatgagactctgagcaaagaataagtaataaggttagaattctttagaagtgttaaggggaaagaaggtaacaacaacaaaaactcctccacatcaagagttctaagtactttgttgtttattaactaatttcataccaacaaccctgtaagactgatattatcaatccccattttaagtacgtggaacaaaagaagaaagaggcaaacaacatgctcaaagatttacaaagccaagaaatcatgcgaactggtggggcttcgggttccagaagtcartgtaaacatagcttctccatttttcaccaacagtcactaaaattgaggccagcaagtttttagaagcctatctccc

SEQ ID NO: 337828 - DNA, 505 bp, Homo sapiens
ttggtggtgacttgatgggtcgttttgaagctgagagtaagaatctaggacccattccgcagatcaggaagagttcactgaaggatttggtataatgtcaggctctgtastagacattatttgggatacaaaagtaaataagtcagaggttttgtcctcaaggaactaaccatccagaagtaaatagaaataaacttggggaccacatgcagtgctcatgcctgtaatcctagcactttgggaagccaaggcgggcagatcactggaggtcaggagattgataccagcttgtccaacatggtgaaaccctgtctcgactaaaaatacaaaagttagcctagagtggcggcttatgccaataatcccagctactcgggtggctgaggcaggaggatcacttgaacccaggaggcagaggttgcagtgagctaggattgcaccactgcactccagcctaggtgacagagcaagactccatctcaaaaagaaaaagaaagaaatttgg

SEQ ID NO: 337829 - DNA, 604 bp, Homo sapiens
cactgtcagttacagttggactgctgcatcacagtggaggcagcagagttgaagatccacagagggctgtaatacagcccagaaaagacaatggagagtgaaggctagaaacattgaggaaggggtcaagaagcacttgtacttcctgttatcttttccaatagaatattcctgcaagttacccatcagaaaaaggtgttcagagggtttgaaaaagaagtggttagcccatgccagtgaaggtgacaaaaaacaaaacaacttgatttttggtcatatcagaaaggatggagggaaacacccaagtacatgcayggacacatgtgctccagccaaaggagtgctgttttcaccagccacaaattttctaacagcaacaacaaaaacccacagatgtaagtaacatggaagtggatcagtcctaagccaaataaggattcccacctggggcaaaagctgacttcctaggacatgaactgaacacatcacagtaaaagcccagtagaggctgctgccagttccagctattagtaattatgagggggacaggatgacacctcacacggaccacccctagcaagagggtttgtttcagttctagctg

SEQ ID NO: 337830 - DNA, 604 bp, Homo sapiens
cactgtcagttacagttggactgctgcatcacagtggaggcagcagagttgaagatccacagagggctgtaatacagcccagaaaagacaatggagagtgaaggctagaaacattgaggaaggggtcaagaagcacttgtacttcctgttatcttttccaatagaatattcctgcaagttacccatcagaaaaaggtgttcagagggtttgaaaaagaagtggttagcccatgccagtgaaggtgacaaaaaacaaaacaacttgatttttggtcatatcagaaaggatggagggaaacacccaagtacatgcacggacacawgtgctccagccaaaggagtgctgttttcaccagccacaaattttctaacagcaacaacaaaaacccacagatgtaagtaacatggaagtggatcagtcctaagccaaataaggattcccacctggggcaaaagctgacttcctaggacatgaactgaacacatcacagtaaaagcccagtagaggctgctgccagttccagctattagtaattatgagggggacaggatgacacctcacacggaccacccctagcaagagggtttgtttcagttctagctg

SEQ ID NO: 337831 - DNA, 604 bp, Homo sapiens
cactgtcagttacagttggactgctgcatcacagtggaggcagcagagttgaagatccacagagggctgtaatacagcccagaaaagacaatggagagtgaaggctagaaacattgaggaaggggtcaagaagcacttgtacttcctgttatcttttccaatagaatattcctgcaagttacccatcagaaaaaggtgttcagagggtttgaaaaagaagtggttagcccatgccagtgaaggtgacaaaaaacaaaacaacttgatttttggtcatatcagaaaggatggagggaaacacccaagtacatgcacggacacatgtgctccagccaaaggagtgctgttttcaccagccamaaattttctaacagcaacaacaaaaacccacagatgtaagtaacatggaagtggatcagtcctaagccaaataaggattcccacctggggcaaaagctgacttcctaggacatgaactgaacacatcacagtaaaagcccagtagaggctgctgccagttccagctattagtaattatgagggggacaggatgacacctcacacggaccacccctagcaagagggtttgtttcagttctagctg

SEQ ID NO: 337832 - DNA, 580 bp, Homo sapiens
gttagaaaaacagcaagaaggtcacataaatttgaaaaattaccaagtgtttaatatttctggcataatttaaatttctgtagtccctataagcttattggtactgaagaagttacttaaaattaatattctaattctgatgcttcttcctaccttatggtaccttagacttctagactctctaattgatatggcccttggcaacctaggtatgtctgagattaatcaagtattgtctcagatgtacttataagaaactctgtttcaaaggttctgcacttgctttattgggcatagcagactcctctgataggctgtaggtggcttgtcaacatctcactggatgctatgccattgctgcttcaacaaataccatgttatctattgctgcttcttcaaactccataactcccgatcagctgtcacatttcttccagctgcagaaagcacaattactaytgcaccaggcagtaccagaaacaccctgaatcctcatagtgttccaggtgggacacattctgtggcaaaatgggcagtaaaggtgattttctctcctctgatcaagaaatattgttagcta

SEQ ID NO: 337833 - DNA, 595 bp, Homo sapiens
ttaaaagtaataatcctttgaaagtgatatttaaaagtaataatcctttttttcttattcagagcctactcagatgtaagtccatttatctacactggttttaggcaygaaatccagtgagatttactggtgtctctattatttttcccacaaaagtttgagtgtggttaatggtgtaattgttagcagaaactttcttcttacagcagtgttggtgggctttaaaatctcttgcacttatcttttttccttcttgcttttagcactgcagtattttcttgatggaaaaaaatccctattgattcataccaggcttataaaacggaatgtgtgcttctactttttacaggcaaatgaaatagaatgattataaacaatgaacttgccaatgtgatactgctaatcagtttgtttaaataaaacccaaatcatgtgccagatacctgccatcttgtgaaggaacagtttatgttctttgtatgtggccaggttttattccccagagatttgttgctatgaggctggaattcaacttgtatgtggttggaatgatattaagtcatagacactctgccagaacatatctttccaaaca

SEQ ID NO: 337834 - DNA, 595 bp, Homo sapiens
ttaaaagtaataatcctttgaaagtgatatttaaaagtaataatcctttttttcttattcagagcctactcagatgtaagtccatttatctacactggttttaggcatgaaatccagtgagatttactggtgtctctattatttttcccacaaaagtttgagtgtggttaatggtgtaattgttagcagaaactttcttcttacagcagtgttggtgggctttaaaatctcttgcacttatcttttttccttcttgcttttagcactgcagtattttcttgatggaaaaaaatccctattgattcataccaggcttataaaacggaatgtgtgcttctactttttacaggcaaatgaaatagaatgattataaacaatgaacttgccaatgtgatactgctaatcagtttgtttaaataaaacccaaatcatgtgccagatacctgccatcttgtgaaggaacagtttatgttctttgtatgtggccaggttttattccccagagatttgttgctatgaggctggaattcarcttgtatgtggttggaatgatattaagtcatagacactctgccagaacatatctttccaaaca

SEQ ID NO: 337835 - DNA, 523 bp, Homo sapiens
atttgttgtctttatttcttacataagagatccagatcatatacccatgaaacagttttttttacaacactactttaaaggacagcttactatgtaactatatgtgggattctatatttcactgcagaaggtttcccaggtattttttgttatgaataattctgatgagcatccttggagcatgtacactaagtgatgtaaaattgatttgcattaaaaggcttttaatatgtattgctaaattattgtyatagggctttgcaattttttttcaaacattaaatgtctttgagaaataactggatcttagatatttagtgcacacaattttctgcaatccttttttaaactttccctgaggcaggaaaccaaatagctttgttttgccaacagttaaggctcttctataattaaaattgcaaaaggtacccaccctgaaaagaaaaagggatttagtggcaaaaaattttttctagctagaggagtcaaaaataagaagagattggaacattccagtaaaaga

SEQ ID NO: 337836 - DNA, 523 bp, Homo sapiens
atttgttgtctttatttcttacataagagatccagatcatatacccatgaaacagttttttttacaacactactttaaaggacagcttactatgtaactatatgtgggattctatatttcactgcagaaggtttcccaggtattttttgttatgaataattctgatgagcatccttggagcatgtacactaagtgatgtaaaattgatttgcattaaaaggcttttaatatgtattgctaaattattgttatagggctttgcaattttttttcaaacattaaatgtctttgagaaataactggatcttagatatttagtgcayacaattttctgcaatccttttttaaactttccctgaggcaggaaaccaaatagctttgttttgccaacagttaaggctcttctataattaaaattgcaaaaggtacccaccctgaaaagaaaaagggatttagtggcaaaaaattttttctagctagaggagtcaaaaataagaagagattggaacattccagtaaaaga

SEQ ID NO: 337837 - DNA, 527 bp, Homo sapiens
attatattttaagctagtgttaaaatatttatgaaaaagtgcctttcgtgttaatatttttaacatactgaaagtgagtacatatgyatctcttcaaacagctttcaatggaaagagtcacttggacaattttcagagttgttatactatgagctctctctgcttatgaccactcacacacaaaaacaatgcaaataataatgtagttaagagcaaataaaatttaaaactgatgcattataaaaaaatgctctcaaatgcaaacttttagttaccaataagcaaaagtacaacgtgaaatattaaaattgataactataagcattgtttacaaatgtaaagaagaacatatttaaagattaatatagggaaccagattatgtttagtttgtcatctaatctgtagaatatcatcttaaaaacagcaaaagtaacacaaaataaatatcagctgagtttttactattacaaatactgtggctgttaacattttaacttttctcaatagttggaaaaagcatgctaaa

SEQ ID NO: 337838 - DNA, 527 bp, Homo sapiens
attatattttaagctagtgttaaaatatttatgaaaaagtgcctttcgtgttaatatttttaacatactgaaagtgagtacatatgcatctcttcaaacagctttcaatggaaagagtcacttggacaattttcagagttgttatactatgagctctctctgcttatgaccactcacacacaaaaacaatgcaaataataatgtagttaagagcaaataaaatttaaaactgatgcattataaaaaaatgctctcaaatgcaaacttttagttaccaataagcaaaagtacaacgtgaaatattaaaattgataactataagcattgtttacaaatgtaaagaagaacatatttaaagattaatatagggaaccagattatgtttagtttgtcatctaatctgtagaatatcatcttaaaaacagcaaaagtmacacaaaataaatatcagctgagtttttactattacaaatactgtggctgttaacattttaacttttctcaatagttggaaaaagcatgctaaa

SEQ ID NO: 337839 - DNA, 578 bp, Homo sapiens
ttttttttaaagttttattttagatttgggatacacatgaaggtttgttacataggtaaacttctgtcatggaagtttgtggtacagattattttattacccaggtattaagctgagtgcccaatagttatctgcttctcttcttcctcccaccctccaccctcaagtagaccccagtgtctattgttcctttctttgtgttcatgagttctcatacgcactaataaatgagaacatgcagtatttggtkttctgttgctgcagtagttggctaaggataatagcctccagctccatccatgttcccacaaaagacaggatcccattctgttttatggatgcataatattcctgggtgtataggtaccaaatatgtaccaaattttatctatccaatctgtcattgataggcatttaggttgattctgtgtctttgctattgtgaatagtgctgcagtaaaaacactgtcgtgtgtgtgtctctatggcagaatgatttatattcctctgagtatatacccagtaatgggattgctgagttgaatggtagttctgctttcagctttttgaggaatcac

SEQ ID NO: 337840 - DNA, 461 bp, Homo sapiens
ttcctgtataattctaactttacaaataagcctaataagcccgatatgtctctcttggatttcagggaacttaatatcmaaaaagtttagtttgaggtcaaaagattgaatttaacatgaaattttgctgttggaaagtctgtcagatttcaaaggtttaagacactagatatcacaaaataggatcacaagttactataaaattgtcattcaagtagccaaaattatgtttactcctcatagagaggaaacatattttcccaatcaataagacttaagacagcatgaggccaagtatatctgtctcttccccctccattttctccctgcagttcacccaaaaggtaaacaaaatctcttatctcttaatattacataaacattttgctcaaaagagaaaaccaaaatttcaccttttgtatggtatataactaaagctaattttaataaaaccttataaa

SEQ ID NO: 337841 - DNA, 601 bp, Homo sapiens
tggggttaggatttcaacatatgaattctgaggatgggtacagtttagtccataatatgctgtttctcattttggaacaagatgtaataattttctacaatatatttatttttctacatacactttcttgcttattacttcttttgtacaacttgaaactacttcaagtttttttcatcatgtgagctaaattagagcattttcacctcctgaaatatgcagaatttagttaccaaagtcagttatttctctccagttctctttagcaaagtggaaataatttcaagccagataaccacaaaaaggcccaaatgaaaagcaccaaggaaacttgccgcaaagagcatggaaaaacttccttatcttgaatatgaatttatattaaaataatatactcataagattattttgarataaaaacaaaaacaatactttagatagaagccgctgatcactccgtcctgctcacaactccattttcccacctcctacagcatggctaactaccttctcacttttatgatatttactccaacattttctttatgtcagtctccaaattttagaatcatcacctcacctctttacatcacttaagtat

SEQ ID NO: 337842 - DNA, 551 bp, Homo sapiens
acaaattaaatgatatgctcctgagtgaccagttggtcaatkaagaaattaagaagggaattgaaaaatttcttgaaagaaatgattatggaaacacaacatatcaaaatctatgggatacagcaaaagcagtactcagaggtaagtttatcactataagtgcctacataacaaaagagggaaaacttcaaatgaacaatctagtgatgcatcataaagacctggaaaagcaagagcaaaccaaatccaaaattagtagaaggaaaggaataataaagatcagagcagaaataaaggaaattgaaatgaataaaacaacacaaaatatcaatgaaacaaagagttggtttttgaaaagttaaacaaaattgacaaacctctaaccaggtaacaaagaaaaaaagaaagactatccaaataaataaaatcagaaatgtaaaaatcacattacaactgatactgcagaaattcaaaagatcattagtggctaccatgagcaactatgagttggaaaatctagaagtggacaaattcttagatacatacaacca

SEQ ID NO: 337843 - DNA, 654 bp, Homo sapiens
gatcaataagtaatgagatcagagctgtaataaaaaatctcctagtaaagaaaagcctgggacctgatggcttcactgttaaattctcacaaacatttaagaagagttaataccaatcctactcaacctattataaaaaataggggaggagggaatacttccaaactcattctacaaggctaatattatcctgataccaaaatgagacaagacacatcaaaaaaggaaactatagacaaatatctctcatgaatattgatgtaaaaatcctcaacaaaatagaagcaaaccaaatttaacaatacattagaaagatcattcattatgatcaagtggcatttatccctaggatgcaaagatgtttcaacatatgcaagtcaatcaatgtgattcagcctataaacagaatgaaggataaaaaccatataatcatttcaatttatgctgaaagagtatttgatwtaattcaacatccctttatgataaaaactctcaaaaatctggggacacaaggaacataactcaacataataaaagccatgtatgaagattcacagttaggatcatactaaatggagagaaactgaaactctaagatctggaatgtgacaagaatgcacactgtcaccactgttattgaacgtagtactggaa

SEQ ID NO: 337844 - DNA, 562 bp, Homo sapiens
ttggggatgatacgttggagtgtcctaggctctgtcctcaggcttcttgtttatctatgctaaactctttagcataacatctaatctcatagtggcatttgtatactgaaaacttctaaacttttaacttcaactcagacctgcaatttgaaatccagatttttatatttatgcctgcttgacatctttgctaggatgtgcaatgggtatctcaatgtaacttcacactatatgcaaaatagtaattgcagaacgggtacggcrgctcatgcctataatcccagtactttgggaggccgaggcaggcaggtcacttgaggccaggagttcaagataagcatggccaacatggcaaaacccagtatccactaaaaatacaaaaattagccaggagtggtggcacatgcctgtaatctcagctactcaagaggctgaggcaggagaattgcctgaacctggaagcaggaggttgtagtgagctgagattgcacactgcactccagcctgggtgacagagcaatactccatctttaaaaaaaaaagtaattgtaggtaaaatata

SEQ ID NO: 337845 - DNA, 579 bp, Homo sapiens
tgttgattggattttttttaactagtaaaaattctttttaagttattgatacaaatgctttgtcagctttatgtattacatatatatgtggcttgtttttaaacattgctaattatcttttgtcaataaaggattttagtwttaatgaaatcagatttactaaattttaatggtttgtgattttagcattttgttaaataaattcttcccagaaggtataaagatattttcccatattttcatatttaactaatcacatggaagtaatattcatgttttccatggatgagtttctttctttgggggctcaatggttaatgagcccagaatctggacccagattgcttgagtttaaacatgagttttaccatgaacactgggcaaaatatttaacctctctgtggcttgttttgtcacccagaaataaagatataaatcaggagtaattgagttaacatataaagtgcttagagcagtgatggtcatgcaatacaagctactaatgtatctactgttgttattaacatcagttttatctgatacttctgagctaacaccccactgtcataagtaatatgc

SEQ ID NO: 337846 - DNA, 579 bp, Homo sapiens
tgttgattggattttttttaactagtaaaaattctttttaagttattgatacaaatgctttgtcagctttatgtattacatatatatgtggcttgtttttaaacattgctaattatcttttgtcaataaaggattttagtattaatgaaatcagatttactaaattttaatggtttgtgattttagcattttgttaaataaattcttcccagaaggtataaagatattttcccatattttcatatttaactaatcacatggaagtaatattcatgttttccatggatgagtktctttctttgggggctcaatggttaatgagcccagaatctggacccagattgcttgagtttaaacatgagttttaccatgaacactgggcaaaatatttaacctctctgtggcttgttttgtcacccagaaataaagatataaatcaggagtaattgagttaacatataaagtgcttagagcagtgatggtcatgcaatacaagctactaatgtatctactgttgttattaacatcagttttatctgatacttctgagctaacaccccactgtcataagtaatatgc

SEQ ID NO: 337847 - DNA, 474 bp, Homo sapiens
tattcctataatatataattaataaagaggaatcatattttatatcttgtaaattactttaagaaagatatttaatgttacattttttaatattaattgtgcatttagtgtatacattttaagctgttggatgaaatgtacttacactcagttttccactgcgattgtcttcttctctcattgccagggcygtcagaaaattatcttgtaggtctttaccagcacttgttagcgtcctgtaaaaggcagatcttcagttataatatattagataacaaatatgtttccaacactctggagccaacaacaatgcttctttaagtgacaatttccttgcaacatgaaaaccatataaataaaatcatgatctactagattcctcaatttaattgtatatagtaatagagtctttatttataaacacttggaatcaagcctttaaataatatatccatatcaagactcatggcagat

SEQ ID NO: 337848 - DNA, 544 bp, Homo sapiens
gatcacatcaagtcaaaaagcttctgcacaacaaacaaaacaatcaacaaagtaaagagacaacccacagaatggaagaaaactacccttctgacaagggattaataaccagaatatacaaagagttcaaacaattgtataggctgaaatctaataatccaatcaaaaaataggccaaagatttgaatagacatgtctcaaaagaagatatacaaatgacaaataggcatataaaaaggtgytcaacatcattaatcactacaaaaatgcaaatcaaaactataatgagatatcatctcattccagttaaaatggcttttatccaaaatataggcaataacaaatactggtgaccatgtggagaaaagagaaccctgatacactgttgatagcactgtaaattactatagccactatggagaacagtttgtacgttcctcagaaaactaaaaacagaggtatcatgtgaaccagcaatcccactgctaagcctatacccaaaacgaagtatatcagtatatcatgtctgcacgctcatgtttgt

SEQ ID NO: 337849 - DNA, 544 bp, Homo sapiens
gatcacatcaagtcaaaaagcttctgcacaacaaacaaaacaatcaacaaagtaaagagacaacccacagaatggaagaaaactacccttctgacaagggattaataaccagaatatacaaagagttcaaacaattgtataggctgaaatctaataatccaatcaaaaaataggccaaagatttgaatagacatgtctcaaaagaagatatacaaatgacaaataggcatataaaaaggtgttcaacatcattaatcactacaaaaatgcaaatcaaaactataatgagatatcatctcattccagttaaaatggcttttatccaaaatataggcaataacaaatactggtgaccatgtggagaaaagagaaccctgatacactgttgatagcactgtaaattactatagccactatggagaacagtttgtacgttcctcagaaaactaaaaacagaggtatcatgtgaaccagcaatcccactgctaagcctatacccaaaacraagtatatcagtatatcatgtctgcacgctcatgtttgt

SEQ ID NO: 337850 - DNA, 535 bp, Homo sapiens
cttcagtttataactctgataactcttcgctattccttatacctttgctacagaaaggcaggcaggcacatgtttgattcattttctccagtttatttaatgtattattattgttttccaattagtataaagttgggttttgttatttggaactgtagtttgtgagcacctgctttgtctgttaaggacacttccagttttgtattccccttttcatttctgtatayataacaagtcacctattttcaagtgatatttactccaacagaatgttgtcagtttgcactgaaataatgctatttttttctatcctaatggaaacagttttgattaaaattaacggctacttagaatattttaagtcttcaaggagtgattcaaaacaaatagaaaatatgttcctgaaagtgtcctaagaggtgaatttgtgtgactaataatgaccttgatccccatagctgtatatttaatggagatgacaaacagtccatactagtggtgaggcactaactttaaactaaggcacttctattga

SEQ ID NO: 337851 - DNA, 483 bp, Homo sapiens
agtgcctattgtttccatctttgggtccatgtctgtaaaatgtttagctcccacttatacttgagaacataaggtatttgaatttctgttcctgcattagttcacttagcataatggcctccagctattaatacatccatgttgctgyaaaggacatgatctcattctttttcacggctgctaagtattccacagtgtatatttaccatattttctttatccggttcaccattgataggcgtcttggttgattccatgtctttgctattgtgagcagtgctgcaatgaacacacaagggcgtgtgcctttttgatagaacaatttattttcctttgggtatatacccaatactgggattgctgggtcaaatggtagttctgttttaagttcttggtgaaatcactaaattgtattccacagtggctaaactaatttacattcttaccagcagagtataggtgttcccttttcttcacaacctt

SEQ ID NO: 337852 - DNA, 483 bp, Homo sapiens
agtgcctattgtttccatctttgggtccatgtctgtaaaatgtttagctcccacttatacttgagaacataaggtatttgaatttctgttcctgcattagttcacttagcataatggcctccagctattaatacatccatgttgctgcaaaggacatgatctcattctttttcacggctgctaagtattccacagtgtatatttaccatattttctttatcyggttcaccattgataggcgtcttggttgattccatgtctttgctattgtgagcagtgctgcaatgaacacacaagggcgtgtgcctttttgatagaacaatttattttcctttgggtatatacccaatactgggattgctgggtcaaatggtagttctgttttaagttcttggtgaaatcactaaattgtattccacagtggctaaactaatttacattcttaccagcagagtataggtgttcccttttcttcacaacctt

SEQ ID NO: 337853 - DNA, 618 bp, Homo sapiens
acttcaaattacttccattaagggtggcagacataaattcccacttaatgttaaaaggcattcctacataaaagtgcccatcataatgataaccaaaactatggaaatgaatccatttaatagggaagggcatagatgaaagaactaagggataaccaatgtgccttaaagcatattgaaactagagggtaagcattttgatatgttttttcttgtgtggtcaaaacattaacagaggaaggagccatttgaaattgtctcactgcatttcctggcccacctgagtaattacaatttaaagatctgcccaaaggaattaaaaatacgtagggtcatgttttcttactttcagaatggaatatatagtcattaacttaaattaagaaggaaaagaaactaaccatcaaaattggaggaataaaagaaaaatttgtgatgtatggtcatttgcataccgcataggttgtcctatgcatgttgcaaagaggaaagatygggatgaaggggtaataatgaaaccctgatagcatatgaagtatctcatggtcatggttgaaagtcaagtctggaaggaataaactttactctttcaggtgttcaaagaaaaaaattaaaggt

SEQ ID NO: 337854 - DNA, 537 bp, Homo sapiens
tccatgacttttattgctactaaactaaaagatacattacattaattccttcccagtccaattgaggataagttggctaataacaagtggatttttacttagtgtaataagggtaagtataatataataatatcataaataaaataaactactaatcgtgggagctgaaaagaaatgctttccaataatagaaataaaataaaaactttgtttaaagtacatatgaaaaccgtgctaaaattattcattaaaaaatagaggagtatgacacctgtatgtgtaatatttattacttaagggatctttggctttccattactttttgaagtcattcagaaattagagacaattttaagcagttgaatattttattttgttagatggtaattattctgtctgaacatgtgaaaatgcaaacaaaatataaaaataattacttctyacagcattaaaacacagctagaaacagtttactcccaaagtaagcattcaggaaagattaccacttttaaattcaaactttattctgatttattt

SEQ ID NO: 337855 - DNA, 570 bp, Homo sapiens
tcattcagaaattagagacaattttaagcagttgaatattttattttgttagatggtaattattctgtctgaacatgtgaaaatgcaaacaaaatataaaaataattacttctcacagcattaaaacacagctagaaacagtttactcccaaagtaagcattcaggaaagattaccacttttaaattcaaactttattctgatttatttggaatgtcatgtatcaaaactatttgaaccaaaatgccacaaggtggcagtggcctgtccaagktgcagtcatagagcactgaaggaccttctcttcagcgttgacattctatttccttcttatgcttttttaaataattaatctttctgattgtgccacatgaaattttctgaatatacttagtgttgaagaactttagtgacccatttccacaacctttattattctcttcactactgaaagaagaaaccaataagagcagaaaacataaatttattatatgttgtgttcagccacctaactagatggcttacatattatatatctagaatatagttaaatattctttagatattcaat

SEQ ID NO: 337856 - DNA, 439 bp, Homo sapiens
tgttgtatacaatgagagaaataatgtgtgccttttgaagttggtttatgatgaaaactaaataacataagtatatagagtgtctcacagacagtgattatcaaaacaattgaagctgttatttstgtggttgctacttccaagttccgcacttacctaacagcctatctttttttttatcattaaccaagtaacctttattaaagcactgacaccctatcattaatagattcccagtggatattttcagtagaatgcttccttcctttaactattgccttaaatatttagtatataacaaaaaatagaattttggggggattcagttataggcaaggggctacattcaactttaagatgatttgaatgttggcacctgaagataacttctttccttttcccaatgggtaggcttggactgctgaacatgtcaagtagt

SEQ ID NO: 337857 - DNA, 625 bp, Homo sapiens
gtcagttaaacaagttgagattatagttggggtcagatcatacagactgtcaatcccaaacataggaagtcaggctctgtcctataagcacagggaaatattggactctttaatgcaaaaataagccattattttatttttgaataataatttttctgatcatgagagaggaaaaacataataggagactaattgggagagcttgcaatagtccaggtaagaggatgtgagatgaatgaagtgaagggcgattgcactgaacataaatgcaacagtctagagttgatctgaccaatgcagagacattttattttattggttaaatcaacacagagtgattttaacagcactataacactactatctggactgggtcatccccagctgagttaratccacagaatattgattagcattctgtttcaaaactcagtacattctggtgaaatattgttttcttcattttgttgatttgcctatttctataggcatcttttctaaaaccatcttgtttcataatataataacttgactggcctttataattttttattgtcaatatgtttctaataataactttgcatttctcactcagatagcaaaatgggtttatatttaaagtacc

SEQ ID NO: 337858 - DNA, 544 bp, Homo sapiens
agataaagctttcacagtatctggctgtagcacaatgctaagaaaagagatattgataagctggaaaggacagttttgcattacccctgtcattcctccaccaaacccgggcaacacaatgcatctagagacaccatttcctcagggaaaagagaagaaagtgagcatataatttgccttggaccccaatactgacaccaacacagtgtaacccagcataaggcagacccccacagccccatactctagattagaatctgcagacagagtctctagaatcatcctagtgcaagacaggaccacacagccccacgtctcaggcttgtgtggaagacttgatttctggtagctctagacatcccttgtggcaggcagttctcagtgtaygccaggcttcaggcagcaacccagtgccatgccagcagcaactgcactgaacataacccaatgctgtgcctattgcatattttctcagaaaaatgccagtctgctaaggctggaataagtacctagttcttcaaatatgcagatgttgatgcatgac

SEQ ID NO: 337859 - DNA, 490 bp, Homo sapiens
aaaattgaatcacaacatacccaaacttaccagatacagcaaaagcagttctaagaaggaagcatgtagctgtaaacagtgacattacaaaaggtaaaagatctcaaataaacaacctaacattgtacttcaaggaactgcaaaaaacaggaataaactaagcccaaagttagtaaaaggaaggaaataataaaaatcaggacagaaataaaataatagagcctggaaaaataatagaaaaatatatatttttgaaaagataaacaaaataaaactttagcttcactaactgagaatgaaataggagtcaaataagtaaaatgaagaacaggaaaaggagatattacaattgacacaacagaaattcaaagggccataagagattattatgaacatttatataccaaccatttcartaacctagagaaacagataaattatttgatgcttttattatgaagacataaaaaatctttacagaccaataacc

SEQ ID NO: 337860 - DNA, 633 bp, Homo sapiens
tggtgattttaagttgtaatttagaaagtttagtagccatttccacttttatttattatttatttatttattgagacagagccttactctgtcacccaggctggattgcagtggcgtgacactccactcrtgacactcggctcactccaacctcctcctcccagcttcaagcgattctcctgcctcagcctcccaagtactacaggagcatgccaccatgcccggctaattttgtatttttagtagagacggggtttcaccatgcttgccaggctggtctcaaactcctgacctcgtgatccgcccgcctcggcctcccaaagtgttgggattacaggcgtgagccaccacacccggcccactttcacattttaagaataaaagaggagggtactaatttatatgatgtatatgtttctcacttgtaagaagaaattatggtgataagatagaaatttaatttttaaaaggcattttaaagagaagaaaataaacatgtttaatatatgttcttttagtgagattttgtgtcttaattgtgctatcaaataaaaatcacataatattgcccattcattatattatgcattttcaggatgataagattgtgctttttaagaatacattattcat

SEQ ID NO: 337861 - DNA, 594 bp, Homo sapiens
atcaacatatctgaggtaagccaacttgtcctttttccccctctcttaaacaaggttgggttatatggaggcagcaaaatgctttgtatttctttactatgttccaaycaaatcacatagccaagtttcagaatcattgtgtttatatagtgaacttcaaacacctatttcctaatttggattgatcagaacatcttcaaaacatctgcccaacttggtactctgcccaggaagtctaataacttttgagaagagaaactaagatttattgggtaagacagggaactacctggaaaattgtgaggttttagtaagactatcggtactcctaaacttgccaagagtcagccctgtggaattcagtaagaactctaggtagcttgaacataaactctttgattaaatgcaattataagaaattgtcatgtgtcagaattgatatttttttcctggaataacatacaaaatagtcaatgtcggaagtatgattagtagatttccaaaacgggctcaattttcctacatggtatggtctggaagtaatgagaaattctgctttctgctttctcaaaactccatctcttttccaagttc

SEQ ID NO: 337862 - DNA, 569 bp, Homo sapiens
gcatttacttcgattcttttagaagggacttttttcagttattattctgaaggccattactttattattttgtgtaaatgtaaagttacaaattaaataagcttggttgcatagcatagtgaataaggccatagctctaaagaagatctggctttgagtcttacctcacccactgcttagttgtgtgactatctctaaacatggggataataaaagcacctcacttacaatgttgtagtaagggttgcactcgagcatgtaaagtgcttggcagaatgcctggcctgtaataagtgctgcataaattctgatggctactgatgttgccactgatattactgttgttgctattggtgatgyctttgtgggattcttctaatagcctcccacattatagaaagcaatttattttctatggaatatgatggaataagaacagtttaggtcagaccattgttgtctattgcctggcatcttactgtaaagtttgatagttctcaaaactgcacacaacagcatgttgcacagctggatgtgcaattctctggactgcagctcttcagtggcct

SEQ ID NO: 337863 - DNA, 533 bp, Homo sapiens
tttttaaacaactttacattatagcatatttataaagaaatatagtaatatacttttccaatataaatggtcaactatacaccatttgcctgaacacccaagccaaactatgtggaatcctctgagattttattcctccctgttcacatccaaaattcactttatcagtcagagtcccaacagaaaacaaatgaaacactgaaagagcttaaggggagagagtataatggagctatcaacagggttcagaatgttcacaaagggtgatggaaacacacaagaattagccacaatgacggagtaggaagctcttctcaccctcaagcctgaggagacaaagagggagtgttgctaacagagccttagctggctggctacctgataggcagtgtggtcatgtgtagagaacatggccaccaataaaactgtggtccagtctctatctcctcctgctttacaatttacttactgaggctatagtacacagagattatcctytggggccacaaacttatcttttgatttgccattaa

SEQ ID NO: 337864 - DNA, 555 bp, Homo sapiens
agtaaccaggaaggagactccattttagaaatgcaagcaaaggatgcaattttaaacactgagataactccagctgcacattttgatctgttgtaaaagagcagaatcaattcatagaacttgtattccacaatgtttgggtgaaatgtctcttaagcatacttggagggcctaatcttgaagttgcctcatttgatgaatggtagcaactcatttctccagcataattcaaaaatasggtactctggatcagaacatctcccagatagctaaatactttttttaaatagcataacaaagtatggtgtaacagaaagaatgtcagtcttggttccagttagctgggagttaggaccctggccctgctactcacaagctatgtaccctaagacaagtcactcaacatccctcagccccagtttcctcatccgtaaaataaatataatgttatctacctgttgggtctatgactacaccagttgtcacgcctaggtccaggttccagcccatactgaggtccgaggggaggggtggataagcagatagctgaatgaa

SEQ ID NO: 337865 - DNA, 613 bp, Homo sapiens
tttttgctacttcactgttgagtttcgagagttttcatacattgcattttcatacattgtcagatacgtggtttgcaaacattttctcccagactgtaacttactttttcattctcttaacatatgtttcatagaggaaaagttttcarttttgatgagatccagtttatgggaacaccccacatgtcattcctcaactcctgactttagtccttatccgttctgtcttctttttgacttccagagattttctatatttgttatactatttccaatgtatttcaattgtcaggtggtgatatagggaggaataggtctactgcctcttctctggaaccagaagtcaactctcatttaaaaaaattgccgatcttcactgtctgttctctttctatcaaatctttaatttagacatctttccaagacctattctagtgcctcttaaccccctccctttcattgtctacagtttcttgacagtaacagtcaacctctggacgaaatcttaatttccatttaaataattcctcagtttctcagtttatacttctagcgtaaatctcagaactttattttcatattttcatttggatatcttctccaaggttttttt

SEQ ID NO: 337866 - DNA, 613 bp, Homo sapiens
tttttgctacttcactgttgagtttcgagagttttcatacattgcattttcatacattgtcagatacgtggtttgcaaacattttctcccagactgtaacttactttttcattctcttaacatatgtttcatagaggaaaagttttcagttttgatgagatccagtttatgggaacaccccacatgtcattcctcaactcctgactttagtccttatccgttctgtcttctttttgacttccagagattttctatatttgttatactatttccaatgtatttcaattgtcaggtggtgatatagggaggaataggtctactgcctcttctctggaaccagaagtcaactctcatttaaaaaaattgccgatcttcactgtctgttctctttctatcaaatctttaatttagayatctttccaagacctattctagtgcctcttaaccccctccctttcattgtctacagtttcttgacagtaacagtcaacctctggacgaaatcttaatttccatttaaataattcctcagtttctcagtttatacttctagcgtaaatctcagaactttattttcatattttcatttggatatcttctccaaggttttttt

SEQ ID NO: 337867 - DNA, 572 bp, Homo sapiens
ataaaaacagaatcaaatttgaaaagaatgtaatgtggcataggcttagccaaaagtaatttaacagatggcaaaatgtataagatgcataatgtgatcctgagcagtgactatcaaatattctgtaaagtcttctaagcccatgaatactttgtggggaaacattttgatgtgtggaaactggagaagggctatttttatgtctacattcatgtagcataaakcaaaggcagcccttgagaattcaagatctagagcactgtaacccaccagaaatctctagaacattggagcaagccttggaaatttaccacctcaggagttggtagagaatgaggatacaaggtgttattgggatacatgtgaagaagaaagaggagcaataggcttaatgaatgggctggattcagtggtatatacagcaaagattcattttatttttcaccaaaagtgttttcagatttattctgtgggatctgcccgctttttctctggacaatatcatagacatagttttctaatgtcatcatccataaaaatagttttatggtaattcaaattcatgctcagta

SEQ ID NO: 337868 - DNA, 591 bp, Homo sapiens
caagaccatacaactaagttttaaaaatcaaatgtaccagttctgaggggagcagacatggttagcagctggttcataaaaagatttcaataaatttcaagttccaacatgagatgatattgtaatgtagctccattcaaaaaagctcaaagtcatcttgggctgtattgatagaaattcagtgtacaaacaagatggaccatagtgggactgactttgcactactcagatcatatccagagtactgggaattccctgaatttagagaaatgatgacagaagtgagcagactactggacagaactcagaaaactgccacattgaacactgatgctatgactgtgtatcagaaaattcacctagtggtcatgaaatacttgaaagatttatattctgatgactattaaagcacggtaagaatcatggttgtaaaatatagggaaaaatgttttggatcagtatgaaggaaaatttaaaataattaaagatgttaaaaattgtatgaactttcttakgaatgtgagtgctccctgtcactgcaggtgctcaagcagaaggtcagccaccacttgtcagaaatatcatgtatga

SEQ ID NO: 337869 - DNA, 417 bp, Homo sapiens
agctgaggtgtgaagaatggatctgagtttggtgacaagagaggcaaggggaccaattaagaggccactgcagatgaccaggcagcgctgattaccaagacatttcatggctctctctaatcagtaacaatagttaaaacgtactattgttgatattccatgctgatctaggccaaactgcaactgctaaccctagagaaatgtagaaatggactcgttccaaaraaggggaataaaactttttttttctctgatagaagccgttttcttcttagagatagtatttgaaattacctttaagatgtcatcctatagtattaattttctgctgtttaaggtaagcttgataccccctccatctctaacacctcatacttacagcatcactacggtatatggaaccaaataagattgttt

SEQ ID NO: 337870 - DNA, 591 bp, Homo sapiens
caagaccatacaactaagttttaaaaatcaaatgtaccagttctgaggggagcagacatggttagcagctggttcataaaaagatttcaataaatttcaagttccaacatgagatgatattgtaatgtagctccattcaaaaaagctcaaagtcatcttgggctgtattgatagaaattcagtgtacaaacaagatggaccatagtgggactgactttgcactactcagatcatatccagagtactgggaattccctgaatttagagaaatgatgacagaagtgagcagactactggacagaactcagaaaactgccacattgaacactgatgctatgactgtgtatcagaaaattcacctagtggtcatgaaatacttgaaagatttatattctgatgactattaaagcacggtaagaatcatggttgtaaaatatagggaaaaatgttttggatcagtatgaaggaaaatttaaaataattaaagatgttaaaaattgtatgaactttcttaggaatgtgagtgctcccwgtcactgcaggtgctcaagcagaaggtcagccaccacttgtcagaaatatcatgtatga

SEQ ID NO: 337871 - DNA, 556 bp, Homo sapiens
atggtgaatcacatttgttgatttgcatatgctgaaccaactttccctcccaggaataaagcctacttgatcacagtgaatgatatagtttggatccatgttccctctcaaatgttttgttgaaataaaatccccaatgctggaggtgggacctggtgggaggtgattagatcatggtgatggtttctaatggtttagcaccaactccctagtgttgttcttgtgatagagtttttatgagatctggttgtttaaagtgtgtagcccctccccccctctctcttcctcctgctctggccatgtargatgtgactgcttcccctttaccttctgccatgattgtaggtttcctgaggcttccgcagaagtcaaacagatgcagccatgcttcctgcatagcctgcagaatcatgagccaattaaatctctttactttataaattactcagtctcaggtatttatttgcagcaatgcaaaaatggactaatacagttaattagcttttagctttttgatgcactgctggatttggtttcctagtattttgctaaggat

SEQ ID NO: 337872 - DNA, 552 bp, Homo sapiens
gctttttgatgcactgctggatttggtttcctagtattttgctaaggatttttgygtctatatttatcagagatgttagtctgttctttttctttttttgttgtgtctttgacaagtttgagtatcagggtaatgctagcttcgtagaataagttagggaggagtccctactcctcaattgttttttgaataatttcagtagaattggtaccagctcttctttgtacatctgttagaattcggctgtgaatccatctcatccagggcttttttgaattctgctgtgaatccatgtgatccagggcttttttgattggtagctttttttattactgattcaatttcagaagtcaatattggtctgttcagggtttcaatttcttcttgattcaatcttgggaggttatgtgcttccagaaatttattcattttctctagaatttctagtttgtgtgcatttaggtattcataatagtctgtgaggatcttctgtatttctctgcgatcagttgtaatgtcccctttgtcatttcttatgtgttcatttgaatt

SEQ ID NO: 337873 - DNA, 597 bp, Homo sapiens
ggttacctttaaaaattatttctatgactgagttcttaagggccaactctcaaccacagtcaatctagtcttcctctagttttcctacatttagtaaactgcactgccttcttcaaacttgcttatcccatacaccttggagccatccatgaaagttacttttcctatgtcccatatcctacctgtaacctaggactgatgattcaaaaaaaaaaaaagtttctccatccattctctttatgacttctgctcacactccaatccattctaaccccacttactcctgaactactgcaaaccctcaatactagtttgccctgccctagcttttgtatcttaattgtgttgtttcctrttttaatagcttttcttttggttatcttgtatttgtatatgggcaatggaattattctcaaacaatataactttctttatactttttgatatttatgcttcttttttccacctcttgattattgaaatacagtgttgaatactatctgtgacagaagaatttttggtgatctcttaatgtctagaggtagaggagcaggctttcatgcatggaaagaaattctctctctgttattttctata

SEQ ID NO: 337874 - DNA, 597 bp, Homo sapiens
ggttacctttaaaaattatttctatgactgagttcttaagggccaactctcaaccacagtcaatctagtcttcctctagttttcctacatttagtaaactgcactgccttcttcaaacttgcttatcccatacaccttggagccatccatgaaagttacttttcctatgtcccatatcctacctgtaacctaggactgatgattcaaaaaaaaaaaaagtttctccatccattctctttatgacttctgctcacactccaatccattctaaccccacttactcctgaactactgcaaaccctcaatactagtttgccctgccctagcttttgtatcttaattgtgttgtttcctattttaatagcttttcttttggttatcttgtatttgtatatgggcaatggaattattctcaaacaatataactttctttatactttttgatatttatgcttcttttttccacctcttgattattgaaatacagtgttgaatactatctgtgacagaagaatttttggtgatctcttaatgtctagaggtagaggagcaggctttmatgcatggaaagaaattctctctctgttattttctata

SEQ ID NO: 337875 - DNA, 591 bp, Homo sapiens
agactacacattttggactagaaaatatcatatccatttactagtgagacaaatgaaaacaccacatcgaattctcaacgcattaactggaatcgtatcatggttcagatgcarttgcatggaggttggccagtggcactctaacaaccataaacataacattttgatatatttagggtcaagggaaacaaggacattgaagtcttgatggatcattgtcttctcatgaagtctaacccctgtgttaaaggaatagagaacacaaacatttttcaaaagagggatagcagaaagtgtccacagtttaagaaattgaatggttataaacagaaactgtaatcatgtctgacagggtttggaagcactgcacaatattaagcttgagctctgtcatttccactgaccaaggacaaccacacagctttttcagatctctattggtggttctggcaaaacacaatgtaaaattctttacccaaaaaaaaaggcacaagtctgaaaaagtgtaagcatgatgatttcttactattggtaaattatgcagtcactttaactcacttttcttccaaaatctggacagagaagatagac

SEQ ID NO: 337876 - DNA, 591 bp, Homo sapiens
agactacacattttggactagaaaatatcatatccatttactagtgagacaaatgaaaacaccacatcgaattctcaacgcattaactggaatcgtatcatggttcagatgcaattgcatggaggttggccagtggcactctaacaaccataaacataacattttgatatatttagggtcaagggaaacaaggacattgaagtcttgatggatcattgtcttctcatgaagtctaacccctgtgttaaaggaatagagaacacaaacatttttcaaaagagggatagcagaaagtgtccacagtttaagaaattgaatggttataaacagaaactgtaatcatgtctgacagggtttggaagcactgcacaatattaagcttgagctctgtcatttccactgaccaaggrcaaccacacagctttttcagatctctattggtggttctggcaaaacacaatgtaaaattctttacccaaaaaaaaaggcacaagtctgaaaaagtgtaagcatgatgatttcttactattggtaaattatgcagtcactttaactcacttttcttccaaaatctggacagagaagatagac

SEQ ID NO: 337877 - DNA, 591 bp, Homo sapiens
agactacacattttggactagaaaatatcatatccatttactagtgagacaaatgaaaacaccacatcgaattctcaacgcattaactggaatcgtatcatggttcagatgcaattgcatggaggttggccagtggcactctaacaaccataaacataacattttgatatatttagggtcaagggaaacaaggacattgaagtcttgatggatcattgtcttctcatgaagtctaacccctgtgttaaaggaatagagaacacaaacatttttcaaaagagggatagcagaaagtgtccacagtttaagaaattgaatggttataaacagaaactgtaatcatgtctgacagggtttggaagcactgcacaatattaagcttgagctctgtcatttccactgaccaaggacaaccacacagctttttcagatctctattggtggttctggcaaaacacaatgtaaaattctttacccaaaaaaaaaggcacaagtctgaaaaagtgtaagcatgatgatttcttactattggyaaattatgcagtcactttaactcacttttcttccaaaatctggacagagaagatagac

SEQ ID NO: 337878 - DNA, 537 bp, Homo sapiens
tgccgcccccccaccaaaaaaaaagaaaaaaataagtgttggtaaggatgtgaagaacttggaatccttgtgcattgtttgtgagaatgaaaaatgatgcagccactgtggaaaacagtatggcagtttcttaaaaaattaaacctagaattaccatatgacccaacaattctatttctgggtatatactccaaagaattaaaagcagtgtcttgaagggatatttgtacaacagtgttcgtagcagcattactcacaatagccaaaatgtgaaaacaaccctaatgtccatcaacagatgaataaacaaaatgtaatatatacttaacaatggaatattattcagtcataaaaagtaatgaaattatgacacatgctacaacattgatgaaccttaaaaacattatactaattgaaataagctagattaaaagggataaatgctgcatgacttttatatggtacttcgtttgcatgcggtacttasagtagttaaattcacagagtcagaaagtaggatagtggttgctgggagct

SEQ ID NO: 337879 - DNA, 352 bp, Homo sapiens
ttgctttgtgttaggaacattccgagtccactcttttagttattttcaaataaagaataaattattatctctagttaccctattgtgttaccaaatactagatctcatttcttttatctaattgtatttcttttacccattaaccaacctctcttcatctccccctcctctctacccttcrcaatctctggtaaccatcattctactctctagctccgtaagtttaatatttttgccttccacatatgagtgagaacatataatatttgtctctctgtgcctgatttatttcacttaacatagtgccctctggttccatccatgttattgcaaatgacaagatattaatttt

SEQ ID NO: 337880 - DNA, 545 bp, Homo sapiens
aatcatgggggcagttttcttcatactgttgttgtgatagtgaatgagttctcacaagatctgataattttataaggggtttccccctttgcttggctattctctcattctcctacctgccacattgtaaagaaggatatgtttgttttctcttttgccatgagtgtaagtttcctgaggcctccccagccatgctgaactgtgagtcagttaaacctctttcctttataaattacccagccttgggtatttcttcatagcagcatgaaagcacattaatacaactagccttcctggttctccagcttgcggatggcaaagggtgggatttcttggcctccataatcctgtgagcarattcctataataaatctttctcttttctctcttcctttatctctctgtctgtctatatttatgtctctctctctctgtctctctctccattcatgcatccatccatccaattgattttgtttatctggagaatcctgactagtaccaaagaaaaagaagctagtaagtgcatcaatgggcagactgcc

SEQ ID NO: 337881 - DNA, 459 bp, Homo sapiens
attattttccatagtggttgtactaatttacattcccaccaatagtgtacgagagttcctctttctccacatcttcttcagcatccaatattgcctgtctttttgaaaaaagccattttaactggggtgagatgttatttcaatgtggttttgatttgaatttctctaataatgatgttgagcattttttcatayacttgttggccatttgtatgtcatcttttgagaactgagttttcagatcttttcatttcttaatcatattatttgattttttgctttttagtttgagctttgcatgtatttttgctattaatccctttttggatgggtagttttcatatacgttctcctattttgtgggttgtctcttcactttgttaattgtttccttttctgtgtgaaatctttttcacttgatacaattccatttgtccatttttgctttagttgcctgtg

SEQ ID NO: 337882 - DNA, 393 bp, Homo sapiens
tagcatgtcagaattttcttctttttaaaggctgcataagagtccatygtatgtacataccacatgtagtttatccattcgtcaatggacatttgtgttgctcctaccttttggctactgcaattagtacagcttatgggcatagatataaaaatatatttccaagatcccacttttaattattttgggtatatacacagaagtggaattgctggatcatatggtagtcctatttttaattttttgaggaatcttcatactgtttttttaatagcagctgaaccatttaccttcctaccaacagtgtataaggtttctaatttcttcatatcatcacagcacttattttgtttatctgtttgctttttgatagcagccatccaaatggatttg

SEQ ID NO: 337883 - DNA, 393 bp, Homo sapiens
tagcatgtcagaattttcttctttttaaaggctgcataagagtccatcgtatgtacataccacatgtagtttatccattcgtcaatggacatttgtgttgctcctaccttttggctactgcaattagtacagcttatgggcatagatataaaaatatatttccaagatcccacttttaattattttgggtatatacacagaagtggaattgctggatcatatggtagtcctatttttaattttttgaggaatcttcatactgtttttttaatagcagctgaaccatttaccttcctaccaacagtgtataagktttctaatttcttcatatcatcacagcacttattttgtttatctgtttgctttttgatagcagccatccaaatggatttg

SEQ ID NO: 337884 - DNA, 534 bp, Homo sapiens
ttaacccttatcagatatataatttgcaggcattgttttaattctatagtttgccttttcactctggtgatcatgtctttgatgaacagaagttttaaaattctatgcattttatttttgtatgtttacttttgttgcctgtgcttttggtgtcatgttcaagaattcattgtcaaattcaatgtcatgaagttttcctcccatgttttctcttaagagttttagaattttaggtcatacattttggtctttgatacatttttagttactttttaaatattttttaaggtaatggcccaacttcattcttttgcattgtggamagccagttttttccaataccatttgttgaagactgtcctttctccactgactgttcctggcacttttgtaaataaccattaaccatatatacgaagttttatttctgggttctctctttatattccaattatctttatggctatctataaggtacattttaaaatatattttatgtctgaaacattaacaaatatcatcaaaattagctaa

SEQ ID NO: 337885 - DNA, 586 bp, Homo sapiens
gagaactgagttttcagatcttttcatttcttaatcatattatttgattttttgctttttagtttgagctttgcatgtatttttgctattaatccctttttggatgggtagttttcatatacgttctcctattttgtgggttgtctcttcactttgttaattgtttccttttctgtgtgaaatctttttcacttgatacaattccatttgtccatttttgctttagttgcctgtgcttttggggtattagtaaaaaaaaaaaaaawctttgctcagaccaatgtcctggagcatttatccaatgttttcttctagtagtttcatagtgtcaggtcttagaattaagtttttaatacattttatttgatttgatttctctatatggtaagaaatggggtctagcttctttcttctgcatgtgaatatccagtttccccggcaccatttattgaagagactatcctttcctcaatgtgtgttcttggtgtcttttgtcaaaaatgagttgactttaaaaacatggatttatttctgggtcttttattccatttcattggtctatgtctctattttcatgacactcatg

SEQ ID NO: 337886 - DNA, 586 bp, Homo sapiens
gagaactgagttttcagatcttttcatttcttaatcatattatttgattttttgctttttagtttgagctttgcatgtatttttgctattaatccctttttggatgggtagttttcatatacgttctcctattttgtgggttgtctcttcactttgttaattgtttccttttctgtgtgaaatctttttcacttgatacaattccatttgtccatttttgctttagttgcctgtgcttttggggtattagtaaaaaaaaaaaaaaactttgctcagaccaatgtcctggagcatttatccaatgttttcttctagtagtttcatagtgtcaggtcttagaattaagtttttaatacattttatttkatttgatttctctatatggtaagaaatggggtctagcttctttcttctgcatgtgaatatccagtttccccggcaccatttattgaagagactatcctttcctcaatgtgtgttcttggtgtcttttgtcaaaaatgagttgactttaaaaacatggatttatttctgggtcttttattccatttcattggtctatgtctctattttcatgacactcatg

SEQ ID NO: 337887 - DNA, 586 bp, Homo sapiens
gagaactgagttttcagatcttttcatttcttaatcatattatttgattttttgctttttagtttgagctttgcatgtatttttgctattaatccctttttggatgggtagttttcatatacgttctcctattttgtgggttgtctcttcactttgttaattgtttccttttctgtgtgaaatctttttcacttgatacaattccatttgtccatttttgctttagttgcctgtgcttttggggtattagtaaaaaaaaaaaaaaactttgctcagaccaatgtcctggagcatttatccaatgttttcttctagtagtttcatagtgtcaggtcttagaattaagtttttaatacattttatttgatttgatttytctatatggtaagaaatggggtctagcttctttcttctgcatgtgaatatccagtttccccggcaccatttattgaagagactatcctttcctcaatgtgtgttcttggtgtcttttgtcaaaaatgagttgactttaaaaacatggatttatttctgggtcttttattccatttcattggtctatgtctctattttcatgacactcatg

SEQ ID NO: 337888 - DNA, 546 bp, Homo sapiens
gggaggctgaggattgcttgaacccaggagtttaagggtgtgtgaggtatgatagggccactgcactccagcgtgggtgataagagcaagaccctgcctcaaaaaaaaagtcaattttagccagattaccatatttcaatktaattggcacttggggaatggtgaatatcagaccttttattgtcattgtatactatttttaaaatcttccaggttacaagttttcctcaaatttctgatgattcttggctgcctgctcatggttaagaatgggaggacaaatggaatcgaattaaacttaagagagttttgagttattgtcaaatattcaaagagcaagtggacacatacatcttcccaagactcaactaagaagaaattgaataggagaatagaccaataaaatgttctaaaattgaggcagtaattaatagcctaccaaccaaaaaaagcctaggaccagacagatttacagttgtactcaaaggtacaaagaagagctggtaccatttttactaaaacaattccaaataattgaaaaggaga

SEQ ID NO: 337889 - DNA, 620 bp, Homo sapiens
tatagtctgttatttcccattgtgcagacgtgataaatatgaccccaactgtttacagtatcttctagtccagaaattctcttttttctctctctaaaagtaaactttctgtcaggatgggggtgggtgtgttgagggaaacaggagatttgagattgtacatacgcctttaaaacaaaatttttcttattttatctcagaccaccaaactayaccaaaagtacctggtattgcctgttcctaaacattttagaaattctgtgctgtaaattgcacagcttcttggctttcactgttactggtttgagatgatccttcttggctaagccttttctgctttcaaaattctattgttgtgctctgcagtatatttgtaggattattctttattgaaattttttctttaatgtggtttcaggagagaggaaatgtagatgtacgttttcacattttaacccaaaagattatatttttgtttttaagactttagaaatatgaaataaaatttgatctattaaaatgatgtctcaccactcctattcaacatagtattggaagttctggtcagggcaatctggcaagagaaagaaataaaggtattcaaataaaaagagaggaag

SEQ ID NO: 337890 - DNA, 620 bp, Homo sapiens
tatagtctgttatttcccattgtgcagacgtgataaatatgaccccaactgtttacagtatcttctagtccagaaattctcttttttctctctctaaaagtaaactttctgtcaggatgggggtgggtgtgttgagggaaacaggagatttgagattgtacatacgcctttaaaacaaaatttttcttattttatctcagaccaccaaactataccaraagtacctggtattgcctgttcctaaacattttagaaattctgtgctgtaaattgcacagcttcttggctttcactgttactggtttgagatgatccttcttggctaagccttttctgctttcaaaattctattgttgtgctctgcagtatatttgtaggattattctttattgaaattttttctttaatgtggtttcaggagagaggaaatgtagatgtacgttttcacattttaacccaaaagattatatttttgtttttaagactttagaaatatgaaataaaatttgatctattaaaatgatgtctcaccactcctattcaacatagtattggaagttctggtcagggcaatctggcaagagaaagaaataaaggtattcaaataaaaagagaggaag

SEQ ID NO: 337891 - DNA, 620 bp, Homo sapiens
tatagtctgttatttcccattgtgcagacgtgataaatatgaccccaactgtttacagtatcttctagtccagaaattctcttttttctctctctaaaagtaaactttctgtcaggatgggggtgggtgtgttgagggaaacaggagatttgagattgtacatacgcctttaaaacaaaatttttcttattttatctcagaccaccaaactataccaaaagtacctggtattgcctgttcctaaacattttagaaattctgtgctgtaaattgcacagcttcttggctttcactgttactggtttgagatgatccttcttggctaagccttttctgctttcaaaattctattgttgtgctctgcagtatatttgtaggattattctttattgaaattttttctttaatgtggtttcaggagagaggaaatgtagatgtaygttttcacattttaacccaaaagattatatttttgtttttaagactttagaaatatgaaataaaatttgatctattaaaatgatgtctcaccactcctattcaacatagtattggaagttctggtcagggcaatctggcaagagaaagaaataaaggtattcaaataaaaagagaggaag

SEQ ID NO: 337892 - DNA, 619 bp, Homo sapiens
cccagacagcatctctggacgtacctgggacctggaagaacatgctgcctgaaggcaaggacgtttactattcacagagccctacagcattgagagaacattgggggtagccaggtagtggttacagaaggccttggatgagacccagtgctgtsctggattcaggtatgacccagtgcagtcccagtcgtggtagccataggggtgtttgtgccactacacccccagtttcaggcagctcaaatagagacaatcagtttgcttggcagaaagtatgggaaaataacaagagtttcctcctggtaatccagagacttcttctggacattatccaagaccatgaaggtggtatctctatgagtctgcaaaaaacacagcattattgggcatggggctcaagtccctttaaatacctaaaaaggctcctcaagaagaatcggtacaaacaagcccagactgcaaagactatcataaatacataattttataatgctcagacattgatgaatatctacaagcatcaagaccatctagaaaaaaacaacctcaccaaataaactaaataaggcaccaaggaccaatcctggagaaacagagatatgtgacctttcagacagag

SEQ ID NO: 337893 - DNA, 430 bp, Homo sapiens
ctttcacattcttggttaaggataatcctaagtgtattacatttttgtaggtattgtaaaaggtttgagttcttgatttgattctcagcttggccattgttggtttttagcagtgctactgatttgcatgcattgattttataatctgagagtttactgaattcatttatcaaatctargactcttttggaggagtctttatggttttctaaatataagatcatatcactggcaaacagataatttgactttttttccaatttgaatgccctttctttctttctcttgcctaaatgctctggctagaacttccatttttacaataaaatccatcaaatattttaaaaagagagactgacttaattctcccttgaaaataagtgaagagatttccctctcttcctttttcttagagcatttacctcagaaa

SEQ ID NO: 337894 - DNA, 584 bp, Homo sapiens
tattgtattcccaggtatttcatactgacccaattgtctcagaaacaaaacattttattggatgaggcaagtcagtgaggaaccattcagccatgtctttatcatggattctgtggttgaggtctctagagataactgtcaagtttggcaaaaaagtaagtgaaactacaaaaggaktaagacttgtaaaacattctctcaaattcaagagtagaaataaaacatgacaaagtataggagaagaaaaaaaatttagatagttatattttggcagtctttacacaggtattagttgatagatgataacctattctggatttaataatttccttttgaaactaattgtgctttcacttcagctgcctatttctgggaaggtaaaattaagagaaataaaatctcattattatatcactgtacagaagtttttctacaaaacaatgcctttttttaaaaaggagtaaaacgtttaattgtattaacattgagaaattctcccccctacatacaaatcaggagttaaatttaaaataagttacttaaaattaaatttcaattataataattggagggcacatagcttt

SEQ ID NO: 337895 - DNA, 584 bp, Homo sapiens
tattgtattcccaggtatttcatactgacccaattgtctcagaaacaaaacattttattggatgaggcaagtcagtgaggaaccattcagccatgtctttatcatggattctgtggttgaggtctctagagataactgtcaagtttggcaaaaaagtaagtgaaactacaaaaggagtaagacttgtaaaacattctctcaaattcaagagtagaaataaaacatgacaaagtataggagaagaaaaaaaatttagatagttatattttggcagtctttacacaggtattagttgakagatgataacctattctggatttaataatttccttttgaaactaattgtgctttcacttcagctgcctatttctgggaaggtaaaattaagagaaataaaatctcattattatatcactgtacagaagtttttctacaaaacaatgcctttttttaaaaaggagtaaaacgtttaattgtattaacattgagaaattctcccccctacatacaaatcaggagttaaatttaaaataagttacttaaaattaaatttcaattataataattggagggcacatagcttt

SEQ ID NO: 337896 - DNA, 575 bp, Homo sapiens
agaaatgatggtggcttggtcagaagtgacagcaacagaaataagaaatatggatagatactaagtataaagtgaaaggaactggtaatacattggacgtagggagtgaggaagaagtgtcaaggatgactcactggcatgagcaactgcaaggctgccagaggctgacatgctcytaagtgggtagagtgggggaggaagagtttcaggagaggataattaaggattcttttggatgtgttcttcatagtgcctgagagccatcctaagagatgtttgatattcaaatctctaactcagtagtgaactctgaatcagaatgtgaatttgggagttctggcacatacagagaatatataaagatattgcattgaatacgattatttaggaaaagtttgttttcctagataaaagtttgtttctgttcatggagaacacactactaaattttctaaagtcaagtaaatatgatcccatgagagaataatttctagtattttttcattttgttttattcagtaattattttcccggtatgtattctaatagattaaagttaaaagttttttgaaaaa

SEQ ID NO: 337897 - DNA, 575 bp, Homo sapiens
agaaatgatggtggcttggtcagaagtgacagcaacagaaataagaaatatggatagatactaagtataaagtgaaaggaactggtaatacattggacgtagggagtgaggaagaagtgtcaaggatgactcactggcatgagcaactgcaaggctgccagaggctgacatgctcctaagtgggtagagtgggggaggaagagtttcaggagaggataattaaggattcttttggatgtgttcttcatagtgcctgagagccatcytaagagatgtttgatattcaaatctctaactcagtagtgaactctgaatcagaatgtgaatttgggagttctggcacatacagagaatatataaagatattgcattgaatacgattatttaggaaaagtttgttttcctagataaaagtttgtttctgttcatggagaacacactactaaattttctaaagtcaagtaaatatgatcccatgagagaataatttctagtattttttcattttgttttattcagtaattattttcccggtatgtattctaatagattaaagttaaaagttttttgaaaaa

SEQ ID NO: 337898 - DNA, 619 bp, Homo sapiens
atattattcatgagttcagacaaatggtaacatacttaacagtatgttcatatgagaaatatttccaacttagttacacatttatgtttcatgatttaaatcctgctgtccccatcatcacctacacatgaaacctgaaccctaggctatgtaatcttccagctccactcttgccacacccacctaacaagacatagttcagcagcaagcgcttttactattttccatctctatgccttggcccacactttttctgtgcctaggtgawgcagccctctccttttccccaaatgtcaaatgtccacattcagaacactcttctgttcttcctagaagtctccatgatcccttattaggtcaccccttcctctttgcttacttgttggtcttccagtgaactccttaaaaaattagggactatgtcaaattcatctgagtctgtaactgctggcataaggcctaccacagtgtattagtcagtttttgcacggctataaagaaataccccaaactgggtaatttataaacgaaagaggttgaactgactcaacagttccacatggctggggaagcctcaggaaacttacaatcatggtataaagcaaaggggaagcaagcg

SEQ ID NO: 337899 - DNA, 619 bp, Homo sapiens
atattattcatgagttcagacaaatggtaacatacttaacagtatgttcatatgagaaatatttccaacttagttacacatttatgtttcatgatttaaatcctgctgtccccatcatcacctacacatgaaacctgaaccctaggctatgtaatcttccagctccactcttgccacacccacctaacaagacatagttcagcagcaagcgcttttactattttccatctctatgccttggcccacactttttctgtgcctaggtgatgcagccctctccttttccccaaatgtcaaatgtccacattcagaacactcttctkttcttcctagaagtctccatgatcccttattaggtcaccccttcctctttgcttacttgttggtcttccagtgaactccttaaaaaattagggactatgtcaaattcatctgagtctgtaactgctggcataaggcctaccacagtgtattagtcagtttttgcacggctataaagaaataccccaaactgggtaatttataaacgaaagaggttgaactgactcaacagttccacatggctggggaagcctcaggaaacttacaatcatggtataaagcaaaggggaagcaagcg

SEQ ID NO: 337900 - DNA, 586 bp, Homo sapiens
ctagacatttccatatatcctcttaaatctaggcagaggttcccaaacctcaattcttgactctgtacacccacaagcccaacatcacatggaagccaccaaggcttggggcttgcaccctctgaagcaatggcctgagctgtaccttggccccttgtagccatgaatggacctgaaacagctgggatgcagggtgccatgttctgaggttgcacacagcagcaggaccctgggcccaacccacaaaaccgtttgttcctcctaggcctctgggcctatgatgggaagggctgccaccaagatctccgaaatgcctggacaccttttccccactgtcttggtgattaacatttggctcctcattaattatgcaaatttttgcagcaggctkgaatttctccccagaaaatgggtttttcttttctatcacatcatcaggctgcaaattttcaaaaacttttatgctctgcttcccttttaaacataagttccaatttcagatcatctctctcaagttcaaagttccacagatctctagggcagggacaaaatgccaccaatatctttgctaaagcatagcaagagt

SEQ ID NO: 337901 - DNA, 443 bp, Homo sapiens
tcataaaatttagatttggaagaaatgactctttataactcaaaaagaactgtggagtcttatggagtatgtattgttgtgtacatctacatagctcacacttacataacactgtgcagcctcagaacatggcaccctgcatcccagctgcttcaggtccagtcgtggctaaaaggggycaaggtacaactcaggccattgcttcagagggtgcaaaaagtttcttattaagaagtttacactttttaatagcaaaaacatgaaatctacctaaatgcctgtcaatggaagactggatatagaaaatgtggtacatattcaccatggaatagtatgcagccataagaaagaatgagatcatgtcctttacggcaacacgaatggaggtggaggccatcatcctaagcaaactaccacaggaactaccacaggaaccacagaaa

SEQ ID NO: 337902 - DNA, 642 bp, Homo sapiens
aactaaaaggaatttttctgtgtatgtcaaacttggagaagaggaatcaaaggagtgaaaatctgcaatattggaatataacccctaaggccaattttgtaccacctggacttccttcttttacttcgtggaattacaagtactcaaacccagaaaaagaatattagaactcattatgtctaagttgactttttaaagtacttttgtctggatttgacatttaattacattagagaaatattaggactgaaacagaaaagccagtttgctttaaaaaaatgtgaccagagttattaatgaaagtcctcaatttctttaaaagcagaaaatgcttttaactactctatcaatggatttttgaaaagtaacagcatctcttsctgattttatatgataaatagtatagacagttctactttcccattttcttcatatcctgaaaagaaaaataatgccacaaatatagtagcaatcatcattattaaagtaatagtgattttcttccaagaagtttaaaatacttgtgaaacattactttataataaaaaaggcaaatggactattagactagtagaattactatcactattttgataatgtaatagcacaaatccaaaattttttaaaagttgagaaaattaa

SEQ ID NO: 337903 - DNA, 586 bp, Homo sapiens
tcgtgactcacgaatggaagagctatttccatatcagtatccatgatgagcctcatataagttctcatgcaaattagatttttggggaataaacatttagacaatagagcaatgttatagtctgttcttagtacattactatagatcttcttttaacaaaaagtaaagctttatttcttaaaccagttagtaggtacacagcagttagttgtttacttctctaaattatggtttgtcacacttgagtacatatcccacagactctataaagcaaccacacaatagaaactacaaagcaaccaggtaaygacttcacaataggttcaaaaccttacatatcaatatgaaccttcagtgtaaatgatataaataccccacttaaaaggcaccaagtggcaatttggataaaaaagcaagacccatccatctgctgtctacaagagacccatctcacacataatgacattcataggctcaaagaaaaggattggagaaagatctaccacataaactaaaaagcaaaaaagaatagggatggctattctatcatataaaatagacattaaaccaacaacagtaaaaaagg

SEQ ID NO: 337904 - DNA, 613 bp, Homo sapiens
tttcattgtcacaatgattgctgcagcaatcctaagcttccctaataaatgctttgcactgatcgccctggcagttagtgtctcttgctttggaatcccaactggtcccacctaggatggtgaggagcattcccatgtatgtattcccctgccctcactttttttttttttttttgagatggagttttgctctgttgtmcaggctggactgcagtggcgctatctcggctcactgcaacctccgcctcctgggttcaagagattctcctgcctcagcctcctgagtagttgggataacaggcacccaccactatgcctgactaattttgtatttttagtagagacggggtttcaccatgttggccaggctggtattgaactcctgacctcaggtggtccaccggcctcggcctcccaaagtgctgggattacaggtgtgagccactgctcccggcctaaaaagtgtgtttgtacgggatgctgttactttttctttattaacaggagcacatatgttagcttttgtattgtcttcttgctttgtcttttcgttattctgattttaggaatcagaatatttgtagcccaaagaatctgtttgcttcgtgtgatg

SEQ ID NO: 337905 - DNA, 613 bp, Homo sapiens
tttcattgtcacaatgattgctgcagcaatcctaagcttccctaataaatgctttgcactgatcgccctggcagttagtgtctcttgctttggaatcccaactggtcccacctaggatggtgaggagcattcccatgtatgtattcccctgccctcactttttttttttttttttgagatggagttttgctctgttgtacaggctggactgcagtggcgctatctcggctcactgcaacctccgcctcctgggttcaagagattctcctgcctcagcctcctgagtagttgggataacaggcacccaccactaygcctgactaattttgtatttttagtagagacggggtttcaccatgttggccaggctggtattgaactcctgacctcaggtggtccaccggcctcggcctcccaaagtgctgggattacaggtgtgagccactgctcccggcctaaaaagtgtgtttgtacgggatgctgttactttttctttattaacaggagcacatatgttagcttttgtattgtcttcttgctttgtcttttcgttattctgattttaggaatcagaatatttgtagcccaaagaatctgtttgcttcgtgtgatg

SEQ ID NO: 337906 - DNA, 545 bp, Homo sapiens
aaaaggccccaagacaagggtatctaaatctgcctataaagccactgcaatttcctctttcactgccaccatctacatagtcatcactacttttgtgctgagctctggggcaggtggcctttgggagatggaaggtggagagcaaaggcccagggagcactttctaacacagagccaatggtggagagataggagagaatcctcctcactccccagccaatgaggtgccaggaatctgaaaaataataaatatttttagaaggaataaaaaatagtcccaggccacgttaggacagagcagttcattatctgccactcaggtgcagacaagcacaaaaccatttgcaatatctcaagcacagatgccacagtgcagggcccasggctagtgaaagacccatgggcacaaaggtagcgatgatgaccacgtggttggcaaaggtggtaggtataaaaatggaattgcagtagaagcagcattttgttgtcataaaacttccccccttatccttccaagatcactcaaaccttttggataacagatc

SEQ ID NO: 337907 - DNA, 578 bp, Homo sapiens
catcagctgaagtcttcattatctcctggggcaagattctgatgacacagtggatattttttgtttgtttgtttgtttgtttaaaagtagctttttatgatagaaaagttttaggtttacagaataattgcaaaggtgtacgaaatattcccatatacctcacacccagtttcctctattattaacatatggtacatttttcacaattagtgaaccattattcatacattattattaactgaagtccacactttattcaaatttgtttaattgtcacatggtttccttcttctgttcctaaatcccatccagattacctcattacatttagtagtcacatcrcttttggtccctctcagcgacacagctgatatttaagcaatactttgtcagagaaataatacatctatatctgttaaaaagatctcacatataattcttaaaatgactcatagcttttgtatagtcagaatacaaacaaaagaaatagcaaggagatgataaatgttaacgaggatgtagagaaaaagggaaattttgtgcactgtttgtgggaatgtaaatgggtacagccatta

SEQ ID NO: 337908 - DNA, 578 bp, Homo sapiens
catcagctgaagtcttcattatctcctggggcaagattctgatgacacagtggatattttttgtttgtttgtttgtttgtttaaaagtagctttttatgatagaaaagttttaggtttacagaataattgcaaaggtgtacgaaatattcccatatacctcacacccagtttcctctattattaacatatggtacatttttcacaattagtgaaccattattcatacattattattaactgaagtccacactttattcaaatttgtttaattgtcacatggtttccttcttctgttcctaaatcccatccagattacctcattacatttagtagtcacatcacttttggtccctctcagcgacacagctgatatttaagcaatactttgtcagagaaataatacatctatatctgwtaaaaagatctcacatataattcttaaaatgactcatagcttttgtatagtcagaatacaaacaaaagaaatagcaaggagatgataaatgttaacgaggatgtagagaaaaagggaaattttgtgcactgtttgtgggaatgtaaatgggtacagccatta

SEQ ID NO: 337909 - DNA, 578 bp, Homo sapiens
catcagctgaagtcttcattatctcctggggcaagattctgatgacacagtggatattttttgtttgtttgtttgtttgtttaaaagtagctttttatgatagaaaagttttaggtttacagaataattgcaaaggtgtacgaaatattcccatatacctcacacccagtttcctctattattaacatatggtacatttttcacaattagtgaaccattattcatacattattattaactgaagtccacactttattcaaatttgtttaattgtcacatggtttccttcttctgttcctaaatcccatccagattacctcattacatttagtagtcacatcacttttggtccctctcagcgacacagctgatatttaagcaatactttgtcagagaaataatacatctatatctgttaaaaagatctcacatataattcttaaaaygactcatagcttttgtatagtcagaatacaaacaaaagaaatagcaaggagatgataaatgttaacgaggatgtagagaaaaagggaaattttgtgcactgtttgtgggaatgtaaatgggtacagccatta

SEQ ID NO: 337910 - DNA, 551 bp, Homo sapiens
cacttctatttgcagagatgctgcctttctttcctgtggcagagccttttgcttcaaaggaagctcatttacgctattagcaaccccactaaatcaataattctctccctcactcttttgcaatgttttgtttcytcaattcacactgagacctgcacgaagttgtggaaactgctctttcccagggagattaacatgaattcatcttgaagtcctaactgtgttctggctatttaatgctgtacatttataacctttgtcttccttctttaagctgcagtttctttgtgttatcacagagataggaaaactgacacaggaaatgcataacacatgttagactccaagacctctctccatatgggctcagttctgatttcctctgtttcctatatggcactgagacaaatgcctggacacagggttttttcttcctaaagactcacccagaagttctgctattaatcatcaatccgttcctcaaaataacttggcatagctaaacctagcaaagtaaggaagatctgacatatggtgaagttctccaacag

SEQ ID NO: 337911 - DNA, 540 bp, Homo sapiens
tggttcttatatactcaggcacacacaaatgtttcttttcaccagcttaaaatcttcataactgtttgctgagctaaccatagaattattgacatgtccataggtcatttatattgatggcctttgagagtttttgctaaaccgagttgttcattttagtgcacccatcaactaaatatttggtgtcacaattgccacaatattaaacatgtgcaaactccttcattatatagttatatcacagttcaaaaatttccctgcctttcacagcagccatactctgcaatgaaatttcaattggtgccaatggttctatatactaaatatgtttcttttaaagtaagcatttccattgatccaaaacaaaataaaaagcatstaaactcataatttcctgttagtttttatatctaaaaattgaatcctattatttaaattaatctgatccaacaatttatatatcacttttgtcctcatctctatcagtaaggtgaaattctacacatttagaatgaagagtgttcttggaaataacgccaa

SEQ ID NO: 337912 - DNA, 611 bp, Homo sapiens
attagaactctgactccaaagctcattcttttagccactatattttattgcattttgtgcatgcatggttcttatatactcaggcacacacaaatgtttcttttcaccagcttaaaatcttcataactgtttgctgagctaaccatagaattattgacatgtccataggtcatttatattgatggcctttgagagtttttgctaaaccgagttgttcattttagtgcacccatcaactaaatatttggtgtcacaattgccacaatattaaacatgtgcaaactccttcattatatagttatatcacagttcaaaaatttccctgcctttcacagcagccatactctgcaatgaaatttcaattggtgccaatggttctatatactaaatatgtttcttttaaagtaagcatttccattgatccaaaacaaaataaaaagcatctaaactcataatttcctgttagtttttatatctaaaaattgaatcctattatttaaattaatctgatccaacaatttatatatcacttttgtcctcatctctatcartaaggtgaaattctacacatttagaatgaagagtgttcttggaaataacgccaagagata

SEQ ID NO: 337913 - DNA, 558 bp, Homo sapiens
gtgtttagtaaaaaggagactaatccaaattattctctgataaccagaacctagttttacccacttcgttcaaatttatgaggtagcaagaagaaaggattttatgtagatgtgttttgctatctgtcagcacataatgtcctcaaaattagatcccagcacggcttccagtatgtgtgggtaaaacyaaaatgattgacatggagatctcactgggctcacagacaaggacccttcactgtgcagttgaagtagcttttcttacagttgacttttctccactctgcctcatagatcccaaaggattctgaagcctttgataagtaaatagagtcaaggccagaatctaaataaaaatgacaaaatccctctgtggaaatgtggactgacaaaagtgaataaatataaaataaaaataaaagggcctgggggttgtcactgatctctgctgaagaggcagagatgataagccagggggaaacgaagtatagaaatcaggagaaggagcagttaagaactgtgagagaagtgtttgacactcttgaagtcagttctgta

SEQ ID NO: 337914 - DNA, 494 bp, Homo sapiens
aattaccagaacagagttggcaaaatccagctcatcaataaaaatcagtagttgtcttcttgatcaacaaaaaaaaataaataaataaataaataagggctttggaaagataatcaggtattcttttccatgagtcactaaaccattaagtgtaattttcctctatggtttcagagttgtaatagaaaatgtcaccatccaaactatttgaagtgctgaccaatgagggtgaggctaatagaaagacttttgacaacagcagagggaaatttctgaagtcccccagcagcttatcctcattcaatacatttagttaatagtatatagtgaatatatcaacawaaaatacaaacctaggatggaaggactagaagctctgagggatttggatagccagaagcaaggattcaagtcagagttccagagatgcaaatacaaaccaaagaggtggtggtgttctagaaaccctatacaacactgggcatgcaagacac

SEQ ID NO: 337915 - DNA, 448 bp, Homo sapiens
ctgtcatatctgtgcattttttgatggttgtaatgttagtatattattttcctctttacataacaatggttaaagagttaaaggcagttttcatgccaccttttctccccctttttccaacctggctccaaagttgaggataactaggcagagggcaaattctctttgtccattgagattgatttcctggtcatgagttttccagggaaacttctgcacttgaagaggtcacttggaagcagaaagttaatgagaacctttcttatttttcttggcaactctgagagaccatgctttttggtggattggggctgttagtgggtccctttacatctactgtacattttgcattcattgcattgtacttggactctggggcccattttgctaatagtgcttgttttcttgcctcacttacrtgtcaaagatttctctgaagctggtttca

SEQ ID NO: 337916 - DNA, 521 bp, Homo sapiens
tgtgtatggggcaatagtgattttgccaaactttaaccacctcttctttcatgatggctagcaaaccctaccagaaatgagccccataattattaagatagcagctttttttgtttgtttcctttattttttctccctttaatgatttgctttatttttttcaacttttattttagaatcaggggaaacatgtgccagtttgttacaaaggtatattgtgtgatgctgagaactgcagtacaaatgaacccatcattcaggtagtgagcgtagtacccaatatgcagcttttcaaaccctccctccctcatgtattccccagttgtctattgttcttttcttcatgtccctatgtacccartgtttagctcctgctgataagggagaacatgaggtatttggttttctgtttctgcactagttcacttagaataatggtttccagtggcatccatactgctgcaaaggacacgacattcttttttatggctgtgtggtattccatagtatatatgtatacc

SEQ ID NO: 337917 - DNA, 453 bp, Homo sapiens
ggtcctgttccacctcttaatattatcacattggcaacatctgaattttggaaaagacatattcaaacattggaggggcyacataggagtcacagcaagatcgcaggcaactcagagggaaaaccagtgggaaggaatcactgtgtactgacaaggctaagagaacaaaccccagatgacagcattaacattgcaggagcaacatggtgacagcagatacagcaacacagaggaagctacgcatatgccaagcaagaggggatcctcagtggagggcagcaaggcactgaggacagcaaatggaccagaggctcctcccctaatgccatggagttaaataagaacaatgtgacctgttgagtaaaggcaccctgtatccagaatcagaaggaaaattagggagagagaaaccctgaaagcttgagtatttatttactcaaaaaagtctgaggt

SEQ ID NO: 337918 - DNA, 491 bp, Homo sapiens
cctcaaaccacactttggaaaccactgctgtgcacattccctcggctttggatttaggtgtttaacctgtctcttcaaaggaatcccaactttccttgaccaggaaagagcagtcttgaatcctcaataaagggagaggccagcctcaaccatactggggctgttatctctagcttgaagaaaaattctaaaatggtggttagtagagtgtattagtctgttttcatactgctaataaagacatacccgagactgagtaatttataaaggagagaggtttgatggactcactgtttcacatagctggggaggcctcacaatcatggcagaagacaaaggaagagcaaagggacttcttatatggtgtcaagcaagagagaatgagagacaagtgaaaggggaaatcccttctaaaaccatcagaacttgtgaaaattattcactaccttaagaacagtatggrggaaaacacccccatgattcaattatct

SEQ ID NO: 337919 - DNA, 483 bp, Homo sapiens
cctcctggcaggacctggtggataggaaaaaaaaaagttactttrtttgccctgggaaaatgtgtttatagagaataagacaaaaattccacaaaatcaaagaacttctgtgctcactgacatttttggaggcccagtcctatgaagtgtatcaatatgtcttctccatagtaaaataaaagaagccaaatttgtatctcctaccagtaggatagggtacttgttaggcctctttagattttaaaaagagcatgtaagctatgtggatattactaagtaagctgtaagatttctcagattttgagagcaaaagataactttctagtgggtttttccttctaaagaagtctttctgccactttctttccaagccctgataaatacaatactgcatataatgtctgtggcaggtcaagatgttgtatgaatcctgagctgaaccctggtacaagaatcacataagaggccctcttcagcaagcaa

SEQ ID NO: 337920 - DNA, 483 bp, Homo sapiens
cctcctggcaggacctggtggataggaaaaaaaaaagttactttgtttgycctgggaaaatgtgtttatagagaataagacaaaaattccacaaaatcaaagaacttctgtgctcactgacatttttggaggcccagtcctatgaagtgtatcaatatgtcttctccatagtaaaataaaagaagccaaatttgtatctcctaccagtaggatagggtacttgttaggcctctttagattttaaaaagagcatgtaagctatgtggatattactaagtaagctgtaagatttctcagattttgagagcaaaagataactttctagtgggtttttccttctaaagaagtctttctgccactttctttccaagccctgataaatacaatactgcatataatgtctgtggcaggtcaagatgttgtatgaatcctgagctgaaccctggtacaagaatcacataagaggccctcttcagcaagcaa

SEQ ID NO: 337921 - DNA, 483 bp, Homo sapiens
cctcctggcaggacctggtggataggaaaaaaaaaagttactttgtttgccctgggaaaatgtgtttatagagaataagacaaaaattccacaaaatcaaagaacttctgtgctcactgacatttttggaggcccagtcctatgaagtgtatcaatatgtcttctccatagtaaaataaaagaagccaaatttgtatctcctaccagtaggatagggtacttgttaggcctctttagattttaaaargagcatgtaagctatgtggatattactaagtaagctgtaagatttctcagattttgagagcaaaagataactttctagtgggtttttccttctaaagaagtctttctgccactttctttccaagccctgataaatacaatactgcatataatgtctgtggcaggtcaagatgttgtatgaatcctgagctgaaccctggtacaagaatcacataagaggccctcttcagcaagcaa

SEQ ID NO: 337922 - DNA, 574 bp, Homo sapiens
acttctgtgctcactgacatttttggaggcccagtcctatgaagtgtatcaatatgtcttctccatagtaaaataaaagaagccaaatttgtatctcctaccagtaggatagggtacttgttaggcctctttagattttaaaaagagcatgtaagctatgtggatattactaagtaagctgtaagatttctcagattttgagagcaaaagataactttctagtgggtttttccttctaaagaagtctttmtgccactttctttccaagccctgataaatacaatactgcatataatgtctgtggcaggtcaagatgttgtatgaatcctgagctgaaccctggtacaagaatcacataagaggccctcttcagcaagcaactatctttctttaaattattcttttaagaaatagtcttgagatcgttactagctcctgtagatacaacttgagaccccttcacaaatttggtattgtctgatccaacaacctataaagttagggaaagtcagtagcactccagcatcaagtagaagttatagtcaaagaatcgtcactgggactccctatgaag

SEQ ID NO: 337923 - DNA, 534 bp, Homo sapiens
gacaaagtagaagtcaaagggttggtgaggggctatcttagtctatttgcactaatataacaaaatacctgagactgggtcatgtataaagagcagaaaattattttctcacacttctggaggttgagaaatccaagattaagaygccagcaggttcagttgtctggtaagggctgcatccattggagaggaagaatgctgtggcatcaagcctttttataagagcatcttatcctactaatgagggaagaggcttcgtggcgtaattacctcttacaggtccctcctcttagtatcatatggcaaaccctgccttttggaaagatcacactcaaactatagcaaggcttatttttgaaaataagtaaacatttatatcaattcaaaacataataaatcaggccacatataacaataaagatttcatagatggagaagacagaccataacaggtaaaacttgggatgtttctgatgttttgaaagacctgtggcttccacaagccatggtgttattagttcaagtcaagtttat

SEQ ID NO: 337924 - DNA, 477 bp, Homo sapiens
caggttcagttgtctggtaagggctgcatccattggagaggaagaatgctgtggcatcaagcctttttataagagcatcttatcctactaatgagggaagaggcttcgtggcgtaattacctcttacaggtccctcctcttagtatcatatggcaaaccctgccttttggaaagatcacactcaaactatagcaaggcttatttttgaaaataagtaaacatttatatcmattcaaaacataataaatcaggccacatataacaataaagatttcatagatggagaagacagaccataacaggtaaaacttgggatgtttctgatgttttgaaagacctgtggcttccacaagccatggtgttattagttcaagtcaagtttatatatcttgagggtgggaggcctgaactgaaaattagcttataaaaaatttataaataataaatgttaagccaaaatattgcaaaggaaaacta

SEQ ID NO: 337925 - DNA, 591 bp, Homo sapiens
caagaccatacaactaagttttaaaaatcaaatgtaccagttctgaggggagcagacatggttagcagctggttcataaaaagatttcaataaatttcaagttccaacatgagatgatattgtaatgtagctccattcaaaaaagctcaaagtcatcttgggctgtattgatagaaattcagtgtacaaacaagatggaccatagtgggactgactttgcactactcagatcatatccagagtactgggaattccctgaatttagagaaatgatgacagaagtgagcagactactggacagaactcagaaaactgccacawtgaacactgatgctatgactgtgtatcagaaaattcacctagtggtcatgaaatacttgaaagatttatattctgatgactattaaagcacggtaagaatcatggttgtaaaatatagggaaaaatgttttggatcagtatgaaggaaaatttaaaataattaaagatgttaaaaattgtatgaactttcttaggaatgtgagtgctccctgtcactgcaggtgctcaagcagaaggtcagccaccacttgtcagaaatatcatgtatga

SEQ ID NO: 337926 - DNA, 486 bp, Homo sapiens
atttaatgctatctctatcaaaatatcaacattatttttcacagaattagaagaaactattctaaaattcacatggaaacaaaaaaaaagagctcaaatagccaaagtaatcctaagcaaaaataacaaagccagagccattatattacttgacttcaaattataccataaggctacagtaaaccaaacaggttttttctttactaatataaaagtagacacatagaacaatggaataagatatagaacccagaagtaaagccacacacctacagccatctgatctttgacaaaattgacaaaaagtgagcaatggggaaattatttcctattcattaaatggtgstgggatagctggctagtcaaatgtagaggaatgaaagtggatctccacttttaactttatacaaaaattaactcaagatgaattaaagatttaaatgtaagacttcaatctataagaatcctagaagaaaacctagaaaa

SEQ ID NO: 337927 - DNA, 486 bp, Homo sapiens
atttaatgctatctctatcaaaatatcaacattatttttcacagaattagaagaaactattctaaaattcacatggaaacaaaaaaaaagagctcaaatagccaaagtaatcctaagcaaaaataacaaagccagagccattatattacttgacttcaaattataccataaggctacagtaaaccaaacaggttttttctttactaatataaaagtagacacatagaacaatggaataagatatagaacccagaagtaaagccacacacctacagccatctgatctttgacaaaattgacaaaaagtgagcaatggggaaattatttcctattcattaaatggtgctgggatagctggctagtcaaatgtagaggaatgaaagtggayctccacttttaactttatacaaaaattaactcaagatgaattaaagatttaaatgtaagacttcaatctataagaatcctagaagaaaacctagaaaa

SEQ ID NO: 337928 - DNA, 535 bp, Homo sapiens
tgcttagcatctctgctccacctctccaactcatactgagcagtcagcagtcaaagagtttcgttccggcttaaactagttatacactacttaaataaactgatgtgtcttatgaagatggtgcccaacataagtggagtgagaaagagttgcagagaaaattcagaagtaactttagattttcacaggctacagaatattgcaaagaaggaaaaagagcagctcactctgacatttggcttcaggatattacccactgttacatttaacagaatgaatgtctacgccccaaaataaggtagcaaactcaggaacctgagaatcctgaataaaagctacccacaccattttcctagtacctgtcacactactttaactgtcccaaagggaagatatcttcaaagttctgaaagaaaaaacaatctgtcaattyaaaattttataaccactgaaaatacatttcaaaaatgaagacaaaataccacatttccagacatctgaaatctgaaataatttctcactagcagatttacac

SEQ ID NO: 337929 - DNA, 575 bp, Homo sapiens
gctcaataaatcaagggctaaattagctaactacattaacagaaaggtatttatttaatacttgtggaattgtgtgcccatcattcatttcttctttcatttgtacagtctttcatatactcttgattctctcatttaaaaaaatattaaatagtagcataatattggacactttgtcatttccactcttgaggaacttatattcttgttcattattttcctgagtagtctagttataataaccacatggggcattagctaaagataaaggttttcttgcctrtccttcagagagtctgagatgggaccagataatccttatgcttgaatatatttgtgacacaatgtggtatggtgataaatgatttgttgcccaagttaatggaggttgtggtgttttaaaaatgggtgtgtaaaagaactcctgtatcaaaactcatttgaattactacttttctgtttttaatagaatcaatctaaaaactatactacaatgatgatttaagcatacatgggaaatcataatttgtgggttgtgatatctatataattatgatgggaaaataaacacttcg

SEQ ID NO: 337930 - DNA, 572 bp, Homo sapiens
atgttaacatcaaagtttctgcccacataccaagttgcaacaaatgctacatcccaaagtagtcgtaagaattgctgatgctgcaggtacccctgttctcctcaatcatacaagggagagaggtgggggtaaccacctcttatctcaggtttagcatgagagcctccatagagaccacactgggagctgactatgcctcctctgcagttgtgtgaatatgtgggaggaggaagggaggaagggtgttgttctcattatctccagtagtatctcagtataacagattggctgcrgagctatttggatggcagcatgaaagagagatgtgctgccttggagttgacctgtaaagctatattttattcagctaaagcatatgcaagagtttttcatggaagcttttcactttacctgataactgacaacatccatagagatgttatacatattgtctccaaaaccatagaggaagcatactgcctatgtctcaaaacttagggggataaaatgaagcaaattcttctttggttggcttttattatcccatattatggaaccctgcatttttactg

SEQ ID NO: 337931 - DNA, 504 bp, Homo sapiens
ttcatgtacttcttgttaaatgcaaggaaagaattatagattaccttagcttaacttttatacaacagtccaatgggcactaaatcttttggaagaaaaaataaatattcaaattataaagaaaaaattactattgtaatcacaaatgtattacgactgttaacatgccaatattcagtttaatacctaaaccacctctacccataataatgtgactcatttytaaattacatgtagaatacagtaagattgtaattatgcgggggctgattatctaggttgtcaattattcaaggcttttgcctcccttcttcttcttcctgctgtccaccttttggacagttatcaccttgttagtatttctactccttgcttgttagtgagattggcaggggaagggaaaaggtgtgaaaacttaaatcagtagatattattacttgcaagaattttccataaaaattggtgtggaagagttcgaagctaattgctaaaatcacactaggg

SEQ ID NO: 337932 - DNA, 593 bp, Homo sapiens
ttgatataatgcccaggtgagtcttgaactcctggcccaaaacaatactcctgccttggcctctcaaagtgcaaggattacaggcctgagccaccaggcctggctggtgaaatatctttttttgttgaaaggataatggaaaagcatttcatattttaaaagcactagggttgttagtgaatrtaaagttactaattttatatcagcaaagatagaaaattgtgcttaaattcaatttaactatacatttgtaatggaattggtatactacattgtaatggatgccaagcaacaaaatataagatattattagaacactgctgtaaaaattaaaactattatagagtattaatttgcgttgggcatttgtaaaacattagaaatctccagagcagctgagctatattttcgcattctatactttcccaatatagagtcatagaggtagttataaaagagggaaaaattaggttttaaaagtactactacatgttttagagtttttgattatgctaatgtactttgaaatggagaggatgcttcagggatttaggatatagtggtttccttagcttatttggctatgtaaccta

SEQ ID NO: 337933 - DNA, 620 bp, Homo sapiens
ccagtggaggcaggacacagtagcagggacaagccacattagggataaaaatcccttccctcctttgtttgggatgctmtcatggcgaccagacctgtgagatgcacccttctgcagaagtaaatttgccttgctgagaaatcctttgtttaagtgcttgttttctttgtgactctgagctttacttccagcaggacgcttggtgggcagcacctaaacatggaagcaactgcaggtttctggccatggccagtgaaagtaaggtgtttccatgtggacaagcctgaccaccaccacccagttcacttaagggaccagggtgtttttcatttttattttcttctatttctttttcagtctttcagcagccgtttattagtagctccttggaaactgagggcaattggctggggtcacttcctggtactgcctgaaggtttaggaatgaaatggaataattgcccccccaaagggagaagggtcttttttttttcaatcttttctacttgcacaaggtgcctgatccttaagtgtggtgcaactcagagcaaactctcacatgtttcaggcaacttaaaccttcttttcatatgctaaattcttcccttattgtactcaac

SEQ ID NO: 337934 - DNA, 535 bp, Homo sapiens
tgaaactccgtctctactaaaaatacaaaaagcaaattagctgaacatggtgttgggcgcttataagtaatcccagctacttgggaggctgaggtaggagaatmacttgaacccaggaggcagatgttgcagtgagctgagatcacgccactgcactccatcctgaacaacagagtgagactctgtctcaaaaaaaaaaaaaaaaaaagtaaaaaattaagtacaatgaataggacaattgttctgggtaaactttttgtgtaagttgtcatttccaattaagcaagggttgtaatacagggaagtgtgtttctaaaattgtgaaattgttcttatctataaatgcccatatctgatagttcagtatttcttgctttttagggttttactaaagttctaggtttctaggtaacatgtaattctgtatacaaaatgttccacaaagggttatgttactggtgaaaaaaaaaaagaaaaattttgtctaattcagaagttgtctaaaagttagttcaaattacagatttgaaaaggt

SEQ ID NO: 337935 - DNA, 586 bp, Homo sapiens
tttagtttctagtgggaggcttttatttggttctgtgaatagttattttgtttcctgtgcatttctagcaagtcatcattcattccatttatttggaattcctaagctacccttgtcaggctgcagaattaatggaacacactagtttttttatccttaaactaactttttggattttaggcttccagatactttaagtgtgttgagtatactcttacaaataaatttcgagtcatatttgtctctctgcctagttttctccaaaatttataaaccttctatgaatattctgaattaatggcaaagtgtctgtttgcatacagtcaagtagagttaccacagctgctcagggagagagaacccagaaacctgacatgccggcaaaagggtaagaatttcttaccrgtcaatctctggcctctttctctctgtgcaaactgttaatctcctctgtaaagttttaaagtaattgctttaataataataagagtttaaatcaaatattttgtcagaaaagtgaaaaacttaatgctttttatttagttcatgtgacttgagtaatctttgggaaataaagatggtttta

SEQ ID NO: 337936 - DNA, 641 bp, Homo sapiens
tgcatttggtgggcacactatctgaagtatttgagacatatggaaaaataataagtactatggaattggatggggttaaccatgcattgaagaaaaacactgaaaggtttacagtgattaatcaccaatttaaggtgacatgtttggaagtatataaagaaactcatttgctgtggtaagaaggcagaaaaagatcatcagrtacaggatttaattacagtggtagcagagatccagaaaaggataatgttcagttacagcatgtctggtcagctaactaagatcagtgccttattgggaaggcatgggactctagactcaggatagggacatctaagtcaatgtacttgaaaaattcaattcctagtttaccctgagctctctgcacctgaagaattggtccactccttgttagagggtaatggtcccttttgctggaatatgatgcagaacctctcccttaaaagacatcatgtgaatgacctcgggatttgctgccctctctcatcttgaataccaaaacaataagtacagtcacgttacaacagaaattagctggaaaaatactggcattgtgaaaggttaaaagggaatttgcagaagttgctgcagaacctagccacatacatacaccaacaaga

SEQ ID NO: 337937 - DNA, 641 bp, Homo sapiens
tgcatttggtgggcacactatctgaagtatttgagacatatggaaaaataataagtactatggaattggatggggttaaccatgcattgaagaaaaacactgaaaggtttacagtgattaatcaccaatttaaggtgacatgtttggaagtatataaagaaactcatttgctgtggtaagaaggcagaaaaagatcatcaggtacaggatttaattayagtggtagcagagatccagaaaaggataatgttcagttacagcatgtctggtcagctaactaagatcagtgccttattgggaaggcatgggactctagactcaggatagggacatctaagtcaatgtacttgaaaaattcaattcctagtttaccctgagctctctgcacctgaagaattggtccactccttgttagagggtaatggtcccttttgctggaatatgatgcagaacctctcccttaaaagacatcatgtgaatgacctcgggatttgctgccctctctcatcttgaataccaaaacaataagtacagtcacgttacaacagaaattagctggaaaaatactggcattgtgaaaggttaaaagggaatttgcagaagttgctgcagaacctagccacatacatacaccaacaaga

SEQ ID NO: 337938 - DNA, 515 bp, Homo sapiens
taaaatgtttaggggtttagtggtctgaggcctgccaaaaaagctattttaaattaaataatggttttttaatctatattataattttgcccctttctctactaagatggaaacacaatgcctggtagacttctttagattctagaagcaacatatcacatgtgtgaacatctttctctagtcgatattcctggtgatgtaaaaggctgctagtttttagtggggctttgtataagaaagagctcyttaggacatccagattgcagtgaagctgtcctaatgcttggaccataagacttaccagtttttattctatctttgatggaataagatgctaaacaacataagtgaagttcatggccagccacaaaaggagaatcttctggggttatagtgtatggtcatgccttctattcagcattaaaaatagcccctagcaaggtactatgccctgatagaggcagagtatctgattttgggacctcaagtgattgtgaagctataactggaagttt

SEQ ID NO: 337939 - DNA, 515 bp, Homo sapiens
taaaatgtttaggggtttagtggtctgaggcctgccaaaaaagctattttaaattaaataatggttttttaatctatattataattttgcccctttctctactaagatggaaacacaatgcctggtagacttctttagattctagaagcaacatatcacatgtgtgaacatctttctctagtcgatattcctggtgatgtaaaaggctgctagtttttagtggggctttgtataagaaagagctccttaggacatccagattgcagtgaagctgtcytaatgcttggaccataagacttaccagtttttattctatctttgatggaataagatgctaaacaacataagtgaagttcatggccagccacaaaaggagaatcttctggggttatagtgtatggtcatgccttctattcagcattaaaaatagcccctagcaaggtactatgccctgatagaggcagagtatctgattttgggacctcaagtgattgtgaagctataactggaagttt

SEQ ID NO: 337940 - DNA, 515 bp, Homo sapiens
taaaatgtttaggggtttagtggtctgaggcctgccaaaaaagctattttaaattaaataatggttttttaatctatattataattttgcccctttctctactaagatggaaacacaatgcctggtagacttctttagattctagaagcaacatatcacatgtgtgaacatctttctctagtcgatattcctggtgatgtaaaaggctgctagtttttagtggggctttgtataagaaagagctccttaggacatccagattgcagtgaagctgtcctaatgcttggaccataagacttaccagtttttattctatctttgatggaataagatgctaaacaacataagtgaagttcatggccagccacaaaaggagaatcttctggggttatagtgtatggtcatgccttctattcagcattaaaaatagcccctagcaaggtactatgccytgatagaggcagagtatctgattttgggacctcaagtgattgtgaagctataactggaagttt

SEQ ID NO: 337941 - DNA, 624 bp, Homo sapiens
caatgataaatagtaatattatgaagatttctcttttgtacatttatttggcacattttcatttctcctctattatatacaataagaaaacaaaaatttaaagagctagaaaagtgattcccaaagacacagaagacatcattttacagtatcagagattatgtttctaatccatatggaatatttaaaaatatatatttactgaagtgttacagtgaaatcaactatttgtatacaaagtcttaacatctttagccatatcaagaattggatctagaatgcatatatatgatttgtgtgtgtgtgtgtatatatatacacatgtatatgtatacgtatacatatacatatacatgtataatgcatacatgtataatgtatacatatacatgtataatgcatacatgtataatgtgattacatatatatttttaacatataatgattatatattgagtacatattttacgtattcatatataatcacattatacrtgtatttttcttttgctgcattgtaataaatgtattttcaattttcaatacatacttttttcaataaataataaatgtattttcaattttccgtaaataaattttcaatttgttttattatatgcccac

SEQ ID NO: 337942 - DNA, 605 bp, Homo sapiens
tacatatacatatacatgtataatgcatacatgtataatgtatacatatacatgtataatgcatacatgtataatgtgattacatatatatttttaacatataatgattatatattgagtacatattttacgtattcatatataatcacattatacatgtatttttcttttgctgcattgtaataaatgtattttcaattttcaatacatacttttttcaataaataataaatgtattttcaattttccgtaaataaattttcaatttgttttattatatgcccacatggttaaaaagagaatactactaaaatgtttgcctcataataaaacctgtactttgaaaaatatttaatatttctttttagcctaaatttttaaaatgatgtgaaatagtttatctttatagatacaggatcagtttcttggaattatattcaggaagcagmccttcatggataaaggctagcacaaattgccagcagtggagtggttgataagtataatttttcttcaccatttgccactccccagcctccacagtaatcgcagaggagagtatccaaagatgcacaggttaaatataatagtaacagagaaaaatt

SEQ ID NO: 337943 - DNA, 604 bp, Homo sapiens
tgagtggcttgaaaacattatataaatctatatataagtcaaattttttttttttatttgattgcttgctgaatcagccatgattaggtcttactgaaagtagctaaagaatgaaaacaacattggcataataaaatagaaatttttttcatatttagaaattcaaaagagtaatactagagatgtaaagatgcttcatgctgtcaaggactcacgcttattatatgttattcttctgccttatttggcttcaattcccaaagttacctaatggtccaagacagctgctatagcctcacccagttttatctatatcatggccaaatgtaagtagaaaacaggaagacacaagatcactcmtaacacttcctggttgatgtactgagcatttccatttatagcctactggtcagaatttagttacagggccatatcaagttgcaccttggatattcaagaaaaccccgcaagtctctgccaaattggttgcccagcaattgatgagtcatgtcagacacacaattggatctcagtcaggcatgattggctttccacaatttactacctaggataatttgaattttgacatagacagtattaaata

SEQ ID NO: 337944 - DNA, 580 bp, Homo sapiens
gatttggctctagcacagaggaaccaaataagaggtacaggttaataatatagaaaggtgagcagaaatcatttgtcagttttctatgacatgtcatcctggagtgccactcagaggggaaatactgatatttgttatagctcagttatacccttgttttatataaacatattttgttacctctattaatattcctgacagatgagtaaagtgtacagctgtctgtttcttatggctctggctgctgcacctggacagcctttgtaattagctagggaatgcctcttttccatctgtcactgccatgataaccaaatttagtgctcagtagaaatttgttgtaaaaaagaaatgataaacaactaaaagaaaatgtacatataaaactatattttactcttccacttaaatcattatacgaacacgctgttaaaaataattctgcaaatcacatatttaagtaaccaaagaataaaatcttggtgtacatatacacacactatctatatattatagaaaaagttaaaggcctttgttttacrtgaagacctgagattagcatatccttaaaattatttct

SEQ ID NO: 337945 - DNA, 582 bp, Homo sapiens
ttatttcttagaatcctactacctaactggagtcatttctcttatttgaatttcattccatggttcatgtgaatttttttgttgttttgagcatttttctataattccaaagctaagaagcttattaaatggggccaaatattccctgacaccaataatattaattccaaaattcactttatttcaagtttttttctgatttaaacattcccaaataaatgttcatattggcggaaattaagggcagaatagctctctcargagatccttgtctactgctgagaaaatagttttctttaagtcaatacaagggattcatagtctttttatttaaagaaaacttctatccatataaaaatgtatattattattatacttttccttaatattaattttataatgcttaaaataaagttagttaattgcattattcactcattaatctttagcaaatatcttttaatttttacacatcttccccattttccttaaattattacatcagcgaaatattctccaacatgttttcatctatttgcatacacaagcattttatatattgtatatattctatataaaacc

SEQ ID NO: 337946 - DNA, 567 bp, Homo sapiens
ctatataacattaatattatattatattaatactatataatattaatattatatataaaatactatatacagttagtgaagaacaattaaaagactaaaattgaagactaacaaaatcaagtgttgatgaagatgtagaaaaactcagattttcatacactgtgaatttgaatgtaaagtattgcaaccactttataatatatttcagccatttcttaaagagttaaacatatgtctgccatataaccagctattttacttttagggatataaaagtatatacccatacaaaggtttgtacatacatggttatttcagctttgtttataataagaaaagcttaactcaattgtccatcatcagatgaacaaaccttaaactatagcatactataaagtaaaatcctaatcctcaataaaaagaaattgactaatacatatgacaacatggaaaaatctcaaaaccagtattmtgagggaaaaaaagctagacacagtaaatactgtatgagtccattaaaaagtcaaactaaattgacaatataaaattattaattttgatagctag

SEQ ID NO: 337947 - DNA, 608 bp, Homo sapiens
ccttgcttttgactagaaagttttgtacatgtctgttaagcctagttggtctatgatattgtttggatgttcatgttcttcaaacctcatgctgcgatgtaatcctcaatgtttgatgtgggacctggaggaaggtgcttgggtcatgggggcaaattccttatgaatggcttggcmctatcctcttggtaatcaaaaagtttacactccatcaattcaagtgagagctagtttattaaaagagtagacagttatggtagttatagattcctggtaaattgacccgttttacaattatataatatcagtctttatctcatgctggtacttgacttaaagcatatatgtctgatataattatgactgcctcacccaattgtggttgcaatttgtatagatatagatctttttcattctgttactttcagcctatttgacttagtgccaaaatggatctcttttaggcagtatattgtatgctttcttatttatttatttttgagatagggtctcactctgtcaaccaggctggtttgcagtggtgtgatcatggcaatgagctgcagcctcaacctcccaaactcagatgatcttctcatttcagcctg

SEQ ID NO: 337948 - DNA, 618 bp, Homo sapiens
ttcccatgtaaccgacctgcacaggtaccccccgaatgtaaaattaaaattaaagtataaaaaggcaagaaaaaaggtcttactctctcactctggcgagaatgcaatgccataattatagcccactgcagcatcaaattcctggggttaagcaatcctgtcatttcagcctcctgagttcctgggactacaggaacatgtaaccacacatgactaatttttaaaaatatttttggccaggcatggcagctcatgcctgtaatcccagcattttgggaggccgaggtgggtggatcacctgaggttgggagttcaagaccagcctgaccaacatggagaaaccctgtctctagtaaaaatacaaaattagccaggcatggtggagcatgcctgtastcccagctacttgggaggctgaggcacgagaatcgcttgaaccagggaggcagaggttgcggtgagccaagatcatgccattgcactccagcctgggcaacaagggtgaaactccatctcaaaaataataataataataataataataataataataataataataataataatatgtttaaacacagggtctcacaatattgcccagagtggtctcaaaca

SEQ ID NO: 337949 - DNA, 579 bp, Homo sapiens
cctggggttaagcaatcctgtcatttcagcctcctgagttcctgggactacaggaacatgtaaccacacatgactaatttttaaaaatatttttggccaggcatggcagctcatgcctgtaatcccagcattttgggaggccgaggtgggtggatcacctgaggttgggagttcaagaccagcctgaccaacatggagaaaccctgtctctagtaaaaatacaaaattagccaggcatggtggagcatgcctgtactcccagctacttgggaggctgaggcacgagaatcgcttgaaccmgggaggcagaggttgcggtgagccaagatcatgccattgcactccagcctgggcaacaagggtgaaactccatctcaaaaataataataataataataataataataataataataataataataataatatgtttaaacacagggtctcacaatattgcccagagtggtctcaaacatctggccttaagcaattctcctgccttagctttcaaagtaactgcaattacaggcacacatcattgtgcctggctaaaacatctatcttaaagatgcttag

SEQ ID NO: 337950 - DNA, 622 bp, Homo sapiens
taatcatttggataatgcaggaaagacccttatcccatccctgagctcctctctcagcatgctgtaccacactgctgaccacaacgtgggatggctattagaaatggaggggcagcgggggctgggaacggataagcaagaattatgttgcccaaatatgctttttttttctttttttctttttctttttctttttttttttatttgagacagagtctcactgttgcccaggctggagtgcagtggcttgatctcagctcattccaacytccacctcccgggttcaagcgattctcctgcctcagcctcctgagtagctgggattacaggcgcctgccactacctccagctaacttttttgtatttttagtagagatagggttttgccatgttggccaggctggttttgaactcctgacttcaagtgatccgcctgtctcagcctcccaaagtgctgggattacaggcgtgagccaccacgaccaggcaatatgctcatcttagaaagactaagatatattcacacacacacatatacacacacatatatatacacacacacctatatatgtggacaaggccagaggaaagtatatttagtacaacacaaccatgaggctgc

SEQ ID NO: 337951 - DNA, 622 bp, Homo sapiens
taatcatttggataatgcaggaaagacccttatcccatccctgagctcctctctcagcatgctgtaccacactgctgaccacaacgtgggatggctattagaaatggaggggcagcgggggctgggaacggataagcaagaattatgttgcccaaatatgctttttttttctttttttctttttctttttctttttttttttatttgagacagagtctcactgttgcccaggctggagtgcagtggcttgatctcagctcattccaacctccacctcccgggttcaagcgattctcctgcctcagcctcctgagtagstgggattacaggcgcctgccactacctccagctaacttttttgtatttttagtagagatagggttttgccatgttggccaggctggttttgaactcctgacttcaagtgatccgcctgtctcagcctcccaaagtgctgggattacaggcgtgagccaccacgaccaggcaatatgctcatcttagaaagactaagatatattcacacacacacatatacacacacatatatatacacacacacctatatatgtggacaaggccagaggaaagtatatttagtacaacacaaccatgaggctgc

SEQ ID NO: 337952 - DNA, 622 bp, Homo sapiens
taatcatttggataatgcaggaaagacccttatcccatccctgagctcctctctcagcatgctgtaccacactgctgaccacaacgtgggatggctattagaaatggaggggcagcgggggctgggaacggataagcaagaattatgttgcccaaatatgctttttttttctttttttctttttctttttctttttttttttatttgagacagagtctcactgttgcccaggctggagtgcagtggcttgatctcagctcattccaacctccacctcccgggttcaagcgattctcctgcctcagcctcctgagtagctgggattacaggcgcctgccactacctccagctaacttttttgtatttttagtagagayagggttttgccatgttggccaggctggttttgaactcctgacttcaagtgatccgcctgtctcagcctcccaaagtgctgggattacaggcgtgagccaccacgaccaggcaatatgctcatcttagaaagactaagatatattcacacacacacatatacacacacatatatatacacacacacctatatatgtggacaaggccagaggaaagtatatttagtacaacacaaccatgaggctgc

SEQ ID NO: 337953 - DNA, 493 bp, Homo sapiens
gtggctccaccttggcctcccaaagtgctgggattacacacatgagccaccacacccagccatcgtttacatacttaaactgacacaaaagatatatgctataaagaaatccttttaggttgatatttaattattgattaaagtctgaaagtttattagacaagagagtaaccagaaaacacaatgatttctctaaggaaaataattatttttccgagtgttaattgacyaacattttacttgtttaatatatatccttaattttttcttcctattaaatgatataatattcatgataaacatgtgttttgttaaatttaaatgattacatatttagctgctactatatccttacatctagaaaattcctcaagaataattccaaactggcatttagagacaattttatcttcttggtaagacaaaatcaccaatagttattaattcaggtaaagtatttacatagctggtactctattatattaaaatcagt

SEQ ID NO: 337954 - DNA, 556 bp, Homo sapiens
aatagttattaattcaggtaaagtatttacatagctggtactctattatattaaaatcagttctgattatataacattctrtttacttcaagaagttttattgccttatgtgacctttttaaaacactgaggtagaagcacacatgctaaaattcatgaattatccattccatcattctcctatctgtccatccacccatccacataatgttacctaaacaaactgcatctgtttgtacatgcacaagagaaagccaaacaccgaagcactgggtttttgcaggagaaaggtttattgagtccactggcaggtagtcagaggaaatggtcatccagagctaggggctagatcaggttttataagcatatggtaatgaggtgtgatctgattggatcttgcaatgaagggatgccagcaggcatgatctgactggatcctctcatgggacaatgccagggctcaaccagattggatcctggatcctgccatgtggtgtccacttcttagttcggtttcctgattcaagcacttaggttccacctgtgattgaatact

SEQ ID NO: 337955 - DNA, 438 bp, Homo sapiens
ataatattttggtacattccagttggaaagcatccaccaaatattttataatgaatataaccttcagtaatgataggaagtatacatggttgagccaaatttagaagtggtcaccagctatttattcctatgtcttaagaaaaataaatcagttaaacaagtttatataaatgatatactttaagagcagttttttttcccccaktatgttaaatctcttcaaatccacaaacctgatattattatgcatcactgactatctttcttgttagagtggacaacaaaattgacaaactagagcacagattaggaaagttactcagtgtaaaactacagttcaagcaagatttggatcaaataagttgtctgtaaattatggtaccttatcttcaaagttttataaattgaataatttgtacttcctaaaactggagtaga

SEQ ID NO: 337956 - DNA, 492 bp, Homo sapiens
aaaacgcaattacttgtgcaccgacctaataggtgtgacttcacttttatttccattacgccgtacataactataagttgggacacaagaattggggggtttgtgccattacttccaatggcaaaacccaccatttttcaccaacctaataggtgtgacctaaggcaagtcaattatattatctgaacccaagtcctcatcttaccttgcaaggaaattagaggattagaaaacacatgtgtaaaacagtgtttacaagctcagtgcaatgatagattatccaggaaaaatatttaatttcaaaatatataaattgatcttataaaatgatttttactgctacagtttcagaaataaactgggactgaacagattttttttcaaaataaatactatatcataatctattcgagacttmtaaaatcaacgcttctttaaaaatgcaacatatagaaagaacttccttcttttcctttcctcccactagtttta

SEQ ID NO: 337957 - DNA, 597 bp, Homo sapiens
tgatttttactgctacagtttcagaaataaactgggactgaacagattttttttcaaaataaatactatatcataatctattcgagacttctaaaatcaacgcttctttaaaaatgcaacatatagaaagaacttccttcttttcctttcctcccactagttttagwgccattgatttatgaagattcactcaatttatgtactaacatgttaccttctgaacagagaagactgaagctgaaaaactccttctgaaagtggctatccatttcttaattggttaatgatgccatgtgggcagtccctggtttcctttgcaagacaagctatcttgggaaacacccacttcatatttcacaggcacagatcaccacaatcagctcagtcaacaagttagctcctgccccagatgctggagtaccagctagtctgtactttccttagattagaaagctatatgcaagcaagaggctactaaaccatgcacagagccctcagactataggaagatacacatgtattttgggaattcatcattttggtcaccaagcagtatatgtatgtcctcaaagttctttttaaccactttatttcatg

SEQ ID NO: 337958 - DNA, 597 bp, Homo sapiens
tgatttttactgctacagtttcagaaataaactgggactgaacagattttttttcaaaataaatactatatcataatctattcgagacttctaaaatcaacgcttctttaaaaatgcaacatatagaaagaacttccttcttttcctttcctcccactagttttagagccattgatttatgaagattcactcaatttatgtactaacatgttaccttctgaacagagaagactgaagctgaaaaactccttctgaaagtggctatccatttcttaattggttaatratgccatgtgggcagtccctggtttcctttgcaagacaagctatcttgggaaacacccacttcatatttcacaggcacagatcaccacaatcagctcagtcaacaagttagctcctgccccagatgctggagtaccagctagtctgtactttccttagattagaaagctatatgcaagcaagaggctactaaaccatgcacagagccctcagactataggaagatacacatgtattttgggaattcatcattttggtcaccaagcagtatatgtatgtcctcaaagttctttttaaccactttatttcatg

SEQ ID NO: 337959 - DNA, 447 bp, Homo sapiens
ttcagtagaagttgaaagtaagagaaaagcaacaagaaaaatggaaacaaaaagaaatcaatgtgttgcagtggatctggggaccaatctgaaagacaaggttctagttgtatttccaatgcgcattttccattttgtgatgttgtaaaagtaaagtcttcattagatacctctgatgtttacaatccccacaatagaaataaagaggaaatgagatgttccatttttaatattacacatacaatcattttacagtgtggaggttaattccgctcacaaaagtgcatgaaaggaattaaaggaaacaatttgaacattttaattcttttcatatatttcaaggggaggaattaggcaccaaaacacaaaacaattatatgtgtaatttaaaatgcatattgatttttttcacagcgataaayaggcaatggcagtacagtgtaaagc

SEQ ID NO: 337960 - DNA, 622 bp, Homo sapiens
aattttattgaaattaggttcaggttattaaaactaactgtaaatgccttgttcaaaaggacaggcctatggcattaaggacaaagatgatgtraacttagtctttaatgtaaactttcaaactttgttaaatattcttatacattagtgaagcctcaaaagatattcataatagtagtagagataaaaatatatagtatttggcatcagtattgaaaaaatacataaaaactttattataaatgaattattttttaaggaaaaacatgtggtctacgtcacctattgaatgtgttaacttgctaattacttaatatttggaaaaagctttgaagatgagacgtgctataagtgttaatattattattcgagtactatagtctccataaattgaatgcgcttgcacatgaaatatcatccctttgatcccccaggataattagcagtttctgccttcttctaaaattataaatcataacttctcaaaggttatattagaatcacagactactaatgcagagaaagaaatagatatatttatttctccccaatatccatatatatgtggatatatgaatatttggaagaaaaattttatgtataaaaaatgtggtattttaat

SEQ ID NO: 337961 - DNA, 592 bp, Homo sapiens
tgtcactgtccattgtagttttcaaactggtcccaggaaataagaaatttttttcgatgcaacaaaataatatcgcataatagaaatgacaacaattttgtagatatagtcactgacaatattttattctgctccaaaccataagtgagctggattcattccagggttcatgccatcacgatgatcgtgccaaaagaagtgtttcttctttttgcttcacaatgtatgcttaaaacaaatatatttatattggagaaatccagattcaggtactagattaccattatcaagtcrtcatctcatgatggtaatcttgattgtaatatgtattttagtaatgaacaaatgtaaggtaccttatcaaaaattgtgacctttcagcataatcttggtgtgcattacacactaattatatgtctctgaaatttacatataaatggataaacatcagccatttagagaagggctgggcttacaatgcatcgggaacataacaagcaaaggcaaaatgtggtaagtgcatgtaggattttaaagatggtggaaagtttagtggggtcgaagtttagcttattgggggaataggaaaaaa

SEQ ID NO: 337962 - DNA, 556 bp, Homo sapiens
aatcttgcaaaattctaatgcagctatgttatgtgggtgaggtcaaaattatatagacaagatagggctaggaattccttgtgagtatgaaggattatggagacataaaaattaagttagttcttgagcaccatcttttatgtcagagggaaaaagccctataattctacaaaatctgtttctgatccctgttcttaagtaccacaagcatgacctcggatatgtattattatgaagtaatgctgaatttcctctattctttctggtgggaaataagaaaacccagaggtaagtaagtattaactstattcataagccatttatcaaagtagtaaaagaaaaatacatctgataattttcctttgccaccaaacaatgctattctttatttatgattaatccttagcaccaaagtaaggtgaacacttcccaagggaatgttaggcatttgcttataggacaatttatcatatcagagtttatgttttttcactgaatgaaagtatgattttatgatactctatttttggtttgtcagtgcaatacttttaatgat

SEQ ID NO: 337963 - DNA, 487 bp, Homo sapiens
ctttacaacacatgatgataaaggcttttacttgtttaaaacattgttttaagataatgttttgaatattgcctttttaatttttttatttccattttatgttttctgtatcattgagaaataaaaagcatttattctgacatgtttttctgttggatattgttaaatagcagtcctggaagtccaaccaaaatatccaggagtattgtattgtccttgcatgtactaatacaaaatgggttacagaatrgggtgaattccacagtactgttacaagtgcttttccccgcgaattcaatatgtgacacctttagtccaaagtcattcagaccaatttcgatcatgatggaaaactcaaaatcttcaaatagcatgtgatttcagacatatgacaatatgattctgagcaatgtcaacacagttatgctagcttttcattatggaatatacagttcattttagagaatgcagtgttcttttactttta

SEQ ID NO: 337964 - DNA, 508 bp, Homo sapiens
tagcacaaaacagttttagccccatctctagccccatatctgtttaaaactgcaacagggagcagaaatattgggttatagctagtttagatcctttacattttctaaatggtctaaggtaataaaagcatcctggtaatatttagtcagaaatcatctatatgttcacggctaatgtgtcctactacatctaggcatgtgtaatatacaaaattccaaattacattcccctagctttgggctctttcaaacttgtagtctgtgtgaggcatkgtgaggattggtaagtgacttgcgtttctctatttccttgtctagtgcttatgtggtttccgaactttccagagttgatggggaagagggtaggttgaagggagataaaaagcaaagagtattcttttatttgtgctatcgtgatctgacattggtgctctctgtgcttggcagatgttcaaaactaatactttcttgattgtttttgttgtacaattctgcttggagagtaatc

SEQ ID NO: 337965 - DNA, 508 bp, Homo sapiens
tagcacaaaacagttttagccccatctctagccccatatctgtttaaaactgcaacagggagcagaaatattgggttatagctagtttagatcctttacattttctaaatggtctaaggtaataaaagcatcctggtaatatttagtcagaaatcatctatatgttcacggctaatgtgtcctactacatctaggcatgtgtaatatacaaaattccaaattacattcccctagctttgggctctttcaaacttgtagtctgtgtgaggcattgtgaggattggyaagtgacttgcgtttctctatttccttgtctagtgcttatgtggtttccgaactttccagagttgatggggaagagggtaggttgaagggagataaaaagcaaagagtattcttttatttgtgctatcgtgatctgacattggtgctctctgtgcttggcagatgttcaaaactaatactttcttgattgtttttgttgtacaattctgcttggagagtaatc

SEQ ID NO: 337966 - DNA, 508 bp, Homo sapiens
tagcacaaaacagttttagccccatctctagccccatatctgtttaaaactgcaacagggagcagaaatattgggttatagctagtttagatcctttacattttctaaatggtctaaggtaataaaagcatcctggtaatatttagtcagaaatcatctatatgttcacggctaatgtgtcctactacatctaggcatgtgtaatatacaaaattccaaattacattcccctagctttgggctctttcaaacttgtagtctgtgtgaggcattgtgaggattggtaagtgacttgcgtttctctatttccttgtctagtgcttatgtggtttcygaactttccagagttgatggggaagagggtaggttgaagggagataaaaagcaaagagtattcttttatttgtgctatcgtgatctgacattggtgctctctgtgcttggcagatgttcaaaactaatactttcttgattgtttttgttgtacaattctgcttggagagtaatc

SEQ ID NO: 337967 - DNA, 268 bp, Homo sapiens
atgtttgctgaagtcttccttaggatgtggaaaacctgacgatagtttyaaacatggagagagagagagatgcaatcacacaagtaatgctgacagacgagcatcaaaggaatgggtagggaaaggaaggaggaaagatggagaccattgtttcatagtcaagaaagggaaatactaagcaagtttatatgaaaggtctttaactaacttagtaaagaaagttgcttttcataacagaatagagggcagtgttaagtttactgagagc

SEQ ID NO: 337968 - DNA, 520 bp, Homo sapiens
gtttctaacagtgaaccaattggcaatttatcaaaccatctcaaagtgagagtgttttgcagcatctattgtttattttacgctatcactgtcatttattttatattctcaggatctagatagtcaaaatgaaagaggaaagaaaaaacctgacaggcaggtagttmgggtgggtccttggatgagttctttcaaacaaaaggacagcctgaaggcacagataagggaacttgcaaaggagagcttgcctgagacatgcccacagccccatagataagaaaggctatccaggagacttgctcagacatgtccacaatggaaaactccatcccccgacacatgtgtagtaaagggaacaaagcaatatggagtaactcaagctaagggcctgcatgtgcactaggaggacagggtacagttaccagaaattcgtgatttatgcaaatgagatgcccagacctcatcggcttcttataaaagcttctgtattcaactgtgaaatggcaaccattttttcagg

SEQ ID NO: 337969 - DNA, 576 bp, Homo sapiens
gtaagtcctatttataccgtggagtctatctaactactggagtataaggtcttactttggaaaaaacattgtattgaacaacatgaaaaaaaaattagcctgggaaaagtatgatagatacataaattttttttcagaaactttttacattaaattttaaaatatgctaaacactttaacctacttaaacccaagtttgttatgtttcttttggctggatttctaatttcatttcaaagaaaagctaattttagattttttttaggcaaaaagatgtcacatctattgtgctttggattaaaaaatgttttgttatccataaaaactctaaaacgaatctttcttctcaaaagctaatgtgtttatttaaataaattattttatcaacagaatcttatayatattagaaaaatgactatgtagaatgacacagacttaagtgtatatatgtacatatatatgtatgtgaatatatgtacaccatacgtacatccaccatgtgtggtggatgtacatatatatgcatatatatgtaaatgaatatatatgtacaaataaacacatatacatgggtat

SEQ ID NO: 337970 - DNA, 576 bp, Homo sapiens
gtaagtcctatttataccgtggagtctatctaactactggagtataaggtcttactttggaaaaaacattgtattgaacaacatgaaaaaaaaattagcctgggaaaagtatgatagatacataaattttttttcagaaactttttacattaaattttaaaatatgctaaacactttaacctacttaaacccaagtttgttatgtttcttttggctggatttctaatttcatttcaaagaaaagctaattttagattttttttaggcaaaaagatgtcacatctattgtgctttggattaaaaaatgttttgttatccataaaaactctaaaacgaatctttcttctcaaaagctaatgtgtttatttaaataaattattttatcaacagaatcttatatatattagaaaaatgactatgtagaatgacacagacttaagtgtatatatgtacatatatatgtatgtgwatatatgtacaccatacgtacatccaccatgtgtggtggatgtacatatatatgcatatatatgtaaatgaatatatatgtacaaataaacacatatacatgggtat

SEQ ID NO: 337971 - DNA, 453 bp, Homo sapiens
aaataactacataagcaaaaatagatgctttgcttggaagaagcttttcacttccttgtaatatttcaaatggtgttggaacacattccggaaaccctatttatttttggttttaaagaaagcaagacagatttgagagcacccttttatctaattgattccatttccttccatcctcaagaacaaagcacacattcctttggwgcaaactgctcacataggagttatgctttattttactgaacttgcaattaattgaaagtaaaaagaagttagtgtactcataaaaagtttgtctttttgaacaaagttgagtattgtaacaagacaccgtgttatatttgtcactattgctttttatgccaaaatgggatccattgaatcttgaaaaatctggctttctaaacctggaagctgattttgttttgggaaagatagatactgaaactttgg

SEQ ID NO: 337972 - DNA, 691 bp, Homo sapiens
gggaggacagatggtgggccatactttattcatttgggttgtgaggatccagcgggtgtgttgtggctcaartggcaataattagggcaacagctaaggtggtgtgatcctggaagacagtcagtaaagctgtatcctgtttccttggctttctgattgttgtacattggtcattctgcaatattgctctaggagtcattactggagggttttcccagagtctgattctctggcccttccagtacttttaagtacccagtttcctaaattaattcaatttctgcttaaaattgttatagtggtttctattactttagccgaaccctgactggaatgtatttatgtgtatataaataacttctataaataaacaattttctattgtttattttctatattttctatgttctatttcgggcactattttcaaccaaattttaaataaatgtagatgttaacaagaaatattttatttcttaagcaattatcttaaatttccattccccacaatattaaaaaaacttgcatttttctggttattggtgaaaaattttaatgcagatattatataccagatagaattgattttattatatatagtatatttagatatccaaccttttccaagataaaaatattaactgttactttacttattctaattattttcttcatcatgtttcgtacttta

SEQ ID NO: 337973 - DNA, 609 bp, Homo sapiens
aatattaaaaaaacttgcatttttctggttattggtgaaaaattttaatgcagatattatataccagatagaattgattttattatatatagtatatttagatatccaaccttttccaagataaaaatattaactgttactttacttattctaattattttcttcatcatgtttcrtactttagatatgatttacagtaacatttcttgcattactactatgtcagacattaagctaggtgtttgcagtttgacaatgtttaatcctctggaagaaagtgagcattaatatataaattcatatgctaatagttgatgataagagaagttaagggctttcctaatgtcacacagtgagcgagctgaatagcaaactgaggaattagtgatgcttccactagaacacactgctttttcttttgtttctaattgagtagtatatggtctgtatgagacaaaactggaaattagcatgatattatatttagcacacatttattttaagaggctataatgccttagtattaaaaaaatgaggggggcataagaataaaaaagcatcctgaggtagaagaaagccacattacttgtatgatacacaatactgcat

SEQ ID NO: 337974 - DNA, 575 bp, Homo sapiens
aacgtgtttcttctctggaaagcaataaataaaataattttgtttgttttgttttgagagagtttccctgtsttgtccaggctggagtgcagtggcacgatctctgctcattgcaacccctgcctcccgggttcaaacttcagcctcctgagtatctgggatttcaggcatgcgccaccactcgcagcaaatttttgtaattttagtacaccatgtttgtcaggctggtctcagactcctggcctcaagtgatctgcccacctcggcctcccaaagttcagggattataggcatgaacaactgtacctggcctagaatatcaaacttttaacaacaaagtctacataataaaattatgcattacatttttatgtagacagtggtcacagtcacacacatatataccataacatccttggtatggcaaaataaaaataaaataaaataactattatcttagtttttaacatttagaaaaatcacaaaacaatgctttgacttagaatatgatatttagggaaccactgcataatacatttcaatatcctggagattcaggcttcattagcctgaaa

SEQ ID NO: 337975 - DNA, 575 bp, Homo sapiens
aacgtgtttcttctctggaaagcaataaataaaataattttgtttgttttgttttgagagagtttccctgtgttgtccaggctggagtgcagtggcacgatctctgctcattgcaacccctgcctcccgggttcaaacttcagcctcctgagtatctgggatttcaggcatgcgccaccactcgcagcaaatttttgtaattttagtacaccatgtttgtcaggctggtctcagactcctggcctcaagtgatctgcccacctcggcctcccaaagttcagggattataggcatgaacaactgtacctggcctagaatatcaaacttttaacarcaaagtctacataataaaattatgcattacatttttatgtagacagtggtcacagtcacacacatatataccataacatccttggtatggcaaaataaaaataaaataaaataactattatcttagtttttaacatttagaaaaatcacaaaacaatgctttgacttagaatatgatatttagggaaccactgcataatacatttcaatatcctggagattcaggcttcattagcctgaaa

SEQ ID NO: 337976 - DNA, 575 bp, Homo sapiens
aacgtgtttcttctctggaaagcaataaataaaataattttgtttgttttgttttgagagagtttccctgtgttgtccaggctggagtgcagtggcacgatctctgctcattgcaacccctgcctcccgggttcaaacttcagcctcctgagtatctgggatttcaggcatgcgccaccactcgcagcaaatttttgtaattttagtacaccatgtttgtcaggctggtctcagactcctggcctcaagtgatctgcccacctcggcctcccaaagttcagggattataggcatgaacaactgtacctggcctagaatatcaaacttttaacaacaaagtctacataataaaattatgcattacatttttatgtagacagtggtcacagtcacacacatatataccataacatccttggtatggcaaaataaaaataaaataaaataactattatcttmgtttttaacatttagaaaaatcacaaaacaatgctttgacttagaatatgatatttagggaaccactgcataatacatttcaatatcctggagattcaggcttcattagcctgaaa

SEQ ID NO: 337977 - DNA, 627 bp, Homo sapiens
tctttgggaaagggaaggttaggatttgaaaggacaatctctcaatgttatataatagcattcacatagaaatactgatgtacagatcaaacactcttagatattacaagggaaacttggagggttcaaagatttttaaggttaaaccacctaatggaaatatttccaacatttagtgaggtcagtcacaagtaatcgccatagatcaagcaagataccaaagggatgccaggaattaatgagccacaatatttgccctcaaaaagctgacatttttgggaacaaaaaggcactcaaacagattattagaatgcagcatgttcacttcaagtaacagaagtaatagtgtgaaaaggaaacatcggtgaatgacactaagttcagcttctgattcagtggttaaagaaggcttctagaacaggtgatgtctaagcataatcttaaacaatgagtcggagtagctgcctagaagaacactacacaaaggcacaaaggcaaacgaataaaatagcctaaagtgtgcagggatctatmaaatcctaagtgatgacagagcattaagtgatgaagtacatggaagctttgaaggtggagatggagagtgggcgtttgcaaggctgtgaagag

SEQ ID NO: 337978 - DNA, 567 bp, Homo sapiens
aaacacctgtgattgtaaactcactgaaagtttagccttggcctatgtaattacattggtacaacaccttgaatagtcccatgattaatgcagtgtttagtgtaacttgtcctaacaggtgactgatgataataaaaaaagataagtcaaaatataagggcattatgtcacttttagaccactttcattagaatgacccatagcatgttaattgcatactcctagattacaccactgatatttttgaaaactccttcagaaattactttagtgggaagagtgaagtcaaaaagcttccattaaaatctggttctagtccataccagttaatttaccattaaacttmcctaaccaccacctctcatcagtcaaaaaaaaaaaagaaagaaaagaaagaaagaagggggagtgatcatatctcatattacacattatgatctaatatgtaatggctactaatatgtaatggtgcatattaccattacagaatggtaatatggatgaaataatatatttgtcaaaatattttatatgatatcatcatgtagtagatgatgaacaaattta

SEQ ID NO: 337979 - DNA, 567 bp, Homo sapiens
aaacacctgtgattgtaaactcactgaaagtttagccttggcctatgtaattacattggtacaacaccttgaatagtcccatgattaatgcagtgtttagtgtaacttgtcctaacaggtgactgatgataataaaaaaagataagtcaaaatataagggcattatgtcacttttagaccactttcattagaatgacccatagcatgttaattgcatactcctagattacaccactgatatttttgaaaactccttcagaaattactttagtgggaagagtgaagtcaaaaagcttccattaaaatctggttctagtccataccagttaatttaccattaaacttacctaaccaccacctctcatcagtcaaaaaaaaaaaagaaagaaaagaaagaaagaagggggagtgatcatatctcatattacacattatgatctaatatgtwatggctactaatatgtaatggtgcatattaccattacagaatggtaatatggatgaaataatatatttgtcaaaatattttatatgatatcatcatgtagtagatgatgaacaaattta

SEQ ID NO: 337980 - DNA, 622 bp, Homo sapiens
ttcatattcttctcaattgaagagtaatactttccacaccctagtcagggagctaagtcaagttataaaatttcagaatagtatatattcccttaatagctttctttgaatatctaaaagaactttgaaggtagcaaagyaatttttaagcaagtgaacatgatgtaatggacaaagaacagagaggagacttaagagcgccaacttttagctggagttagccaccgactggcagtgtaggtaagccatttacactctccatgtctctctctatgcataactaaacttgagaaaataatacctcatctatttagttgacaaaatttactcgttaaaataatggaaactctaaggctcaaatctctgaaaagggaaacattatgtaaaactgaattgttttattaaaattattatattatctcttcctgtaagaaaataaaagttggagaatagctgagaaataataatagtgacaatgataatagctatccaggagatgctcagggcgtgccacaaaatgtgttaaacatattatcttagttttctatgtagtcacattataaagcaggaattattgtatctattgtatagatgaataaattaaactaagaaagaataaaga

SEQ ID NO: 337981 - DNA, 587 bp, Homo sapiens
aaattataataagggagaatgaatggaccccagagacaaaaattaacttgtaaataattctctttggaatttgaatgagccccagaggcagcattattttgtgggaaaaaatccatccagatgtggttacattcctcactcttctgttctgtgatagataatgacatttcagggagggaaaacaatgacatttgtgttcttccttgcatgtctgctttctaggtagataagggaacctcggagaacagtctcatccagtgctctgggagagaccaagggttctgggagagatcagagagaacttgaggctgcttctaacttcaaacatattagggggtaaaatattctggttttcttcatagccatcttgccacttttcagtttgtataattcttttattacaaacatacacacaattaaaatctaaatataattatgacagtaaataagcataagcactataatttgtaatataaatcaactgtaaataaataaacctctattattaacamataattactaatattggaaagtattaattgaatattatgctctgatgcttatgagcacttctagaatggaaatac

SEQ ID NO: 337982 - DNA, 373 bp, Homo sapiens
ttatcactttgtaatcttagtagcatgtgacttttaacagatattttagttcatatacaatcagtttttcttttcatttttccattcaaataatccaacatgagtttctctgaaggtaggtgttatttcctggtcactaatttagaaaattttcttaaattctattagtccttgcaaatactattagaaccacagtaaacatttttgtaaatatttaattcctttactcaacacatcagtattaagcaaatatcatgttccaggcartaaaagaggctctggggtgcagccatgaacaaactagacaaaaatcccagccctcatggaacttgctatctaatacagggatacatagcaaaaaacaaaaaataag

SEQ ID NO: 337983 - DNA, 385 bp, Homo sapiens
aacttccctccaaaataatgctaatgaaatgggagggaatgtttttgctgggaggcaattaacaaatgccactattattaaaataaaatgggacaatatttttcttttttttctatcgaattctaacagttacttttgtatatctagtttttacatttattttttaaagacaaacagagagagctgggcatagtggtatgtgcctgtagtcccaactacttttgaagctgaagcaggataaacacttaagctcaggatttygaggttctaatgtgctatgatttcacctgtgaacagccactgcattccggcctgggaaacatagcaataacctatctctaaaaaaatgaaaaagactaaaggaaaggaagaaagagaaggaagg

SEQ ID NO: 337984 - DNA, 589 bp, Homo sapiens
ttggggttatataacttatgaagcttctttcagatgtaaaattttgtggaataataactgtagaatctttgattcagagggagagatatttatacagtaagtgggagtgggaaaactttatcaagctcctcttattccattctttagacaaccctcattagatagggcaagacttgaggagggcatgtcctatccatttactctgtagttttatttgatttctcyaggatgtactgaatttagaacttatgattgcactaccttctctttagttatttcctagtatctcctaaattgagcccaagtcctgcctctgtttttctgaccagtacaactgaaagtatgtaaatgactagaacttatccacagtgcatttttccttctatattacagcctcacaaaacttctaattgtttctcttatttttttatgtttctgtcctttttggtttaaccagtcccttaggctgaaataccctctctcaaccagaggcacattcattcattcattcgttcattcattcattccagtcatagtgcaagagctagagcctaccaagtcatgtgctgagacttttaggaagcttttc

SEQ ID NO: 337985 - DNA, 566 bp, Homo sapiens
ttgactgttcttttcaggtaatttcacttttaattctttgtgcttgatttgggaaattttcatcccctttttcttttttttatttgagacagggcctctctctatcacttgctggagagcaatagcaagttcagggcttactgcagcctcaacctcccaggatcaaatgttcctcccacctcagcctccctaggacctgggactacaggcatgcgccactgcaccggcctatttatttatwtatttatttatttatttatttatttatttattgtagagatagagtttcagtgtgttgcccagcctggtctcaaactcttgggcacaagccataccccaacttcagcctccccgaagtgctgggattacaggcatgagctactgcacccagcaaaaatacaattttaaagtaattattcagtaagtcagatttaccctgagatggcaaaggtttgattttattttccttataacttcttgtggtagaagttttatgacaagaaaaagggagcttcagtgatgtggttcagttaacattgggtctagctgcaagtgatagaaagtcc

SEQ ID NO: 337986 - DNA, 555 bp, Homo sapiens
tgctttatcctaatttctaggggttgttgactgttcttttcaggtaatttcacttttaattctttgtgcttgatttgggaaattttcatcccctttttcttttttttatttgagacagggcctctctctatcacttgctggagagcaatagcaagttcagggcttactgcagcctcaacctcccaggatcaaatgttcctcccacctcagcctccctaggacctgggactacaggcatgcgccactgcaccggcctatttatttatttatttatttatttatttatttatttatttattgtagagayagagtttcagtgtgttgcccagcctggtctcaaactcttgggcacaagccataccccaacttcagcctccccgaagtgctgggattacaggcatgagctactgcacccagcaaaaatacaattttaaagtaattattcagtaagtcagatttaccctgagatggcaaaggtttgattttattttccttataacttcttgtggtagaagttttatgacaagaaaaagggagcttcagtgatgtggttca

SEQ ID NO: 337987 - DNA, 445 bp, Homo sapiens
tgctagtaacaatagacaagtaagcaggagaacatgtatttcagtagtctcttggtaaagtaataaaatgaataattacatttcttcaggtttctaatattccagcattacccattttgcatttaacagtaagaaccctccaagtgttggagagaaaaaaacaacaaaattatttgtatttcccgataccaactcaatattgggatcaagaagatgttggagtttttactatgcagaatccctgatgaacataaargataaaagagaaaccttcaggaacttgataagaggaatgaatatgatgtcaaataataaatactcaaggactagtttcttgtattaagtgcaaataccaatagcatgccaagaatgtggcgagaagggctgcagaaatctggaatttttcatgatcagaggggtctaaagatttattcagtttaactta

SEQ ID NO: 337988 - DNA, 597 bp, Homo sapiens
tagaaatatcaccgatagctacatgtttacatacaagaaccttcggctgagattctaagggcttttgaagtttagtcaagttatttttcgctgtgagttctttgtctgctgttactttaaatgatttccttccaatgctttgtcttttttgccataaatagtatattgtcaaaatttactcgataaatattagcaatatctgacctatgtgaaaaataagttatgtataaaaactttaatgcttgaattttgagtaaactattcagaatcaacttcattccccctctttaatcaagagaaaaatcaatatatttctaagaacagttawtgaaacattattgttttgtgaagttttatgaggaaacaccaaataatgttttaaatggatataaaaatcttaaactattccttcaacaactaaacatttttttctcaggtcattaaacagttgttatgtttgggaacgcagtattttctataattaaagttttgtaatgtcaaatgactcttctagaaagtcaactggagaccttccttgtcaggccattaattttaaagtaaagttgtctaaacaggaaattgaaggaaaaaagtagt

SEQ ID NO: 337989 - DNA, 597 bp, Homo sapiens
tagaaatatcaccgatagctacatgtttacatacaagaaccttcggctgagattctaagggcttttgaagtttagtcaagttatttttcgctgtgagttctttgtctgctgttactttaaatgatttccttccaatgctttgtcttttttgccataaatagtatattgtcaaaatttactcgataaatattagcaatatctgacctatgtgaaaaataagttatgtataaaaactttaatgcttgaattttgagtaaactattcagaatcaacttcattccccctctttaatcaagagaaaaatcaatatatttctaagaacagttattgaaacattattgttttgtgaagttttatgaggaaacaccaaataatgttttaaatggatataaaaatcttaaactattccttcaacaactaaacatttttttctcaggtcattaaacagttgttatgtttgggaacscagtattttctataattaaagttttgtaatgtcaaatgactcttctagaaagtcaactggagaccttccttgtcaggccattaattttaaagtaaagttgtctaaacaggaaattgaaggaaaaaagtagt

SEQ ID NO: 337990 - DNA, 479 bp, Homo sapiens
ggttcaggcatttggttgtcattgaaattgtattacagagttttttctaaggatcaattattttgggtaactcaagtaaataagactgtgttcaatataatactacagctaacaccttatttcttccaattattactgatattcagaaaaaaatcttttgasagtcacactaatatgagttaaactagaaaatacaatttttaaaaatatgtaatttaatatgttaagaaaaagtgtccctgaatttgtcatataagcatatttcttagaagaaacatactgaatgaaaggccttattgctggtgtgatgtttttataagcataaatgaaattggttattcagctttgtctttttaaaaaagtttaaagtattagcgtggcacttcttctaaaaaaaaaacagatgtatacaatgttgtggtcacaaaaatgcatctttcattgttctttaggcctgagtatccataactatgctattc

SEQ ID NO: 337991 - DNA, 479 bp, Homo sapiens
ggttcaggcatttggttgtcattgaaattgtattacagagttttttctaaggatcaattattttgggtaactcaagtaaataagactgtgttcaatataatactacagctaacaccttatttcttccaattattactgatattcagaaaaaaatcttttgagagtcacactaatatgagttaaactagaaaatacaatttttaaaaatatgtaatttaatatgttaagaaaaagtgtccctgaatttgtcatataagcatatttcttagaagaaacatactgaatgaaaggccttattgctggtgtgatgtttttataagcataaatgaaattggttattcagctttgtctttttaaaaaagtttaaagtattagcgtggcacttcttctaaaaaaaaaacagatgtatacaatkttgtggtcacaaaaatgcatctttcattgttctttaggcctgagtatccataactatgctattc

SEQ ID NO: 337992 - DNA, 539 bp, Homo sapiens
atgcgatggatgattgattagcaatgtatggcaagcgtgcaggtaggtgcaggtagagaagactggttgcttctggtttgtgcatattttcccagaaacaaatcctggacttggagaatgtttgcatttgggcctcacaaccataaatggtaatgttcactagttagcgcaatcaatgactagactagcactagagaaaaaaaaaatccatcagctagccaaccaaaaacaaacaaaaaaatcccacctcataaacaaacaacctttcttttctcttaagaatctctgggattataagaggcctakactctccaaagggtagccgcatataagatactctctatgcaggcctttagaggtgtttctttccttgatccctcctgatttgaccaatgggttgtatatgttgtgtttaaaaaaaataaatcccaagttttacataatttgtacatagaaccccgttgcattgcactcaatgctgccacatgtcctgatccagcttctgccttctggagtaacaggtgataggccaaagcctc

SEQ ID NO: 337993 - DNA, 565 bp, Homo sapiens
gggggtggaacccagacaccagaattttctataggtccccatgtgattccaatatgcaggcacatttaagaattttccagaattgaaaacatgagcccacagattgaaagtacataccaaatmccaagcaaaaaaaaaaaataacatatctacaactagtcaaatcataatgaagctgaaaaatgttagaggatagagagaaaatcatgcaaatatcctagagtgaaaagatagattatctacaaaggaaagaaaattgcggtaatggcagacttatctgtaacattaggtgacagaagacaatgagttaaaaatcttcaaagtgctgagggagggaaaaaaactatgaacatagaatcctacagcctgctaaattattcttcagaatgaaacagaccttttcagacacacaaagctaagactctactactcagaccatcactggaagaattaccttacacagaatatacttcattataaaggtaactgagccaataggattacagaagtatttattggtattaaccaagtctgacttctacctggaaaatacaagatgtatgaa

SEQ ID NO: 337994 - DNA, 664 bp, Homo sapiens
ttttccaccacgatagttaagattgtgtacacatattcaatatgaaatcctcttaggattttcacaccttcagcctgaaaacataaaagcagattaaagtttggcatacaagatctcagtctgatagtaattgctttaaaactcaaagtgtaaaaatatctacttgacattctaggaaagcatggccacatgcacagacacattctctcactcactccaacacacacgtgtgcacacatactcacaccccagagtactcagaagatcttgcccttgtggatcagacaactgccaccaatttcaaaaactaatggaaaaaattagctaagaatatgtttaaaccatacttaagaggtgctggttgccattaagatctttaacatgcagagaatgccatctcaatacactcttaaacagacttgaactattcactaatggatacacgaatacatragaaattatgtattcatccacccccaagactgcatgtaagatgaaaaacctaggcattccaccaacgagtcatatgactgaacccagctaaagctacagtggtttgcttcacagaacccaatagaagacagaacccaacagatttagaaacctcattgtgatctgtttggagtttcctatatgctccatgtgcaaaagcaatgagattctg

SEQ ID NO: 337995 - DNA, 632 bp, Homo sapiens
aatgattggtgattcttgtcataagtcctttctgatgtttttactattactacaagaaaatatttttcaaaattaaaaacaagttttatttcactgctttagactaggcagggttctgataggaaacagattatattctcaacccaagtaactgagcagaattttaacaggaccatttgcaattgtgtgggcaggstagggtagggaaacctacaaggctggcacagtagccaccagcattaggttgcattgaccacccctcgtcctcaaaggccaggaaaaggaagtctctgctgaatttggcaagagagtggctgtatggcaagggatgtctgacaagagctgaggcctttgcagaggacatgatgacccatggtaaccacacagggagaggtcccagggaaataaataatcttcttcaccctgcttttcctccccaggattctcttgttgcttcttactggccagacccaaccagaagccagaactgtgctgcccagtaagagagccactagccacacttagctatctaagttaatcaaaattaaataaggttaaaaatttagttcctcagtgctcaataactggtggctagtggctgccatcctggacagggtagacataggacatgt

SEQ ID NO: 337996 - DNA, 632 bp, Homo sapiens
aatgattggtgattcttgtcataagtcctttctgatgtttttactattactacaagaaaatatttttcaaaattaaaaacaagttttatttcactgctttagactaggcagggttctgataggaaacagattatattctcaacccaagtaactgagcagaattttaacaggaccatttgcaattgtgtgggcaggctagggtagggaaacctacaaggctggcacagtagccaccagcattaggttgcattgaccacccctcgtcctcaaaggccaggaaaaggaagtctctgctgaatttggcaagagagtggctgtatggcaagggatgtctgacaagagctgagrcctttgcagaggacatgatgacccatggtaaccacacagggagaggtcccagggaaataaataatcttcttcaccctgcttttcctccccaggattctcttgttgcttcttactggccagacccaaccagaagccagaactgtgctgcccagtaagagagccactagccacacttagctatctaagttaatcaaaattaaataaggttaaaaatttagttcctcagtgctcaataactggtggctagtggctgccatcctggacagggtagacataggacatgt

SEQ ID NO: 337997 - DNA, 569 bp, Homo sapiens
tgtttgtttgatttttatttattttttcatttatttggcttttttctagatgctttacctaatctaatccaaataagaacagcacttaacaactctaaatatggcatagggggaaatatgtatatccttttctttatattatcttttgtttcacatgctgagggctgtggaaggcaaaatgtggtgaggtgctattttatagcrtggttaatgcttatcagtaattttttccctctgaccttctgcctcagacaattaattttcttgaactgctcacacactggcagaacatggaggggggataatgttagtactagtgaatataatcttggaagaaaagctgtgcaattattcaaagacctaatcttatctcttgtttcatttttatatcacaagtctacatttaaaagtattagatatcctgttctgctgtcccacaccttcaaacctcagtaaataaatgctgttaagtgccaccaggagtgaaagagcttgtaatgagaagtgtgaggagatatgtgctccattcatcattctgttcaggccaatattgaggctcttgttatcag

SEQ ID NO: 337998 - DNA, 604 bp, Homo sapiens
ctttcctttaaatgtctttttgttgttgtttgattgcttgcccattcgagtactgattagcttgttttacaagtgcataatttgcaaggtgtgtgtgtgtgtgtccatgtgtacatgcacrtgtgcatgtgtgtgtccatgtgtacatgcacgtgtgcatgtgtgtgtgcacatgtgcttggggggggaacggggaaagacattgtcattctcatagttgtgactctagctaggctccttcagtgcccttactacatttctccactggtattggaataatattatggatagtaatacaatagagtgtagagagaatctagcctcttgtctgtcctgtcttttaagcatcaagtgtcttttcgtggttcccctagagaagaaaatgtaaatcctgagaccactccatgacagtcttgcaaaggtcaaacacaggttcagtaaagacatcctagagagggacactcacttcaaaatgaaggatccaggtacatagctgcatttctcttttcagggagcaaggaacatattttatttatttttgtatttccatggtatccactgcagtgatttccacacacaaaaagttgggaaacaaattcaaata

SEQ ID NO: 337999 - DNA, 562 bp, Homo sapiens
gctctttgctcttcatgggaggctctgtggacacaggatgtttaggtccctgtaggtagccttgtggatggtaagattccagagagtatccctgaggkcaagttggatacaatgagttggagagacttcatctagtccactctcattttgtgacaatctgaatctcactgaaggtctagatggaaaccaaattctggaggtcaggttttggcgtccccttcaacttcacctctaggttatcaggagaactaaatgtgagcatgtgtgaaacatgctttgtaaactataaagcaccacaaatatgtcagtgattgttaggaggtagcaggaagtcagcaagctcagttagtatcccagctcttactaactctgtaaacatagtcaagtgacttaactttgccagacttgtctctccacctgtaaaatggggtgcataaagcctatcttacctctgtgaagattaaatgaaatagtgcatataaactactcagtatttcatctgacccaaaatagctgctgctcaataaacagtagctaatattatagttatttctaatatata

SEQ ID NO: 338000 - DNA, 607 bp, Homo sapiens
tggtccatgcccctccctctcctgcacacaagtcccccagcatagatcccgttccctggatgctgacttggcaagctattcactttatgaatatgaccctcagaggggagagcccctctcagcagcccccgaactatgttatcaccattattaaggagcttaaagaggagctgggaggacragacaccgctggaattgcagcctgattgtgattgatgtgttcctattagcgcctcagtgttatctctctggatagcaacaacagccagtggcttgtaacacaacagattacctgagttctcagccttagaaggatgtttaaataaaatatagtcgctcttagcaagaggctcattttctccacgaggctcccggactatttcatgtcagctctgattcgctgcgactctcctcagtaaacatgtcttatcattaataattctttacaagcacaatctccaagagtcctctctctctccctctttctctaggtggctggactcagacacatcacgctccagtttgggttccaaggtgcttctctctggattttcacctgccttgccaaaaatgattgattacgctgggccaactgggtgtccggcaa

SEQ ID NO: 338001 - DNA, 607 bp, Homo sapiens
tggtccatgcccctccctctcctgcacacaagtcccccagcatagatcccgttccctggatgctgacttggcaagctattcactttatgaatatgaccctcagaggggagagcccctctcagcagcccccgaactatgttatcaccattattaaggagcttaaagaggagctgggaggacaagacaccgctggaattgcagcctgattgtgattgatgtgttcctattagcgcctcagtgttatctctctggatagcaacaacagccagtggcttgtaacacaacagattacctgagttctcagccttagaaggatgtttaaataaaatatagtcgctcttagcaagaggctcattttctccacgaggctcccggactatttcatgtcagctctgattcgctgcgactctcctcagtaaacatgtcttatcattaataattctttacaagcacaatctccaagagtcctctctctctcyctctttctctaggtggctggactcagacacatcacgctccagtttgggttccaaggtgcttctctctggattttcacctgccttgccaaaaatgattgattacgctgggccaactgggtgtccggcaa

SEQ ID NO: 338002 - DNA, 577 bp, Homo sapiens
aataagctgttatgggttgaatgggctgaattgtgtatccccaaaattgatacattgaagttctaagccccagtttctcagatgtgaccttatttaggaatagtatccctgcagatgtaatcagttaagatgaggtcataatgaagtacagtgtgctcctaatccaacatgactgatatccttataaagagagaacaccacgtgagcctgaaggcagagatcaaggtgatgcctctacaggtcaaagaatgttaaagattgccagcaaaccaccagaaactaagggaaaattgtggagcagattctctctcatagccctcagaaggaaccaaccctggtgacactttagacttctagcttttagaactgtaagacaataaatttctgtttttcaagctatccagtttgtggtactgtgttatagcagccctggcaaactaatacataagcttcagagaataacatgagagctgaagaaattggcagaaagctcagtcaatggtgtaattaggagataggaaataaacacamccaggaacagatgcgacaccagggttagagaggggccagcaacaaa

SEQ ID NO: 338003 - DNA, 638 bp, Homo sapiens
caaggtacattacctaatggggcaataaacagtatctatattatgattataacataagcattgaatattaatttaccttakaaattatataactgttgaaaagatgcactagagagaggaagaagaggtggagctatataaaacataaatattcatctacaaaaataagataatagatgatgttaaaaatgataaagtaataaatagtataagcatatcattttgaaatatggagaacgcaaagaatgaaaaaaaataagaaaaatggacatggttacctctgaggagcactacctgaagatggggagggaaaggtagatggggaactgctaaatttgtcatgtttttatcaactatacgcatatgttactcacaaaaataaaatgtagtgaaaaatgaaacctgtaaaaaaataaaatttcctagcatagtcaacttaaactactttaaattgtggaaatgggaaagaccatgagctgcagagtcagacagaagtgccacttattaggccatgtgactttggtcaaccatcttaacccctttaccatatcatctaaaacaggattcataacacctttctcagaggattatatgaactaaagtaatctagtgtactgtgataagtgatttatttgcgg

SEQ ID NO: 338004 - DNA, 638 bp, Homo sapiens
caaggtacattacctaatggggcaataaacagtatctatattatgattataacataagcattgaatattaatttaccttataaattatataactgttgaaaagatgcastagagagaggaagaagaggtggagctatataaaacataaatattcatctacaaaaataagataatagatgatgttaaaaatgataaagtaataaatagtataagcatatcattttgaaatatggagaacgcaaagaatgaaaaaaaataagaaaaatggacatggttacctctgaggagcactacctgaagatggggagggaaaggtagatggggaactgctaaatttgtcatgtttttatcaactatacgcatatgttactcacaaaaataaaatgtagtgaaaaatgaaacctgtaaaaaaataaaatttcctagcatagtcaacttaaactactttaaattgtggaaatgggaaagaccatgagctgcagagtcagacagaagtgccacttattaggccatgtgactttggtcaaccatcttaacccctttaccatatcatctaaaacaggattcataacacctttctcagaggattatatgaactaaagtaatctagtgtactgtgataagtgatttatttgcgg

SEQ ID NO: 338005 - DNA, 638 bp, Homo sapiens
caaggtacattacctaatggggcaataaacagtatctatattatgattataacataagcattgaatattaatttaccttataaattatataactgttgaaaagatgcactagagagaggaagaagaggtggagctatataaaacataaatattcatctacaaaaataagataatagatgatgttaaaaatgataaagtaataaatagtataagcatatcattttgaaatatggagaacgcaaagaatgaaaaaaaataagaaaaatggacatggttacctctgaggagcastacctgaagatggggagggaaaggtagatggggaactgctaaatttgtcatgtttttatcaactatacgcatatgttactcacaaaaataaaatgtagtgaaaaatgaaacctgtaaaaaaataaaatttcctagcatagtcaacttaaactactttaaattgtggaaatgggaaagaccatgagctgcagagtcagacagaagtgccacttattaggccatgtgactttggtcaaccatcttaacccctttaccatatcatctaaaacaggattcataacacctttctcagaggattatatgaactaaagtaatctagtgtactgtgataagtgatttatttgcgg

SEQ ID NO: 338006 - DNA, 638 bp, Homo sapiens
caaggtacattacctaatggggcaataaacagtatctatattatgattataacataagcattgaatattaatttaccttataaattatataactgttgaaaagatgcactagagagaggaagaagaggtggagctatataaaacataaatattcatctacaaaaataagataatagatgatgttaaaaatgataaagtaataaatagtataagcatatcattttgaaatatggagaacgcaaagaatgaaaaaaaataagaaaaatggacatggttacctctgaggagcactacctgaagatggggagggaaaggtagatggggaactgctaaatttgtcatgtttttatcaactatacgcatatgttactcacaaaaataaaatgtartgaaaaatgaaacctgtaaaaaaataaaatttcctagcatagtcaacttaaactactttaaattgtggaaatgggaaagaccatgagctgcagagtcagacagaagtgccacttattaggccatgtgactttggtcaaccatcttaacccctttaccatatcatctaaaacaggattcataacacctttctcagaggattatatgaactaaagtaatctagtgtactgtgataagtgatttatttgcgg

SEQ ID NO: 338007 - DNA, 553 bp, Homo sapiens
tcttggtgcaaggcagattggtgtgagtgggatcacacatatggaaatcttattctctttactgtctgcttggagttttttcacttccctgtgaccctakaaactgacttgttcttatatttgagttttggggtatttctggtaataatctcagtgatgtatatttgtttaggttttctgtatgggcagtgaaacaactttggttgtatgctgccattttggaacctgtagtctccctaatacaacaatttctgtcttcatacaaagcaagattatatatttagtagaaataattttatttattgttaatgttttttacagtgctcatatattttattctgtgaagagctatagatttaaagaacttggaacaaagataaatattgagagaatagggtgctaagagctgaacatttgggagttgacaattgaaagcaaaataagaaagatcagggagggaagtatgtgaggtaaaatttacacataaaaatcagattttaagtactcatttcaatgagttttgataattatacacatctgtgtaaccatcagt

SEQ ID NO: 338008 - DNA, 553 bp, Homo sapiens
tcttggtgcaaggcagattggtgtgagtgggatcacacatatggaaatcttattctctttactgtctgcttggagttttttcacttccctgtgaccctataarctgacttgttcttatatttgagttttggggtatttctggtaataatctcagtgatgtatatttgtttaggttttctgtatgggcagtgaaacaactttggttgtatgctgccattttggaacctgtagtctccctaatacaacaatttctgtcttcatacaaagcaagattatatatttagtagaaataattttatttattgttaatgttttttacagtgctcatatattttattctgtgaagagctatagatttaaagaacttggaacaaagataaatattgagagaatagggtgctaagagctgaacatttgggagttgacaattgaaagcaaaataagaaagatcagggagggaagtatgtgaggtaaaatttacacataaaaatcagattttaagtactcatttcaatgagttttgataattatacacatctgtgtaaccatcagt

SEQ ID NO: 338009 - DNA, 598 bp, Homo sapiens
tggtcatgaattgaagctggtgatgggtacgtgggaggggttcattattctcttctctctacttttttttttaatgtttcaaagtttccatggtaaaatgtttaaaaagtactccaccagattgaaaggaagtccacattttaattatcattgctaatcaaattctgaaacttttatgatagtaaaatatatctaaaagttatgtctaatctttgatgttttttacttggatgacactcttaatatcctacccatgcaggaaatgaaaaaactccaatttcaccaaataccttaccygaactgcatgatgtttcacttacagtgtttccattttaggagcagagaaacaggctttaaaaaactcttgaaggaaaaaaagtattcacatgagctaggttttggatagtatatattagaattaataatactcttggtctcagcagaatcaggaacagggttactgaaaatataagaagtgttgaagcagttcaagcaacagatgtttttcacttcaattaaaccatgttcatgctgaccaaaggttaaagattacattagattagaaaactaggatgaaatggaaaaaaaaaaattaaag

SEQ ID NO: 338010 - DNA, 615 bp, Homo sapiens
tactactccgccataaaaaggaatgagttaacagcattcacagtgacctggatgagattggagactattattctaagtgaaataactcaggattgaaaaatcaaacattgttctcactggtatgtgggagctaagctatgaggatgcaaaggcgtaagaatgatacatggactttgaggacttcgggggaaggatgggacatgggcgagggataaaagactgcaaatagggtgcagtgtatactgctcaggtgatgggtgcaccaaaatctcacaaatcaccactaaasaacttactcatgtaaccaaacaccacctgttcccccaaaacctatggaaaaagaaaaatgaaatttattctctacgttctggaagctacaagtttgagatcaaggtgttggcaggatttagccaacattctgaggcctcgatcttggcctgtagatggccatcttctccctatatcttcatatggtctttcctctgtgcattttttctgtgtactaatcttctcttcttataagaacaccagttatatttgattagggcctacccacatgacctcattttaccttaattacatctcaaaaggccctaatatggtcacatactgagg

SEQ ID NO: 338011 - DNA, 615 bp, Homo sapiens
tactactccgccataaaaaggaatgagttaacagcattcacagtgacctggatgagattggagactattattctaagtgaaataactcaggattgaaaaatcaaacattgttctcactggtatgtgggagctaagctatgaggatgcaaaggcgtaagaatgatacatggactttgaggacttcgggggaaggatgggacatgggcgagggataaaagactgcaaatagggtgcagtgtatactgctcaggtgatgggtgcaccaaaatctcacaaatcaccactaaagaacttactcatgtaaccaaacaccacctgttcccccaaaacctatggaaaaagaaaaatgaaatttattctctacgttctggaagctacaagtttgagatcaaggtgttggcaggatttagccaacattctgaggcctcgatcttggcctgtagatggccatcttctccctatatcttcatatgktctttcctctgtgcattttttctgtgtactaatcttctcttcttataagaacaccagttatatttgattagggcctacccacatgacctcattttaccttaattacatctcaaaaggccctaatatggtcacatactgagg

SEQ ID NO: 338012 - DNA, 602 bp, Homo sapiens
aggtatcttcacgcctctcagagattatttgtaatccccataagaacacatgatgctgcaaataactttaaatcacaacacatttataagcagaaacaagaagttgtatgtgtattagccattagcattgtgctcaatgaccaccattctttaaagcacaagaaaagctagcacatatgcaagtctactagaaattgtattacatcagcttcacatttccagggcaagcagacatttggggaatcatcaataaatttcatttcacccccaacccaaataacaacacatatgacaaagcgaagccatgccaggcaaagggaaacacatgatcaatcagtatattatatataataactacatataataactgaacagaaacacttagaagagattaagatcaagttgccaacatgactytgaagatgacagaaaaatatggaatatctgtcccaagagacttacattgccaatgttcagcaaccacactattattttttttttcttttaggtttagtgggtacatgtgcaggtttgttacatgggtaaattgcatatcacaggagtttggtgtacaaataattttgtcacccaggtaatcagca

SEQ ID NO: 338013 - DNA, 572 bp, Homo sapiens
tgaattaataaacttaaagcactttaacacagtgccttgcatatagtacacatgtattaagtgttagctgttattattcactaaagagtaaaatccaggctgggagcggtggctcatgcctgtaatctcagcactttgaaaggctgaggcgggtggatcacaaagtcaggggttcsagaccatcctggccaacatggtgaaaccctgtctctactaaaaatacaaaaaaattagccgggcgtggtggcgggtgcctgtagtcacccgctgtaactactcgggaggctgaggtagtagaatcacttgaacccaggagggggatgttgcagtgagccgagatcgcgccactgcactccagcctggcgacagagtgagacttggtttcaaaaaaaaaaaaaaaaaaaaaaaaaagtaaaaagtaaaatccatagacatagactaaaacagtggttatcagtgggtgagaggaatgagaagatgttaatcaaagggtataaacccgcggttataagataaacaggttctggggatctaaggtacagcatgaatggtgatagatgtattaattaatt

SEQ ID NO: 338014 - DNA, 634 bp, Homo sapiens
agaaggaaaaaaaaatcaaatgcgtactacttcctttcaaacagacttatgaaaaattaagaaaaaaaatctgaaaacacatcctaatgtattaaaaaaayatggtgaagtagaaaaagtattaaattcagaatcaaaatacatgtagtctaaactagttctgttgcagctgtgcattttggacaagtaacttaaggtttctgggtctctgtgtcagtttctatggctgtgtaataaaccatcccaaaagtgagttgcaaaaagcatcaatattgctcgtgaatctgcattataggcaatgctaggcaggagcagctctctctgccctgaagtctctgctctgcttgaagtcatctgagatggaaagaatgctgggaaatgtagccatgtgaaggctctttcactcacctaggtgacaaaattcaaaacagctaggtctggaacagttaggattccttaggtactttgtttctatgcagcctctctgcatgatttctccagcatgcggattcaatgtagctgaactttttcacatgtcagttgaaggcttccaaggcatgagtccctacagagggtcacttagaagccatatagctttttatggtgtagcctcaaaatgcacatagcacaccat

SEQ ID NO: 338015 - DNA, 634 bp, Homo sapiens
agaaggaaaaaaaaatcaaatgcgtactacttcctttcaaacagacttatgaaaaattaagaaaaaaaatctgaaaacacatcctaatgtattaaaaaaacatggtgaagtagaaaaagtattaaattcagaatcaaaatacatgtagtctaaactagttctgttgcagctgtgcattttggacaagtaacttaaggtttctgggtctctgtgtcagtttctatggctgtgtaataaaccatcccaaaagtgagttgcaaaaagcatcaatattgctcrtgaatctgcattataggcaatgctaggcaggagcagctctctctgccctgaagtctctgctctgcttgaagtcatctgagatggaaagaatgctgggaaatgtagccatgtgaaggctctttcactcacctaggtgacaaaattcaaaacagctaggtctggaacagttaggattccttaggtactttgtttctatgcagcctctctgcatgatttctccagcatgcggattcaatgtagctgaactttttcacatgtcagttgaaggcttccaaggcatgagtccctacagagggtcacttagaagccatatagctttttatggtgtagcctcaaaatgcacatagcacaccat

SEQ ID NO: 338016 - DNA, 649 bp, Homo sapiens
gttctgttgcagctgtgcattttggacaagtaacttaaggtttctgggtctctgtgtcagtttctatggctgtgtaataaaccatcccaaaagtgagttgcaaaaagcatcaatattgctcgtgaatctgcattataggcaatgctaggcaggagcagctctctctgccctgaagtctctgctctgcttgaagtcatctgagatggaaagaatgctgggaaatgtagccatgtgaaggctctttcactcacctaggtgacaaaattcaaaacagctaggtctggaacagttaggattccttaggtactttgtttctatgcagcctctctgcatgatttctccagcatgcggattcaatgtagctgaactttttcacatgtcagttgaaggcttccaaggcatgagtccckacagagggtcacttagaagccatatagctttttatggtgtagcctcaaaatgcacatagcacaccatagtcacagtgctgctcagattggagtggagagaacatagattccatctccctcaatggagaaatttcaatgtcaatttgcaaggaaaacatgtggtatgggagttatcggtgtagtcatttttggaaatacaatctgcagcaatctcctttagcttatatgaaaaataatca

SEQ ID NO: 338017 - DNA, 632 bp, Homo sapiens
catttgcattttagaatgattactccagtgttcacttagcaatggcagtcaggagaatgagaagtgatgagaccctgagctaagcagtttctacggggaagatgaggaagtaaagctttcctgagacaatgaggacaaatagttaagtgggcaatttagactggggtctaggagaagcaatcgaggtggagagggaaaaaacagtgaccgtctggcctcgcctctgatgactgagtgggtaccatttgctgagaaaagtctrctgggaaagactcataattgggaaaaataaattaaattttattttggtaatgtaaagttgaggtggctttgttgtatttaggtagaaatacctactgtacagttaaatacatcaggaggatatttagggataacattgagatttgggagctgttggggcggtatagggggtagttagcgaagtcgtaagtgagaatacttcccacccttcccaaattcctagggtgtcttttgatattggtgatattgattttgatattctaaaaaatatgttgattttttaaaagttgtagatattatttgacttgatactatggaatctcaaaatatggctgtccccttaacttgtatttttcttgaagttctctgat

SEQ ID NO: 338018 - DNA, 545 bp, Homo sapiens
agaagtcttttcacttggtatcttccttgaggggagttctgcaaggcattcgacactgtgacttgtaggtttagtttcaggagggacctgggggccaggatttgattcccatgaatgctagaatgaagagaactgtgttgcatggcaccagctttaatattcaaaacctcttcactgagtatcttagaaaagagctgtggctagttatttgacactttttatcagctgtcagccctctgtgagctaggggcaaagggctaaggagatggaggtggtattacatgtaaaaatatctttaattgcccaaatagagttaaataaccttattttaacttctaggtagaaattgatttgtggtctcaatttgtggccattaattctattcttcttgataagtctaaatcattcaaatccttttacattataactttattttaaattactgcattgcyttaaatgttttaaagcctctcatggagtcttggaaagaacacaagtttttcagatagggagatgaaatatgtaaatttgattaagttacttaa

SEQ ID NO: 338019 - DNA, 537 bp, Homo sapiens
aacataaataattcacgctttaattttagaatatttgaaattgaaacaacaaacttcttcaaagctaagtttgtgctaagtaactataattattttatttatatgactagtttatagtttattatttctataaacattaactataacagcttgaaatatttactagaaatttctcttattaaaatgcgtaataatagtaacgctgggtgtaataaattggaaataaagcacaacacatgaagcagaactaattccttcatcattaataatcttatacacatgaaagatacaagctttcaataaatgttatagatcactattttttgctcattgtaaatatatgcataaattaattatgtaatctatttcagtataatactttaatggcagcamtgaaaccatatgaaacataagctattttttaactagaataaaggttctgtagagagggaaataagttctatacctaaggcacttaaaaaagaaaaaaataagcctctccttctaaatgcaaaggtgtttaaaaatatgacaaaa

SEQ ID NO: 338020 - DNA, 479 bp, Homo sapiens
atgggaattaaggaagtgcttcatggagggtrtgacaacatgaagagctttgcctttggaagaggccactttagctactgtgtttagtagagagttctatgggttgggagtagatgagcagtgaactctgagagacagattagttggctgttacagtggctctagtaagagatatcagaagcctatactaggctggggaaaacacagatggaggaacatgcacaaattatatagatatcaaagagtaagaacataaaggaacttaacaatcaattggacataaagtttgaggaataggcattgtcaaggatgattccatttctgacttactccacaggctgaataatgttgcctttcaattttttccagaatgaaactttgttaaagatggatatatctttccattagcagaaaaacttgagataaacttttgacagtttagcatctgaactcatcaaaggatctcaaattccaccagt

SEQ ID NO: 338021 - DNA, 583 bp, Homo sapiens
agggtgtgacaacatgaagagctttgcctttggaagaggccactttagctactgtgtttagtagagagttctatgggttgggagtagatgagcagtgaactctgagagacagattagttggctgttacagtggctctagtaagagatatcagaagcctakactaggctggggaaaacacagatggaggaacatgcacaaattatatagatatcaaagagtaagaacataaaggaacttaacaatcaattggacataaagtttgaggaataggcattgtcaaggatgattccatttctgacttactccacaggctgaataatgttgcctttcaattttttccagaatgaaactttgttaaagatggatatatctttccattagcagaaaaacttgagataaacttttgacagtttagcatctgaactcatcaaaggatctcaaattccaccagtaattgtactttgttttatcctttcatcttttagaaattccatgaatgactctgtggaaacctttctcttcttgcactgtgggtctctgtattttctcacttagctctcgtctctctattgggcttcttct

SEQ ID NO: 338022 - DNA, 583 bp, Homo sapiens
agggtgtgacaacatgaagagctttgcctttggaagaggccactttagctactgtgtttagtagagagttctatgggttgggagtagatgagcagtgaactctgagagacagattagttggctgttacagtggctctagtaagagatatcagaagcctatactaggctggggaaaacacagatggaggaacatgcacaaattatakagatatcaaagagtaagaacataaaggaacttaacaatcaattggacataaagtttgaggaataggcattgtcaaggatgattccatttctgacttactccacaggctgaataatgttgcctttcaattttttccagaatgaaactttgttaaagatggatatatctttccattagcagaaaaacttgagataaacttttgacagtttagcatctgaactcatcaaaggatctcaaattccaccagtaattgtactttgttttatcctttcatcttttagaaattccatgaatgactctgtggaaacctttctcttcttgcactgtgggtctctgtattttctcacttagctctcgtctctctattgggcttcttct

SEQ ID NO: 338023 - DNA, 661 bp, Homo sapiens
aatgatatggtaaaaacagtttcctacattattttaaacgatttgtgctataaaatagtatacagtcagctatgtaatgttttactattgattacctagtattcagttayagggatttttaatttttatttatctttttcctcacaacttttgacattttcctggtcactaatgcctgcaggagacagtgaggcgaactcaagttaatcaagtcactgttcagtttttagtgcctttatgaggagcaggactttaaaactattgactaaaattaggctttctgggttatttatggattttatttaacatatttctttcccttctgcatatgcagtttgagagcagactgcatatattgtatttacactgaagagaaagttgaacaaatcaattcatggagataagagaaaatacacatgtaaaacaaatattgtcacagaaacaatagtcttatttcttgttgaaaattatgacggaattcacgaaatagaaggatgatagcttatctgtattttgtacttttttagtggggcatgaaagagctggtgtaaatggatcatagctttaaaatagaactgagggtatgaataatatttaaggaaacttgaagtcagtatgtctaaatagagaatcactgacaattatgtacttaatggtcagc

SEQ ID NO: 338024 - DNA, 661 bp, Homo sapiens
aatgatatggtaaaaacagtttcctacattattttaaacgatttgtgctataaaatagtatacagtcagctatgtaatgttttactattgattacctagtattcagttacagggatttttaatttttatttatctttttcctcacaacttttgacattttcctggtcactaatgcctgcaggagacagtgaggcgaactcaagttaatcaagtcactgttcagtttttagtgcctttatgaggagcaggactttaaaactattgactaaaattaggctttctgggttatttatggattttatttaacatatttctttcccttctgcatatgcagtttgagagcagactgcatatattrtatttacactgaagagaaagttgaacaaatcaattcatggagataagagaaaatacacatgtaaaacaaatattgtcacagaaacaatagtcttatttcttgttgaaaattatgacggaattcacgaaatagaaggatgatagcttatctgtattttgtacttttttagtggggcatgaaagagctggtgtaaatggatcatagctttaaaatagaactgagggtatgaataatatttaaggaaacttgaagtcagtatgtctaaatagagaatcactgacaattatgtacttaatggtcagc

SEQ ID NO: 338025 - DNA, 661 bp, Homo sapiens
aatgatatggtaaaaacagtttcctacattattttaaacgatttgtgctataaaatagtatacagtcagctatgtaatgttttactattgattacctagtattcagttacagggatttttaatttttatttatctttttcctcacaacttttgacattttcctggtcactaatgcctgcaggagacagtgaggcgaactcaagttaatcaagtcactgttcagtttttagtgcctttatgaggagcaggactttaaaactattgactaaaattaggctttctgggttatttatggattttatttaacatatttctttcccttctgcatatgcagtttgagagcagactgcatatattgtatttacactgaagagaaagttgaacaartcaattcatggagataagagaaaatacacatgtaaaacaaatattgtcacagaaacaatagtcttatttcttgttgaaaattatgacggaattcacgaaatagaaggatgatagcttatctgtattttgtacttttttagtggggcatgaaagagctggtgtaaatggatcatagctttaaaatagaactgagggtatgaataatatttaaggaaacttgaagtcagtatgtctaaatagagaatcactgacaattatgtacttaatggtcagc

SEQ ID NO: 338026 - DNA, 580 bp, Homo sapiens
caaggtgtatgcatatatatatttttatttatatatttgtatgtcttaccttgggctgctatagcaaattaacataggctgagaggctttaaaaacatcagaaatttatttctcacagttctrgaggctggaagtctgagatcagggtgccaggatggttgggttctggtgagggcccatttccagattatagattgcttactttttatatcttctcatggaaacaaatgagagagagaaaagagagagagaaagagctctctggggatccttttataagttcactaatttcattcatgaggtctttaccctcatgaccaaattaccttccaaagatcccactcttcaattccatcaaattggggattaggatttcaacatatgaatttttgagggacacaaatattcagtctattatatgtgtgtgtgtatgtatgcatccatatatatatgcacacacatacgtacacaagcacatatataattcttatctatccattatatatatctctttatctatttctctatatgttggtgcaaaagtaattgttattttgccattaaagttttaaccttgcat

SEQ ID NO: 338027 - DNA, 606 bp, Homo sapiens
tttccagtaatttacttaacctaaaatgccttatgttatgcatgtttatgatatttgtatttcaggtagtattgataagtttttattttcttgtgatattacatcttgaaagatttactgaattgactacctacaaatctatacacactgttcacatgattaaaaaatatattattgaagaaagtttgaaatgacaacaaaaagtagttttagtttcactgtcacaagaacaagaagaaattgaagcagctctaaaattcactttgtagccaagaaaatggttttcataaaatygaaaaaatgtcccaaagcaacaatattatatttcttaaactattgctgctactgacatataaagaattctttctataattcttctgtggccttggttggtgacaaagtcgttactagaaaaattttgtaaatagtttctttttataagcttccaggcatagaaaataaaaaagagagagactcatttgagtgtcactatcttcaattattaaatgggtttaaaaatcacatgattcagtatataaatcaaaataatacacgatcttctactagcacaaatttgcagaagcgcaatgtagtgtcatcaagtaa

SEQ ID NO: 338028 - DNA, 599 bp, Homo sapiens
atgccaacaatggtcaaaataaacttttgcttcagtggttacaaatgcacgacggcacagtggaaagaactgggagtaggatactccattagtatatggccccttgatctctttggtttccagtttccttacctgtatcatgagggagtgctacaaatggtatcaaatactccttctagttctatgtttcaaagataaatatgaatgtcgtgggactaataaagagggattctttcatataaacagatgacattcactgtataaaygtggcaatgatattttgtcacatatactccttcagtgtttttaaaatatgttttaatttttagagttctaggttcacagcagaattgatcagaaagtagagttcccatatattccttccgccatacacaaacagccttgcccactatcaacatctcacaccagagcgatacatttgtcacaggtgaatttaagccaacacatccatagtttatattagcatctatcgttaacattagggttcactcttggtgttatacattctgtggatttaggtaaatgtatactgacatgttccttcagtgtttttattgtcttagccagattactatgtg

SEQ ID NO: 338029 - DNA, 599 bp, Homo sapiens
atgccaacaatggtcaaaataaacttttgcttcagtggttacaaatgcacgacggcacagtggaaagaactgggagtaggatactccattagtatatggccccttgatctctttggtttccagtttccttacctgtatcatgagggagtgctacaaatggtatcaaatactccttctagttctatgtttcaaagataaatatgaatgtcgtgggactaataaagagggattctttcatataaacagatgacattcactgtataaacgtggcaatgatattttgtcacatatactccttcagtgtttttaaaatatgttttaatttttagagttctaggttcacagcagaattgatcagaaagtagagttcccatatattccttccgccatacacaaacagccttgcccactatcaacatctcacaccagagcgatacatttgtcacaggtgaatttaagccaacacatccatagtttatattagcatctatcgttaacattagggttcactcttggtgttatacattctgtggatttaggtaaatgtatrctgacatgttccttcagtgtttttattgtcttagccagattactatgtg

SEQ ID NO: 338030 - DNA, 582 bp, Homo sapiens
tattgtgttttctatttttttttatttttttaaattccttttgctatttttttaacttttgttttaggttcagaggtacatgtgaaggtttgttacataggtaaactcatgtcattgaggtttgttgttcagatcatttcatcacccaggtattaaacctagtacttaatagctatttttttctgctcctctccyaccctcttcccaccttccaccctcaagtagaatccagtgtctgttgttcccttctttgtggtcatgagttcacatcattcagctttcacttataagtgagaacatgtgttatttggttttctgttcctgtagtagtttgctaaggataatattttacttttttttctgtctttctgaataatttaaaactgctatgcaaataattggataaaatatttctgtgttttatatataaactatatttaaactatatatataaactatatttaatatagaatcaaagttgtttcataaggaaacacttgacataggatatttgaaatactctaagtagtccatgtcattgtaacaccactttaaaagattccttcagaactgttccactga

SEQ ID NO: 338031 - DNA, 582 bp, Homo sapiens
tattgtgttttctatttttttttatttttttaaattccttttgctatttttttaacttttgttttaggttcagaggtacatgtgaaggtttgttacataggtaaactcatgtcattgaggtttgttgttcagatcatttcatcacccaggtattaaacctagtacttaatagctatttttttctgctcctctcctaccctcttcccaccttccaccctsaagtagaatccagtgtctgttgttcccttctttgtggtcatgagttcacatcattcagctttcacttataagtgagaacatgtgttatttggttttctgttcctgtagtagtttgctaaggataatattttacttttttttctgtctttctgaataatttaaaactgctatgcaaataattggataaaatatttctgtgttttatatataaactatatttaaactatatatataaactatatttaatatagaatcaaagttgtttcataaggaaacacttgacataggatatttgaaatactctaagtagtccatgtcattgtaacaccactttaaaagattccttcagaactgttccactga

SEQ ID NO: 338032 - DNA, 573 bp, Homo sapiens
tttaaaaatattttgttctattttacttatcaagctataaaatatagttttggaaaattataaaactataggtattaaagcttttaaaatgcttttaaaagaaaacacttaaaaaataatttcgttgattctggtttttcctctatttctgtgtgtgttattttcacaaggcacataagatttgctactcatcaagggctcgggatatggataaactgtctgaggcaaaatgagttatgttaggaaggacggaggaaatgttgaaatcttaccttgaataggataagtagtaagggatcagttgactactttagccctgtaactgacagggtgaaatgaaaagggtaatttccaggaaggatttagatcatgttaagataaaggcagtatactcaactagttgttgaataatgtgcttttaaaaaaattaatgtaggccaggtgtggtggctgatgcctgtaattccagtactttgagaggctgagccaggyggatcactttaggccaggagttcaagactagcctggccaatgtggcaaagcctgtctctacaaaaaatatttaatacaaaa

SEQ ID NO: 338033 - DNA, 573 bp, Homo sapiens
tttaaaaatattttgttctattttacttatcaagctataaaatatagttttggaaaattataaaactataggtattaaagcttttaaaatgcttttaaaagaaaacacttaaaaaataatttcgttgattctggtttttcctctatttctgtgtgtgttattttcacaaggcacataagatttgctactcatcaagggctcgggatatggataaactgtctgaggcaaaatgagttatgttaggaaggacggaggaaatgttgaaatcttaccttgaataggataagtagtaagggatcagttgactactttagccctgtaactgacagggtgaaatgaaaagggtaatttccaggaaggatttagatcatgttaagataaaggcagtatactcaactagttgttgaataatgtgcttttaaaaaaattaatgtaggccaggtgtggtggctgatgcctgtaattccagtactttgagaggctgagccaggtggatcactttaggccaggagttcaagactagcctggccaaygtggcaaagcctgtctctacaaaaaatatttaatacaaaa

SEQ ID NO: 338034 - DNA, 473 bp, Homo sapiens
tgtcacatggcaaaagcaggaggcagagaaagacagggaggtgccatacattttaaacagcaggctctcacgagaagtcactctgccacgaggagagcaccaacggtatggttgtaaaccattcatgagaaatccatcttcatgatccattcacctcccaccaggccccacctctaatactggtaatgacatttcaacatgagattttgggtggggacaaatacacaaactatatcataatagaaaccagaacagtagtttctgatgactggaaggtacagtstaagagtgaattttagagggtcgataggaatgtgttacatcttgatttgggtggtgattacacaagtgtatatatgtatcaaaacttactaaattatacacttatagtctgcgtgttatactgcatgtaaaatgtacttccataaaagtatttaaaattttttaaatgtatcttttataaaaattagaat

SEQ ID NO: 338035 - DNA, 597 bp, Homo sapiens
gtgtacacacacatacatacatacatatatatactataattaagtatatacaacacttgaacagatactaaaagaagacataaatggcttatgagcacataaatatatgcttgagattattaaaatgcaaattaaaagcacaataagatacaattgcacacaggatagaatgattactattaaaagacttatcaacattaaatgttgataaggatgtggagcaaccacatctgtcatacattgttgggaggaactggtaaaattatacagccaccactttaaaaaaaactcttcagcggcttctttaaaaagtaaacatgtgtctacattttaaacagcaattactcttgtrtttatcccagcatcattgaaaatatgtgaccctaaaatacacttacaaaaatattcattgtgtagcagctcaaaactagaagcattcaggtgtgcatcaatgaaagaatggatatgtaacttgtcccatattcatacaatggaatattactcacgagtaaaaaggaacactttttacatatgtataacagcatggataaacctcaaaaacatgctgagtgaaagcagccagccataaaagagtgc

SEQ ID NO: 338036 - DNA, 618 bp, Homo sapiens
tatcaacattaaatgttgataaggatgtggagcaaccacatctgtcatacattgttgggaggaactggtaaaattatacagccaccactttaaaaaaaactcttcagcggcttctttaaaaagtaaacatgtgtctacattttaaacagcaattactcttgtgtttatcccagcatcattgaaaatatgtgaccctaaaatacacttacaaaaatattcattgtrtagcagctcaaaactagaagcattcaggtgtgcatcaatgaaagaatggatatgtaacttgtcccatattcatacaatggaatattactcacgagtaaaaaggaacactttttacatatgtataacagcatggataaacctcaaaaacatgctgagtgaaagcagccagccataaaagagtgcatagtgtgtaatcttatttatacaatgttctcaaaagagcaaaacaaatgtgcggttctagaatcagaataacacttttaactattatgattaaagctgctataaatatatttcttacctattatgattaaagctgctctaaatatttaaataaattaatattttcttgtaaactgttttctatgggcataccttgttataaagaaagat

SEQ ID NO: 338037 - DNA, 587 bp, Homo sapiens
tcttggtgggggagtgggactatagttgctaaactattccctggatggaaaactgaagagagaaagtgtcttcttgttcctatgagtcacgatatttaagtcaaactctgctaaatattcctctatggagcaatggaggagacatcatgccccaaaatgaatattcttctctgtccactgtttttgtggcttactctgcttggatgttgctcccacaatgctgtattcagggagtaatttagaaacctctctctctgtgtcttgcacacacgctcactcatgcatacaccaccctakctaatgtatcagattttttaaaaacacattgaaacttttaggacactattgtctcgtgtagaggttaatggaaccataatatatccttggttatgctgagtgacgccttagtgagatgtctagcattcccagagtacacaaagtatcttttcaaaagtaataatgatgttgttgatgatgataataaagtgtatattatattccagaagttgtattattcagcttaacatacattctcttattcatttctcacaacactgagaggtgaataatattattgttatgcccac

SEQ ID NO: 338038 - DNA, 587 bp, Homo sapiens
tcttggtgggggagtgggactatagttgctaaactattccctggatggaaaactgaagagagaaagtgtcttcttgttcctatgagtcacgatatttaagtcaaactctgctaaatattcctctatggagcaatggaggagacatcatgccccaaaatgaatattcttctctgtccactgtttttgtggcttactctgcttggatgttgctcccacaatgctgtattcagggagtaatttagaaacctctctctctgtgtcttgcacacacgctcactcatgcatacaccaccctatctaatgtatcagattttttaaaaacacattgaaacttttaggacactattgtctcgtgtagaggttaatggaaccataatatatccttggttatgctgagtgacgccttagtgagatgtctagcattcccagagtacasaaagtatcttttcaaaagtaataatgatgttgttgatgatgataataaagtgtatattatattccagaagttgtattattcagcttaacatacattctcttattcatttctcacaacactgagaggtgaataatattattgttatgcccac

SEQ ID NO: 338039 - DNA, 643 bp, Homo sapiens
acttggtttcgggagactctggaaattggtaaagaaagtgaaaaaaacaccaccttccccccaccaaacaaaaattcaaaatataaagatattttatataagagcttactgaatgtagtgatggtttttagctgaacatacataattaatttcctctcaaatcaatttaacatctaaataatacaacaccagctaatgggctctcagctggccaaacattaagagatatattgccccatatactcatcataaagaattaagatgaacaacttgcctggttacataacattgttgtacaacataaataaaagatcctctcgctttggcaattgttctgtactgttctaagttttgctaaatcagacttccttctaatctaacagatgccagcagtttaaaagcagttcaaaaatccttatttatatctgatgttcagctttgaataaaatgggccagcaaatgcagagggagaggggagaaaaaaagcataacttaaaaatggratttatttccagccttctaaacacagatgtccaataaacatgcacttagagaaccatttcattaagctaactgcagctgaaaacaagttccctgatgtttctttgagcattttattttctaaaatgaatcattactttct

SEQ ID NO: 338040 - DNA, 547 bp, Homo sapiens
aattgtactttatctgatgtactaagtataatttttcatggaaggtggtcaaatataggaaatgattcatttgaatttgataatcttataaaatacccaaatgcttgcactttttgkctcatttagagtgttatgcatttatttaaaatctgtagctccaatcctgccaggccctacctctccatcctcatcacgcacccctgtccctctcgttcactatgcttcagccactgcagtattcttctaactccttgaaatcatcaaactccttctcacctcagtacctcagtgcatttgtccatgtcattgcctatgcctatggccacttaccccatgttctgattacttcagatcatagggcttgtttccctgccaccttctggaggaagctttccctgaatttcccaggatacaataggtcccatatttgttcccaaagagtgatttttttcttcagagtactggtgacaatgacattaaatattgatattcataatcaataacttgttagctccctaatatttgtccctaatatttggaaggacaa

SEQ ID NO: 338041 - DNA, 527 bp, Homo sapiens
cccggcaggcattttgaaccttacatataattaagaactaatcatctatgactgagagatgggcamgagaaatgagaaagatttacactgattttcacgtgcatatgtcttgttaaagtctgatggccaaatacgagaaatgagacattcctcctaggtagtcagaacccaaactctgaattaaaaaaaaaaaaaaatgactccacccacaattaatttgatgcttctaaaaagctgaatttaactaaagcaacagcaaatctcagagccagctcacctatagactacaactaaattgctccaacacaccctgtcacccctcacacactaacagtttgataaaagaagaacaatgtcattttctggggataaatattatttactttagactctgctattcttttatatgtaatatttggcattcaattaaaaattatgaaacattcaaagatgcaagagaatatggcctactgttaaggggggaaataattaatatagacaaacataaagatgactcacatgttaga

SEQ ID NO: 338042 - DNA, 588 bp, Homo sapiens
cctcaggatttactccacataaaagaaaacagagttgttatttttaaaatttatatttcttctctgactcatttccaaagtattcaaagcatctctttttgttccggcacatttttctctttatgttatttttattttaaactaatggttatgatacttcattgacgtcactatagcaaaaagattaagagaaagctttcttctaactaaaatatttctttaacccactacaaaactcttaaagctagatactaatatgtcctgtaattaagaaatgagcttcccaataggatttattttcatagatttagattcaatgccaagaagctacagtttaaactgtcacagtgcccartagtaaaaacttgcaaatcctcagagaccaattttaaataaatttgtatttcagaaaaaaataaagtgcaatgaagatatccttctattccttctgttaccctcacttccacccaaagtaaggcagacacggaaagagaaagtgagcgggtagaaaagaaagagaaagagagagagagagagagagagagcacattaatatccaaaaaacattacacttggttttgctgtgag

SEQ ID NO: 338043 - DNA, 607 bp, Homo sapiens
agtacaagtttacattatcaaatttgccactgctctacgagacggaaactgcctttgcaaaaatgataactaaggaaattatgacagtgaaaaagatgaaacctaaccaactccatcttgcttctaacctttaatctgtccttgttcattcctgggtgtaggccaaactaacctagggaagaaatttagtgtatggtttgactctgaaacaaaattgataatggccctttccrgaaaagaccctcttctttcctggggaccagtctgcctttgcaggactaacaaattagctacaagatgagaaattatggtttaggggttatgcagcctctggctgcaagagtctgaacctcccaaattgctcctgtggataatatcactattgtaaaacttcagatcagtgcttgagatattttgcagactcttcactcagtgaatcagctgacaccacacccagacttataatctgactcaaccagttctgtgatcccacccaggaacagaagacagcaagaaaacttcactttgaccccgtttgattccatctgcaacgtgaccaatcatcactcctcaattcccgagcccctactcaccaaattatctttaa

SEQ ID NO: 338044 - DNA, 527 bp, Homo sapiens
cccggcaggcattttgaaccttacatataattaagaactaatcatctatgactgagagatgggcacgagaaatgagaaagatttacactgattttcacgtgcatatgtcttgttaaagtctgatggccaaatacgagaaatgagacattcctcctaggtagtcagaacccaaactctgaattaaaaaaaaaaaaaaatgactccacccacaattaatttgatgcttctaaaaagctgaatttaactaaagcaacagcaaatctcagagccagctcacctatagactacaactaaattgctccaacacaccctgycacccctcacacactaacagtttgataaaagaagaacaatgtcattttctggggataaatattatttactttagactctgctattcttttatatgtaatatttggcattcaattaaaaattatgaaacattcaaagatgcaagagaatatggcctactgttaaggggggaaataattaatatagacaaacataaagatgactcacatgttaga

SEQ ID NO: 338045 - DNA, 580 bp, Homo sapiens
gtatgctatgaggatagggcagtctaaccttttcacatttctctacctgctttatatcttggccatgttggcagctgattagatggtgcccacccagattaagagtggttctgcctttcccagcccactgacccaaatgttaatctcctctggcaacaccttcacagacacactcatgatcaatactttgcatccttcaatcccatcaagttgacactcagtattaaccatcacactgtgcttggcttatttcacttaacacaatgacctccagtttctttcatattgttgcaaatgacagactctcattctttttaatggctgaatagtaagtactccattgtgtataagcacaacattttctttatacattcctctgtgtagacacttaggttgcttccaaatcttggctattgtgaacagtgctgcaataaatgcactagtgcacatatgtctttgatgtactgatttcatttcttttaggtrtatacctagcacaggatagctggatcatacggtagctctaattttatgtgttgggaaactctcaaactgctctccatatagggcgtgctaatgt

SEQ ID NO: 338046 - DNA, 559 bp, Homo sapiens
ctaacatctttagacaaggttaagcactttctgcaacgtgtttccattgactcatgctcataccaccatcacagccttatcatactgctgtcatgattcacttccttatttgtttctcctgaattccttaaagcaagtttctaatttcactcatttttgtgttgctagatcatggcccacaacctggtatataatatgcactaaataaatattttctaaatggctggatgaatacataacatttcactgatctgatgaaaataaaacaaatcttacatctatakgtcctggaccttgggccaagggagaaaaaatagttatgatgaattttaggcttactaatacaacaccaggaagaccatgagaatagacatagttaggcttatgccaatgatatatcagtaacaaatcctggccaaaaacttttagaagtgctcatattcacatggtgttttggctgccatgaaaggaatagatctttctaagacatacagacagtgcttgatggctggaaatcaaaacccatatatatggtagataaataagttaaatttattca

SEQ ID NO: 338047 - DNA, 583 bp, Homo sapiens
acaaacatatcaccctagtgagaaagaatagcgaatatgttacctagcgaacattgatagccagttatcattgtcgatatccataagatgtgtacatatcaaaatgttaaatactaaacaactcttaagggccccaaataaatgtattagtatccaaattagggaaactgtttcttccagtttttgtcttgctatgggattattgtgacagcctctttatattctaaagtaagtaaaatcaaaatcctgtgacargtactgagggagcagccattaaaaatagtaaaactcttaagtcctctgactcattaataagaaagcccataagtctcatttaggctaattgtgcaagtgttgtgacagagaatatcccctcatagatcattttaaaatattccttaaatgtctaatgtttattacaactttttataacgataccattaaagcagagtaaagagaaaattcttaatagccatggtaagaaattgtatctttatacctacaatatatttgccaaattaattagttctttagttcatgactataatcatcatctgaattgtattatttcattcaaacaatg

SEQ ID NO: 338048 - DNA, 557 bp, Homo sapiens
gctttctaaatgaaggcagataatatcaaggctgaagaccgagtggcagagtaaaaccaatgaccaaataacacaattttcatgatgctccccgaaagatgcctgcctctatggtatcttctgctgactgctgagttccttcaaacagctggcaggagccacatgtcagcaatacagctctggtccctattgagaatgcatccatttaatcttatattcagcatttcttaaragacacactggtatgtaaagggccacaaaagagttgttctttgaccaaatctgcacaccacagctctgcagagggctattttttaaatgcatattggagtctcccaactcctacctcaacaagaacatcttcagagtctttcctttgtccaacatttaaaacatcccacaaagctcctcatgatctggccttgttctgagtttctgaaccacacctatccttctgtgagctctggcttacactggctggccttcttttcatttccagagccttcactcaagctgtcctcctacctgggaggcaatttccctactttttctctgga

SEQ ID NO: 338049 - DNA, 557 bp, Homo sapiens
gctttctaaatgaaggcagataatatcaaggctgaagaccgagtggcagagtaaaaccaatgaccaaataacacaattttcatgatgctccccgaaagatgcctgcctctatggtatcttctgctgactgctgagttccttcaaacagctggcaggagccacatgtcagcaatacagctctggtccctattgagaatgcatccatttaatcttatattcagcatttcttaaaagacasactggtatgtaaagggccacaaaagagttgttctttgaccaaatctgcacaccacagctctgcagagggctattttttaaatgcatattggagtctcccaactcctacctcaacaagaacatcttcagagtctttcctttgtccaacatttaaaacatcccacaaagctcctcatgatctggccttgttctgagtttctgaaccacacctatccttctgtgagctctggcttacactggctggccttcttttcatttccagagccttcactcaagctgtcctcctacctgggaggcaatttccctactttttctctgga

SEQ ID NO: 338050 - DNA, 522 bp, Homo sapiens
ttatttggccaatttcccccatttggaatgggtatacttacccaatgcctctacctgtattgcatctaggaaggaactaacttgctttcaattttacaggctcatatgtagaaaggacctgtcttgcctcagatgagacctgggacttggacttttgggctaatggtagaatgagctatactttgggggactgttggaaaggcatgattgtgtttttaaatgtgaggacataagatttacgaggggaaaaggggggaataatgtggtggggctgtgtccctactgaaatctcatctggtaattatagttcccatatttgccacatattgtgggagggacccactgggaggtaattgaatcttgggggtggttccctccatgctgttcttgtgatagtgagtgagttctckcaagatctgatggttttataaagggcttctccctctttgcttggcaattctgcttcctgccaccatgtgaaaaaagaggtgtgtgctttcccttctgccatgattgtaagtt

SEQ ID NO: 338051 - DNA, 274 bp, Homo sapiens
tgagattctgtcttgaaacacagaaagaataaatgctatggaagcaagacacaataggaaaattcagattggagactcaataacacgggtggaggatgaagactaattactaaggtgaagagaagcagaagaaaattctcaggagacagaagacagggaatttgaaaaaaaccacatggtccagmtaaaggtcagagtgcaaagtgagtaataagaaaaattaaggctacataagtaaatacaggttagaaatgaaagaacttatacacagaaa

SEQ ID NO: 338052 - DNA, 571 bp, Homo sapiens
tgaggctggtctagtggcaacacattcccttagcatttacttgtctggaaaatatttcatttttccttcaaacctcagcatcacacaatatatccatgtaacaaacttgtacatgtacctccagaatctaaaataaaaatttgaaattttaaaaataaaataatataaaaaatgaaatagtgtaaactttmccaaaatatataacaatgatctatattaaaacctctgaaacactactgagagaattttaaaatacctaaataaatggagaggtgtactatattcatagattgaaagactcaacattgttaagatatcatttcctccagattgatctgtagactcaatgcaatttcaatcaacttcccaataaattttttaaaaataaaaaatttacactgattctaaaacatgtgggaaaaaaaagcaaacccaaaatctagcacagaaatacacacacacatccatatacatgtgtgtatatatatcttacactcaaatatatatatactcaaataaccatatatgcattcatatatacatatatacacacatacgtacatatatacac

SEQ ID NO: 338053 - DNA, 380 bp, Homo sapiens
ttatcgaactcccctcatatataggtatatgtatgtgtgtacaagtatatgtgcacctatatacatagggggagacagagagagaacagtagcgttaaaaaaaaaaaaaggacattacctttatgacctaggaatggggactttttggctaaacaacaaaaacacaaactaaaaggtaaaaatagaatgaattctattaaatcaaaattagatataccatagacaagtttaccagatggatgaggaaccatgggaaaatattggtaatgtttaatgwctaaaatttttgtagaatatattttaaaagtctgtaaaccagtaataaataagcagaaaaaccattgtaaaataggcaaagaatattagtggcagttcatggt

SEQ ID NO: 338054 - DNA, 620 bp, Homo sapiens
ggtgcggtggctcccgcctgtgtaatgccagcattttgggaggccaaggtgggcagatcacaaggttaggagatcgagaccatcctggtcaacatggtgaaagccagtctctactaaaaatacaaaaattagctgggtgtggtggtgtgtgcttgtaatcccagctactcaggaggctgaggcaagagaatcacttgaaccagggagtcagaggttgcagtgagccgagattacaccactgcactccagcctggcaacagagcaagactctgtytcaaaaaaaaaaaaaaaaaaaaaagaaaaaagaaatgaagtccatattgtattatccatgagctagcttttgtttttgtatttctttaagcttttgcttttctatttctttaagaaaatatcaggaagatattttgaaataaaaatgatcacttgattacaaagcccttttctgtaatgggtatattgcaaagcatttgtacaaatttgtataatttgtataataaaaatatttgccataatcaatgcgtgggcataaattaatgcagtggctttcaatcaggacaattttgtacaccacctctccaggagagatatatttggcaattcctgtgttagagcaggta

SEQ ID NO: 338055 - DNA, 601 bp, Homo sapiens
gtgtgagccaccgtgcctggcctgaagtgtgctcttaaaccaatgttaattggggagaacaggctaactgatggcaggctttcctgctacaaactatatgccagtctatgtaccaaaattgctaattatagattgctaattactatgttcaacccacctgatagaatgtatcttgctatgctctaatccattccttcatcactagtttctctcctgaactttccattatctatcactaaatgtgccaattgtgttctacttcctaggaggtaccttctatcattattaacagctggttcctctaccacagctgcctatcccaatagatgtagttccagaaaccaactccccaaagtcttcccaagtccattgctatcagataactatttgatgrccagctaattgacaaaataaaaccatcatcagattagcaccctcaaattcaatagaaaacagattccaaagaaataaatatgcaaaaattgacagatccatcagaggagagcatctcaaattcccactactaaattttaaatcttcttaaactacatttttttctattttcatatcatgatggaagacttgtccctgctcctcttaa

SEQ ID NO: 338056 - DNA, 620 bp, Homo sapiens
actaagcaactctgactgcatagactcttgaaaggtgccaacattcccatcaacagctatttttcccatacctccatttatgctggatttgaaatttcactttcgatgttattgctttttgtttttttgctacactttcatctttattggttagttcmacctttcaaagatccatcttcgtaaaacagcacatgggtttatcaggaggcatacaattacaacctttgctgtgtatgtaatgaattacaggtgtgcagggaccaatcacaggcagatcttgaatagaagtgacatgattggtcacttatgattcacatctgttatttaggtagtgatttgtgaactgaggaagctgtaaagtctgtacttcatgcaattattcacagataatatacttgtgttaacagaaagttgaacagtttgttgggggaatagtgttaggtaaccaaacctcatgcatgtcaaaagtgcaaaataaggaatgtctattctttcattattttccttctggcctttatgctattgtcacgtacttaactttgacatgttataaactccacattattattgtttaaccagccaattatcttttaaagagacataataactttttgaaactt

SEQ ID NO: 338057 - DNA, 527 bp, Homo sapiens
aaatcctacatctactcatttatgaggtctaagagaaggcaggaggacaagtttagtttttgttttaggatcccacaagtgattatgatcacacctggcaagaactgaaatccatggtcagattctaaataatcacttaacgctagtgctaggcttaaattgttcctagaaacatttcccaaccctaaaactgagagaatcagagtcaaattgtctcaagagggggagggcaggatttctgccaccagattctgtctaaattcattcaacatttaatgagtaaccactggctatcagtatcaggtggacagaaatgagtaaggtgtctctgttcttggtaacttaaaagctggtgataatagggtagtatataaggcagtgtttcccatggtaggatacatgtctgcataccactgtctgcagtaagcaacccmaatgttcctggggtccgagtcatctgtctataacagaaaaagatgaatgagagataagctccgctttcaacaggctctttttggaaataatgg

SEQ ID NO: 338058 - DNA, 534 bp, Homo sapiens
tccaaaacttttgtatttaatgactttcaaatacatgtccaaggaaatgtttcatttaccattgcaaacattgatttattaaataaagtagaagtccaggctttataaaagtcagcattacatttctcacagagaaatcaagaaaaaaaatttcctatcaatcacagatagttatcagcagtcttygtgaagtcttccaactaatatttcattaaagaaatgaagtgggagctgcatttacagatgaggctcgtgctttagccattctccgaaccagtgcttcttgtctttttctctgaatttcttcaggagaacactttctatttttctcttcttcctctaaaaattcaacaaaagatgagttttacttttatagcctataaagtcattcaatatgtgctttaatttttgctttttttaatcacccagatttgccatattagttggctattaaatcaaactaaactactgaatataaaattctaagtacataatacagatataatgctccagttcaaaagaaaatcaagcact

SEQ ID NO: 338059 - DNA, 513 bp, Homo sapiens
agaggaaagaaaaatgagaagaggagagaaaaaaaaataaggaagcttgcatgtttaaagtctttcttattaaattcacatgctttaaaatttcaaattgtactaaaatatttgtaacataaaattatctatttccyacccacttttttctactccctgcttggtaatttcagaagcagtcattttgattctttcagctgtttcttttgacatttacctaactttaaatgtttaaatagtatgtgtatttgctattcttagatacatgaatgttgagcattatctaattacttcctattatggtagtttagcactttactctcttagactcccattgcctctgctttccctcctctatgattccaattcagttgtagtcatttttagattaaatcaatactcagtaaagtctgtgtagatattactcacagctgagcattgtactatgattacatttcctttcttatattttcaccaaagttaattattaccatcttttttgattgaggtaca

SEQ ID NO: 338060 - DNA, 579 bp, Homo sapiens
tatctttttattgatgaattgtattctactttatagatatacaacactttgttaatcctttcaccagttgatgaattgtttccactttttggctactagaaatattgctgctgtgaacatatatgtacaagttttgtgtggacttatgatttcatttcccttgggtagatatctaggcatggaatttctcaattgcacaatgtctcactttttaaaaactgctaacctttttccaaagtagctgtctcattctaccatcccaaaagcaatgtatgagagttccagttactccctgtcctcacctacacttgatgtcgtcagtctttttttcwagccatttaatgggtacattgcagtatctcattttaattcacattttcctaatcactaattattttgagcatgtttttgtaggcttattagccattagtataatctttttggtgaaatatctgttcaaatctgttacccactgtattggttttttattgctgccataacaaattaacacaaatttggttgcttcaaccaatacaaatttatcatctcacagtttctgtaggacagaagtccaggtga

SEQ ID NO: 338061 - DNA, 579 bp, Homo sapiens
tatctttttattgatgaattgtattctactttatagatatacaacactttgttaatcctttcaccagttgatgaattgtttccactttttggctactagaaatattgctgctgtgaacatatatgtacaagttttgtgtggacttatgatttcatttcccttgggtagatatctaggcatggaatttctcaattgcacaatgtctcactttttaaaaactgctaacctttttccaaagtagctgtctcattctaccatcccaaaagcaatgtatgagagttccagttactccctgtcctcacctacacttgatgtcgtcagtctttttttctagccatttaatgggtacattgcagtatctcattttaattcacattttcctaatcactaattattttgagcatgtttttrtaggcttattagccattagtataatctttttggtgaaatatctgttcaaatctgttacccactgtattggttttttattgctgccataacaaattaacacaaatttggttgcttcaaccaatacaaatttatcatctcacagtttctgtaggacagaagtccaggtga

SEQ ID NO: 338062 - DNA, 443 bp, Homo sapiens
cctaaaacaaccatttttaagaaagttgtcttcttattaatgatttgtaaaagtttcttatatattctggatataagttctttaacagttctatcaggggctcacacattttttctgtcaattaacagataataaatattttatgttttgcaggctacaaaggatcccttttgcatatgcttttttaaacactttaaaactgtaaaaaccattcttagcttatgagccttaccaaaacagatcataggacaaatttagccttcaggccatagyttgccaacctctaagatgtgtgctttgcaaatattttctccaagtttgtggcttatctttttttattttcatactgttgcttttggaagagtgtagtgaacagacttgaagatggctctcataactctgtctcctggtattggtgatttggtataattcctccccttgag

SEQ ID NO: 338063 - DNA, 521 bp, Homo sapiens
cattactagaataaagaaaaaaacatttatttttgcacacttatcttatatcttgtgaccttgttgaacttcctttttagttctagttttttggtttgtattttagatttcctaggagtttcyatgttcaagattacgttgtcttcaaaaaaaagttttagttcttccttttcaatctatatgcctttaatttctttgccttatctgattgcggtggtcagagtctctagtataatattaagcaaaatgggtaagaatagatgtctttaccttattcttgattttaggaacaaagcactattttttagcaatttatgatgttaagtataggcctctgtaaatgtcctttagcactctgagaaagttctctgctattcccaatttgtggagagtttttatttatgggtgcaggatatttttttcaattgatttttctgtttcctgagatgaccatgcattttgtataccttgccttattaatatggtgtattacattgatttatatacagatgttaagacaa

SEQ ID NO: 338064 - DNA, 541 bp, Homo sapiens
ggtgcggtggctcactcctgyaatcccagcactttggaaggccaaggcagatggatcacttgaggtcaggagttcgagaccagcccagccaacatggtgaaaccccgtctctactaaaaatacaaaaattatctgggtgtggtggtgggtgcctataatcccagctgttcgagaggctgagggaggaaaatcgcttgaacctgggagggagaggttgcagtaagccaagattgtgccactgcactccagcctgggcaagagagcaagactctgtctcaaaaaaagaaaaataatacactctgattcatgtcaacagtgttctcctaactctaattagtaatgggtgaagagaaactgcacccaaagcgctcatctctaaaatcattttaatgtagattaaatttatatatgattaaatatcttatttatattaattagagaggtatgtataaaattcagacaaaatcctcaaattttatttccacttctaattccaattcatctgcattactatgtttttttagcaaaaatagaacaataa

SEQ ID NO: 338065 - DNA, 591 bp, Homo sapiens
tagcatcagctttaacattcatctttctattaacatcctctttaygacaatatatgtattctctaggataatacaggctttctctatcacgctcctcacttccttattagtcctcaccagcagcatcctcagcaaccatttttctaccaacagcctgtttacaacaatctaggctttatctgtcatgcccctcaaaattcttccagattctgcccattatcaaattccaaagccacttccacatttttatgtattacagcagcatcacattttcattaccaaaatctgtatttgtttcctgtgcttttcacaaattaccagaaacttggtggcttaaagcaatagaaatttattatctcacagtcctggaggccagaagtccagaagtggttccactgtgttgacatcaaggtgtggacagggctgcattcctctggagtgcccaggggaaggtctgttcctggcctcttctagcttctggtggctgctggcattccttggtttttggctgcatcatttaaatctctgcctccatgttcacatttcctggatttcctttggagggccattgttgggtctatcacaaatatt

SEQ ID NO: 338066 - DNA, 455 bp, Homo sapiens
tgtcattttgttcaatgttgttcattataacactgatgggaaaaaaaaaaaaagtcacttcccatcagtggccactgtctggacattctccccatggctgcataggttacctactcagcttcctcccacatcccaragatgtgcagcttaggtgaatctgtatgtctacatgagccccagagggagtgagcgtgtgtgtgggtgtgagtgtgccctgccataggaggaggtcctggtcagggctggttcccaccttgcaccctgagctgccgagataggctctggccacccgctaccttgaactggaataagtgggtaaaaaatgatcttacttgtatttattaatctttcttaaatgtatgtgtagctcatttttatatcaatgtttaatattagaagtgttttgggtcttgttttagaagtttggtgctgcttttttaccagaaatatgtagt

SEQ ID NO: 338067 - DNA, 509 bp, Homo sapiens
tggcagcttggtttctcttcttcaccctagaactctttttttttttttttttttttgagatggagtcttgctctgtcactaggcagaagtgcagtggtgcaattttggctcactgcaacctccgcctcccaggttcaagtgattcccctgcctcagcctcccaagtagctgggactacaggtgcatgccaccatgcccagctaattttctgtattttagttgagacgtgatttcaccatgttggccaggatagtctcaatctcctgacctcatgatccacccgcctcccaaaatgttgggatkacaggtgtaagccactgcgccccaccaagaactcttaacaaattccaacactcccaggagctccaatgaataagacgctcaaggcacctatggctaccagctatttggggagaagagatgggcagagaaggaaggaaaaggatttgcagaagggtagaaaaaggagttacaaacccatcaccgaagaacctttctagaactggcag

SEQ ID NO: 338068 - DNA, 440 bp, Homo sapiens
ggattgcttcattgttgtttttttttttgttttcttgttttgttttgttttttcttagtgaagctttcaatttgaaaagccaagcgattgatttgaaaatgagtataataaaatatttaaaagaggcagggggacctgctactctcactgctgcctcagggcctttgcagttgctgttccttctgtctgggatactccaccctcagaagacatatggctcactccttatgttcttctggggtccgtgcaaatgtcaccctttcaatgaggactttactgaccaccttatttagaatagkaaccccatcactatctatccccctgtatctgcttgatttttctctatagaatgtatcaccatgtgatatacacttacttgtttatttgtgtatttcggtctcctgtcactagaatgtaagccccatgagggcaaggatttt

SEQ ID NO: 338069 - DNA, 614 bp, Homo sapiens
tgcttaaaaaacatccacaaggccaggcaccgtggctcacgcctgtaatcccagaactttgggagggcaagaccagagggtcgcttgagcccaggaggtagaggctgcggtgagctatgattgtgccactgcattccagcctggcaacagagcaagaatctgtatttttaaaaagtaattaattaattaaaaatccacaaaaatcttagcagcattggacaacacacattcatttattctctgtctggagtcattagctaggtggctctgctccatgtctgaattttggctggttgttggttgatctaggytgtcctcaactgggatgactgggatgacttaagcatggctcatgtcccttattctctagcaggctagtctaagcatgttctcattgtgacgtctagagcatgacacataaacagaaacaggcgagtcttcctgagccctaggttcagaactggcacactgccactttttcctcattctgttgaccaaagcaagtcaggagcccaaactagagtcgaaggaaggtgtgatatgtattgtgaaatatatatttggttttcctcccatttcctgacatacaacccctaaaatctttagaatctcta

SEQ ID NO: 338070 - DNA, 614 bp, Homo sapiens
tgcttaaaaaacatccacaaggccaggcaccgtggctcacgcctgtaatcccagaactttgggagggcaagaccagagggtcgcttgagcccaggaggtagaggctgcggtgagctatgattgtgccactgcattccagcctggcaacagagcaagaatctgtatttttaaaaagtaattaattaattaaaaatccacaaaaatcttagcagcattggacaacacacattcatttattctctgtctggagtcattagctaggtggctctgctccatgtctgaattttggctggttgttggttgatctaggctgtcctcaactgggatgactgggatgacttaagcatggytcatgtcccttattctctagcaggctagtctaagcatgttctcattgtgacgtctagagcatgacacataaacagaaacaggcgagtcttcctgagccctaggttcagaactggcacactgccactttttcctcattctgttgaccaaagcaagtcaggagcccaaactagagtcgaaggaaggtgtgatatgtattgtgaaatatatatttggttttcctcccatttcctgacatacaacccctaaaatctttagaatctcta

SEQ ID NO: 338071 - DNA, 614 bp, Homo sapiens
tgcttaaaaaacatccacaaggccaggcaccgtggctcacgcctgtaatcccagaactttgggagggcaagaccagagggtcgcttgagcccaggaggtagaggctgcggtgagctatgattgtgccactgcattccagcctggcaacagagcaagaatctgtatttttaaaaagtaattaattaattaaaaatccacaaaaatcttagcagcattggacaacacacattcatttattctctgtctggagtcattagctaggtggctctgctccatgtctgaattttggctggttgttggttgatctaggctgtcctcaactgggatgactgggatgacttaagcatggctcatgtcccttattctctagcaggctagtctaagcatgttctcattgtgacgtctagagcatgacacataaacagaaacaggcgagtcttcctgagccctaggttcagaactggcacactgccactttttcctcattctgttgaccaaagcaagtcaggagcccaaactagagtcraaggaaggtgtgatatgtattgtgaaatatatatttggttttcctcccatttcctgacatacaacccctaaaatctttagaatctcta

SEQ ID NO: 338072 - DNA, 600 bp, Homo sapiens
gatgtataatttcttttatatattgccaaattctatttgctaacagtttttaagaatttttacatttatattcacataggatgctaatctgtagggttggctttcttgtgctgtctttgtctggttttggtaacagggtaatattggtttcttaatatgaattagtatgttttctctccttttctttctgggatagattgtgaagaatgagtaataattcattttaatcatttgrtagaatgctctagtgaaacaatctgggcttgggtatttttgttttttgagatggaggattaattgcaaatccaattcctttaatagttacagggccattcatattatcaattttatattggctgagttctgagagtttgtgcttctggaggaattggttcatttcttctaaactgttaaattttatgtgtagagttgctcctagtattctctaattcttttgacatctgcaaggtctccagtgacagcccctgaataattctttgcctgcataatttttatcttacctattatgtttttgtcattcttagcagaggtttgtcaattttattgatgtttttgaaaaatcacccctttgaagtttct

SEQ ID NO: 338073 - DNA, 611 bp, Homo sapiens
tttgaattgattttctgctgtggttaggttgttgttttcttttggagtttttaaaactatttttgtgattcattttttgaaatttgattatgttgtgtcttggtgtagatttccttgggtttatcataattaggcttcccttagtctcttgggtytataagttcatgtattttgccaaaattggggaattttcagcccttattttgtcaagtacttttcagcctctcactcttacttatttcattttggtagtccagtgatataaatattagatattttgttattgtcccacagattcctgaggctctgttcttttcttttttccttttagtctgttttctcttgttcagattggaaaatttctattcttttatcttctagtttactgctcctgtcctctgtccctccattctgcaaacccatagaagtttttgtttcaatcattgaattcttcagttgtacagtctatgtccttctgtatattttcctatttctttgctgagactttctatttattagtctattctatttcaagtatgttcacaattacccattaaagcttttttgtattgatggttttaaaatccttgttaagcttattttatcatctc

SEQ ID NO: 338074 - DNA, 611 bp, Homo sapiens
tttgaattgattttctgctgtggttaggttgttgttttcttttggagtttttaaaactatttttgtgattcattttttgaaatttgattatgttgtgtcttggtgtagatttccttgggtttatcataattaggcttcccttagtctcttgggtttataagttcatgtattttgccaaaattggggaattttcagcccttattttgtcaagtacttttcagcctctcactcttacttatttcattttggtagtccagtgatataaatattagatattttgttattgtcccacagattcctgaggctctgttcttttcttttttccttttagtctgttttctcttgttcagattggawaatttctattcttttatcttctagtttactgctcctgtcctctgtccctccattctgcaaacccatagaagtttttgtttcaatcattgaattcttcagttgtacagtctatgtccttctgtatattttcctatttctttgctgagactttctatttattagtctattctatttcaagtatgttcacaattacccattaaagcttttttgtattgatggttttaaaatccttgttaagcttattttatcatctc

SEQ ID NO: 338075 - DNA, 611 bp, Homo sapiens
tttgaattgattttctgctgtggttaggttgttgttttcttttggagtttttaaaactatttttgtgattcattttttgaaatttgattatgttgtgtcttggtgtagatttccttgggtttatcataattaggcttcccttagtctcttgggtttataagttcatgtattttgccaaaattggggaattttcagcccttattttgtcaagtacttttcagcctctcactcttacttatttcattttggtagtccagtgatataaatattagatattttgttattgtcccacagattcctgaggctctgttcttttcttttttccttttagtctgttttctcttgttcagattggaaaatttctattcttttatcttctagtttactgctcctgtcctctgtccctccattctgcaaacccatagaagtttttgtttcaatcattgaattcytcagttgtacagtctatgtccttctgtatattttcctatttctttgctgagactttctatttattagtctattctatttcaagtatgttcacaattacccattaaagcttttttgtattgatggttttaaaatccttgttaagcttattttatcatctc

SEQ ID NO: 338076 - DNA, 611 bp, Homo sapiens
tttgaattgattttctgctgtggttaggttgttgttttcttttggagtttttaaaactatttttgtgattcattttttgaaatttgattatgttgtgtcttggtgtagatttccttgggtttatcataattaggcttcccttagtctcttgggtttataagttcatgtattttgccaaaattggggaattttcagcccttattttgtcaagtacttttcagcctctcactcttacttatttcattttggtagtccagtgatataaatattagatattttgttattgtcccacagattcctgaggctctgttcttttcttttttccttttagtctgttttctcttgttcagattggaaaatttctattcttttatcttctagtttactgctcctgtcctctgtccctccattctgcaaacccatagaagtttttgtttcaatcattgaattcttcagttgtacagtctatgtccttctgtatattttcctatttctttgctgagactttctatttattagtctattctatttcaagtatgttcrcaattacccattaaagcttttttgtattgatggttttaaaatccttgttaagcttattttatcatctc

SEQ ID NO: 338077 - DNA, 587 bp, Homo sapiens
cctcattactgctggattaggaaggaagttcagaccccccaacatggtctccatctactccttgtgggtctaggctagtgaccactgagcagtaatgaacgtcctgcctccctacctggccttctctgacaccatcccagaaaatgactggagcctcttgttatagtcagctgaggcatttgacattgttgccatcaaaggagctggcacaaccatctttctgcagtttggctggagtatagaggttataatctaaaagttttatgttttgccaggcttcccttttcctgatctcttggctgargaaagcattttgttttcagcctttcatccatgcccattcgcatttttggcatcctggcttctttagttccaagtctaaaatatatgagaaaaaaataaagctcacaggcctcaccaccatgtctttcctgggttcttgaggtcctgaagtccttggccagtcctccttattctctcctaccatagtgtcttcttatgttgcttttatatatgaagtgcaaagattttagttttccttagaggagaacaggaagacgtatcttcctgcatctgtacataaacag

SEQ ID NO: 338078 - DNA, 587 bp, Homo sapiens
cctcattactgctggattaggaaggaagttcagaccccccaacatggtctccatctactccttgtgggtctaggctagtgaccactgagcagtaatgaacgtcctgcctccctacctggccttctctgacaccatcccagaaaatgactggagcctcttgttatagtcagctgaggcatttgacattgttgccatcaaaggagctggcacaaccatctttctgcagtttggctggagtatagaggttataatctaaaagttttatgttttgccaggcttcccttttcctgatctcttggctgaggaaagcattttgttttcagcctttcatccatgcccattcrcatttttggcatcctggcttctttagttccaagtctaaaatatatgagaaaaaaataaagctcacaggcctcaccaccatgtctttcctgggttcttgaggtcctgaagtccttggccagtcctccttattctctcctaccatagtgtcttcttatgttgcttttatatatgaagtgcaaagattttagttttccttagaggagaacaggaagacgtatcttcctgcatctgtacataaacag

SEQ ID NO: 338079 - DNA, 587 bp, Homo sapiens
cctcattactgctggattaggaaggaagttcagaccccccaacatggtctccatctactccttgtgggtctaggctagtgaccactgagcagtaatgaacgtcctgcctccctacctggccttctctgacaccatcccagaaaatgactggagcctcttgttatagtcagctgaggcatttgacattgttgccatcaaaggagctggcacaaccatctttctgcagtttggctggagtatagaggttataatctaaaagttttatgttttgccaggcttcccttttcctgatctcttggctgaggaaagcattttgttttcagcctttcatccatgcccattcgcatttttggcatcctrgcttctttagttccaagtctaaaatatatgagaaaaaaataaagctcacaggcctcaccaccatgtctttcctgggttcttgaggtcctgaagtccttggccagtcctccttattctctcctaccatagtgtcttcttatgttgcttttatatatgaagtgcaaagattttagttttccttagaggagaacaggaagacgtatcttcctgcatctgtacataaacag

SEQ ID NO: 338080 - DNA, 594 bp, Homo sapiens
ccatgcccattcgcatttttggcatcctggcttctttagttccaagtctaaaatatatgagaaaaaaataaagctcacaggcctcaccaccatgtctttcctgggttcttgaggtcctgaagtccttggccagtcctccttattctctcctaccatagtgtcttcttatgttgcttttatatatgaagtgcaaagattttagttttccttrgaggagaacaggaagacgtatcttcctgcatctgtacataaacagaaatcctattctctgcctttcagttgaggtgtatagatcctttacatttcacatgattattgatatgattgggtataaatgtatggtattgctatttgctttctgtttgtctcatgtgtttttaattctcttttcctcttttctgctttctttcaaattaattgaatatttgtaatagcccttactttttagaataatattaaatttacagaaaaattaagaagatagtatagttgctacatattctgtaccaactttcctcctattaacatcttaaattaatatgacatatttattacacttaatgaacaaatactgatacattatattaactaagt

SEQ ID NO: 338081 - DNA, 594 bp, Homo sapiens
ccatgcccattcgcatttttggcatcctggcttctttagttccaagtctaaaatatatgagaaaaaaataaagctcacaggcctcaccaccatgtctttcctgggttcttgaggtcctgaagtccttggccagtcctccttattctctcctaccatagtgtcttcttatgttgcttttatatatgaagtgcaaagattttagttttccttagaggagaacaggaagacgtatcttcctgcatctgtacataaacagaaatcctattctctgcctttcagttgaggtgtatagwtcctttacatttcacatgattattgatatgattgggtataaatgtatggtattgctatttgctttctgtttgtctcatgtgtttttaattctcttttcctcttttctgctttctttcaaattaattgaatatttgtaatagcccttactttttagaataatattaaatttacagaaaaattaagaagatagtatagttgctacatattctgtaccaactttcctcctattaacatcttaaattaatatgacatatttattacacttaatgaacaaatactgatacattatattaactaagt

SEQ ID NO: 338082 - DNA, 594 bp, Homo sapiens
ccatgcccattcgcatttttggcatcctggcttctttagttccaagtctaaaatatatgagaaaaaaataaagctcacaggcctcaccaccatgtctttcctgggttcttgaggtcctgaagtccttggccagtcctccttattctctcctaccatagtgtcttcttatgttgcttttatatatgaagtgcaaagattttagttttccttagaggagaacaggaagacgtatcttcctgcatctgtacataaacagaaatcctattctctgcctttcagttgaggtgtatagatccttyacatttcacatgattattgatatgattgggtataaatgtatggtattgctatttgctttctgtttgtctcatgtgtttttaattctcttttcctcttttctgctttctttcaaattaattgaatatttgtaatagcccttactttttagaataatattaaatttacagaaaaattaagaagatagtatagttgctacatattctgtaccaactttcctcctattaacatcttaaattaatatgacatatttattacacttaatgaacaaatactgatacattatattaactaagt

SEQ ID NO: 338083 - DNA, 465 bp, Homo sapiens
aaagtgtctacataaattacttatatttttcctttttgagatgtttgtatcttctccctattttttgttttagtcatttatttatatcagaatatatatttatgaatatttcttttatactttaggttataatccagtacaacttyctgtatttggttgcatgaattgttctagctttgactgatttctcaatgatgtctattgtggtctaagagcatagtttttgatcttagtctttaaaactcgctctttagtctttaaaacacaagagtgttttatggcccagaatgtggtttatcttggtcattgtttcatgtgaacttaagaggaatgagtattctgctattattagatacatgctctatagatatcaattagatcaaattgattgatggtgctgtcaagtcaattatatccttattttctgtctgtttcatcaattactgaaagaggagtggtaaaatt

SEQ ID NO: 338084 - DNA, 465 bp, Homo sapiens
aaagtgtctacataaattacttatatttttcctttttgagatgtttgtatcttctccctattttttgttttagtcatttatttatatcagaatatatatttatgaatatttcttttatactttaggttataatccagtacaacttcctgtatttggttgcatgaattgttctagctttgactgatttctcaatgatgtctattgtggtctaagagcatagtttttgatcttagtctttaaaactcgctctttagtctttaaaacacaagagtgttttatggcccagaatgtggtttatcttggtcattgtttcatgtgaacttaagaggaatgagtattctgctattattagatacatgctctatagatatcaattagatcaaattgattkatggtgctgtcaagtcaattatatccttattttctgtctgtttcatcaattactgaaagaggagtggtaaaatt

SEQ ID NO: 338085 - DNA, 622 bp, Homo sapiens
tttctcccttctcttagcatatcaattatacttctttttaaaaatgtttttagcagttactctgcagtttgcaatatatatttacaaccaaattaagtccactctcaaatactaccataatacttcataggtggtacaggtacctttaacagtgtaccccaatcactccttcctgtcccttttaactttgttgttgttcattttccttatgtatatactataatcacttaatgcactgttgttattattagtactttgaataaacagctacctattcagtcaattaagaataagaataatataaaatttaattttataatcacttattcctcctttgatgctttcctttctttatgtagatccaagcttctgagtastattatattctttctccctgaagaacttcttttaaaatgtctcagggttacatctactggcaataaatttccttagtttttgtttgagaaggtccttatttctccttagcttttaatggatcactttataggatgtagaattcaaggttgcaagtttattttcttttgttttgttcaagtgttaaatattctactccactcccttcttgtttgcatggttttcgacaagaagtttgatgtaattc

SEQ ID NO: 338086 - DNA, 589 bp, Homo sapiens
agtttgcaatatatatttacaaccaaattaagtccactctcaaatactaccataatacttcataggtggtacaggtacctttaacagtgtaccccaatcactccttcctgtcccttttaactttgttgttgttcattttccttatgtatatactataatcacttaatgcactgttgttattattagtactttgaataaacagctacctattcagtcaattaagaataagaataatataaaatttaattttataatcacttattcctcctttgatgctttcctttctttatgtagatccaagcttctgagtagtattatattctttctccctgaagaacttcttttaaaatgtctcagggttacatctactggcaataaatttccttagtttttgtttgagaaggtccttatttctccttagcttttaatggatcactttataggatgtagaattcaaggttgcaagtttrttttcttttgttttgttcaagtgttaaatattctactccactcccttcttgtttgcatggttttcgacaagaagtttgatgtaattcttatcttttttcatatatctgttaggtgtttt

SEQ ID NO: 338087 - DNA, 520 bp, Homo sapiens
ttcacatctcaagagaaaagccttaaggttgataaccaggagaactttgacatggtggccagtcgtctgctttgcccaggactgcggggcttcctgagacatgagactttctcaaaactgagaaagtctgggacaaaacaagaagatttggtcactttcaaactggactgtggagttgaggaagagctcatgacaccagtatctgagccatgacataacgctacccagtcatcatgctagagtctgtttactctccaaatcccctgagctataacgtgagtcattctcctctcttcaaagttctaattcatcctaccatcagctgatgackagctccctatttcactgagaaaataacacaataagaagagagcaggcacagaacttccataagcctcctcaaccatatctgagccacgtgctctgcattccttcctgtggccgaggagaaactccctgtggcccccacacttgactgttgtctactattgcctctccccagtgaggaacacatacctgt

SEQ ID NO: 338088 - DNA, 562 bp, Homo sapiens
gctgttcacatcccctgtgttacttttaaagttgccttcagtctccaacatagtcatggcttcttaaaggaggaagtgaagaggtgacggatgggcgctctgtcaacaatattccaaagctgctgtattartcaggcctctctcagaaacagaaccatctgtctcctaatatctcctgttggtctgtttcctggaggtccctgactaacttgactaacgcagcaagtttggaagatagatagatagatagatagatagatagatagatagatagatagttaaaattagttcacaaggctgtggaggctgacagggccaagatctacaattagtaggcttgaaaccaaggaagagtcaatgtttcagttcaagcctgaatacaggaaaagatacccatctcaacagtcaggcaggagttgtccctcctactcagcctttttgttccatttggaccctcaatgtgttggatgatggccactcaaatcggtgacagtggatcatgtactttactcattctatggattcaaatacttatcttagccagaaacacactcacagacat

SEQ ID NO: 338089 - DNA, 562 bp, Homo sapiens
gctgttcacatcccctgtgttacttttaaagttgccttcagtctccaacatagtcatggcttcttaaaggaggaagtgaagaggtgacggatgggcgctctgtcaacaatattccaaagctgctgtattagtcaggcctctctcagaaacagaaccatctgtctcctaatatctcctgttggtctgtttcctggaggtccctgactaacttgactaacgcagcaagtttggaagatagatagatagatagatagatagatagatagatagatagatagttaaaattagttcacaargctgtggaggctgacagggccaagatctacaattagtaggcttgaaaccaaggaagagtcaatgtttcagttcaagcctgaatacaggaaaagatacccatctcaacagtcaggcaggagttgtccctcctactcagcctttttgttccatttggaccctcaatgtgttggatgatggccactcaaatcggtgacagtggatcatgtactttactcattctatggattcaaatacttatcttagccagaaacacactcacagacat

SEQ ID NO: 338090 - DNA, 574 bp, Homo sapiens
cattgggtctatttgcatgttgtttgggtctattaaatgtgatgcagaagtaaatgtgactccacctgagttgttctcattgaatgtgacacaggctcatcctgagtgtatttatttcgagtaccaccaactgacagggaggaaatgttagtcctcagaatgcctcatctgtaggggaaaacactkgattatctacttggcttggagcttatgtctccaaagacattcctaacctttccatgcttccaagtgcttggctaatctctctcctttttctaagatactttccccacagtttccttcagacactcttctttctgggtttgagtgtgaagactcatatgtgactctatacagtgccaatgtctctctgcttcttgatctttaagcattttagggatacccacctctaggagagctcttaccaccagtgtgtgctttaacccgaggattgagttctgggactgtggcacgtgcatttttgtagctctaacataaggccaggcatagagtaggttgaaataaaataaaataaggaattaatgcaggtatatgtgtaaattgaaagaaaact

SEQ ID NO: 338091 - DNA, 574 bp, Homo sapiens
cattgggtctatttgcatgttgtttgggtctattaaatgtgatgcagaagtaaatgtgactccacctgagttgttctcattgaatgtgacacaggctcatcctgagtgtatttatttcgagtaccaccaactgacagggaggaaatgttagtcctcagaatgcctcatctgtaggggaaaacacttgattatctacttggcttggagcttatgtctccaaagacattcctaacctttccatgcttccaagtgcttggctaatctctctcctttttctaagatactttccccacagtttccttcagacactcttctttctgggtttgagtgtgaagactcatrtgtgactctatacagtgccaatgtctctctgcttcttgatctttaagcattttagggatacccacctctaggagagctcttaccaccagtgtgtgctttaacccgaggattgagttctgggactgtggcacgtgcatttttgtagctctaacataaggccaggcatagagtaggttgaaataaaataaaataaggaattaatgcaggtatatgtgtaaattgaaagaaaact

SEQ ID NO: 338092 - DNA, 584 bp, Homo sapiens
cttgtcagaaacacagtctcccagtactcaccctggaccttctgaaatagtgtctgcattgcatgaggtccccatgatccacgtagacattagagcaggaagaggcttgctcaggaagtcaagggatgcaagaaccctctasggcctctctgtctgtagggagatgagctgattgaacccagccaacccacagtgcaggctcagcattagtaaattaaactcactgcaacttctgcacttcagatgtgcaggtgagaaatagggctttcctaatacactcagacaagttcaaactcttgggaatatacttgagataaaaatatcaaagcttaaagtataataataataaaattaaaaaatatcaaagcataggttagcctggatctcagcacacattgtgctacctacagtgaggctcttcctttcctttatgtcccactccatgcacactctagctgatattataagactagagatgcaaaacaagtaaaaaaaaatgaagagtcaacatatttttgagtcaatatttgtgatggaaatttagatggaaaatgctaggcatggtagttcatgcctgtaattcc

SEQ ID NO: 338093 - DNA, 584 bp, Homo sapiens
cttgtcagaaacacagtctcccagtactcaccctggaccttctgaaatagtgtctgcattgcatgaggtccccatgatccacgtagacattagagcaggaagaggcttgctcaggaagtcaagggatgcaagaaccctctacggcctctctgtctgtagggagatgagctgattgaacccagccaacccacagtgcaggctcagcattagtaaattaaactcactgcaacttctgcacttcagatgtgcaggtgagaaatagggctttcctaatacactcagacaagttcaaactcttgggaawatacttgagataaaaatatcaaagcttaaagtataataataataaaattaaaaaatatcaaagcataggttagcctggatctcagcacacattgtgctacctacagtgaggctcttcctttcctttatgtcccactccatgcacactctagctgatattataagactagagatgcaaaacaagtaaaaaaaaatgaagagtcaacatatttttgagtcaatatttgtgatggaaatttagatggaaaatgctaggcatggtagttcatgcctgtaattcc

SEQ ID NO: 338094 - DNA, 622 bp, Homo sapiens
ccatacaagtaagaaaaaaagaaaacatgggtaatttttgtaactttaatttgagtaggaggatgttttccttaaatgtataattccctaaaataaaatgcatactgtcatttttttcttccagtgtagcagaaaaaggggagaaagagagagtgtctgtgtacagatatttttagagatattcaaagggtaggagacaagaaactacagaaaaatggacaaggtgcattaaacagacaattccctgaaaaggaaatccaaatgccacttgaagctctgctagatgacctaacctggctcatagttaaacaactgaaacaaggacaaaatattgtgctcctcctctcagactgcagacaccaatatgtttagtaatggacttttcttttgaagttattgggaaacaggaacctcggatataaacgttyggttgtgagcgttcactgcacacctatttgcagttgatttggcagtgctggcagtttcatccaacatgaaattctagccatgtggaaaacaagcgtgcatcccctttatcatttcacttttagtgagttgagctgcatacgtacacataggtgctcacacacgtgtacagatgtgtgcacattcatcgaattca

SEQ ID NO: 338095 - DNA, 622 bp, Homo sapiens
ccatacaagtaagaaaaaaagaaaacatgggtaatttttgtaactttaatttgagtaggaggatgttttccttaaatgtataattccctaaaataaaatgcatactgtcatttttttcttccagtgtagcagaaaaaggggagaaagagagagtgtctgtgtacagatatttttagagatattcaaagggtaggagacaagaaactacagaaaaatggacaaggtgcattaaacagacaattccctgaaaaggaaatccaaatgccacttgaagctctgctagatgacctaacctggctcatagttaaacaactgaaacaaggacaaaatattgtgctcctcctctcagactgcagacaccaatatgtttagtaatggacttttcttttgaagttattgggaaacaggaacctcggatataaacgtttggttgtgagcgttcactgcacacctatttgcagttgatttggcagtgctggcagtttcatccaacatgaaattctagccatgtggaaaacaagcgtgcatcccctttatcatttcacttttagtgagttgagctrcatacgtacacataggtgctcacacacgtgtacagatgtgtgcacattcatcgaattca

SEQ ID NO: 338096 - DNA, 366 bp, Homo sapiens
ccagtgaaaagtttaatgttcttcaaggagaggtgccacatcatgaaaaggccaattctatctagcttaattgtcatatttaacrcactctcagtgacaaccaccacaactaccaccacaaaaaatgagcagcacactttaaacttcactaagcaaaagtaatccagaagagttagaatcctgaaaagcaggagagagctatacagaagtaccaggcttactaggtagtcaaaaatgctgtaaagatggtaatttaaatagattaatgttcacatatgaaaagacctacaaaatagtggaactgaagtctagaaatagatacatatgaaaatgtattatgtggtaaaatcagtatatcagatctgt

SEQ ID NO: 338097 - DNA, 522 bp, Homo sapiens
ctgtggttggtggacttgattattagagaactctttgtaattatgaatgctgcaaatattttcttggcttgccacgtgatttttggcttaatttatgttgtgctccagctaaggtgctttcctcatggattgaaccctggatgttctgatgcttgctgtgataacagagaraagaagtgaggcaggtttctgaactatttcacccagagctaccttcttcaatgtgaagtcaacagctacatgagcccagattgagaagtgctgtaagtgtgaaccataaaccagattttaatgatatggcacaaaaagaataaaatatttcaatattttaatactgattacatgttgaaattatatattggatatattgaattaaaattttatgagaaactttttttcttttgtcatctttttaaaaatagggctaataaaaatttacatttccatttagaattctatactttgtgtttccactggtcgctgagctagagactgagtctgtcaccataaatcaaaaggctt

SEQ ID NO: 338098 - DNA, 559 bp, Homo sapiens
gctgtctaaatgtaatgtggatgagatcttggactagaaaaaagacattagaaaaaaatacagaaatctggataaagtatggattttagttaataataatgatatatacatattagtttactaaacacattagagagatgtccaaggttttttaaagttaaaagtacataatacratacattcttataaaattcactgtgctttaatactcaacaaaaagcaggaaaacttagattgtatttttcattttagtacgttgttacaatctgaaaattaggaccacttattccaaaggacatttttttttctttgtaatgaattcatgtcatgattcagtgagcaggtatgtattgagctcatactgtatactaggcattctgccagtttactggagatacttggcagaaaaggtcagactgtatatgaataatttcaatacaaattagagatgccatatctaagggagcagggaggccacaagacaggcatagattaatgttatgaattttagaggaaatactagtaaaaatcctcatggcacaaagaacattaaagctga

SEQ ID NO: 338099 - DNA, 553 bp, Homo sapiens
ttctaattggattggtttttgtttggtttcgttgtgttttgtttactgctgagttttgagagttctttatgtattctagatactagtcctttgtcagatacgtagtttgcaacagtgtttcacagagcaaaagtttttaattttgatgaggtccaactgatcaacttttcttttatggataacgcttttggtgtcaagttgattaactctgcttagccctagattctgaagtttttttctatttctgttttgtgaaagtgtgatagtgttagctttgaatttaagtctgggttccatttagagaaaatttttgcatatagtggaaacttaggcccctgccgatagcaactgatattgattattgcaagtttagataggaattgacrttaatactgggtagagcaattctctgactctatttttattcaaaatagtgtttactgttttatatctaagtctacacaaaagtatcctggaattttaacagggacttaattaaccctgtagattgcattaggatcagtgatatatttagtatgttaatattccaatt

SEQ ID NO: 338100 - DNA, 566 bp, Homo sapiens
ttctcttgctggctttttcctctcggcaggaaacacaaatgccagtttttctcccatttcacatttaatttatcccattttttattcattatttactccataatacatgtttttattcattacttacatttgaaaaatattgaagaaggactctggttattctcattcccttgggtaaattttacctacccttctattcaaaacaattaatttgaaaaattyggttctgattatgttacttaaaaaaaaaatcctgcagtctcctttcctctagtattccttgtctgacatcaaggctctttctaatcttaccactacttttctgtccaaacatgttttattttttattggtctataacacatactctaaatcaagtatgaataagttagtttgtcaatacttgttattgctcctaatgatacagactttactcatccttttctctccaagggcatttctagtaatatgtattgatgttgactttgagccacatcctaccttgaggagacccagaacccagtaggatatataaacaagaaaacaactaatcacaactcaatatcaa

SEQ ID NO: 338101 - DNA, 599 bp, Homo sapiens
cagggtaagggtggattctggctaaaccaatagcagaattcttgctaaagacaggcccaggtaatcggatatcacctggggaaaggtggcagatgaggaacctgaaaaaccatcaataatgaggggttcttgctaaactaagacagcaaggttttgctaaaactgtattttataaggaagtgcacagttgggcccacaagaaggttcagaaacctggctaatgtttggtcaagcagagaatctttgtcagagcctccacagagcatctgtgtgagagtgaagatgaagaggagggaatcatagtcaaatctttgggagacaagatgaacgggacctgcagtgaagatggggaatcagaaatgtgcacctgtagagatggtgagggagccatgcagacagataacaactaaaggtaaacagcttgcaaagaagctgagttcagtgcggggcctgttgagtctgaggtttttgtgagagctccaagtgtagatagccagtagccagttgaatatggagatagtgccraagagagaggtgtgaaggaaagatactgattgagaattactataaactagaggtcaaagctaataaacagccca

SEQ ID NO: 338102 - DNA, 571 bp, Homo sapiens
atgctggctcttctcacattatgcccatgccttatgctactgctgtctaggggagccatacattaaatgtgctgaattgctgtttcacatggtttacatgtgactaaaatatttgctggagttttaaattggtgtgtaagaatgtggtggtaatgtttgagaaattgattggcatctttaataagatggaaatgcaggactgtttctctctcttaaaataatggtgtataagtatcttgtatctgagaattytaagacattattgctaaggaattgcgtgtgattcaccagggaatgctgtttagggtgctgagcgtcataatgtgaagcaacatcaaaatcagcttaggtaatcaaaaaggctttgcaggggcagtgttgatttaaaaaaaaaaaaagaagaagaagaaaaaaaaagccaaactctgtaaaatatttgaatagatttattccaagccaagtatgaggaccatgacccatgacacagcctcaggggattctgagaacatgtgcccaaagtgattgggtcacagcttgattttattcattttagggggacagaagttacagg

SEQ ID NO: 338103 - DNA, 565 bp, Homo sapiens
gggcaggactcaaagaaaaaatcaagggaaatatagcattttccaccacaaaaatatttagaacatagctatttgataccctgactgttctraagttgtttttttcaggaggacattaaagcactatatgttatcaaattgttttgtaaaagtgtgttgcaatctcagagaatattgtaatattagcttacaaattgtcacagagcagtcatcatacacttaaaatttttttgcctttcttcaaagttctacccagaggaagaacacttcaaacacatttcacttcatggcatttcttctgtcttttcatttgtttgcgtctcagcttacttaggatgtttaacatcttggaatcataaaccttaacataaccaatgcataaaagtcgcagccactgacccagtgtggagagcaagtgaactgtgctgccagctgtggcccccgcccatgctgccttcatgcttcaggtacctccagacctcactacagtactgacacagtatcccagctctgtgctgctttctcaggctgcagccacagggggagtatgaacacacaaacatgc

SEQ ID NO: 338104 - DNA, 565 bp, Homo sapiens
gggcaggactcaaagaaaaaatcaagggaaatatagcattttccaccacaaaaatatttagaacatagctatttgataccctgactgttctaaagttgtttttttcaggaggacattaaagcactatatgttatcaaattgttttgtaaaagtgtgttgcaatctcagagaatattgtaatattagcttacaaattgtcacagagcagtcatcatacacttaaaatttttttgcctttcttcaaagttctaccyagaggaagaacacttcaaacacatttcacttcatggcatttcttctgtcttttcatttgtttgcgtctcagcttacttaggatgtttaacatcttggaatcataaaccttaacataaccaatgcataaaagtcgcagccactgacccagtgtggagagcaagtgaactgtgctgccagctgtggcccccgcccatgctgccttcatgcttcaggtacctccagacctcactacagtactgacacagtatcccagctctgtgctgctttctcaggctgcagccacagggggagtatgaacacacaaacatgc

SEQ ID NO: 338105 - DNA, 565 bp, Homo sapiens
gggcaggactcaaagaaaaaatcaagggaaatatagcattttccaccacaaaaatatttagaacatagctatttgataccctgactgttctaaagttgtttttttcaggaggacattaaagcactatatgttatcaaattgttttgtaaaagtgtgttgcaatctcagagaatattgtaatattagcttacaaattgtcacagagcagtcatcatacacttaaaatttttttgcctttcttcaaagttctacccagaggaagaacacttcaaacacatttcacttcatggcatttcttctgtcttttcatttgtttgcrtctcagcttacttaggatgtttaacatcttggaatcataaaccttaacataaccaatgcataaaagtcgcagccactgacccagtgtggagagcaagtgaactgtgctgccagctgtggcccccgcccatgctgccttcatgcttcaggtacctccagacctcactacagtactgacacagtatcccagctctgtgctgctttctcaggctgcagccacagggggagtatgaacacacaaacatgc

SEQ ID NO: 338106 - DNA, 526 bp, Homo sapiens
agacaacatgatgtggtggccgcggagaagaggggaacacatgaggaagaggctgaatgccacaggagtggggaggaggtggtggtggcttcttcaygacacccctgttctgaggaccttagagtgaatggaagtgggttgactgagccagtcccatttggtctgagtttaacttgcagttatgacctgggtcttcagaagtcttccatactacttagtaaataagctgcccactcactcctatgcaggctgaagcattgtgattgctggtttgttttcagaaaatatatgtcacttaagacagtctaagctaaacaagtaaaaagttcatatgaccatgacccaaataaccaaagcatagagcaattagcgactctaaaccattttcagaaaatcatcctctggaaagacaatcacgtatcaagaacaaagttgcaagatgtccttgggctcaagtgtgaagaccactatacacctgaatggccagatggctgtgagtgttcactgaaggacccgtttccccagt

SEQ ID NO: 338107 - DNA, 526 bp, Homo sapiens
agacaacatgatgtggtggccgcggagaagaggggaacacatgaggaagaggctgaatgccacaggagtggggaggaggtggtggtggcttcttcatgacacccctgttctgaggaccttagagtgaatggaagtgggttgactgagccagtcccatttggtctgagyttaacttgcagttatgacctgggtcttcagaagtcttccatactacttagtaaataagctgcccactcactcctatgcaggctgaagcattgtgattgctggtttgttttcagaaaatatatgtcacttaagacagtctaagctaaacaagtaaaaagttcatatgaccatgacccaaataaccaaagcatagagcaattagcgactctaaaccattttcagaaaatcatcctctggaaagacaatcacgtatcaagaacaaagttgcaagatgtccttgggctcaagtgtgaagaccactatacacctgaatggccagatggctgtgagtgttcactgaaggacccgtttccccagt

SEQ ID NO: 338108 - DNA, 525 bp, Homo sapiens
gaaaaaaccaaagagggacagaaaaggggagtatggagggatagagagagaaggagagaagaaagattgattaaatgtgaatctttsaatataaatcttagcaacaaatagtattttatctgcataatatttaaaattaaaaatgatctatgtaagaaacatgcagatgccaatcaaataccaggatcattcttttcaagaaatatgtttctgtatgatttctctgttagctatggtaatacgttaatatgttatatttaaatttttgctttcacacttatttccttaccttttagacctctaattagcagagcatctggtaattaaattcacacttgcatcattcaacgattcttcaaagcaactggtacacattcatgttggccagtgtccagagttgaagaagaggtggacatctgtagaactcctggtgccagaagggaatataattgaattaacatgtttcctttctcccaatttcaaaggtgcattgttcactactaatttttcctgtgttttttaaag

SEQ ID NO: 338109 - DNA, 311 bp, Homo sapiens
gattaaatgtgaatctttgaatataaatcttascaacaaatagtattttatctgcataatatttaaaattaaaaatgatctatgtaagaaacatgcagatgccaatcaaataccaggatcattcttttcaagaaatatgtttctgtatgatttctctgttagctatggtaatacgttaatatgttatatttaaatttttgctttcacacttatttccttaccttttagacctctaattagcagagcatctggtaattaaattcacacttgcatcattcaacgattcttcaaagcaactggtacacattcat

SEQ ID NO: 338110 - DNA, 525 bp, Homo sapiens
gaaaaaaccaaagagggacagaaaaggggagtatggagggatagagagagaaggagagaagaaagattgattaaatgtgaatctttgaatataaatcttagcaacaaatagtattttatctgcataatatttaaaattaaaaatgatctatgtaagaaacatgcagatgccaatcaaataccaggatcattcttttcaaraaatatgtttctgtatgatttctctgttagctatggtaatacgttaatatgttatatttaaatttttgctttcacacttatttccttaccttttagacctctaattagcagagcatctggtaattaaattcacacttgcatcattcaacgattcttcaaagcaactggtacacattcatgttggccagtgtccagagttgaagaagaggtggacatctgtagaactcctggtgccagaagggaatataattgaattaacatgtttcctttctcccaatttcaaaggtgcattgttcactactaatttttcctgtgttttttaaag

SEQ ID NO: 338111 - DNA, 529 bp, Homo sapiens
cttagcaacaaatagtattttatctgcataatatttaaaattaaaaatgatctatgtaagaaacatgcagatgccaatcaaataccaggatcattcttttcaagaaatatgtttctgtatgatttctctgttagctatggtaatacrttaatatgttatatttaaatttttgctttcacacttatttccttaccttttagacctctaattagcagagcatctggtaattaaattcacacttgcatcattcaacgattcttcaaagcaactggtacacattcatgttggccagtgtccagagttgaagaagaggtggacatctgtagaactcctggtgccagaagggaatataattgaattaacatgtttcctttctcccaatttcaaaggtgcattgttcactactaatttttcctgtgttttttaaaggttatgtctgcttaaaattggaggagttgatacaatgcagaactgtcttaattttgataatgaataaagtattaaataatagaagggaattaatacaatt

SEQ ID NO: 338112 - DNA, 525 bp, Homo sapiens
gaaaaaaccaaagagggacagaaaaggggagtatggagggatagagagagaaggagagaagaaagattgattaaatgtgaatctttgaatataaatcttagcaacaaatagtattttatctgcataatatttaaaattaaaaatgatctatgtaagaaacatgcagatgccaatcaaataccaggatcattcttttcaagaaatatgtttctgtatgatttctctgttagctatggtaatacgttaatatgttatatttaaawttttgctttcacacttatttccttaccttttagacctctaattagcagagcatctggtaattaaattcacacttgcatcattcaacgattcttcaaagcaactggtacacattcatgttggccagtgtccagagttgaagaagaggtggacatctgtagaactcctggtgccagaagggaatataattgaattaacatgtttcctttctcccaatttcaaaggtgcattgttcactactaatttttcctgtgttttttaaag

SEQ ID NO: 338113 - DNA, 598 bp, Homo sapiens
atctatatactggcaccttctgtccttagaatgtggcttttatcttctaatctgcctcataatacaagatggctactggagcttcagccatttcagcaacatcttagataggaagaagaggtaagggcaaaatattacatgtcccagctaggttaggccctttgagaaaagttcctgaaagccccaactaatgacatccctcacactcagctggaagaggtgagaaaatgttgctgtttagttaagacattgctacctgaaataaatgggggattatgttcattgagaagaaaaggaaaaatagaaattatggagcagcaaatggtctcagctatgattgtaagccatcatcccaaactctgtttatcagaaatgataaaaygtatcttgtaagtttaagaaggcttcccaaattcatgctgatatcctgttgatcactgagccacatgacagtaattgatctgccacaggtagagcaaattgtgaaatgcagatgaaagacaattgaactggatcacctaaaggatgggttactaggccctcctctgctatcgagtagcagcataccagaagagacagtcatctctctgcctggacc

SEQ ID NO: 338114 - DNA, 602 bp, Homo sapiens
actatctgtgtagtgaacacatctaccatcacatccatatggatcaattctgtgattattgattgacatgcttatcacctgaaaggcagtgaaagctatgtgaggacagaggctgtgttttattcattgctctacatagagcagaaactgcagtactgggcacaaactagtgttgatgaacattccaaagataagtgaaaaatcagagtactgtgcaaatctgtgcaaatcagagtactgattttttttttaacagcatgcctgaagggaccaggtaaacaataacaacagctcagtaacttgcagggaacacagcacctcctgagtttctcaaaccatggacaggggagagagactcctcttggtacctggaagctgttgaagaagggccccttactgtggacgtctgcccacccaaccaaattctcaagagaaratatgagttgccgctggtgtcctgggataccattcctccctttcaccattgctgagttgtaaggcaaaccttactctacacacaccacaaggcacaacactctccgctcaagtctctgtctcatagagtgttcagtgacaatcaataatgtagcttcctcccagcc

SEQ ID NO: 338115 - DNA, 606 bp, Homo sapiens
tgcacggagctgatgcctgctggctctaatcaattagaactccccttgggaagcctgctgggataatgccttggactccaatgaacactttggcccgtaggtcccttgttctctctcttgttccccatccactgtttgaacgtttgtttccctgttggctcctcctttcccactggccctgtgaagcatgctgccttcttctctctgggatctgtaagaaactgcttctgtgatttcatggattttgttgagttgcctcctctttctcatctgatccatagaccagmgaataacttctctcctgggcagggctttcctagacattggctatcttagtaggaataaactgaacacaggtgagacatgatccacaagggcagtaaaaatcagtttctgtgaaagtgatagctggtcacaagtgacacttaggtatcagcccatccacaaggataaagaagtatcttatgagaggcacactgcaaacatctatcaccaaattcctgaatcagggaagtgctagagtttatcgcactcatgtgagagagacctgaagactaaattagaaagaaagaaagaaaaaaacaacacacacacaacagaagcaca

SEQ ID NO: 338116 - DNA, 606 bp, Homo sapiens
tgcacggagctgatgcctgctggctctaatcaattagaactccccttgggaagcctgctgggataatgccttggactccaatgaacactttggcccgtaggtcccttgttctctctcttgttccccatccactgtttgaacgtttgtttccctgttggctcctcctttcccactggccctgtgaagcatgctgccttcttctctctgggatctgtaagaaactgcttctgtgatttcatggattttgttgagttgcctcctctttctcatctgatccatagaccagagmataacttctctcctgggcagggctttcctagacattggctatcttagtaggaataaactgaacacaggtgagacatgatccacaagggcagtaaaaatcagtttctgtgaaagtgatagctggtcacaagtgacacttaggtatcagcccatccacaaggataaagaagtatcttatgagaggcacactgcaaacatctatcaccaaattcctgaatcagggaagtgctagagtttatcgcactcatgtgagagagacctgaagactaaattagaaagaaagaaagaaaaaaacaacacacacacaacagaagcaca

SEQ ID NO: 338117 - DNA, 606 bp, Homo sapiens
tgcacggagctgatgcctgctggctctaatcaattagaactccccttgggaagcctgctgggataatgccttggactccaatgaacactttggcccgtaggtcccttgttctctctcttgttccccatccactgtttgaacgtttgtttccctgttggctcctcctttcccactggccctgtgaagcatgctgccttcttctctctgggatctgtaagaaactgcttctgtgatttcatggattttgttgagttgcctcctctttctcatctgatccatagaccagagaataacttctctcctgggcagggctttcctagacattggctatcttagtaggaataaactgaacacaggtgagacatgatccacaagggcagtaaaaatcagtttctgtgaaagtgatagctggtcacaagtgacacttaggtatcagcccatccacaaggataaagaagtatcttatgaraggcacactgcaaacatctatcaccaaattcctgaatcagggaagtgctagagtttatcgcactcatgtgagagagacctgaagactaaattagaaagaaagaaagaaaaaaacaacacacacacaacagaagcaca

SEQ ID NO: 338118 - DNA, 533 bp, Homo sapiens
ttcattgagtaaagcctttacgcttctgactacttttaaaaatatcttcagttatagaattatttaaattgaaaaaaggtatcatttttatacttaagcttgttgaaggtattaaagaaataattgaagaataatgtatcactctaagtatcaacaatagtagtaaaagggacaacattacctataaacagaaaaagaaattttgacacaaagtggacaattattacagcatttgctgagcctacctttgaaatggatttcacaccttaagaattctttgctttttcatggatgtgactaatactcttccagcctggaaataaggagacyatcatgtgcaatgttgaggataaagtgaattaaagtcgatgtggatgctttctttttggcaatgggcaacatttttaaaagttgaataagagatgcaattgaaatcccaaagaatggaaaagcaacttatgtcatagaaggtggtattatgctcctcaacaaatcaaatctgaaaagcggttttcagaaagggtaactttatg

SEQ ID NO: 338119 - DNA, 533 bp, Homo sapiens
ttcattgagtaaagcctttacgcttctgactacttttaaaaatatcttcagttatagaattatttaaattgaaaaaaggtatcatttttatacttaagcttgttgaaggtattaaagaaataattgaagaataatgtatcactctaagtatcaacaatagtagtaaaagggacaacattacctataaacagaaaaagaaattttgacacaaagtggacaattattacagcatttgctgagcctacctttgaaatggatttcacaccttaagaattctttgctttttcatggatgtgactaatactcttccagcctggaaataaggagactatcatgtgcaatgttgaggataaagtgaatwaaagtcgatgtggatgctttctttttggcaatgggcaacatttttaaaagttgaataagagatgcaattgaaatcccaaagaatggaaaagcaacttatgtcatagaaggtggtattatgctcctcaacaaatcaaatctgaaaagcggttttcagaaagggtaactttatg

SEQ ID NO: 338120 - DNA, 544 bp, Homo sapiens
gcaagaattaaacagttctttgtagttctcattcagaactctcaatctcataaaaagggattaagacctagatgaggaaagtgacctccccaggacccccagaaaggtagctgtgggtcatcagaagacagctttgagactcctggtacacaactctttagtctgctaggtggacttgtcagctcctcttagggcagagatgatagtctggttgtggaagagaacagtgaagtgtccctcacttggagccgaccctgaattctggcttgaaggatcttgcaagttgtttaattgggatagtcacagacagcctctgcgtgcctgagatgagtggtctcgacctgaggagcaaaaaggcaaatagtgctccagaacaagttagctctttttaagaagccaaagttaaaattcttgtaatcctttttggcttggaaatggaaaaaaaaaatacaatcaggaaaatgagaattagatttgcaaacgatattttaataaaaayaggataatacaaaaatctcattttaaaatttgtttaaaatgtatc

SEQ ID NO: 338121 - DNA, 642 bp, Homo sapiens
gtataattttttgttaggaaatctaaaacatcgaagtgaatgtgtagtcactgaatgcaatcagcagctttctggggctgggacaagttgggtgatggacagtaaaggggaaatttctgaggtgatgggaatgctctatgtcttaatttttgtcacagtttcaccactgtaatatttgtcaagtttcatccaactgaacagttaaaagcagagcatttacagtcatgctggaatcctcagtaacattgttgacaagtccagcttggacagattcctttgagttgtttacatggagactggtgggcagcttccagccacactggccagtgctcctacttctataccactcttttmttcaacttacatataaatagtcatgtactgcataacaacattttagtcaattatggactatattatagtggccccagaagatgataatactgaatttttactgtactctttctatgtttagataaacaaatgcttcccatcgtgttacaactgcctacaatattcagtatagtcatatgctgtacaggttcgtggcctaagagcaataggctataccatatagcccaggtgtgtagtaggctctaccatctaggtttgtataagtataccctgtcatgtttgcacaat

SEQ ID NO: 338122 - DNA, 669 bp, Homo sapiens
attttcttgctctgtcaggtcaaagtgcctgcaagcaactataccccagcaccagcaagcacaggcacccagatcttggtgtctaacatcattctctcatgaaaggagccaggggttctcagaaaaattgctgattctaggactggaacaggaagtatacgagatgatcccgaagtatcttactgtgccaaaaagcgagcaagtgctgaaaataaaacccaaaacaaacatgttgggggcatgtcaaaggaacacagaaaccaactggaaaaggtctcaatggccaaaactgaaacaatttgaaaaacaaaaagtaacattggatgataattcaaaatatgaaataaataaacatgagtccatactgatcaaaataaaacattgaataaataaataaatgggggtgaagagaaaaatgtcctaggcgggagcattccgaataatttatgtagaaactctggcctctagaagatggagtaaactcttcaccccttaagtgttgattgttgatagtgtcttccatccaaagagtacagtatgaaaagaaaacaagtaacttgacagtrgagaaatatcaccaacataacctcagccagagatcagggtcaacattaacagggcgaagtcatgctgacagtgcttacccttgacaggatgtgatgaaaatgg

SEQ ID NO: 338123 - DNA, 584 bp, Homo sapiens
agttctttatgcatgtggatcttctgtgatttcttccatccacatgttgtagttttctgcatctatctatatatatatccatatatagatatatattgttcatgtttgcctagatatgcacatatttatttttgagtgatktaaaatagtacggtattttaaattttgacatctacatgctcattggaagtatacagaagtacaattggtttttgtatgtttatcttccattatgtggcattcttgaacctattagttctaggaatttttttgcaaagtccatgggatattctatgcagacaaccatggcatttgcaaataagggcagttttatttatttatttcagatatttttcttttatttcttttctgtcttacactaactaaaattttcagtactgtgttgaacaagtatgtagcaagcagacacctttgctttgtttctaatcttagagggggaagcattcactctttcctcattaaccacaatgttagccatagttttttgcatagaatctttataaagtcagaaaagttcaagtttttcatttctaacttgctgagctattttcatttctaacttg

SEQ ID NO: 338124 - DNA, 584 bp, Homo sapiens
agttctttatgcatgtggatcttctgtgatttcttccatccacatgttgtagttttctgcatctatctatatatatatccatatatagatatatattgttcatgtttgcctagatatgcacatatttatttttgagtgatgtaaaatagtacggtattttaaattttgacatctacatgctcattggaagtatacagaagtacaattggtttttgtatgtttatcttccattatgtggcattcttgaacctattagttctargaatttttttgcaaagtccatgggatattctatgcagacaaccatggcatttgcaaataagggcagttttatttatttatttcagatatttttcttttatttcttttctgtcttacactaactaaaattttcagtactgtgttgaacaagtatgtagcaagcagacacctttgctttgtttctaatcttagagggggaagcattcactctttcctcattaaccacaatgttagccatagttttttgcatagaatctttataaagtcagaaaagttcaagtttttcatttctaacttgctgagctattttcatttctaacttg

SEQ ID NO: 338125 - DNA, 464 bp, Homo sapiens
tagtaggtaaggggaaccccttagctagttmcagaaagatggtggaaggaactcatctcatagtacgttgagttgaaggtggtcaattcttttttagtgtcctttttttttttttttttttttttgagacagggtctcactccatggcccaggctggaaggtagtggtgctatcacggttcactgcagcctcaaacttccagggtcacttacacctcccgagtagctgggaccacaggcgcacacttccatgcccagctaatttttgtattttcttgtagagacagggtttcactattttgcccaggctggtcttgaactcctgaactcaagggatccacccaccttggcctcctaaagtgctgggattacaggcgtgggccaccatgcccggccaaaagtagacagttcttgaccccaggtaatgagcactttgtcatgagccccctcccatcctgaagcttg

SEQ ID NO: 338126 - DNA, 591 bp, Homo sapiens
tccaggtagaaggcccagggcagagtgcaagcgggagccctagaaagatgacccctcccaccctccacccaccaccgcatgcccagatgtaggggtaccgtgcgtgttgtcggagttgccataactggagtagccaccgccgccacctcctgttagacagagaaggtagagttgarggatgttcaggtgtctgagcgtggggtttcctgcaggtgttggtctgtccagctcattgggaatggcaacaagtcgtgtgaacgtgtcactgccaagagagctccaaagagtgaccagcaggggagagtcaagggtggccccaccaaagcttcctcttccccgtgggaaaactcatgccaacactgagctctagctatcaaaaacactttgccgtcacgggactaacatttaccctggggactccaaattcacgcaggcgcacccgcttcctgccgagaaactgatatgagatcagccacgccgacgccggattaggaggaccttccagcagatggtctcaatcgtaaatgttctcagtttctcctttcaaaaataactagtaatttttagtttattcctgattgttattgtaat

SEQ ID NO: 338127 - DNA, 591 bp, Homo sapiens
tccaggtagaaggcccagggcagagtgcaagcgggagccctagaaagatgacccctcccaccctccacccaccaccgcatgcccagatgtaggggtaccgtgcgtgttgtcggagttgccataactggagtagccaccgccgccacctcctgttagacagagaaggtagagttgaaggatgttcaggtgtctgagcgtggggtttcctgcaggtgttggtctgtccagctcattgggaatggcaacaagtcgtgtgaacgtgtcactgccaagagagctccaaagagtgaccagcaggggagagtcaagggtggccccaccaaagcttcctcttccccgtgggaaaactcatgccaacactgagctctagctatcaaaaacactttgccgtcacgggactaacatttaccctggggactccaaattcacgcaggcgcacccgcttcctgccgagaaactgatatgagatcagccacgccgacgccggattaggaggaccttccagcagatggtctcaatcgtaaatgttctcagyttctcctttcaaaaataactagtaatttttagtttattcctgattgttattgtaat

SEQ ID NO: 338128 - DNA, 583 bp, Homo sapiens
catctctggggtcttcccaatgttgcccatcaacaattgccttcgttgtctgagggattgttccagaacaccccatcttggagggacgttacacattgttttctagggctcttcctcgttctcaagatacacacttgggaatctaggctagcctgggctcatttgggctagcctgggcaagaacactggttaaggggaatttctgctcatataccacactatccataattaacttccaaccagcttcatttttccttttccttgggtgtgtacgttaaatttgctcatttcctgtgttaaatactccatgttctgatgttcaattgtgaaaggaaaataaatcttgggaccccaaaatcattaagccaagggaaaagtcaagctggaaaaaaaaagttagtcagatctgcctcccattttctttctaaataagatagctacaaaaaaatttttttaagttttttaaaagctacatactgtcctcacaatctgaggaaagtaaactgttttgtttaccctaaaacagttctgtggaatttcaccctggcaatgtacaccracagctcatcttcacaggtgtggg

SEQ ID NO: 338129 - DNA, 502 bp, Homo sapiens
aagctacatttttcaatagcatattgaaattcaagattaaaagtaatttggaaaaaattccagaaatgtacattatgttctcattctgtgagaacgtgtcacaaagcatgtgggcttagcaactacactgaagctaaatagagcttttaggcaagagtcaaattatgaatttatactctagccaattactcaaaagcacttctgtgtccgacytgagagaccacgagatgttttcattgtccatgatctcatttttattttattacttgttatttacaacctaagccacgagggcaagttaaaggtcccagaagagggaataatttcagaaattggaaacacaaggaaaaaggtaataaaatgcacttgctctgactccataatttggaagtaggtgataactgtatctaggaatgtccagcatcaataaaagttcaataatgtcattgagatcagtgaaaattgttttgcttatttaataagacacggtgatttcaaggcc

SEQ ID NO: 338130 - DNA, 409 bp, Homo sapiens
tagtgaggagtaaggaaggcttttgctaataacactacatttcagactgagttaacaattaatcatctacccctgacttttactaaagggtaagtcatctatttcatatggaacaacaaagacactatgcataatttcttaagaaaggaagcccaaaaatgttatatgtcagattttgaagcatttgctttcaacctcaagtttcatttatctcacatgcttaaattactcctaacgcagtgattgtcaaagtgtggtctcctgacsagcagtaacagcatcacctgtgaacttgttacaagtgcaaattctcaggccccattccagaatgaatgaaccaggaactctggtggcagtgctgtaaatttgagttttaacaatctctccaggtaattatatgtacactaac

SEQ ID NO: 338131 - DNA, 478 bp, Homo sapiens
tgttgtggggtggggggagcggggagggatagcattaagagatatacctaatgtaaatgacgagttaatgggtgcagcacaccaacatggcacatgtatacatatataacaaacctgcaygttgtgcacatgtaccctagaacttaaagtataataaatatatataaataaaaaatagaaataaataaaataaaatatttaaagtatctcataggagagtaggcattccacctgcagccaaactagttgcctccacctcttagagacaatacccattcaggtacagagtgaaagatggggccaccacaacatcaatattttcagcacacttcgtgtagggcaaagtcatgtaactacatgtcccatggtccttcatatatgttgcaaaaggtcagtgcccaggacaacagtcccacatccacgaaagtgtgtgaaggaactggctgtgaattaaagaggatatggtgatcctgagagt

SEQ ID NO: 338132 - DNA, 478 bp, Homo sapiens
tgttgtggggtggggggagcggggagggatagcattaagagatatacctaatgtaaatgacgagttaatgggtgcagcacaccaacatggcacatgtatacatatataacaaacctgcacgttgtgcacatgtaccctagaacttaaagtataataaatatatataaataaaaaataraaataaataaaataaaatatttaaagtatctcataggagagtaggcattccacctgcagccaaactagttgcctccacctcttagagacaatacccattcaggtacagagtgaaagatggggccaccacaacatcaatattttcagcacacttcgtgtagggcaaagtcatgtaactacatgtcccatggtccttcatatatgttgcaaaaggtcagtgcccaggacaacagtcccacatccacgaaagtgtgtgaaggaactggctgtgaattaaagaggatatggtgatcctgagagt

SEQ ID NO: 338133 - DNA, 478 bp, Homo sapiens
tgttgtggggtggggggagcggggagggatagcattaagagatatacctaatgtaaatgacgagttaatgggtgcagcacaccaacatggcacatgtatacatatataacaaacctgcacgttgtgcacatgtaccctagaacttaaagtataataaatatatataaataaaaaatagaaataaataaaataaaatatttaaagtatctcataggagagtaggcattccacctgcagccaaactagttgcctccacctcttagagacaatacccattcaggtacagagtgaaagatggggccaccacaacatyaatattttcagcacacttcgtgtagggcaaagtcatgtaactacatgtcccatggtccttcatatatgttgcaaaaggtcagtgcccaggacaacagtcccacatccacgaaagtgtgtgaaggaactggctgtgaattaaagaggatatggtgatcctgagagt

SEQ ID NO: 338134 - DNA, 633 bp, Homo sapiens
acacagggaaataagtcagtcagtaaaaactgtcccagaggatgcccagacagtgtaaacatgaaagaaagattttaaatcaaccattacaaatatggtcaaagaagaaaagaaaacaatatctaaagaattaaagaaaagtttgagaatgatgtttcaccaaataaagaataccagtaaagagatagaaattagattttaaagaaacaactacattttaaagaaacaactacaactaaaataaatattaggatatcaaattcagaaatatgtttttaaaataatgaagtatcacataagtaaagttggtttaacattcggaaatcaatcagtgtaattcaccatattaagagattataggagagaaatcatattatgaacgcaaaagacaggagaaaggctttgacaagattaacakacatttgtgataaaaactcttttcaaactagaataaaaagctttccatatttaataaaggacatctgtaaaatatccactgcatattgtagttaatggttaaaaattaaccaattggacactttcttgcttaagaatggaaacaaggtaagaatgtatgttctcatcgcttctattcaatattgtactaaatagagtaatatttagagaactaaa

SEQ ID NO: 338135 - DNA, 646 bp, Homo sapiens
tccagcagagcatccatgttatattatttaaaatgtccagttttcaacaataaattttgagacatgcaaagtgaaaggaagtatgggccatacacagggaaataagtcagtcagtaaaaactgtcccagaggatgcccagacagtgtaaacatgaaagaaagattttaaatcaaccattacaaatatggtcaaagaagaaaagaaaacaatatctaaagaattaaagaaaagtttgagaatgatgtttcaccaaataaagaataccagtaaagagatagaaattagattttaaagaaacaactacattttaaagaaacaactacaactaaaataaatattaggatatcaaattcagaaatatgtttttaaaataatgaagtatcacataagtaaagttggtttaacattcggaaatcaatcagtgtaattcaccatattaagagattataggagagaaatcatattatgaacgcaaaagacaggagaaaggctttgacaagattaacagacatttgtsataaaaactcttttcaaactagaataaaaagctttccatatttaataaaggacatctgtaaaatatccactgcatattgtagttaatggttaaaaattaaccaattggacactttcttgcttaagaat

SEQ ID NO: 338136 - DNA, 633 bp, Homo sapiens
acacagggaaataagtcagtcagtaaaaactgtcccagaggatgcccagacagtgtaaacatgaaagaaagattttaaatcaaccattacaaatatggtcaaagaagaaaagaaaacaatatctaaagaattaaagaaaagtttgagaatgatgtttcaccaaataaagaataccagtaaagagatagaaattagattttaaagaaacaactacattttaaagaaacaactacaactaaaataaatattaggatatcaaattcagaaatatgtttttaaaataatgaagtatcacataagtaaagttggtttaacattcggaaatcaatcagtgtaattcaccatattaagagattataggagagaaatcatattatgaacgcaaaagacaggagaaaggctttgacaagattaacagacatttgtgataaaaactcttttcaaactagaataaaaagctttccatatttaataaaggacatctgtaaaatatccactgcatattgtasttaatggttaaaaattaaccaattggacactttcttgcttaagaatggaaacaaggtaagaatgtatgttctcatcgcttctattcaatattgtactaaatagagtaatatttagagaactaaa

SEQ ID NO: 338137 - DNA, 633 bp, Homo sapiens
acacagggaaataagtcagtcagtaaaaactgtcccagaggatgcccagacagtgtaaacatgaaagaaagattttaaatcaaccattacaaatatggtcaaagaagaaaagaaaacaatatctaaagaattaaagaaaagtttgagaatgatgtttcaccaaataaagaataccagtaaagagatagaaattagattttaaagaaacaactacattttaaagaaacaactacaactaaaataaatattaggatatcaaattcagaaatatgtttttaaaataatgaagtatcacataagtaaagttggtttaacattcggaaatcaatcagtgtaattcaccatattaagagattataggagagaaatcatattatgaacgcaaaagacaggagaaaggctttgacaagattaacagacatttgtgataaaaactcttttcaaactagaataaaaagctttccatatttaataaaggacatctgtaaaatatccactgcatattgtagttaatggtwaaaaattaaccaattggacactttcttgcttaagaatggaaacaaggtaagaatgtatgttctcatcgcttctattcaatattgtactaaatagagtaatatttagagaactaaa

SEQ ID NO: 338138 - DNA, 633 bp, Homo sapiens
acacagggaaataagtcagtcagtaaaaactgtcccagaggatgcccagacagtgtaaacatgaaagaaagattttaaatcaaccattacaaatatggtcaaagaagaaaagaaaacaatatctaaagaattaaagaaaagtttgagaatgatgtttcaccaaataaagaataccagtaaagagatagaaattagattttaaagaaacaactacattttaaagaaacaactacaactaaaataaatattaggatatcaaattcagaaatatgtttttaaaataatgaagtatcacataagtaaagttggtttaacattcggaaatcaatcagtgtaattcaccatattaagagattataggagagaaatcatattatgaacgcaaaagacaggagaaaggctttgacaagattaacagacatttgtgataaaaactcttttcaaactagaataaaaagctttccatatttaataaaggacatctgtaaaatatccactgcatattgtagttaatggttaaaaattaascaattggacactttcttgcttaagaatggaaacaaggtaagaatgtatgttctcatcgcttctattcaatattgtactaaatagagtaatatttagagaactaaa

SEQ ID NO: 338139 - DNA, 392 bp, Homo sapiens
gatgtatatagggcagaagggcctataatgagtgtagggacgaatgaaggaaagaataagtaggtatgccagggcaacatcacatcgagttgtcgtcttgtggacacacttctggagattatacatttttgctttatcacaaatctatagtgtggggkgaattattaagagccagaaaagagactgtatcagaatataatattagggcccgtggacgttatcttcattttaaccattgtatctagagagcttaaatttgatcattaacattctcctagaacagacattcttgagagagatccagaaagctatgggataatgataattatggtttctccaatttttatactgtcacctcaagaaaagttacaaaacagtaaaaacagtcattg

SEQ ID NO: 338140 - DNA, 625 bp, Homo sapiens
aatattaacatacgttcaactgagaaagttaaaattcagcatattaaaattgtgtaatgaactaatatagtgtatacagaaaaaatattttaaacgattaagcataaaaatgtttaaaatcaataatcttattttaagattctasaagagcaaattagcaaaataaattgaagagagaggcaatcaacacaagaggagaaatctccaatgtctctatcgtctcatccccggggaatcacgccttcccagtgcctacttggtctcacccttggtgcatcatgcctctccagtgcctggactgactaatctctagggattcctgcctccccagtgccttcacagcctcatctctagggaatcctgcctccccagtgcctgcgcggtctcatacctagaggtttgtgcatcctcagtgtctatattctgtgttctgtagtggttcatgcatcctcagcatgtgcgtggtctctcctctagtggttcatgcatcccagtggctgcatgagcccccagggtctccatgttctctctgggtctggagcccctttgttgagttgatttaatgtaataagtgaaaaccagtacctgagcacctctggacagttttccctccattcttatcctc

SEQ ID NO: 338141 - DNA, 473 bp, Homo sapiens
tatattctgtgttctgtagtggttcatgcatcctcagcatgtgcgtggtctctcctctagtggttcatgcatcccagtggctgcatgagcccccagggtctccatgttctctctgggtctggagcccctttgttragttgatttaatgtaataagtgaaaaccagtacctgagcacctctggacagttttccctccattcttatcctcctttttgggtgctaacacagtagaaacccgctgtaagcgctctcctttgctatgggcacttcctcaaccaccaggcctttctggcaatgtcacctctggtagttcagcagagtctaaagcatcatccttttttcctacctcttttctattgaatcttgccaggtttagtacatgtgagcactggaagatgcttgaaaaaggtaggtgtctactcagttgttgccctggtgtttgaaaactgtaatttaggtcccgcagctcccac

SEQ ID NO: 338142 - DNA, 473 bp, Homo sapiens
tatattctgtgttctgtagtggttcatgcatcctcagcatgtgcgtggtctctcctctagtggttcatgcatcccagtggctgcatgagcccccagggtctccatgttctctctgggtctggagcccctttgttgagttgatttaatgtaataagtgaaaaccagtacctgagcacctctggacagttttccctccattcttatcctcctttttgggtgctarcacagtagaaacccgctgtaagcgctctcctttgctatgggcacttcctcaaccaccaggcctttctggcaatgtcacctctggtagttcagcagagtctaaagcatcatccttttttcctacctcttttctattgaatcttgccaggtttagtacatgtgagcactggaagatgcttgaaaaaggtaggtgtctactcagttgttgccctggtgtttgaaaactgtaatttaggtcccgcagctcccac

SEQ ID NO: 338143 - DNA, 473 bp, Homo sapiens
tatattctgtgttctgtagtggttcatgcatcctcagcatgtgcgtggtctctcctctagtggttcatgcatcccagtggctgcatgagcccccagggtctccatgttctctctgggtctggagcccctttgttgagttgatttaatgtaataagtgaaaaccagtacctgagcacctctggacagttttccctccattcttatcctcctttttgggtgctaacacagtagaaacccgctgtaagcgctctcctttgctatgggcacttcctcaaccaccaggcctttctggcaatgtcacctctggtagttcagcagagtctaaagcatcatccttttttcctacctcttttctattgaatcttgccaggtttagtacatgtgagcrctggaagatgcttgaaaaaggtaggtgtctactcagttgttgccctggtgtttgaaaactgtaatttaggtcccgcagctcccac

SEQ ID NO: 338144 - DNA, 620 bp, Homo sapiens
ctttgactttggcctttttctgtcagttgagtgtgtgagtgtatgggggaactactatctctgggggtccaagacccagaggaatgttgcacaggaacgttgcacaggattgacgttcctaagaactgggcgatggccaatttcccaaggaacgttgaaggacgccagcttttattttttcttcttcttttttttttttaattggtgatcagcccccaggtttcaatcttggacaagttaacacctctcacatgccaacttctgattgggtttagacactgggagatggcagcargagattggaaaatggataggcaggaaggaaagggcattttctcccacctcccccatcctgacttggccaggccccagccggcttggtctacgtggccctattctatagctgcattctattctggtagcagccccattctctcaccccttacaggttgagggttgctggctctggcatgtttcactgcctcatgcttagctgagcccacacatgtgtgagcagttctgctatcgatcttccctcagctcttcggactgtaccatctgtttctagctgcagccctgcctggtgcaatatggaaagatatctatttgtttaagatgta

SEQ ID NO: 338145 - DNA, 515 bp, Homo sapiens
aactcttctaaagccctctatgccacgatcttccttcttggcaatgccctgtcattagggccttactcagcttttatccagtcctgttaaaatgtgcaggttctatatcctgcttcttttggtccttttcattttaatttaatttctatttytttgtgacagggtttcactctgtcacgcagcctggagtgcagtggcacaatcacggctcactgcagccttgaaccccgggctcaagggatcctcctgccttggcctcccgagtagtgggaaacacagacacgagccaacaggcctggctattttttttttttttttattatttgtagagatagggtctcactgtgttgcccaggctagtctcgacctcctaggttccagtaattctcctgcctcagcctctcaaagtgctgagattatagatgtgagccactgagcctggcctggtcctttattctaatttcaaagctaatacccagttaatccctcagaagacacaattatggctccataaa

SEQ ID NO: 338146 - DNA, 515 bp, Homo sapiens
aactcttctaaagccctctatgccacgatcttccttcttggcaatgccctgtcattagggccttactcagcttttatccagtcctgttaaaatgtgcaggttctatatcctgcttcttttggtccttttcattttaatttaatttctatttttttgtgacagggtttcactctgtcacgcagcctggagtgcagtggcacaatcayggctcactgcagccttgaaccccgggctcaagggatcctcctgccttggcctcccgagtagtgggaaacacagacacgagccaacaggcctggctattttttttttttttttattatttgtagagatagggtctcactgtgttgcccaggctagtctcgacctcctaggttccagtaattctcctgcctcagcctctcaaagtgctgagattatagatgtgagccactgagcctggcctggtcctttattctaatttcaaagctaatacccagttaatccctcagaagacacaattatggctccataaa

SEQ ID NO: 338147 - DNA, 515 bp, Homo sapiens
aactcttctaaagccctctatgccacgatcttccttcttggcaatgccctgtcattagggccttactcagcttttatccagtcctgttaaaatgtgcaggttctatatcctgcttcttttggtccttttcattttaatttaatttctatttttttgtgacagggtttcactctgtcacgcagcctggagtgcagtggcacaatcacggctcactgcagccttgaaccccgggctcaagggatcctcctgccttggcctcccgagtagtgggaaacacagacacgagccaacaggcctggctattttttttttttttttattatttgtagagatagggtctcactgtgttgcccaggctagtctcgacctcctaggytccagtaattctcctgcctcagcctctcaaagtgctgagattatagatgtgagccactgagcctggcctggtcctttattctaatttcaaagctaatacccagttaatccctcagaagacacaattatggctccataaa

SEQ ID NO: 338148 - DNA, 589 bp, Homo sapiens
actcatatttcccttctacactgccctagcagaggctatccatgagggtcccgcccctacagcaaacttttacctaggtattcacgtgtttccatacatcttttgaaatctaggtggagkctcccaaacctcagttcttgacttctgtgcatccacaggctcaacatcacgtggaagctgccaaggcttggagtttccaccctctgaagccacaggctgagctgtatgttgacccctttcagccatggctggagaggctaggacatagggcaccaagtccctaggctacacacaagcatggggaccctgggctcagcccatgaaaccactttttcctcctgggccttaaggcctgtgatgggaggggttgctgtgaaggtctctgacatggcctggagacattctccccatggtcttgggattaacattaggcttcttgctacttatgcaaatttctgcaaccagcttgaatttctccctagaaaatgagtttttcttttctatcacatagtcaggctgcaaattttcctaacttttatgctccgcttctcttataaaactgaatgcctttaacaacacccaagtcacc

SEQ ID NO: 338149 - DNA, 603 bp, Homo sapiens
catttcagcgttactcaaaattccaaaatcctaagtctaaagtttcatctggaaatgagttatttttgcctaaaaatttgcaaaactgaaacaagttatttacttccaasatacaatgggagtacaggcatttggtaaacaattctattccaaaaggcagaaattggccaaaagaaaggggcctcaaggcatgcaagtctaaaacctagcagggcagtcattaaaccttaaagctctgaaataatgtcctttgactccatgtcccacatccagggcacactgctgcaaagggtgggctcccaaggttttcagtggctctgcccctgtgtctctgcagggttcagtccctgtggctgctctcatgtgttggagctgagttcccaagacttttccaggcacaagatgcaagctgcccatggatatacacttctgtggtctggaagacctggcctccttctcacagctccactaggcagtgcccagtggggagtctgtctgggtcctctgacccccacatttctccttggcactaccttagtacaggttctctgtgagggctccattcctgcagcaagcttctgcttgggtcaccagactttttca

SEQ ID NO: 338150 - DNA, 618 bp, Homo sapiens
ttctcatttccatctgagacctcatcagcctgaacttcacagtcaacatcactatcagcatttcagttactaccatgtaacagtctctaaggatttccaaactttccctcatcttcctgtcttctgagytctccaaactcttccaacctctatctgttacccagttgtaaagctgcttccacattgtcaggtatctttataataatggagggatgacctaacacaaaaattggtatcagaagtgagttattgctgaaaagaatcagatcttgtgaaaactcattatcctgaagatagcacaaagccataaagggtctacccacatgatgcaaacacatcccactaggtccccccctccaacactggggattacatctcaacatgagatttgaaggagacatccaaactatatcaagcagtaagcatttactttttcttatgaatctatgtgtcacctgggctgtccttacagcatttctcatgtatttgtggacagctggtatgctggctgaaattgcgaggtttaggacagcctcccacacatgcctggcagttgtctgctgggggcaatggtagtggctgagagattgcatgcctttcatcatccaacaggttagc

SEQ ID NO: 338151 - DNA, 618 bp, Homo sapiens
ttctcatttccatctgagacctcatcagcctgaacttcacagtcaacatcactatcagcatttcagttactaccatgtaacagtctctaaggatttccaaactttccctcatcttcctgtcttctgagctctccaaactcttccaacctctatctgttacccagttgtaaagctgcttccacattgtcaggtatctttataataatggagggatgacctaacacaaaaattggtatcagaagtgagttattgctgaaaagaatcagatcttgtgaaaactcattatcctgaagatagcacaaagccataaagggtctacccacatgatgcaaacacatcccactaggtccccccctccaacactggggattacatctcaacatgagatttgaaggagacatccaaactatatcaagcagtaagcatttactttttcttatgaatctatgtgtcacctgggctgtccttacagcatttctcatgtatttgtggacagctggtatgctggctgaaattgygaggtttaggacagcctcccacacatgcctggcagttgtctgctgggggcaatggtagtggctgagagattgcatgcctttcatcatccaacaggttagc

SEQ ID NO: 338152 - DNA, 265 bp, Homo sapiens
taatactgtatttttacttcaccttttctgtgttgagataggtttagatacacaaatacttactattatgttacagttgcctacaatatttagtacagtaacaacctgtacaggtttctagcctgggaacaataggctataccatatagcctagctgtgtcataggctacaacatctaggtttgtgtaagttcactctaatgtttgcgcaatgaagaaatcagctacagctaatgatgygtttttcagaacatattcctatcctt

SEQ ID NO: 338153 - DNA, 552 bp, Homo sapiens
cccttcttttgccttcccttcaaagcaaaatcccagcatgtagcaggaggagcagacatgacttaatgtctaattgaatcttgaataaataataaaattgagtcygggccccaaattatcagtatttaatttttatctggtaataatagtgttggtgctacataaggaagggagacagggtgtgtaaatttgtcttcatgtggtgttttttttccatttctattgtgcaagtccttgagataaccaaggggttcgagagaagagttccggctttcttgagaaacagccaaaatgtgaccaggagctgtgtatttcttcacggaatctttgaagaatccttggggttttatgatgggagcactgacattactaagaagctcacagttagaaaactggagcaatggactcaagacatagggccttttctttctcctcactgctttattctccctattctctctcattttcccaccccttctatccagacctctctgcataagtatgatttaaatagctccccatggtatttcctctcttccctttggtggtcac

SEQ ID NO: 338154 - DNA, 552 bp, Homo sapiens
cccttcttttgccttcccttcaaagcaaaatcccagcatgtagcaggaggagcagacatgacttaatgtctaattgaatcttgaataaataataaaattgagtccgggccccaaattatcagtatttaatttttatctggtaataatagtgttggtgctacataaggaagggagacagggtgtgtaaatttgtcttcatgtggtgttttttttccatttctattgtgcaagtccttgarataaccaaggggttcgagagaagagttccggctttcttgagaaacagccaaaatgtgaccaggagctgtgtatttcttcacggaatctttgaagaatccttggggttttatgatgggagcactgacattactaagaagctcacagttagaaaactggagcaatggactcaagacatagggccttttctttctcctcactgctttattctccctattctctctcattttcccaccccttctatccagacctctctgcataagtatgatttaaatagctccccatggtatttcctctcttccctttggtggtcac

SEQ ID NO: 338155 - DNA, 446 bp, Homo sapiens
aaaaaagagtcagtgaagtagaaaccaagtaagtagaaattctccacttataagagagaaaaaatattttttaacaaatcctcaagaattagtgggacaaatttaagaggtctaagagttaattggagtctcacaagagaagagaaagataatttctaaaaattaaagatattaagaaataatgctcaaaaacttcctaaattttataatccacataaattcacaaatttaagaatctcaaccaaatataatttggataaatttgaaaaccatacctagacatagcataatcaatggctagcaaaataaagagaaaaaaaattaaggcatagaaaattacaaacaggaaaactrtaattcagaactctactgaatgctcatcagaaactatgcaggccgaagcaaaacgaaacaatatcttcaaagttattttttaattcaaccca

SEQ ID NO: 338156 - DNA, 434 bp, Homo sapiens
ctagtaaaatgctaatcctacatatttatcatactccctacctctcaggagggacccatcacccatggaagtgacctagacatgtcaggtttcaatcccagtgttctagggactcaatcttgaaaacataattggttaggcctcttcttctatctctrtctctttctttttattccaccaatgtcgtaaggatgaacagggtggccaaaagatcctcccctctccttgcgtccactccaagcactggtaaaaaacaaggtctatcttgctgatttgaagagaaaatgattcacttcattttctccagtgccagaaactgtggcagaatctcctgtcctcattatgcatggtgagtttcacagtggaggaggtaataagggaagttctggtgacattttaattaagagacctagaaatgcctaaatcctactgtg

SEQ ID NO: 338157 - DNA, 434 bp, Homo sapiens
ctagtaaaatgctaatcctacatatttatcatactccctacctctcaggagggacccatcacccatggaagtgacctagacatgtcaggtttcaatcccagtgttctagggactcaatcttgaaaacataattggttaggcctcttcttctatctctgtctctttctttttattccaccaatgtygtaaggatgaacagggtggccaaaagatcctcccctctccttgcgtccactccaagcactggtaaaaaacaaggtctatcttgctgatttgaagagaaaatgattcacttcattttctccagtgccagaaactgtggcagaatctcctgtcctcattatgcatggtgagtttcacagtggaggaggtaataagggaagttctggtgacattttaattaagagacctagaaatgcctaaatcctactgtg

SEQ ID NO: 338158 - DNA, 601 bp, Homo sapiens
accatgcatgggtgtcaattcataaactgcctgttatcgtaacaagataagtataaaattgagagtaggcattaagaagcttttagagcaattggacaaatatccaaatgtgatcagcagacttctattttatgtttttatatttgtttgtttctaataactattttcaattgtattttataaaaagatgtagtctacaatggattgggaatttagaaaaagaaaaactggcactttctcatccaggatttgagaagcagtgatcttgtgtgtggctagggagggctgggaagagggcacagagcaacagattctaaagcttgcctctgaggctggaaagacaggcatgttctgggaactgcagttcctcccaaagcatcatctcctaaaatacattctctccttcctacagctcacaagcaatcctttctctgatcatggtaattcttaacattgtacatgcyctctatgtgtctggcactccattaagcactttatctgtgtgatctaattgttataaccagatgacaaggtaaatgctcttatttttcttattttgtaaatgagagaagtaagatttggcaaggtaaaacaacttacc

SEQ ID NO: 338159 - DNA, 541 bp, Homo sapiens
ccactttggacatggcttgctgaattttactatgcagataaatcttcttttactaaggagatacccatcagtagccttgctgttgacatttgcgtaaagacattttgagatcacaagcagttaccaacatacgatctaatagtctccttattagcttagaaatcactatacttccagggggctgtaagggagtaagatagtctcctatttctcaggaaacactgaatgctaatgtgaagccttaaaatttgcaatgaatagagaataagagaagaattagaaaagatgcttaagaaaactgaaagtacatacacttaaaattgtacatatttaaagattttaaggaaaataaatactaataaattactaaggaggaaaattaaattaaatacagttatcttaaattattgggggtgagggtggtagggaggagtacaaaagtagatagacaaatrtaaagaaacttcactcatcccatccttaaatttaaaatatatcataaactgaagtctagtttagctaattactttttacgctaaaa

SEQ ID NO: 338160 - DNA, 457 bp, Homo sapiens
aaataaagaatatgagaaagtgtaaaaagcagggagtgtggatagcaagtggtaagagtcattataaactcaaatagagtagtctaggtgtgactaggttgaacaaagattttaaggaacataagccatgcaraaacctggagaaagtactctagccagaaaaaaaggtgaaaaaatcctgagtcaagtcaaggactttcagatgtgttcaagaaacagcaaggtggtcagtgtagttggagtgaggagtgttagagaaaatggttagagatggaatcagagaggtaatggtcagcagagtgtgtagaaacttaggggttattagaagcctatattgcagcaaatgtgatgataatccattgggcagtgtattaattggggttctccagaaacacaggactaaccagatgtttacacaggtgtacctcagaaattttgtgcgtttggttccagacca

SEQ ID NO: 338161 - DNA, 570 bp, Homo sapiens
gttgacaaatttccttagtgaaaattccaaagatagagagaggattctgtatcccacgtgagcatgaatctagcttcattgaagccagtaggaaaatctatggcaccctttctacttagtatttttccctggcacatcagtacacaactgggagaaaacctccaaatcacagcttctccctagagaaggaaggagaggactgaaccattcatctaacattctgacttttcaaggggctgcccaaaagaatggtttctgtcttgtctcagagtgttgacagaaatggccccgaaccaggcgctgcatagagagagagaraaaaaaaaggtaatggttttgactagtacaccatagctccattcccagctcagcacagaactagtgggtgaaatttcttaaatctaggcttctttctggagaagaaaatagttgaaacattcatctaatattccggctttttgaaaggtgaaggtgcccaggagactgtcttcagaatctcttgtctaggaacacgtctacaagggctgggaatattctatgtggctgggggccactttcaacaaggtcaac

SEQ ID NO: 338162 - DNA, 570 bp, Homo sapiens
gttgacaaatttccttagtgaaaattccaaagatagagagaggattctgtatcccacgtgagcatgaatctagcttcattgaagccagtaggaaaatctatggcaccctttctacttagtatttttccctggcacatcagtacacaactgggagaaaacctccaaatcacagcttctccctagagaaggaaggagaggactgaaccattcatctaacattctgacttttcaaggggctgcccaaaagaatggtttctgtcttgtctcagagtgttgacagaaatggccccgaaccaggcgctgcatagagagagagagaaaaaaaaggtaatggttttgactagtacaccatagcyccattcccagctcagcacagaactagtgggtgaaatttcttaaatctaggcttctttctggagaagaaaatagttgaaacattcatctaatattccggctttttgaaaggtgaaggtgcccaggagactgtcttcagaatctcttgtctaggaacacgtctacaagggctgggaatattctatgtggctgggggccactttcaacaaggtcaac

SEQ ID NO: 338163 - DNA, 379 bp, Homo sapiens
agccttaaaaatagggaaatcttgccatttgtgacaacatgaatgaacttttagtaaattatgttaagtgaaataaaccagtcacagaaaaacaaatatatcatggtttcacttatgtgaggtatccaaaatagtcaaactcacagaagcaaaaagtagagtgatgtttgtcagtggctgggtcagggggaaagagaaggtactgtttaatgggtataaggtttcagttatgcaaggtgtgaaaatttctagagatctgctgtgcaatattgtgtgtgyagttaatactgtattgtacacttacaatttgttaagagggtagatctcatgtgatgagtttttttaactataataaaaaagataaaccagaaagtatact

SEQ ID NO: 338164 - DNA, 584 bp, Homo sapiens
aatcttcaagtttaaaagtgtctggcaagagctgtagctatgagtgaagcattgtcttataagagctgtggctgtagccagtaatataacctcatcaccagaggaaacagaatgctgctgacagtgtagtgacaaataaattctctgacatctatctgctctcagctttcrtcatagcatctgctggtctcattggatgaagccaattataaaaaacgcattcttttgaagtacatgtataataagcaaacaataacaacagcaacaccacaaaaacatgttttacactatttgtgtcaacagattaaaagggctaaaaagattagccacagggagggtatatctaaaatgtttgtaattgataaaggataagtatccagagtttataaaatcttctactctggttccagatgcttaaacaccatgccaaagaatatttctagctcatacacaaggagacatgtaagacagttcaatgaaacatagcatgcatttgcaaaaatttcaagccagcccaaatgcacacaaatagaatgtcaaatatataatttatactctagtcatatcttagaaaactagtcagt

SEQ ID NO: 338165 - DNA, 552 bp, Homo sapiens
agaacatgagtagtttatccacaatagagttatttaaacaggcatatatataattaaatttccaagttcacaaataattcaataaatattattatatgaaataatcatataatttttcacccagcaacctgtcaaaatttaaaaaaataatacttggtattgatggagtctaataaatgttacaatgtagtcttatttatattataagtatgcacaatattccttatcccttaagtaaaaatatatgcaaagatatacattaatcactgtattttttgtgatagtaaagaaaatgaataacctagtgcacaytaatagagcattggtttaatacattacagtttataaaaaatggaacagtgaaaggaaggacatggagttcacattacttgaatttgctcttccagtggaaggtgtgtaacactggcaagttatgtatgctttctgattcctcttatgtaaaatgtgaatgatattagtgaattttaaagcaatcttagttccaatgtagcagctttagttggcagtaagtaaagttaccccaatttggca

SEQ ID NO: 338166 - DNA, 605 bp, Homo sapiens
catcagtatcataactatgtagatttgcaaacagggaagcatgattcatgtacagaagtggaaagtgtgaagtgaattcaaactgtgttttaagagcttaaatgatagacttactagacaaagactttaaattgcctattaaaaatatagctaacgaactaaaaggaatcatgtctgaaacattaaagaaaaaaagtatgagaatgagatcttaycaaatgaacagcatcaataaacagatagaaataataaaagaaaccaatggaaattctatggataaaaaaatacaaaaacttgaataaaaatttttctaaaggacttcaacacatgtgaattgacagaagtaagacttagtcagcctgaagatagttcaaatgacaaaatctagcctgaggaacagaaacaaaaaagcacaaagaaaaataaacagacctcaataacctatgagacagcatcaagcttatgaatatacaaatagtagtagactcataggaagagtagagagataaaaggtagaaagaatctttgaagaaataaattgttgaaaattgtccagattaaaaaaaatattctatgcatcccagaatttcaacataaaccaagtt

SEQ ID NO: 338167 - DNA, 620 bp, Homo sapiens
tatgtttgtccttggaaatagcaatataatgtcttaaaaataagaatttataaaaattgtattagcttgatgttaaaatgtctagtttcatttatatacctttgacaaacttgacaaaactgaaaatatttctcagaaataagatatttctgtgaaatagacttaaaatgcatcagtatcataactatgtagatttgcaaacagggaagcatgattcatgtacagaagtggaaagtgtgaagtgaattcaaactgtgttttaagagcttaaatgatagacttactagacaaagactttaaattgcctattaaaaatatagctaacgaactaaaaggaatcatgtctgaaacattaaagaaaaaaagtatgagaatgagatcttaccaaatgaacagcatcaataaacagatagaaataataaaagaaaccaatggaaattctatggataaaaaaatacaaaaacttgaataaaaatttttctaaaggacttcaacacatrtgaattgacagaagtaagacttagtcagcctgaagatagttcaaatgacaaaatctagcctgaggaacagaaacaaaaaagcacaaagaaaaataaacagacctcaataacctatgagac

SEQ ID NO: 338168 - DNA, 643 bp, Homo sapiens
aaatatttcatacatatacatatcaattgacttaggcctcatgataacactatgaaaagtcatactttatctttactttatagatgtagaaactgtagtttatcaaaattaactgacttgtgcaacatcatacagctggcacttcgaaaaaccaggatatgaatatggtcagcctggtgtcagagctccagtgcttattttacwctgccttctagaacatgctgataacttttattaatctacatttaagcctgggcaactctaaagatgcgatcattgaattaaattgtttacttcagaagtgtattgtttaatcttacaaactttgaatgggtgaaaatacaattaaaatggattaatattttttaataattatgaatatattttggatcacgttattttgatacatggtcccactcataacagtttgaaaaacactagtttcgttatcatgcatattactatatattgcccccactgtatttttcctgacaagtttatatttccggattcataagttcttgtgtcttccactgatctttgtaataccagagtgatatttgtaaggtggctatgaacaacctataattattactggatttttttactgaaattgaacaatgggaagatattctttacaaaa

SEQ ID NO: 338169 - DNA, 565 bp, Homo sapiens
gcaacctcaatctttccagcctaacttcttaattatactgccaagagttcatgcaggtttctctctccttaaacttccaactgcaacctcagcgaggaagcaattatgaggcaacaatgccagcaatgctgattgtttacctcaaataaataagaattatgataaggaatggtatgaatgcacacctgggaccaagtttcaatttttttctttttcccagyaggcaggggctcttactaaagataagtaaattatacgaataaataatattccttctctccatctgagtcactgagatagtaaagatgtgacttccaacaaacctgtaattgctgtttacttctccaaaacttaaaattaccctgcttatatatacatacatgatagcttgtttttggtctaagtatcagactcaaaaaggaattgttaacgttagcttttagcatagaaacgaacacagagatacccaacattttctattggttaattctattaccacaattaacaaaacatgataccaacttagacctgctacagaaacacgaaagattcttatagtaccaca

SEQ ID NO: 338170 - DNA, 646 bp, Homo sapiens
ataattttgtctagatttacaaaaaaaaaaatcttgctgagggtgttataggaattgattacatctgtatataaatgtgatgagaattgacatctttactatgtagagtcttccaagcgataatcacaatatactcttcatttacttatatttttaaaaacttatttcaacagcattttgtagtgacaagcaagcaaatcctttacatgatttaatagattcacacttatatattctattttttgagccagaatatatggcattgtatttttaattttggaggtcacattttcattgccrgtacatggaaatacagtgtacttttgtatgtttgcgctgtgtcctttaaacttgttgtggtcacctattatttctatgagttttgtttaattttgtttttgtttagattccttaggattttctatataaacaatcatgtcatctataagtagggacatttttatttcttcctttccaatttgcatgcatttattcccttgacttttgttattatggtggctagaaagtcagtcactatgacttataaaagttgtgaaagcagataagcttgacttattcctgaacttagagggaaaatgtttaaccttttgtcatagagaacaatgatagctgtaggtttttgaag

SEQ ID NO: 338171 - DNA, 447 bp, Homo sapiens
gtaatactagcttcttcaaatgaaataaaaaccatttcctactcttctgttttctggattatattatgtagaattggtgtttattcttctttaaacagttagtggtattctgcaatgaaactatctgggcctagagatattttctattttgagagttttaaagttataaattcaatttccttaccagaaaattatctattatttcatattgtgtgagctgtggtggttgtttatgtttcttttgaggaagtgtcttcattatctaaattgtcaaatttatgggtgtggagtattccctgactatgtctttgatgtcttcagagtctacagtaatactacttgttttattctagtattgataacttaygttttagtgtgtgtgtgtctgtgtatgtgtgtgtgttttctcatcaaactagaggtttgtctatttccttgatattttca

SEQ ID NO: 338172 - DNA, 513 bp, Homo sapiens
taagaataatggcctccagctgcatccaagtccctgcaaaggatagatctcatttttatggctgcacagtattccatggtgtatatgtaccatattttctttatctagtccatacttaatggatattcaggtgaattccacgtcattgccattgtgaatagtgctgcaatgaacatacaggtgcatgtgtctttataatagaatgatttatattcctttgagtatatamccaataatgaaatcactgggtcaaatgatatttctgtctttaggtcttcaaggaacttccacagtgtcttccacaattgttgaactaatttacactttgaccaacagtatataagcattcctttttctccacaacttggctagtatctgttattttttgactttttagtaatagccattctgactgatatgagattgtatctcattattgctgtcatttgcatttctctaatgatctgtgatgttgatatgattgttggctgcatgcatgtcttttgggaagtg

SEQ ID NO: 338173 - DNA, 535 bp, Homo sapiens
taaattaattaaaatatagagaaagaaattcctagaaaacaaggtacacaaagatgttttaatctctgactaaaaggygtgaaggaggaatttgaaataaatactagtaagaaaaacaagtcaaaactttaataaaccttaatgttcaggtgtgagccagtgtaacagatgaaaattaccaagacctccagtcacagaaagaatttgtacacaccatcagccttttcccaaagaacatctcaaactgcgtaggaatagttcacaaaaggctggggtaaaaaggtgaactgagagaatatctactgaattacacattacccagtggaagatatcagggccagagggctgaaaggaatttatctcacaaattcgagacctttactgtgtgcaagccagtggtttctggctgctggcttctgaagtctggctgtacgagagctgagagaaatcactgtaaagctgtctatatcttcagtgaatatactgcagagattcttcaaaggttggaggtattacagcagggtagagatcccct

SEQ ID NO: 338174 - DNA, 535 bp, Homo sapiens
taaattaattaaaatatagagaaagaaattcctagaaaacaaggtacacaaagatgttttaatctctgactaaaaggcgtgaaggaggaatttgaaataaatactagtaagaaaaacaagtcaaaactttaataaaccttaatgttcaggtgtgagccagtgtaacagatgaaaattaccaagacctccagtcacagaaagaatttgtacacaccatcagccttttcccaaagaacatctcaaactgcgtaggaatagttcacaaaaggctggggtaaaaaggtgaactgagagaatatctactgaattacacattacccagtggaagatatcagggccagagggctgaaaggaatttatctcacaaattcgagacctttactgtgtgcaagccagtggtttctggctgctggcttctgaagtctggctgtacgagagctgagagaaatcactgtaaagctgtctatatcttcagtgaatataytgcagagattcttcaaaggttggaggtattacagcagggtagagatcccct

SEQ ID NO: 338175 - DNA, 551 bp, Homo sapiens
tttcaacttcagctcaattcagattagtggatgtagagcagtagaggtgatttgtgttctggatataaatattattcatatcaatttttaatgtttactaatacacattgtatagcaagcaaagaagcaagataaagttacccatggtcaagagaaggagaattcaataaaagcagactaaaggataggcaatatgtaggtattatcaaaaagaactttaaaaaaactatgataaatatgttaaggaattaaaaatgcataaccagtgaacagtatcagtacaatgataaaaawttataaaaattgagccaactgaaaatgctacaaataaaatgtgaatattggagatgacaaattcacttgaggttcttaaaagttttttgcatacagcagagaacagactcatgaacatgaagaagggtcaatagaaattgtcaaaaatgaaacaataaatagtaaaaaaatgaaacaaagaatttgaggttcatagaacaataccaaacagtctgcgataacattaagaaaaggaagaggagtggaatggaagaaat

SEQ ID NO: 338176 - DNA, 572 bp, Homo sapiens
gagaaaagaagatgataaatcagttccctggatagattaataaaagtaattatctcctaacaaaaatctagtcaagtataaaaaccagagaaaacaaaaaatgacagatatcaagaaggaaagaaaaaacatcactacaaatactacagacattaagtaagtgataagaagacaatatgaaaaacttcatggcaaataattgatgatttttataaaatggatggattgatgagtaaacataactcatcaaaactgacacagaaaggaatatgtaagagacaaatttgatgaatttaaatactattattacagaattattaktagtagtagaaaatgtaccactcacaaagaaagttctagcccatatggcctaactggtaaatttaattaaaaatttagagtgactatatttaacaacactatattgtatattttaaaatagctaaaggaaaagatttgaaatgttttcaacaagcatgaagtccttgcccatgcctatgtcctgaatggtattgcctaggaggtccaaaagaggttctagggtttttatggttttaggtctaatgtttaag

SEQ ID NO: 338177 - DNA, 574 bp, Homo sapiens
agtatgtcattttcacttttctaacttctaagttctagaacacatcatgttacatttattttcctaaataaatgtataaatgcgacttttgttcaatgtcagatcaacagaacccccaatcagagctttgtaattgttcagcataacatttatacctaagataaatctgartaattaattacaggctatttcagcctgacagtattgtatgtaactagatgtcccccctgtatgcctaggagaatcattcagcattgttaaatacaatattcctgcttcctaaagtagagcactctaaagagtagcatatgttataagtagctgaatcataaatcaatggtatgcctcagaccacctgtatctttgacttttgattgaagggttttatttgaaaccaatgcttgtttcccttgtccacagtatcttcatatatgtggcatagctctcctaattataaataattttaatggtgttttagttttagctctagatgatgactgcctcttttttaaaataaattgcatatactatgcaacttccatgtcgtcattttccattaatttatcaaacccat

SEQ ID NO: 338178 - DNA, 433 bp, Homo sapiens
gaaaataatgataagacagtatgatagaagcaagcaaagtaattatgaaggtacctaataggtaacaacaaagagtgagagaagattcactttcagttcagaaactggtagttaagttaagaaaaaagaattgagtattattacatattgaagaaactatggtatccaatgagctgcaaatattgytggatcattagttacccttggaaggagagtcatgtgaagcagcttcatacacaggcaggggctagattatgaaggctattgtgtgtcaatatgaaaacaattatgaaaacaactggatgatttttaaaagaaaactggtaggacaaaatttgtgttttgaacaaatcacttatgtaacaccctgggaggaatgaattggataggagaggtgtgtgggcagagcgctgcattaggaaactattatagt

SEQ ID NO: 338179 - DNA, 433 bp, Homo sapiens
gaaaataatgataagacagtatgatagaagcaagcaaagtaattatgaaggtacctaataggtaacaacaaagagtgagagaagattcactttcagttcagaaactggtagttaagttaagaaaaaagaattgagtattattacatattgaagaaactatggtatccaatgagctgcaaatattgctggatcattagttacccttggaaggagagtcatgtgaagcagcttcatacacaggcaggggctagattatgaaggctattgtgtgtcaatatgaaaacaattatgaaaacaacwggatgatttttaaaagaaaactggtaggacaaaatttgtgttttgaacaaatcacttatgtaacaccctgggaggaatgaattggataggagaggtgtgtgggcagagcgctgcattaggaaactattatagt

SEQ ID NO: 338180 - DNA, 538 bp, Homo sapiens
gtaagaccctggagggacaaagatcatgaccttagaaatatctgaaaattttcagatgtgatacatatcattttttatcagcaaggctgttctttacctccatcactacctcctttgcttctgtagttcttaacccatgcctcttcaycatagaacgtatcacattgtttacggataatgtttccaagagtgtttacctattgactttacctcctacttgaccatcaactctgtaaaggcaacactgtaggacatcaatagctcttactcatctgtgtgctgtctcccttcctagctcccaaggggttgtctaaagtgattgtactgctagtgagcaaaagcataaattgaagagttaatgaattccagaacaaaggaatgtctgcagtcaaggaaacatgtaaagaatgtatggttaaaagagcatttctcagtttaaaatatggcaatgattaaaagatattaagggcagccatttagtaggtggactgattccattgtgccatgttatagaatggctttcaaaactatcttacca

SEQ ID NO: 338181 - DNA, 649 bp, Homo sapiens
tcctgactctctcatctcccatcttttctcatataaatactatggagataacaatatttctaaggtcatgatctttgtccctccagaatgtcatcctcttttttttttttttttttctgagatggagtcttgccctgttgcctaggctggagtgcagtggcatgatttcrgctcactgcaacctctgcctcccaggttcaagcgattctcctgcctcagcctcccaagtagatgggattgcatgtgcatgccagcacacccagctaatttttgtatttttattagagacggggtttcaccatgttggccatgctggtctcgaactcttgacctcaagttatccacccaccttagcttcccaaagtgctgggattacaggtgtgagccactgcacctggcctgtcatcctcttaaataagcccaaatactactgtattagtctattctcacactgctataaagaaatgcctgtaattgggtaatttataaagaaaagaggtttttttctttctttataaatacccacatccacataaataattgcctcacagttccacaggctgtacaggaagcatgatgctggccatctgcttggcttctggggaggcctcaggaaacttacaatgatggcagaaggcaaaggggaggc

SEQ ID NO: 338182 - DNA, 649 bp, Homo sapiens
tcctgactctctcatctcccatcttttctcatataaatactatggagataacaatatttctaaggtcatgatctttgtccctccagaatgtcatcctcttttttttttttttttttctgagatggagtcttgccctgttgcctaggctggagtgcagtggcatgatttcagctcactgcaacctctgcctcccaggttcaagcgattctcctgcctcagcctcccaagtagatgggattgcatgtgcatgccagcacacccagctaatttttgtatttttattagagacggggtttcaccatgttggccatgctggtctcgaactcttgacctcaagttatccacccaccttagcttcccaaagtgctgggattacaggtgtgagccactgcacctggcctgtcatcctcttaaataagcccaaatactactgtattagtctrttctcacactgctataaagaaatgcctgtaattgggtaatttataaagaaaagaggtttttttctttctttataaatacccacatccacataaataattgcctcacagttccacaggctgtacaggaagcatgatgctggccatctgcttggcttctggggaggcctcaggaaacttacaatgatggcagaaggcaaaggggaggc

SEQ ID NO: 338183 - DNA, 616 bp, Homo sapiens
caccaatgccatgacagtttacaaatgccatggcagtgtcaggaagttaccctatatagtctaaaaaggaaaggaaccctcatttctggggaatccctgcccctttcacagaaagcttacatacagggcactcctggatggtgacaggatagccctagagatacacattgtcacccatctataagctacttttaagctratttttagtctctttgactactgtgtttgagtgatgaaaatgttttctttggtatgttcccagactctgggatgtttgggttctcagggatacctgctcctcatctgggcaccatggccttgactcatttcccagcattcagtgttcaagcagctgttgcatattcctaagtaatctggtggggtacttgtcagattacaacatgaagcttgggattttcccaggagatgctgtctttttttctcttcgtggtggtctatagcattacaatatgtttgataagaaaaaaatggactttccagaaagaaaatattctaagcctttgacaaattttgagtatacagatcttttctgttgtaaaattacatgttcaataaaattaagagtttagatttccaagaattgacataattgtgg

SEQ ID NO: 338184 - DNA, 590 bp, Homo sapiens
ttctccttacctttgctttactttataatcctttctccacatgccttcaaatttaggttctgaactttcatcattttgttctttaatattaactgacagggtatgaactttcaagtgctgcttgtatttccccatgtttacagcgtaattataattttgtattataaatattatatctatataatatcttaaaccctctcatctaagataattttaggtataaatgagaaaagttgattgcacgtaagatggcagaataggaaaacctgaacccttcttctgcccacatatgattcaataataaatcatggacaatttccttttgtgaggaaatacagaaaccagttgagaggcttctgcacctcaggcaaacaaaaaactagacatstcaacaccagtaggaaaatctgagacaccatctctccagaatctccatgcccagcataacactaaatcaggaaaaatgctccaagagctcttagcttctccttggggagggaaagagttggaacaaacatttgtcaccccaacttttctggggactttccagagcactgacttttgttttgacattcatggagcactggtgg

SEQ ID NO: 338185 - DNA, 592 bp, Homo sapiens
tttattgcagtactactattcacaacaaccaagatatggaatcaacctaggtttccaatgacagatgaatgaataaaggaaatttggtatatgtacagaatgaaatattattcagccagaaaaaaatgaaattccataatttgcagcaacatgggtgaaactagaggtcattacrttaagtgaagtaaggcaagcacagaaagtcaaatattgcatgttctcactcatatgtgggagctaaaatagtgaatctcatgaattcattacggattgaaccatgaagaaattcaaaacatgaacagatgaataacaagtaatgagactgaagccataatagaaagtttcccagtaaagaaaaaccctgatagccaatgccttcactgctgaattctgccatacatttaaagaactaatactaactctatttacacttttccaaaaaaaaaaatagaggagggaatacctccaaattcattctacaaggcaagcatgaccctgataccaaaatgagacacatcaaaaaaagaaaaccacaggctgacacttggaatggatattgatccaaaaatcatcaacaaagtaataggaaacc

SEQ ID NO: 338186 - DNA, 564 bp, Homo sapiens
taaatgggattccatcattgatttggctcttaggttgaatgttattggtgtacagaaacactactgatttttgtacattgattttgtatyctgaaacttttctgaagttgttaatccatttcaagagccttctggtggagtctttaagcttctttaggtataaaatcatatcatcagtgaaaatagataattaacttattttcctatttagattccttttatttatttctcttaactgattgctctggctaaaatcttccagtgccatgttgaataggagtggtgagagtgggcatccttgtcttgtttcagttcttaaggggaatgtttccagctttttccagttcagtacaagttggttgtgtgtttgtcacagatggctctgattattttaaggtacattccttcaatgcctagtttgttgagggtttttgtcatgaagggatgttggatttatcaaaagtttttctgcctctattgagatgatcatatggtttttttaaattgtgtttatgtggatttttatatctgctgctgcacatggaatctgatgtaatgtcacac

SEQ ID NO: 338187 - DNA, 564 bp, Homo sapiens
taaatgggattccatcattgatttggctcttaggttgaatgttattggtgtacagaaacactactgatttttgtacattgattttgtatcctgaaacttttctgaagttgttaatccatttcaagagccttctggtggagtctttaagcttctttaggtayaaaatcatatcatcagtgaaaatagataattaacttattttcctatttagattccttttatttatttctcttaactgattgctctggctaaaatcttccagtgccatgttgaataggagtggtgagagtgggcatccttgtcttgtttcagttcttaaggggaatgtttccagctttttccagttcagtacaagttggttgtgtgtttgtcacagatggctctgattattttaaggtacattccttcaatgcctagtttgttgagggtttttgtcatgaagggatgttggatttatcaaaagtttttctgcctctattgagatgatcatatggtttttttaaattgtgtttatgtggatttttatatctgctgctgcacatggaatctgatgtaatgtcacac

SEQ ID NO: 338188 - DNA, 460 bp, Homo sapiens
gtctctcaactatgctttaaaaattactgctccaaaataatgtgttagtatgtttcagaatatgagagagtatcatcgaaataaaatttggaaagtaaatttcacttttcttaatttatgatacctaggtctgacaagaaactataaatcatggtaaaatgatgtaaaatttgctcagttttgatgggcttkcttccttggtctcctgatgagtgccctcatcaatattatgaaagattgaactttgcctctgtgtaaagtgatagcataggttcagtatcttcctggaataatttcctatgctttatgtgaacattattgtgtttctaattgagaaataggaaaaaaaaggttcacattcatgaaaagagctaagatttgttacaatcatgttatcttctctatttattttgaatggtttattatattatcattttgatcaaatatgtaaccagtcttt

SEQ ID NO: 338189 - DNA, 422 bp, Homo sapiens
tgtcattaactatagtcaccatgctgtatgatagatttattgaacttattcctcctgcttaactacaattacatatcctgtgaccaacatctccccttcccccacctatcctaactaccccagcctctggtaacsaccattctactctgtttctatggcatgaaaccttttagattccacatatgggtgaggacataacagtatttgtctttctatgcctgggccatttcacttaatgttgtcacaaaaaggaaaaatgaaatattgtcaattgtcttatgtttctaaagggccctatagctgctagatgaggctaggagagaatcacagagattagttgggaagaaattatagaggagatggagaacaatgtgaaactgcatggtagtgatggagtagtgagaagtaataggtgttggata

SEQ ID NO: 338190 - DNA, 409 bp, Homo sapiens
tgtcttttctaaattcaaattcatatttattgtagaagttattagcagctgaaaaatatatatatacacacatatattcaaatgtaatcatctagaattcatgttgaagtgaaagaagaaacagtggagtctgaatatatttttatgcataagtataatgtatgcataygacataagcatatagtgttaaaggagcagagacttagggacatactacacctaccaaatgtctaaaatgctaaggataatctttaaaagtaaactgaaagaaacacaacaaaaaattcactgctgtttcttgattatattcctaatgattccagactaggaccagttgtgttgaattgtataaaaagctaggggcatacttccattcgctgagtgcttaatgagccctggtgtctgtctt

SEQ ID NO: 338191 - DNA, 476 bp, Homo sapiens
ttgataactgattacttgaataaaaaggagaactgaatgatggtttcctatttaatggtgttgacagcaggctggaaggctggaccaaaaactggtacagggaataaagaattaaagcagacttagagtgaagaaggaggtgattggtagataatcggcttatttttgtatgtaatgaacttgaagttcatatggggatatccagtggggaacaggttatatggttttggaaaagctgacaattattatactgaagtttctcacattgtagatggctttcaaaattttggaatactttaggtgagattaaatgacagaaggattgaaaatggaactctataaaatatcaagataattagcatgttcaaaggaagaggagaaagagatacaagattactaaaaaatgagaraagaaaaatcagtatttttatgtaaattaaggaactgacaatttccagacaggtgtggtcaagcag

SEQ ID NO: 338192 - DNA, 621 bp, Homo sapiens
cctctgggacgaagcttccagagaaaaaaacaggcagcaatcattgctgttttgcagcctccactggtgatacccaggcaaacagtgtcaagagtggacctccagcaaactccaccacacctgcagcagaaggtcctgactgttagaaggaaaactcacaaatagaaaggaatagcacatccactcagagaccccatctgaaggttaccaacatcaaagatagataaatccatgaagatggggagaaaccagtgcaaaaaggctgaaaattccaaacaccagaatgcctcttctcctccaaaggatcacaattcctcaccagcaagggaaccaaaatggacagagaatgaatttgacgaattgacacaagtaggcttcagaaggtgggtaataacaaactcccctgagctaagggaccatgttctaacccaatgcaaggaagctaaaaaccttgaaaaaaggttagacgaattgctaactagaataaccagtttagagaagaacataaatgacaggatggagctgaaaaacacagcatgggaacttcttgaagcattcacaactatcartagcagaatcgatcaggtggaagaaaagatattagagattgaaggtcaactt

SEQ ID NO: 338193 - DNA, 548 bp, Homo sapiens
ctctctcggttcatgtcctgtcatccaaatagtaccatagcccttatttattaagaagtcccattttctgggtgctcctttgaaatttgaggatcctttccacataaatttatcctgaattgtgaattccaaacaactttaagttaaatgtccaatataacttatgggcagaaagcaaactgggtgggaggcagtgaggggctggatgggtcccctgcacagccaccccacgtgtgtgcagcgactttgcatgcagctgagatccagtggccaaaggtcaagagtgccttgctcactctgacaacagtatgttttaacagaacatttgggagctttttttgtgaattactgcacactttgagctagtttataaagacagaataagccatacacctacaaaaagaaggtaaggcaacagaggtaaaaactgacagcagcagaaaagaatttcaaactaaatgaaatgttttcaagccaggcagatctccatttgacacacagccccatcactcactaccaytgtgattaggaatcaaccactgtacctc

SEQ ID NO: 338194 - DNA, 523 bp, Homo sapiens
tgccaagcattgtgctttatatgtagtatctcatttaatcctccaagtaacaacaggaagaggaggtaaagtcctttattatctccattagagatgagaaaagtcttcaaggttacgtgacttgcttaaggtcacacagctgacaggccatagagccaggattctcatttacagctgtctgctctagagttcactcttacccatcatggtaaattacagtaggctctcmgtatctgaactgaattaagacccttaaaggaaactctaattagaaaggagtgatgctggaagcagacctatgagacattctggagaggctacattcaaccaaccaaagatttcacataaatataatgatttaaaaaaaagacccatattggttgttataacttgtcttcaagaagctcacaactaatttttactttaatagaaatattaaaactaaaagattttaaaaaccatgattttccttagctccactcatggagatggagatgtcatttcagtgatgacaataatgaga

SEQ ID NO: 338195 - DNA, 601 bp, Homo sapiens
tatgcagctgtccactcgaccttcaaacccactgctcgcttacaagccgcgacacatcagatggctggtactgaccatggatacctctggttccttcctctgcccaggctccctaaaccccacagtgtacactacagacaaagatgtggagactggacaaaagctacattcgtttctggggtgttttgtagacctctgaaatacatgggtcaaacatctctgtcctgaatttrgtgactttagacttcaagctccagcagtaccatttagtatcactcacactggttcagaactgcttgtccactgataggaagtagtgttgtcaattataaagttttaaaaacaatgctcatgataatagtagtaacaatatcttcccatgtttgttgaataagtattgtgttccaggaatggttacttatagtagtctctttattctaagtttactgtatgaggtaggcaccataattcttattttccagctgaggaaaatgccactaaaaaaaagggtaagtaacttgcccacagaggtgatgatcatcaatggcagaaatagaagttgcatttatatctaatgtgtgttcccaaacacagccctgta

SEQ ID NO: 338196 - DNA, 600 bp, Homo sapiens
gttacattaagattagagacaagagtattctcagggcaaatgggaaatgggttaaacgcaggtgctaaagctcacatgcatgtgagagcgtgtgtggcctttacagggggtgtgtgacaggtgactgaatgtgtttaagatgcaacaggctgtgcatgatttgaggatgttaagaaactttagattggtatagcctgtcaggcataattacatcaactctcttcaccatctctgtcatgcatgctgtcatgtctgtcccagatcccattcacccaccctcctgcagcgagtgctggctgctaacagcttgcagctgcctcattctacaaaacgttgccctgtccagcagaagcccaggctcaggaagtcccccaacttggggctkacagccaacaatcgactaaagtgggaaaccgaaggcagccctcttgccttagggttggggaaggacaattctgcggtgcagctgatgctccagagccgacctttgcatcaggctgaggacagacttcacctgacatcacatctttgcccagccctttctcattccccaccctagtccttctccctagcctctctcccttatgggtttcacccgag

SEQ ID NO: 338197 - DNA, 570 bp, Homo sapiens
tacaagcgtgagccactatgcctggctgggagcatctttagttctaatgaggcaactcttggtgggtttctggatggggggctggtcacttgaaagaccaagtcacgatcagaagcctggaaatttcagctcccattccccatcctctggggaggtgagaggagctggagattaagttaataatatatcttgcctatgtgatgaascctccataaaaattcctcacctatggagtttggagagcatctgggatgctgaacacacggaggacgctgtgccccaagaggacttgaaaactccatgccccttcccctataccttgccctatgcatctcttccatctggctcttcatctggtcctttgcaatgtcctttataatgaaccagtagatgtaggtcaaacagtttcctgagttctgtgagccattttagcaaatgattgaacctggggaaggggttgtgggaacctccaatttacaactgcttggtcacaagtactggaggtctggacttgtgatcggcatgtaaagtgggggcaattcagtcttgggggactgagcccttaagctg

SEQ ID NO: 338198 - DNA, 570 bp, Homo sapiens
tacaagcgtgagccactatgcctggctgggagcatctttagttctaatgaggcaactcttggtgggtttctggatggggggctggtcacttgaaagaccaagtcacgatcagaagcctggaaatttcagctcccattccccatcctctggggaggtgagaggagctggagattaagttaataatatatcttgcctatgtgatgaagcctccataaaaattcctcamctatggagtttggagagcatctgggatgctgaacacacggaggacgctgtgccccaagaggacttgaaaactccatgccccttcccctataccttgccctatgcatctcttccatctggctcttcatctggtcctttgcaatgtcctttataatgaaccagtagatgtaggtcaaacagtttcctgagttctgtgagccattttagcaaatgattgaacctggggaaggggttgtgggaacctccaatttacaactgcttggtcacaagtactggaggtctggacttgtgatcggcatgtaaagtgggggcaattcagtcttgggggactgagcccttaagctg

SEQ ID NO: 338199 - DNA, 358 bp, Homo sapiens
tcctactacatgtaagggtcattttcaggagaatcagttaagacaactttcttgatcaaaatgatgtcaccctggcasgcttcttggacaatccttcccctttgctcatggtgtagatctgcagtgtccagcatggcctatggattggttggtgtgagcacctggccagttgttaccaaaacctttatctaccagaccaattctcacctccaacatatccacagcagggtaaatgggaaggagttaaaggagccaaaaatggactatactaatgtcacctttcttgagaaatactattgttcttaataatgaaagactcctattatctggatattcttctattctaaaaaaaaaaaaa

SEQ ID NO: 338200 - DNA, 502 bp, Homo sapiens
ctccaatacccatacccagtacggtacagcatttaccaagattatataaccggcccaagcacaaatatccaagtctyagtgagcactaacccagctgtgcctcaatttagccccaaacttatctcttccaaagcttcattcatgctcagattcaggagacactccccaatattcatctctaagttttaaaggaaacaaaaagaaagcccacctggcttgctacacatttatgtgtttggggactttctctccacatgtaacacatgtaaatgacaggcatctgttattcactatgtgcaaagggagccactctagaggtaaagacttgagttatcaacccagtgctaccatttaccagcagtggaatttattttctgagcctcagcctacttggctgtcacattggtgatagtaggatcaacctcataaagtcttgggaggactaaatacacgtgaaagtgatgaaacacgtttgttcagaattgttctgaaaggggcactg

SEQ ID NO: 338201 - DNA, 544 bp, Homo sapiens
gtgacaaattggttgactgaataagtaaatctgtcaagtgaggcctcaggacaagctccagactctgcacagagccatggacaaacacactgcaggaaaagcccccaggtgaagagttagccgccccaagatgtatatttttgaattgtgaaaaataagacacctataattcataggctccaatacccatacccagtacggtacagcatttaccaagattatataaccggcccaagcacaaatatccaagtcttagtgagcactaacccagctgtgcctcaatttagccccaaacttatctcttccaaagcttcattcatgctcagattcaggagacactccccaatattcatctctaagttttaaaggaaacaaaaagaaagcccacctggcttgctacacatttatgtgtttggggactttctctccacatgtaacacatgtaaatgacaggcatctgttattcactrtgtgcaaagggagccactctagaggtaaagacttgagttatcaacccagtgctaccatttaccagcagtggaat

SEQ ID NO: 338202 - DNA, 576 bp, Homo sapiens
ctcctgcttccatcctttctcctgagctagaaccaacaaacctagagagttgggcttcggaaaaactagtgttttcatttaattggatatgaagaaagaacaaatatgtacggggcaaccacgatctttacaaaggtaccattcctgcaaaaatattaacacttcaaagcaaaggttgtattcgtaatgtttgctaaaatttcttatttaaaaaacgttagttttagtgggaggggagatgtcagtatttacgagagcgtttacaayggtgggcccaactaccaggagcacaagatgtaattattaagatggctacttaagtgttaagttttaataagacaacgaaaagtagaaaacccgaaaaccaaaaacctaccagtcgtctctcctcccttccataaaaacaaattctgagaatagagatcttggttgtttagctcatcttggtatctcatcacatagaccttgacgtatagtagctgctcaattaatatttgttaaacaaatgaaaattcaacttccccaacttagtttaaaatgtaaggaactcacaaaattgaatatttaaatgctttc

SEQ ID NO: 338203 - DNA, 582 bp, Homo sapiens
ggttctgcctttagcagacagtaacctgcctctggtatgcatgtgtgtatgtgacaaacaaatgggaaaaatgagaaccttagttaagttgagggacaaagaagcccgagtttctcacagccagaccaaacaggaagttggctagaggcccctggttttcaggagcaatttggctttgacatccccatcctataagctacaaaaacatttggaaaaacaaacaagcaagaccagagaattcacagacaaacaaaaagctgaattcctccaaagagaatgttacaataccatgaagtgacaggggaaaaaaattcctcaagggcatcaagctcctaagcacttaattcttcaagattttttgtatagacaaatctcatgacttgggggagtacaatgagcctgtttcatgtccacttcagtctttagaattaagtagtaattacccaggcagtccaccaaggccttcataaaactctaacttaagagcagagttcagtwtttagaagaaaactaccctgagcagagggaaatgtttaaatctggccaggaaggagctcctccctccattaactgggagatctt

SEQ ID NO: 338204 - DNA, 514 bp, Homo sapiens
gcaaccctgttttgagcaagtctattggtgccatttttccaacatgtgctgacttcctatctttgtcacattttggtaattttcacaatattttaattttttcatcattattatatgtgttatggtgatctataatcagtgatctttgatgttactattgtgattgttttgggatgccatgaactgtgtccattaaaggttacaaactttaataaatgttatgtgtaaataacatctattaaatgttaaaactggttccaataaatgttatgtgtgttctgattgttccactgaccagccattctcctgtttctctcaatctcctttcaatattctccargaatattgaaattaggccaactaataagcctacaatggcctctaagtgttcaagtgaaagggaaagttacacatctcttactttaaatcaaaagctagaaatgattaagcttagtgaggaaggcatatcaaaagcccagacaggctgaaagctaggcctcttgtgccaaatagt

SEQ ID NO: 338205 - DNA, 535 bp, Homo sapiens
gaaagctaggcctcttgtgccaaatagttaaccaagttgtgaatgcaaaggaaaagttcttgaagaaaatgaaaagtgttattccagtgaacacaaatgataagaaagcaaaacagccttattgctgatatggagaaagttagyggtctggaaagaagatcaaatcatccacagcattcccttaagccaaagcctaatccagagcaatgctctaactttcttcaattctgtggaggctgaaagaggtgaagaagctgaaggagaaaaatttgaagcaagcagatgttggttcatgaagtttaaggaaagaagccaccttcctaacatgaaagtgcaaggcaaagcagcaagtgctgatgtagaagctgcagaagttatccgggatatctaagataactgatgaagtcatctacactaaacaacatattttcaatgtaaacaaaacagccttctataagaggaagatgccatctaggactttcatagctagagaggagaagtcaatgcctggcttcacagattcaaaggatagact

SEQ ID NO: 338206 - DNA, 535 bp, Homo sapiens
gaaagctaggcctcttgtgccaaatagttaaccaagttgtgaatgcaaaggaaaagttcttgaagaaaatgaaaagtgttattccagtgaacacaaatgataagaaagcaaaacagccttattgctgatatggagaaagttagtggtctggaaagaagatcaaatcatccacagcattcccttaagccaaagcctaatccagagcaatgctctaactttcttcaattctgtggaggctgaaagaggtgaagaagctgaaggagaaaaatttgaagcaagcagatgttggttcatgaagtttaaggaaagaagccaccttcctaacatgaaagtgcaaggcaaagcagcaagtgctgatgtagaagctgcagaagttatccgggakatctaagataactgatgaagtcatctacactaaacaacatattttcaatgtaaacaaaacagccttctataagaggaagatgccatctaggactttcatagctagagaggagaagtcaatgcctggcttcacagattcaaaggatagact

SEQ ID NO: 338207 - DNA, 535 bp, Homo sapiens
gaaagctaggcctcttgtgccaaatagttaaccaagttgtgaatgcaaaggaaaagttcttgaagaaaatgaaaagtgttattccagtgaacacaaatgataagaaagcaaaacagccttattgctgatatggagaaagttagtggtctggaaagaagatcaaatcatccacagcattcccttaagccaaagcctaatccagagcaatgctctaactttcttcaattctgtggaggctgaaagaggtgaagaagctgaaggagaaaaatttgaagcaagcagatgttggttcatgaagtttaaggaaagaagccaccttcctaacatgaaagtgcaaggcaaagcagcaagtgctgatgtagaagctgcagaagttatccgggatatctaagataactgatraagtcatctacactaaacaacatattttcaatgtaaacaaaacagccttctataagaggaagatgccatctaggactttcatagctagagaggagaagtcaatgcctggcttcacagattcaaaggatagact

SEQ ID NO: 338208 - DNA, 601 bp, Homo sapiens
taatgaatgaatgaagtatatggatggatggatggatggatggatggatggatggatggatggatggatttctttgttcctttatttagggtcctgtattcccctgcataaagccctcaggtatgaaactgctagagattctctttatgctaggccaccacatcctttgaccacattccttgctccaattaggtagtacaagctcagtgagaaaagcaaaatttgatttatgtttctggcaattcagctgatgaaaacaactaaagtgctagataaaaatctgctgcaaatatcattttaaaaacaaaacattgctaatccatacaaaaacttttacacaaatgttcatagcaggattatttatcataggcaaatgtgagaayaacccaaatgtctctcaacagacgataaacaaaatgtggtatattcatgcagtggaatacgattcagcagctaaaatgaatgaagtagtgacacacggattgatgaaccttgaaaacagtcttctaagtgaaagaaactggtcataaagtgctgcatattatatgatttaacttatataaaatgtctaggataggcaaatctacaaggagagaaaata

SEQ ID NO: 338209 - DNA, 574 bp, Homo sapiens
aaattttttttgtctatattttacttatttgtgtattagagacctggttttgctatgttgcccaggccagagtgcagatgctattcgcaggctcgattatagctcactacagtcttgaactcctggtctcaagccatcctcccacttcagcctcctatgtagctgggactataggcgagtgtcatcgcacccagcttcttgtacattcttgttctcctctgaatatgttcatttatttctcctaaagtgaagctttactrtttgacactctgccttcctcctgcatgctactttgcactcctttaagcactgggaatacagcagtgaagaaaatagatatggctattgttaatatgaggggtgggagtaggtggggtggaggcaggagcgaactaagatttgctgatcatttactaaataccagacagtatatacagtatgcaaatagctgtatatatgttatgtcttattcttacaaggatgggataattatacccattttgcagatcagtaaactgagggtgagggagataaaatggctgggccagtaagtggtggagctgcgacttgaacc

SEQ ID NO: 338210 - DNA, 568 bp, Homo sapiens
atgacacgatcatgtatatagaatattctaagtaatccaccatcacaaaaacaaatattaaaattaacaaatgagtttagctaggtgcaggatagaagataaatatacaaagattgatagtatttctatataccagcaatraataagctgaaaatgaaattaagaatatgattctatatacaatagcatcaagaagaataaactacttaggaataaatataacaaaataattgtaagatttttatactgaaaactacaaaacattgttgaaagaaattaaataaggcctaaataaataggaaaatgtactgtgtttatggatccaaagacttaaaattgttaagatggcaatacaaggagatattgtgggtttggttccagaccaccacaataaagcaaatactgccataaatcaagtcacacaaattttttgttttctcaatgcatataaaagttatgtttgcactctaacctactaagtgtgtaataacatgtctaaaaacacaacgtacatgccttaattagaaatactttgctagaaaatgttaattaactgagcatgcagcaa

SEQ ID NO: 338211 - DNA, 586 bp, Homo sapiens
tgtgggtttggttccagaccaccacaataaagcaaatactgccataaatcaagtcacacaaattttttgttttctcaatgcatataaaagttatgtttgcactctaacctactaagtgtgtaataacatgtctaaaaacacaacgtacatgccttaattagaaatactttgctagaaaatgttaattaactgarcatgcagcaagctgtattttttttgttggttgagggtcttgccttgatgttgatggctggtgactgatcagggtggtagttgctcaagattggagtgtctgtggcattttcttaaaataagacaacaatgaggtttgctgcattgattgacttcatttcatgaaagatttctctgtagcatgtcacgctgtttgacagcattttacccacagtagaacttctttcaaaatcaaagtcaaccctctcatatcctgccactgctttatcaactaagtttatataatattctaaatatttggttggcatttcaacaatttcacagcattttcaccaacagattccatctcaaggaaccactttctttgcttatgcataagaagcaactcatttat

SEQ ID NO: 338212 - DNA, 555 bp, Homo sapiens
actccaattatcttacctgtggctggatagggaggactgcatgtccccctgggacaaggccacagtctctgatttttaatacttccatcttaycccaagaggagacactctcccccaggacttaagcaacacttcttgcctattttcctgttcaaaattataaacaaggtagacagggaggcaacactgcttgcattctatcagaaactgagccttggattgcccgatgacctgcccaagaccactgagctagtaaataggagaaccagatttacagccgggtctatgtgacttagcctgacaatgtacagttgtgcaggttattctctatctagtagcaggaagtgacatgtacataggtatctccatatatatatatatatatatattcgctattttccagcaaatggcaatcaactgacttgagggaggaatacccattgtctaatttgcaaaagataccatttgagctctcagtagccctggtatggctgctgtcactcctctatccacaaggaagcgaagctatgacaggctgttccaaaagcccaggaa

SEQ ID NO: 338213 - DNA, 564 bp, Homo sapiens
ttggatacagccaaagaaatcatacaaagactatactactgtgttcacccagaaccaaaaccaaagtgccccaaccaaccaacactatagatacatctatgggaaaacatcttttcctacaaaagctactccatcaaattggaagaagtgactgttacactatatgtgcagatgtcaacataaggacacacaaaaaaatgaaaattcaaggaatatgacacctccaaaggaacataattctccagtaacagaccccaaagaaaagaaaatctatgaaatgcctggaaaggaattcaaaataataatcctaaggaaacttagtgagatatgagaacacaggtagataatrcaaaaaaaaaaacatgaaaacaactcatgatctgaatgagaaatccaatcgagatgtatataatttttaaaaaaccaagcagaattttggagctgaagaattcaatgaataaaatgaaaaatacaatggatagcttcaacaatataccacatcaagcagaaaaaaatttctgaactcacagttcttttgaaataacccaatttgacaaagaaaaa

SEQ ID NO: 338214 - DNA, 564 bp, Homo sapiens
ttggatacagccaaagaaatcatacaaagactatactactgtgttcacccagaaccaaaaccaaagtgccccaaccaaccaacactatagatacatctatgggaaaacatcttttcctacaaaagctactccatcaaattggaagaagtgactgttacactatatgtgcagatgtcaacataaggacacacaaaaaaatgaaaattcaaggaatatgacacctccaaaggaacataattctccagtaacagaccccaaagaaaagaaaatctatgaaatgcctggaaaggaattcaaaataataatcctaaggaaacttagtgagatatgagaacacaggtagataatacaaaaaaaaaaacatgaaaacaactcatgatctgaatgagaaatccaatcgagatgtatataatttttaaaaaaccaagcagaattttggagctgaagaattcaatgaataaaatgaaaaatacaatggatagcttcaacaatataycacatcaagcagaaaaaaatttctgaactcacagttcttttgaaataacccaatttgacaaagaaaaa

SEQ ID NO: 338215 - DNA, 610 bp, Homo sapiens
aacttaaactgtactatcaacaaaatgaacctaacagacatttatagaacatttcatccaacagctgcagaatacgctcttttcatcagcacatgaacattctctaggatagactgtacgttaggctacaaaacaagtctcaacaaatttttaaaaactgaaattatatcaagtgtcttttcagactacaatgtaccaaaactgaaaatcaataataagaactttggaagttgtacaaataattaaaagttaaacaacgtgctcctgaacaaccaatgggtctatgatgaaattgagaaagatatcaaaacatttcttaaaacaagtgaaactagaaacacaacatacccaaacctatgagatacatcaaaatcagtactaagagggaagttcacagcaaatgcctacatcagaaaagtggaaagatttcaaataaacaagctaacaatgcacctcagggaagtagaaaaaaaagaacaaaccaaaccccaaattagaaagaaaggaattataaagatcagagaagaactaatcaaaaaagagaaataggaaaaaatgyaaaaagatacataaaatgaaaagttggtttgctgaaaaaataaacaaaatt

SEQ ID NO: 338216 - DNA, 610 bp, Homo sapiens
aacttaaactgtactatcaacaaaatgaacctaacagacatttatagaacatttcatccaacagctgcagaatacgctcttttcatcagcacatgaacattctctaggatagactgtacgttaggctacaaaacaagtctcaacaaatttttaaaaactgaaattatatcaagtgtcttttcagactacaatgtaccaaaactgaaaatcaataataagaactttggaagttgtacaaataattaaaagttaaacaacgtgctcctgaacaaccaatgggtctatgatgaaattgagaaagatatcaaaacatttcttaaaacaagtgaaactagaaacacaacatacccaaacctatgagatacatcaaaatcagtactaagagggaagttcacagcaaatgcctacatcagaaaagtggaaagatttcaaataaacaagctaacaatgcacctcagggaagtagaaaaaaaagaacaaaccaaaccccaaattagaaagaaaggaattataaagatcagagaagaactaatcaaaaaagagaaataggaaaaaatgcaaaaagatacataaaatgaaaagttggyttgctgaaaaaataaacaaaatt

SEQ ID NO: 338217 - DNA, 588 bp, Homo sapiens
ccagttagaatggcttttatcaaaaagacaaaaaaaaatgctggtgaagatatggagaaaagggacatcttctacattgttggtggaagtgtaaattcattacagacattgtggaaaacagtatgaagttttctcaaaaaaatatatagaactaccatatgatctagcaatctcaccactggtatttatccaaaggaaaagaaatagatatactaaaggaatacctgcaccccatgtttatcatggcagtattcatgatagccaagacatggaattaacctaaatgttcatgagcagatgaatgggtaaagaaaatgtggcacatatatgcaatggaatactattcagccataaaaaatgaaatcctgtcatttgcagcaagatggataagcctagagttcatagttaagtgaattataattaagtgaaataagtcaggcacagaaagataaatatagtatgttctcactcatgtggsggctaaaaaaggtcaagctcattgaagtagagaacagaattgcagttattagaggctaggaaggggaaggggaaaagaaaggctagaaagaggttggtaaacgaatacaa

SEQ ID NO: 338218 - DNA, 588 bp, Homo sapiens
ccagttagaatggcttttatcaaaaagacaaaaaaaaatgctggtgaagatatggagaaaagggacatcttctacattgttggtggaagtgtaaattcattacagacattgtggaaaacagtatgaagttttctcaaaaaaatatatagaactaccatatgatctagcaatctcaccactggtatttatccaaaggaaaagaaatagatatactaaaggaatacctgcaccccatgtttatcatggcagtattcatgatagccaagacatggaattaacctaaatgttcatgagcagatgaatgggtaaagaaaatgtggcacatatatgcaatggaatactattcagccataaaaaatgaaatcctgtcatttgcagcaagatggataagcctagagttcatagttaagtgaattataattaagtgaaataagtcaggcacagaaagataaatatagtatgttctcactcatgtggcggctaaaaaaggtcaagctcattgaagtagagaacagaatygcagttattagaggctaggaaggggaaggggaaaagaaaggctagaaagaggttggtaaacgaatacaa

SEQ ID NO: 338219 - DNA, 535 bp, Homo sapiens
tacacattcttctagggagctttttaaaaggagcattggagtttttcaatcctccttcttcttccttaagtatttgcccattttaatgttgagctgctttctttatatggaaaaaagaattgctccactgagctgtagaaatttgattttcttggtcagttggggtcaatcttactctattaaaaattttaaaacaatcacttatgatgattcttcatgtaactcttaaggtttcatatcttatatcttatttttatattgaatctgcatttttgagggaacaaaaaatgctccccagactttgtctggctcacaaagggataaaagctttacaagatatacatgccactctgactatagtctctgcattttgcatgtgaggcgatcaggaaatggagacgttcagcagcttcttccagatcatccactaaatctgctgcagaactataatgagggctctgaggcttactatcttcatttctakaaaacccatcagtcttctgtttgtaatttattatgagactgctttcttccc

SEQ ID NO: 338220 - DNA, 547 bp, Homo sapiens
tctaaaagttattggtcttaaagaggaggtaaagagagagatcggggtagaaagtttattcaaacagataataacaaataaactttccaaacctagagaaatatattaatattcaaatccaagaagtttatagaacaccaagcagatttaagtgaaataagactacctcaaagcacttaataatcaaagtcccaaagatcaaagataaaggaaaaaaccctaaaagcagcaagagaaaagaaataaataacatacaaaggagctccaatacatacaatagaatacatacaatagaatacawacaatagaatacaatagaattctcagtggaaaccttacagtccaggagagagtggtatttaaggagctgaaggaaacaaacttttattctagaatagtatactgagtgaaaatatcatttaaacataaagaagaaataaaaactaacccagacaaacaaaagctgatggatttcatcaacacctggcctatcccacaagaattgctaaaggcagttcttcaatgtaaaagaaaagaatgttaatga

SEQ ID NO: 338221 - DNA, 575 bp, Homo sapiens
agtagaaatcaaggttatgtgctagtcttggctctgccatgacttggttatgtcactgtctgcacctttcatggcttgtttctccgtcaatgaattaagaaagttggattagactattataattttttgttgttgwtagtgttttaagcaagagtttttcaaatgaaaatttacttgaaatttagatatataatgaaatatattggttttctagtgctgtataacaaatctccccaaaatttagtaccttaaagcaaaggtagtaatttattaatctctcacagttccatgggttgggaaatggagattgacttggctgtgttaccaaactaaacttggctctacttgccctgtgtgcagaaaaagccaaacactaatattaagatctgcagcaagagaaattattgcatttattgtagggtgccaagcaaggagaatcaggcagctaatgcttaagacctgaactctctgatggcttacaagcaagggttttgaaaggcaggggtatattttaagaaagcagaagttacaagtaaaatcataggtgaatacatggaagttacatattggtttgg

SEQ ID NO: 338222 - DNA, 575 bp, Homo sapiens
tctgaagttaagtgatgctgaatagaagctccttatgtktttttggttcttgagctcttgcctaaaataagcaagtttgatttcctcttgaaaagtatcaggcagatgaattctaagagtataaaacaggtgaataccacggtgtatatttcattctgctgtgggggaaaccactcttacacttgcacaatgggggtggttggggatgaggaaagtctaatccataataaactgaggatgaagaatacattagtggaaaaaatggcagaatggagattgggtcttggaggtgactgtgttcacactcaatgggattgatatcatattcttggccattaactgctagatgccttacacactctactggatctgaattaatcctgatttagcctccttcctccttgacaagaagagagagatatggacatttctaatgcaaaaatgtgttatgatcttcatagcaacatatgtacttggctctgttagaaaacacaaaaaatcattctagaacaaaatttattataataattattatcatagtttcaatatcattattttgtgaaatcatgtcagag

SEQ ID NO: 338223 - DNA, 577 bp, Homo sapiens
gagccactgcacctggccacaggtatccctttctgaggcaaacttctgcaatgcccaagtcttgtttagtgtcactggatgcttagcaacactttgataaataggaatgtsccagtacttcttcaagtggggttcatacatatgacagcatgcccctggggtgctggctgaaaattcaaataacctaagtctcaggccagacctcataaatcagagtcttcaagggtaggtttggggaccctgtattttaaaccaatcagatcctgtatcctccacacttaaaatcctcctattgcttcccattgtttttagaaaacaacaacaacccaaactgtgcatgtttccatgtcctatgaggtcctacatggtctagaccctgcctgtttatctcccatgaggctgcccctccacctctgggctcataacccaaatggcctcttgtctgtctgtcatggcaagctctcttcttccgcaggacctttgcacatgctcttacccctgccagaaatgatttcttctttccatttcacctggctaacaacaaatcatcatttagttaagtctcaactcagaagcc

SEQ ID NO: 338224 - DNA, 577 bp, Homo sapiens
gagccactgcacctggccacaggtatccctttctgaggcaaacttctgcaatgcccaagtcttgtttagtgtcactggatgcttagcaacactttgataaataggaatgtgccagtacttcttcaagtggggttcatacatatgacagcatgcccctggggtgctggctgaaaattcaaataacctaagtctcaggccagacctcataaatcagagtctycaagggtaggtttggggaccctgtattttaaaccaatcagatcctgtatcctccacacttaaaatcctcctattgcttcccattgtttttagaaaacaacaacaacccaaactgtgcatgtttccatgtcctatgaggtcctacatggtctagaccctgcctgtttatctcccatgaggctgcccctccacctctgggctcataacccaaatggcctcttgtctgtctgtcatggcaagctctcttcttccgcaggacctttgcacatgctcttacccctgccagaaatgatttcttctttccatttcacctggctaacaacaaatcatcatttagttaagtctcaactcagaagcc

SEQ ID NO: 338225 - DNA, 567 bp, Homo sapiens
ggcatgaataaattccagtagcaagatctcaaaactgcaattaaaaaaaaatgtatcatagcgggaacacttaacatgagatccaccctcttaacaaatgtttttaaaatgtacaatacagtgctgttaattcatactatatacttctcaatggtgggccaatgtctatgtcttcttccactaaatccacaaagcttaaataatgcttggcaaatagtaagtgctcaattcatattgagtaaaakaaatggtgtttcccagtgtgatatcatccagtgtcatgactttaaggcccatctactagttggtgactcctaaatttataccttcaactgtaacctcaaaatgtctaaaattaaactcttgatccaatgttcaccatctcagaaaacggtttcatcattcacccagttgcttagggtccaaaacttgttgtcatccttaacctttctctcaccacatatttgatccatcagcaactcctacagcttccttttaaaatattttcagaaaccctctggttctcccctgctcccctgctaccaggtgcaaatcattaccacctct

SEQ ID NO: 338226 - DNA, 566 bp, Homo sapiens
ggtttcatcattcacccagttgcttagggtccaaaacttgttgtcatccttaacctttctctcaccacatatttgatccatcagcaactcctacagcttcctttyaaaatattttcagaaaccctctggttctcccctgctcccctgctaccaggtgcaaatcattaccacctctcaacaaaacttacttctgtagtcctttttagagggaaacgcttgggtttgtggaaataaatgaagaccactctaatgaaaatcaacagaaactatgtattcagagttggctatagcaagagagttagcctccattccttttggttggcacagactcaaaggcaagcaatgcagtgtgaatgatttatagtatgaaaagggaaggcttcatgtttgctagattggaagttgttggtatggggaagcaggaaatgggctaactagaagcaaggcatcctatgtgattgggctggggaacatatttgattttctctggttggtcctgagttggaagctggccaagttgtgaccattttagaccaattgctgcagaggtggtttggctttctgga

SEQ ID NO: 338227 - DNA, 537 bp, Homo sapiens
gagccccagtaaaactagaagagaaactgtccagtcaaaccacagaatcatgagaaataatggattattgatgctttgaaccactaagttttgggtggtttgttatgtgacaaaagacaattttaaagcatttctaaagtataccctttgagactcaaacatcaaagaaatatcagagtatttctttctatcatattttaccttctctctgagaggagttctagtaaatatgttcttcctacctagatacatagttattagctagatgtactgtccaagtggccccaacccttaatctagttgtagggaaatgatggtaggtctagtgttcaaaagaactgctttgcttcargaaactccctcagaatcacagaattggtccagctagtcattgtcttccccaagaaggggcagattctacaggcagaagagtacagacttggaaaaactagcttctcctggtgcagagagtaagggctctcacctacagggcatgcttgaccgtgtgctggactctgaagagacaggccaacaaag

SEQ ID NO: 338228 - DNA, 582 bp, Homo sapiens
ctgtgtgattttcaagtttagatcatgaaaagtgatagagcttttgcctgggtctctctttggaacatgcaccttttgttctctcagctgtcatgcaagaaataggtccactctgaagctgctatactgggggaccagaggcagagcccatgtcgagagagcacagatgtctgagcagccccagccgttccagctcccagctacttgagtctacctaacccaggcattggacaagtggatgaagaagactttgagatgaccccagccccagccaccatctgaatacaaacaaatgcatgagagaccccaagtaagaaccacctagctgagcttagtcagacctcagacctgtgaaagatctaataatagatggcagttgctgtttacactactaagtttgggctactttgttatacagcaatagataactgctacagaatccttgagcactgctgagatgaggaaggaacargcgagaggagctatggagactggccaccatctgtgtggtacctcactgccagttgtgtctgcagctttgctgaggggcaggtcactccactgccactgacctggaaggat

SEQ ID NO: 338229 - DNA, 582 bp, Homo sapiens
ctgtgtgattttcaagtttagatcatgaaaagtgatagagcttttgcctgggtctctctttggaacatgcaccttttgttctctcagctgtcatgcaagaaataggtccactctgaagctgctatactgggggaccagaggcagagcccatgtcgagagagcacagatgtctgagcagccccagccgttccagctcccagctacttgagtctacctaacccaggcattggacaagtggatgaagaagactttgagatgaccccagccccagccaccatctgaatacaaacaaatgcatgagagaccccaagtaagaaccacctagctgagcttagtcagacctcagacctgtgaaagatctaataatagatggcagttgctgtttacactactaagtttgggctactttgttatacagcaatagataactgctacagaatccttgagcactgctgagatgaggaaggaacaagcgagaggagctatggagactggccaccatctgtgtggtacctcactgccagttgtgtctgcagcyttgctgaggggcaggtcactccactgccactgacctggaaggat

SEQ ID NO: 338230 - DNA, 521 bp, Homo sapiens
agatatgcacaatcagctctcaggaaccagacaagccagctctagcaaataattcagggccagccaatgccacacagctagcaagtggcagaggcagaatttgaacaaaggcagtttggtttcagaatctggacttctaatcgttatgttgcttcctagccttctctttcctagacccacattattagaccctgtaaagtattgaggattgttgtactaatctatactttgagtcctggactctggagggccaygtcctagcatcagctgatgctaatataaccacagacatagagaagactttctgccagaagcaaggtggccatatcttccctcattttcaaaatatcttgtctatgctgtgttgttcttgacttttgagtttattccagcttctgggaactcctgcttcctagctcctgcctgcttgcctcgccttacctcccatctcaacttgatcacttttactcatttgtccctgtggcctgcctgaccatgacccactgagcatctaactgctg

SEQ ID NO: 338231 - DNA, 624 bp, Homo sapiens
ttaacacttgaaccatttagcctgacagttccttgcatctgatgtccctccttctcacaccacctctccagttctccctcatctgcaaggcctggcttaggcctgtcccctccatgaggactttctcataatcaatagccctggctgttagctcccccrtttcttagcaattattgtgtggggtgtttttaccttgtgaaaaagcttcaggctatgtctgtctggcttacaggagaaaaaataagctttattccatattttcttgtgctacccagtgtagcttttggataaaaaactagtgtgtcctcccttcaaaggccaggcttgaagaattgtatatgcccaaaaggatatggggacttgactatgatccagcgtcaacagcacagtctgggaccgaaggggagatttaccatcaaacagagtgagccgctgacatttgctccctttccactgtgcctgtgacccccagtggcaaggactgggcagctgatgtgggtccagtaggaggaatggacaggctgcaagggggagaaagggcactgctagctttcaggggtcatgcggtgacagtggtccctccatttgtggtattagactccaaccaggcctttcaggatcgtc

SEQ ID NO: 338232 - DNA, 537 bp, Homo sapiens
tatactaaaatatagaaattcagatgtatcatttaatctaggaaacattattgtccttgcttctcagtccatttcccctcagtacactttcagtgcacgaagggtagaaactgtgtattatttagctgtagtgcccagtctagagaagcagagtaaaatttgttactggctatagctgtgtccagggaagacaggggattaagtctcctttcttctgtcctacagtttccaaktattgtataatgggcatgccttttagtttgaaaagatggtttgaagaaaaggggagaagcttaaaggtatggctaataatcctgcagaagggaatgcacaatttaatgtttcccgctgaattctataaatctctagagattcttactatgagaattgtattcccttgctatactgtgacaaatgcctaccaagagacacacaggttttaatataaatccatcatgtatttctttactttgtgagaaactgcctttcattgcatgattctggatatacttgtctatggggataaaacgaaatgtc

SEQ ID NO: 338233 - DNA, 575 bp, Homo sapiens
aataaaagttgataacaaatgaatgaatgagcaaattggttgattcattataccatttacctaaatgtaatggtttgctttttgtttttaagaaagaatgaaagctattccttacccttattgtgtgtgtcaccttaaatattttcttgtcatccttgtcttaatgggacttacctcagaagacaaggattcaagtacaagtagtttatttaagaggttatccaagaaaataccagcaaaggagtaggagagtgagtcaaggaaaagaaagaggcaataaaggatatgttattaagccaattcccactgtgagcaacaggagctaagtcctattggggtgatctagggggtagtgcaagaccctcttcagagctgtcccaaccaacaggtgaggactctgagsgggtatttatctaccaattgggtgagtgttgcttctagggatgttatctcctgaaacttctagctcaccctgcacacagaccaagcatactcccttggccaggcaaaaaccctcaagctgagagtcaatggtgtttgcagcatgcaactatcagtgtgctcagggaatgtag

SEQ ID NO: 338234 - DNA, 553 bp, Homo sapiens
actggggtcttctggctaaatagttgtgtcactctggttccctggtcctttcttttcttttcttttttttttttttttgagacatggtctcactctatcactcargttggagtgcagtggcatgatcatggctcactgtagcctcgatgtctcaggctcaagcagtcctcccacctcagcctcccgagtagctgggactataggcatgcaccaccacacccagctaatttttggttttttgtagagacagggttttgccatgttgcccaggttagtctcaaactcctgtgttcaagcgatccacctgccttggcctcccaaagtgctggaattacaggtgtgagccactgtactggccataaatcctttgaattaattttcttacttcaaggacagcctttgggtcacaactgggaaaaaaaaagtagcacctttggaaattagagccctggatcccaatatcccagttcattatacttaatggatgctttaggcattagaattttattttctcatagaatactcagaaaggctgagtggtcaagaaaaagga

SEQ ID NO: 338235 - DNA, 553 bp, Homo sapiens
actggggtcttctggctaaatagttgtgtcactctggttccctggtcctttcttttcttttcttttttttttttttttgagacatggtctcactctatcactcaggttggagtgcagtggcatgatcatggctcactgtagcctcgatgtctcargctcaagcagtcctcccacctcagcctcccgagtagctgggactataggcatgcaccaccacacccagctaatttttggttttttgtagagacagggttttgccatgttgcccaggttagtctcaaactcctgtgttcaagcgatccacctgccttggcctcccaaagtgctggaattacaggtgtgagccactgtactggccataaatcctttgaattaattttcttacttcaaggacagcctttgggtcacaactgggaaaaaaaaagtagcacctttggaaattagagccctggatcccaatatcccagttcattatacttaatggatgctttaggcattagaattttattttctcatagaatactcagaaaggctgagtggtcaagaaaaagga

SEQ ID NO: 338236 - DNA, 553 bp, Homo sapiens
actggggtcttctggctaaatagttgtgtcactctggttccctggtcctttcttttcttttcttttttttttttttttgagacatggtctcactctatcactcaggttggagtgcagtggcatgatcatggctcactgtagcctcgatgtctcaggctcaagcagtcctcccacctcagcctcccgagtagctgggactataggcatgcaccaccacacccagctaatttttggttttttgtagagacagggttttgccatgttgcccargttagtctcaaactcctgtgttcaagcgatccacctgccttggcctcccaaagtgctggaattacaggtgtgagccactgtactggccataaatcctttgaattaattttcttacttcaaggacagcctttgggtcacaactgggaaaaaaaaagtagcacctttggaaattagagccctggatcccaatatcccagttcattatacttaatggatgctttaggcattagaattttattttctcatagaatactcagaaaggctgagtggtcaagaaaaagga

SEQ ID NO: 338237 - DNA, 384 bp, Homo sapiens
tgagagctaattaaagggtcagctgagcatataatttttaattcctaggcacctaaaaactgagattgacaataaaatgtgataaaactcagaatcatttgctaactaataaagcagggattttcaagctgccaatttgctaagccaaatttcaagctgccaatatttaaagtaaactatgtggaatataatatttctatgataatgaactatcaatcatttaccctagcatacttcattacgatgtgcttggattttmtttcttttatatttttggtaaggattacaaggtcaaaagaaatatcaacaaattgtgttctcatttcagattgaaattcactcctgacatagaaagtattattgttagttagtatttatatagca

SEQ ID NO: 338238 - DNA, 503 bp, Homo sapiens
gtttatttaaagaactatttacaagcacacagtcagagtgtagaggagccacaaggatactgcaggaaccaaggactaaagaaggggtgtttyaccacccctacgcccaaggggagaagaggagatggtagttactcaaacctggagaagagaaaatatggtgggagaggccaccttgagagaaacagaggccatcacaagacacagccatgatgtggtgcccttccagggagggatctggggaataaacaccctgatctcaatctcttccctccctcccatctcccgccaacatttctcattagccaaacccattttaagtgttaagacagtgggcagaggaatacaaagaggtcagcttcccagagcacagggtagacaagggtgagggtcgatctggaagggcaaatggaagatacctgcataggcagagatggaccacacacatcttcattctatgattaggtcacattacagatatatttataatgcatatggaatca

SEQ ID NO: 338239 - DNA, 559 bp, Homo sapiens
gagtcactggtagagtccatgtgccgttagcctcatagttttgcacatgctatttcatctgcttaaaatattcttgtcaatttcctgcagataagaagccatcggagtggtcttttactgggaaacatgcttggatttgcattcttaaaaggaaactgatggactaaaggcctctccagactttggtgtggagggagcctgcctcaggtgctgtaggattctttgccaaagctagggatatacagcttccctaggtgtcaccgcccccaccccaaarctctgccacagcattgagggtgctccaaagatgcagaccattgtatccattaaccttagaaaatcaatctctctcttccattctttcataccttcctgtttaccttcccaaaggtctctgctcctcctacctcccaggatagaatcccctcaaggggcctctaacacaccaaagccatttctcttctagtatggacaatttctctttcctttctgcaacacaactctcccctgaggcaaagggagcacaggggaactagctacctatgtggaaagggaaaag

SEQ ID NO: 338240 - DNA, 622 bp, Homo sapiens
aaaacttgactaaaacgattttgatggaaacatttcattccaatttttcagtaatcaattttcaactcatctttggaactcagcataatcataaattgtaaatacatacatgagctgtatgccaaattgaattttcaagctacaaattaatatctaatcactcagtttgcagaagtattgacactgatattcctttaaaacaagaactttggtatttgtttccagaccattaactacttgatagaggatctaggggtgggttaagcagtctaatgcacaaaagttgaaaattgttagacaaagatgagtgaacaataaatgttaaattataaggagatatgaaaatagaattgatttattgatctatatatcttagaaacaaatctatttgtgaaaatgaagtaragcattaattgctcaccaggcacatagtataattttgttgtttttgttacagagagtaaccaagtattttcctcttacaacgtgaaatactcaccaatattttcttatcccactgtacagatttgcatattatttcatacacttaattgaaatgtttatatatatatatgcatgctagttatgggagaagtttagtgtcactctatcacatatatcc

SEQ ID NO: 338241 - DNA, 572 bp, Homo sapiens
gtttgaaaaaaaaaataagaagacacgatgactccttcaacagcatgagaaagctctcacaggagctccactgcctctcaccttccaaaggggcacctggtgccttgcccacattctctcagtacccatacatgccgtttgtgctggcttcatttacactgattactctaagtgttctgacattttctcttttgctcattttgtattctcagcttgagtgaaaattagaacaacaggggccattcctgcttgactcatgtatcttctttcatagctcctcccaggatctagcacagtgtgtcccttccactggactgttgataaatgtcattgaccgttaakgcaattgcatggcaatgcagaagaagtataatttgattaactgcaagtacttgtaaatgcagacttttttttttcttaactaaaggatttttttttttttttttgagatggagtctcgctctgtcacccaggctggagtgcagtgttgcgatttcggctcactgcaacctccgccttctaggttcaagcaattctcctgcctcagcctccctagcagctgggattatagg

SEQ ID NO: 338242 - DNA, 597 bp, Homo sapiens
ggtttatacatgtgtatcaagttcagaaagcatattcattcacaagaagctatgtgttaagttacttggtcttccaaaagtycaagaacccaagtgtacctgtgcttcacatggttacaaattttcagaagtccttgtagtgcttagaattccacatttctatgctctttcatttcattgttcttttaaagtaaacaaggaaaggcagatgagaaaacagaaaatatataattgaaaaatacctagtaagtttcaaactgaaggtttaaaagtcagagttgcacaagttatcttggcaaagaaatcagtgtacctgcaagtatttaatattaataattaaattgtataatgtacaattatggctacctgtatgagtatggtaggtgccaagaactttgtgaagtatgctatgtgcattatctaattttatctgatgacaaccccatggaagattctttcattatatctctcagacttggtaaacgaaagcacagagaggttaagtaacttagtcaaagtcacacaactaataaatagaactgaaatttgcatccacaaaatatgacttcagaaccaaactcgacatttaggctctgc

SEQ ID NO: 338243 - DNA, 553 bp, Homo sapiens
tataattgaaaaatacctagtaagtttcaaactgaaggtttaaaagtcagagttgcacaagttatcttggcaaagaaatcagtgtacctgcargtatttaatattaataattaaattgtataatgtacaattatggctacctgtatgagtatggtaggtgccaagaactttgtgaagtatgctatgtgcattatctaattttatctgatgacaaccccatggaagattctttcattatatctctcagacttggtaaacgaaagcacagagaggttaagtaacttagtcaaagtcacacaactaataaatagaactgaaatttgcatccacaaaatatgacttcagaaccaaactcgacatttaggctctgctatttcccatcttcaatagtgcatcacgtgcagggactaagatgtgtttaatcatcagcatttccagatgtctaagaacatgtgcaatggctaatttatttaaagaaaatttcatatatataaaattgaaatggctgtatttatataccagtatgtgtatctgtatacaaacaatggcattt

SEQ ID NO: 338244 - DNA, 535 bp, Homo sapiens
catgaatttcaatcttttttacttgttgatgatagaactgtctttgttaaaagactaagtcatttttcataaagtaggtatgaaagcctggtcatcttttgtaccagtttatatgtcttttaatccatctctgctatttatgagatcataaagttgatgtggcaccaaatagatcaaaagcaaaagggcaattgttttgtatcagtatatatactttcttcagtattttttcactgacttctaaaaaatatgctcataaatttcttttcagactgattacatggtgctgamtatcttgaaactgaccagggtgggcaagaaaagtgttcacttggctaaggcaagatgacccttaaccaatgcagtgagtgtaagttttaatagtatgattatggtgataaacagctactaccatttcttgaacaaccacagtgtgcacagtactctactgctggctccagggtcattatcctataaccaagtcagcccatttcacagatgaagaaattgaaagccaaggaagttaagtaacccc

SEQ ID NO: 338245 - DNA, 557 bp, Homo sapiens
aaagcctgggttaccaaagtcagagaccaagagcagcactgacatggtgctgaatcagttatcagtgttcatttgcaacactctggataggacagaatcacttttagagctttgtcttactatgggacaaagytaaacttgctgtggggagagggtaggagagcacacctgccaggtgactcaggaaatggagaaccccaaaactgttatggccccaagtctgctttgtttgattaacatctcaactccatatattttctttgtgtactaagaaaccccgtgaaacctcaactcttaaccccttgggtagactcccactctgataatcagtctgatagaggtttagagcctgtaagccttgcataagtctgacaagcagtctatcgatctatttccagcgcagtgtgggttgcagggaaaagttgagcaagggtgcgtgggtgaggggtgagggcgtatgtgaatagatgctgattctcttcatttccatttcagagggaatcattgctgaccttgttgctcccttcttttaaaaagtaatgataatgtcaaaagca

SEQ ID NO: 338246 - DNA, 557 bp, Homo sapiens
aaagcctgggttaccaaagtcagagaccaagagcagcactgacatggtgctgaatcagttatcagtgttcatttgcaacactctggataggacagaatcacttttagagctttgtcttactatgggacaaagctaaacttgctgtggggagagggtaggagagcacacctgccaggtgactcaggaaatggagaaccccaaaactgttatggccccaagtctgctttgtttgattaacatctcaactccatatattttctttgtgtactaagaaaccccgtgaaacctcaactcttaaccccttgggtagactcccactctgataatcagtctgatagaggwttagagcctgtaagccttgcataagtctgacaagcagtctatcgatctatttccagcgcagtgtgggttgcagggaaaagttgagcaagggtgcgtgggtgaggggtgagggcgtatgtgaatagatgctgattctcttcatttccatttcagagggaatcattgctgaccttgttgctcccttcttttaaaaagtaatgataatgtcaaaagca

SEQ ID NO: 338247 - DNA, 561 bp, Homo sapiens
tccttgtttagtgcagaaccagcaaacaagctatgtgaggtgaaagatacacaatggtatgagtggatgtggttctcagggttcctttgctccttgggatgccctggcagctatgcagaatgaggaattcaccaggtccaaaaagcccaygtatgtgctgtcttttatattaaatactttatataaaagggggtaggctgggtaagggttacaggggcccagcagtctacaacacccaggtgatcactccaggttccagtttcaggattccttgatggatcataatgatattatctcatgtgtcttcctttggttctggctgagccatagaatctactttagacttcagtgcaactggcctggccttggcctgtcatggttgttaagaacagatagctcaacaaataattgacttcaaattctctgccattttcaccaaagaaattctagcgtgaagagtggcaatctgccacagtaaacatagtgcagtgacccctttgacaatgtttagaggtcaggcgtgtttgatggctaatttggagtgacctatcagagacgtga

SEQ ID NO: 338248 - DNA, 518 bp, Homo sapiens
tctttctgggcagccttctctatttcacatcaactccaacttgcagcggggtgatgacaaaatgaacaggtcacaggarcatcctcttttgtttgcagcctggagagtgggtcatgccccaggaccatcataacactgatgttcaacaaggcattttcttctgttctcttctgaacagtctcggattttgattcttagaatcaaatgtctgacaatctcaattgctctgatattgagtctttgtggcctgttctcatcattgtcttttatatacctgaccttcttctcagtaattgggccatcttctgactgtagtacttttgggaataatttcttcagcaaagtttgcaggttcatttcctgacagccatatcatacccaccaaagctgcccacttttagtcttgacctggtgttctgaactctcaagggagcctcaggaattgctattttcttctcatgttactcttgagcatgttacatttgctgcatgctttgacccaatagaacaaagtctct

SEQ ID NO: 338249 - DNA, 518 bp, Homo sapiens
tctttctgggcagccttctctatttcacatcaactccaacttgcagcggggtgatgacaaaatgaacaggtcacaggagcatcctcttttgtttgcagcctggagagtgggtcatgccccaggaccatcataacactgatgttcaacaaggcattttcttctgttctcttctgaacagtctcggattttgattcttagaatcaaatgtctgacaatctcaattgctctgatattgagtctttgtggcctgttctcatcattgtcttttatatacctgaccttcttctcagtaattgggccatcttctgactgtagtacttttgggaataatttcttcagcaaagtttgcaggttcatttcctgacagccatatcatacccaccaaagctgcccacttttagtyttgacctggtgttctgaactctcaagggagcctcaggaattgctattttcttctcatgttactcttgagcatgttacatttgctgcatgctttgacccaatagaacaaagtctct

SEQ ID NO: 338250 - DNA, 410 bp, Homo sapiens
caaattaagatttgtctagatggactctagaacttagagtggagggctgggcacatgagcttctaccctccccctgcctcagcctgctcttcagcctagtggtgggaaaccatagaaggatagaaaggcggaggtttaccttaccttacagcctctgcaaggtggcaatgctgttcttaattgatgactactattttggctgtctctgtgggacatacatcgtcttaacagaccctgtggatgaagggatcccccagatkgtcccttaggcattgagagtcccttgtgagatagctgcatcttccagcttactcatagttgttagcagaagccttcattccttgactgtatgtgcctctttcttccacactgtgttagtcctggcaagattgtgtcgtctgttctcatat

SEQ ID NO: 338251 - DNA, 508 bp, Homo sapiens
atgctgggggattgaggtcagaatccatctgagaatgaacattcctcttgaaaacctggaactgctggggcccaggcaagtacaggtggagtggactgcggggggcttttctttcctgctcaggtaacacaggggaggctggcaagcccactgacaaagcaagcgcctaaataagaaacaaaatgccagtcttccttttttgcccatcacttggcttcagagaatattgtgggttgaattgtgtttcttcacacacacamaaaaaaatatattggaattctaacccccagtacctcagaatatgaccttatttagagctagggtctttacagaggtaattaagttaaaatgaagtcattaggatgggctgtaatccaatatgactgataaccttacaaaaaaacggaaattcggacacagagacagatatgcacagagagggaagatgatgtgagaagagatacagggagaagacagccatctacaagccaaggagagagccctagaa

SEQ ID NO: 338252 - DNA, 577 bp, Homo sapiens
ttattttatgtaacaggtagttttcactttcatgtgtaaataacttaagaattgagtttctgtatcaattgggaatagtgctaatactcacgcatttgaggaaataagtagacacagtgtgtggtgctaccttgctcctgaagacagcagacttactctggcagtcagtgtctcagcaggagccagaaacagggcttttctgcctgtctcctctccagttagagatccagcagagaagaggacaccrattgtttcaggaagatgcgcctctgtgcccctttccttgtcctcagctggcttagttctgcatgcaacaggtctggctgtaccccatggtgctctctttcattctccgcatgacagctctctctctggagagaagcagaatgggaaggagagagaagaattattaaagttggagaggcaatgcaattttaacgcttcaactgatggattattttacatgtttcctattatgaagtttaagttattaatatattttactgtacatatcttacgttcttaaaaatgtttgagggcactgccaatcttagagtttgaagtgatattaatagtc

SEQ ID NO: 338253 - DNA, 552 bp, Homo sapiens
cttgtaagggggagcacacacatgaacaggtgcaggagccagggcgagaacttctgggtgctggtaggagcaaactccgtgtgggccttgcggcagcaacttggggggtgcccatgatccctgaagtgccatagggcatgttaaagtactcttttagctcggccatctgaagatggcttaaatattaacaactcagtgggccttctaccttttcatgtgcagcgagcggttgccttctgccagcaagggcaaaaggcaagtgtgacagccttttgcatctgtactcgtggctcccaagctcttgtctggcatccaggagaaacgagttcacatgaatgaattgaaaaatggtaaatgcagtgattttattgccaataaaagtggctctcagcagcaaggagagctgaaaaggggacaggacgggaaggtaatcttctcctgaagtctggtcgtctccagccacattcttccytgaagttacaccgtcaagctgtccctctgaaatcaagctgcttctctcttactgccagctgtttctcctccctgccagtt

SEQ ID NO: 338254 - DNA, 563 bp, Homo sapiens
agacagggccatgagtggttttggaaaaggcaacattcaagcaggaaaacagggatgtcagttctcactttgggccatggtgtgaggcttttcagcttgaaggtggggctttgccagggacctgccactgtctacctagaatttctctgtctcctgttgctatcataggtatagcatgayttcccactcctgaagtgtaggctgcacatagtgacctctgtcaaagaatacaatatagaaaaggagaggaaagagtaactttgcagcacagaatcttagcaaacattacctcagccaggtggtcaaggtcagtatcaacagagatcagtcatgttgatggtgtatacccttcgtaggatggatgaaaatcaagcttcacctattcaaaaacccataacccataaccccagtctgaaatggaaaaacagataaatcctaacagaggaacactttacaaatttcttgatcagtattcctcaaaactgtcaaggtcattaaaaataagggatatgtgagaaagtggtgccaccaagaggaacctggaagtcacggtaactaaatca

SEQ ID NO: 338255 - DNA, 550 bp, Homo sapiens
attgtaatcttccctgttaagaatgaattgctatgggtatcatgctatggagaaagtaggaattgattctgaatctcacatacacacatgcccacacacacayatgcccttcccccaacatacaagcatggagctgaaaataaacacagtttaattcagatgaaaatcaaccactttcaaaatagcattagaaaccaatcatttgtaccttgctttgtgaaacaaaggcaaaaacagaacccatgctgtgcatccaattacaatagtaggcgcaccatgacaagcttcacagccattttcagataaggcccaaatatgagcgcagagtgaaattagcaaacaacaacacaaaggaagtaaagagaacagagaagaattgtgtgaggaaaaggagaagagaggcccatcagtagcgaggcaagagtttgacagacggaaggtgaggaaggcaggtgaacctgtcactgatgcactcagaaaacaggggtcgcccatcactccttcacctccatactgccgcaggtcacaatcagcattaaggggacacata

SEQ ID NO: 338256 - DNA, 550 bp, Homo sapiens
attgtaatcttccctgttaagaatgaattgctatgggtatcatgctatggagaaagtaggaattgattctgaatctcacatacacacatgcccacacacacatatgcccttcccccaacatacaagcatggagctgaaaataaacacagtttaattcagatgaaaatcaaccactttcaaaatagcattagaaaccaatcatttgtaccttgctttgtgaaacaaaggcaaaaacagaacccatgctgtgcatccaattacaatagtaggcgcaccrtgacaagcttcacagccattttcagataaggcccaaatatgagcgcagagtgaaattagcaaacaacaacacaaaggaagtaaagagaacagagaagaattgtgtgaggaaaaggagaagagaggcccatcagtagcgaggcaagagtttgacagacggaaggtgaggaaggcaggtgaacctgtcactgatgcactcagaaaacaggggtcgcccatcactccttcacctccatactgccgcaggtcacaatcagcattaaggggacacata

SEQ ID NO: 338257 - DNA, 550 bp, Homo sapiens
attgtaatcttccctgttaagaatgaattgctatgggtatcatgctatggagaaagtaggaattgattctgaatctcacatacacacatgcccacacacacatatgcccttcccccaacatacaagcatggagctgaaaataaacacagtttaattcagatgaaaatcaaccactttcaaaatagcattagaaaccaatcatttgtaccttgctttgtgaaacaaaggcaaaaacagaacccatgctgtgcatccaattacaatagtaggcgcaccatgacaagcttcacagccattttcagataaggcccaaatatgagcgcagagtgaaattagcaaacaacaacacaaaggaagtaaagagaacagagaagaattgtgtgaggaaaaggagaagagaggcccatcagtagcgaggcaagagtttgacagasggaaggtgaggaaggcaggtgaacctgtcactgatgcactcagaaaacaggggtcgcccatcactccttcacctccatactgccgcaggtcacaatcagcattaaggggacacata

SEQ ID NO: 338258 - DNA, 577 bp, Homo sapiens
aatccactgggagtaccttttcatcacttacttgtctttaatgggaaatgaattaacatgattggctcttaccaggaacttagtagtattcttttgattttaatggacttgctgcttacaaatgttgttaactcaccagaaagggaggagttcccaatattcgcattggcagtactctcctcagtaaaagacaaaggctaaatctttgtccaacattactagagatgctgccaaaccactgtggtggcccacgctgcaaaactgcattgtcacacatgaaaagggctctgtattccctcgctgtgtcatcatggagattaatatcatttataagcttttctcrggcttgtcgatttatgggcagtaagctctgagaagcccttgacattgacttctgagcccttggcaaaataattctaggacccaagtatgtcatctcattttctatgccatgtttcttctgctttcttttcattgccatatattgttttctctgccagaatacgtttctctccagctagacagatttgctgatcaaagaagtctcctgaagtgttacatacatcaattgctattt

SEQ ID NO: 338259 - DNA, 569 bp, Homo sapiens
aactgaggcaaaacctaaaacaaacaacccaaacagtgtcctttgactgaagtatccaaattgacaaaatctaatcttttcagataactggcaatcttcaactttattttgctattttatacagtggttctagcatatctcctcagtgtgtgttaaaactaatgtgggtggtaagtaagtttggttcagctgtgaaattggatgggtcatgtacagccaggcagttcatagcgtagggtagctctgaccagacacaggtttgtctccagatccacatttaaaaattgtacttttgttgattagtgtttcccaatttcatttattttactgagggttgcaaaatagcagttttctamctggattatattctctgcatgtatttgttttcatttctcttttttttaaattttattttgctaaacagctatatgaaaggatcagacagacatatcctggacccactgatcatccttcatataaataaaagtaggaaaacaaagaaaaaaaatgggactttaagaaccatggtaaataatatattaacttagataagcatgggtaattcagtc

SEQ ID NO: 338260 - DNA, 569 bp, Homo sapiens
aactgaggcaaaacctaaaacaaacaacccaaacagtgtcctttgactgaagtatccaaattgacaaaatctaatcttttcagataactggcaatcttcaactttattttgctattttatacagtggttctagcatatctcctcagtgtgtgttaaaactaatgtgggtggtaagtaagtttggttcagctgtgaaattggatgggtcatgtacagccaggcagttcatagcgtagggtagctctgaccagacacaggtttgtctccagatccacatttaaaaattgtacttttgttgattagtgtttcccaatttcatttattttactgagggttgcaaaatagcagttttctaactggattatattctctgcatgtatttgttttcatttctcttttttttwaattttattttgctaaacagctatatgaaaggatcagacagacatatcctggacccactgatcatccttcatataaataaaagtaggaaaacaaagaaaaaaaatgggactttaagaaccatggtaaataatatattaacttagataagcatgggtaattcagtc

SEQ ID NO: 338261 - DNA, 605 bp, Homo sapiens
tgggttgcttttagctgcttaatgtggttgttgtcatgcgccttgattgctccaacctctctrgccccatcagaaatgttccatttttagataaccgaatgtttttcatgaaaataacacaaatagggcccactctggcttttgcaatttcaaagatatttaaaaccaaatggcatattacaaattttagttatcatcctcctcttttatctattttttcccaaatgtcatttctactaattcagtgtttttctaacttcctcctgtgatctttcatctcctttcattttaccttttctttcagtctatatggaaattaaagggagtccatttttgagttcctgctgtttcagtgttttatgctggactttcttatgcctccccttcatctacccaactaagctctgtgcatcttccttgttatgactttttgctgcaagtatactcagcatgtaatgttcatctctagaatatatctggtttctatttctgattcaatttctacttgctcaagtctctcttggactatttttcttgtctctattgggaaaatctgagaaaaaaatagagtttggagcctgtctaattaggtttgaagctttggt

SEQ ID NO: 338262 - DNA, 517 bp, Homo sapiens
gtgtttttctaacttcctcctgtgatctttcatctcctttcattttaccttttctttcagtctatatggaaattaaagggagtccatttttgagttcctgctgtttcagtgttttatgctggactttcttatgcctccccttcatctacccaactaagctctgtgcatcttccttgttatgactttttgctgcaagtatactcagcatgtaatgttcatctctagaatatatctggtttctatttckgattcaatttctacttgctcaagtctctcttggactatttttcttgtctctattgggaaaatctgagaaaaaaatagagtttggagcctgtctaattaggtttgaagctttggtaaagttgcttctttcaagcctcagtttctgtctttgtaaaaaggtatatttatagttattagtccataaaatcattgtaaatttgttgatttgtacgggaaatacagtcagtactttaagtgtttagttaccatttttgtttttcctgtttaaata

SEQ ID NO: 338263 - DNA, 500 bp, Homo sapiens
gatacaacaaacttcattattatcttattctgagaatttgccacagccaccccaagcttcagcagtcaccatcctgatcaatcagtggccatcaacattgaaggaagactctccaccagcraaaagattacaacttgctgaaggctcaggggatcattagcatttttagcaacaaagtatttaatcatggtatgtgcatgtatcaaatatgatattattttacacttaacagtatagcgtaaacataacttttatctgcactgggaaatttaaaaatgtggactaattttgttgcaatatttgctttattgaagtggcctgggactgaacccacaatatttccaaagtatggcagtataattattctttactgtcttattcttttcactttacattatatatgcaagagttacccctatgttgtggctatcacttatttttccttatagcaatataatattccagtttatgaatacaccaaaggttattttttcttccta

SEQ ID NO: 338264 - DNA, 502 bp, Homo sapiens
gccaactttgagctacagggattgtctagaaagctctctgtgtcttcatcctccatggacctgtaggaacagtaagttagtgggaaaattattcttatggcaatggcagaacatttcagacacatttcagtttctgcttgtgctacttctgtcaacatccatttggccaaagcaagccttgtgaagttggaagaattttccacctctagtgagaagaacttcaaagttagatgtaaaggatrtgtattcagtgtggtaaagaaccaggccaataattcaatctgtcacatattctccatccaaaatatatggactcatttgaaaattgatgctgtctgtataatagaaacgcagttcaagcaacacatggtcacctaccaaaagttgctaaatttgaatgattttttgaattacatttagaatatttgcttgtttttgtagagactacttgaagttggataaaaattattctaataactctatataaaaatactatgaaaat

SEQ ID NO: 338265 - DNA, 562 bp, Homo sapiens
atccaaacagccagagttatttcaagaaactgatctttttctttttgcttcttaaggcaattaaaaagttccaactatatcagcracagaggtattgatgatactgaagttgttctgacaaaactttaacttcagttagcaagaagccctcatgatatgcagcaatcgatttcatattaagtgttgttagagaaaggtgtataagcggacaacattggcagtctcactcaggaagttaacaaaaatacattacaaaaattatattaaaattaatgtaaatatttatattattttgcttaataaaatgtaggtgacgaagtcatgattctagcaatgagcaggaaagcttctcttccaaacatggagagatgcttgagatgtatgatggaggacacaagagagctaggcaatggccacagccaggagccaggaaggagctgagggctacagcagtgagcacgtgtgccaacgctattacaggctgggatggggctgctgcctgacctgtagtttcaaggaatttggctttagtgcctgcagagaaacttaggagttaaggtcc

SEQ ID NO: 338266 - DNA, 569 bp, Homo sapiens
tggaggattggaattcaaacttttgcattaagctgcaactctaaggactaaaaatcatcagccactggcccaggaagacaacaaagtggcttgtttctgctggacactatgtgtggagaattattacataaaaatctaaaacttgggcttaatttttgttggaatgcaaattctacattgtgtgagaaacttcagtttaagaagttaacataaaatatggtctcatgtcagtgatgcctcgggggatcctcatagaaaaaatgttccctccaccacacacatatttaagatgagtttgccctgaagcattacagactcttgggggaaataatacacttgacctaagctgcttaaacaacaatgtaaacacagatgtaaataagtgtttaatgtggttacaaagatgaagttaaacaatccttaaagaaagagaaagactcaatattagaatgcaaagcagactccaaaaacaaactctaactttcyaaaatgaaaaccacagacattaatatataagacccaatgggtgggtcctagccactgtagtctattacagaagggcagacaca

SEQ ID NO: 338267 - DNA, 594 bp, Homo sapiens
aacttctgctgaatggggctgtttgtaaatcttgttttttgttgtttttttcttcccccttgaagcaagagcttattgtgctatttggattgaaagtcttcacgatctctctctcctaggccttttctacaccaccagataatcaccatttggagaacttccagaatctttcattacagattttctagttatacccttgycgtactattttatagagcagaacacagcaaaaacaaaatttttcaatgcctcaaacaatttggcatgctggcatttgtgctgcagggttttgtgctggggaaggacagtgccagggattctatgcttactgagcagaatgactttctggagttgaaccatcatgattttttttttctctatttttgaggactcttctgaggattctcctgcagtttttcccttgtccaatgggtaaaaggagacataactgaagttctctctatgcagcttgtccacagggcagggctttcctcatccttcctacacctctctgtggcattatccactaatcaactttcatttcaggttcccatggaaatattccatatgcattccaagtggcagttggtgcca

SEQ ID NO: 338268 - DNA, 593 bp, Homo sapiens
agcttgccaacaattacttcaaaataaaactgactactcctctagaggattatcaatgarcattctggtttgtggaaatctcctataatatgtttgttatgatgttatcaaagtagatatgttaatattcagcaagggataatataaatatgtataaaagttgctgatactaattgtatcacttaagtttatttaataatctcacaaattaaactatgagagctttaaataaatatgtatttatttaaaaaacagaatcattcttttgctatatgaggtatccacacagtgcctaagggaaagggaatagctttatagaacagctttatggaaagaaagaatgaaaacaagacactggtgtgaaatagttctttgagtctgctttaccttgcagtatgataactgtgctgtgcttggctctctgcaaatcttattttcattgaaggggccacgtaaaaggcagaggtggtgtttagacctactgtagtgaatcagaaaagctctatagccaagaccagagaactgaactgaaaggtagccaggtcatcaaactgaagagtagctaagtcaagaactacaggagcaatttcact

SEQ ID NO: 338269 - DNA, 593 bp, Homo sapiens
agcttgccaacaattacttcaaaataaaactgactactcctctagaggattatcaatgagcattctggtttgtggaaatctcctataatatgtttgttatgatgttatcaaagtagatatgttaatattcagcaagggataatataaatatgtataaaagttgctgatactaattgtatcacttaagtttatttaataatctcacaaattaaactatgagagctttaaataaatatgtatttatttaaaaaacagaatcattcttttgctatatgaggtatccacacagtgcctaagggaaagggaatagctttatagaacagctttatggaaagaaagaatgaaaacaagacactggtgtgaaatagttctttgagtctgctttaccttgcagtatgataactgtgctgtgcttggctctctgcaaatcttattttcattgaaggggccacrtaaaaggcagaggtggtgtttagacctactgtagtgaatcagaaaagctctatagccaagaccagagaactgaactgaaaggtagccaggtcatcaaactgaagagtagctaagtcaagaactacaggagcaatttcact

SEQ ID NO: 338270 - DNA, 639 bp, Homo sapiens
tttagaaacatgagtttagaggttagagtcaaaaacatggaaatagttgaacttctccaagaagagaatgactacagagaaaagggaccagagatatcataccacttctcctacgtggggaggtataggtgtggcatcacagcacacagaatttgggaccagaggaagatggctgcatggagctaagaggagagcccttcagtatgaaaagtatggtgggcagcatgggcacctacagytggtaggccagtatgatgggaacagcgggactgcatggtgcttgatgtctaaaggatctgagagagaacagatagtgtatccttgggggacaatgggtatagaaatagcattagagacatattatcagtaacctgtgaatactactctttcatacaaagtaactgcatctttattttatattttggaaactttcttaaaattaagatttctttttcatttctgttatttatttatgataacttttttttttttcttataggggtggtgtctcactatgttgcccagactgttttctaaccctggcctcaagcaaatttcccacctccttctcccaaaatgctgggattacaagtgtgagccactgtacccagcctacttaggaggacatttactattcac

SEQ ID NO: 338271 - DNA, 501 bp, Homo sapiens
tctataaagcagtatatgggtggctcagaaaagtgtgagaattgattgaagatgagtgttaaggtgctctaaatttatctgatgaccagaatggcaaactgtggaagtcattggtttgctcattaatactgtagtattttgatacttccccacaccctgcttgacatgttttatgacctattgcacgatttgctaaatctctgttctttcctccatagtgattggtggtgtttcagaaggtggaagctctgccagccccacatacagcctgagtgagacatgccattcatttgttaagcagctgagggtttgtaactgcttgtgactgmggcatgtccaagaatgttttgtctgatgcacgacaatgagtgaatatataatgattcaacaagagccatagagttttaaaatgtgttacattttataggaaatacagttacttagacttataaaaacaagatattctcagaatatttttcatactgatttacctctacttgt

SEQ ID NO: 338272 - DNA, 662 bp, Homo sapiens
tggtccaattaaagtgaatgtgcacaaactaccttttaaagttttgggtagtcattataaattgatctggatgttaaaattcactcaaaaatttcaaagaatttcttgtgaatcaaaaatatcttgaaagtcaaaagattaggagaaatacatttactgtgatttaaaagaacactcgatccatttttaaaatatttagtaatatataatttattatttcactcatctgtctcagtataaggaatttggtgacatttctatttatgcttttagaggaaacatctgattctaaggttcaaagcgtgagactgtaaggcttttacaaacacagaaattaatgaggaaggtcaccatgcagtctataactatcacagacattttttaatgcaacaatttactggattagctatcagaaagtcaaggaggtgattcactaccatacatgaaaataaagtataaaatactggttttgacagtgcaactacacttttatagctgttttgtcagtttctcacaaatttcctcaaatggacatatcattacttgaatagtaatcagcaatttattttcaggggtttttttgcaataaaaagaratgccttcactcataaaacataatgaagagaaaggcactttatttaagaatagaggaatgcattatg

SEQ ID NO: 338273 - DNA, 587 bp, Homo sapiens
acatgtgtgtggaaatagagccccaccataccaagcaagttgaggcaaaccagtagaggggactgatcagaagccctgtggcaataagtggtgctctccttccctgtcctgggactcctcctcccactgagtgattccatttaccagagacagcagcaggggcaactgctacaaacaaaatgctcaacctgggaagccacttagtcccctagggcctaagactcccctaccctaggcagggatatcacactgtgggaaacacctgcaaaggtgaccttgagcccatgagcagcctgagaggttctcctcatcattccactttttcaactggcagacgtagcttgacaagcacgaggctggaaatgttcttagtcaccttgtgagaaaggatccctttcctaattagtggcaccagcaacctggcctgcatagtttcgtctgcccacccaaagcagyatcagtagggaccagaggaagccccattggcacaagataaaccattcagaataaatagcacctcacaggctcaaaagtgagacagctaatagagccagacaatcagtctctaaaactaggccaggacctat

SEQ ID NO: 338274 - DNA, 514 bp, Homo sapiens
cctactctgtcaatatcctgaacattttcactgcagtattcttttacactgacctgctactttgtgtgtgaggggacctcacctgaataaatccgaattctctgccagctctgcaaaaaccctgaactgctgaatgctattggagaaaaattaaacaaatgcacacatcagtgctaccattgtcttstggatgccagactccactgggttcttagctcttcccactaatccttctatgtcaatactctctccagttctcagtagacaagaattcagaacaatttctctattctcaaacataaccttctggccacctgatttattttcagcaaatagccttattttgtatttttcttttaaaaagccacctaaaaataacatcaacattaatctaaactcccacaaatattcatatagctgcaactgtcctttctttttttcattttctgtttcacactccattgagtggccttgccaatcttaatgttgaactcttcaccagagttcaggattt

SEQ ID NO: 338275 - DNA, 391 bp, Homo sapiens
ccagaatgatctcttcaaaatcaaagaaagcatgccatttagtcttgcttaaaatatggtggtggcttcccattgtacccagaatttaagcaaaatttctctccttggctttacagtwtcctgcatgatcaggactcagagctcccttctcttgcttcctctaacctgtgggctcactcctacctgggcgcctccgctctgctgttaactcttctaatcctggtatggttggttttgctctgtcaattacatctcagtttaaaattcactcctcagagtaggcttccctggacaaatttaagacacttttcttttggcatgacatttaaatattctgtgccaaacactcaggaacactccacaggctatttctgtttcttatttcctgttc

SEQ ID NO: 338276 - DNA, 561 bp, Homo sapiens
cttcattgaatatcacttatatttataccattaagagatgtaaaggaaatgactgctgaagtatcagggaagtattatattccctatgctgaragttgttaagtataagggatgtgcctgttatttagtaattagtgggattttttttgacgaatgaatgaatgctattggaaattatttataataactcacagatataacacttgtttccaaaacactctcaaaatcattgaatttcgactttccagtatcccacaaagtaggcatcattcacttatctcatgagtgttcaggtatcagctgtatgtaaattattgtgtcttcattgaaaagtaaagaatccccaaatttaaggaagaaaaattcagctgcagtggattgagtgacttgtagaagatcttatggccagcagttaaaaaattctgatcttttgactgtcaagtagtacttgtttccctacaacatgatgtgtaacatgtttcttaccacaggatgttgtctcttccaacacatgctatgtgctcactctgctaagctaaataggaagaaaacaccaaataa

SEQ ID NO: 338277 - DNA, 286 bp, Homo sapiens
ctaaaatgaaaaagttatattggaagaagtccatggatttggaacctacgttagtaacaggagcaacagtctttgttgactctgtggagatggtgggtaatgagagaatataaatattgagataactagttggttgtgatctttaagcaggtgtgtaatgatgcaatatttgatacagacatggtcaragaaagtttttctgtgatggtgatcaagaatgttgttttggatatgttaagtttgagatctctagtaagtattcaggtagagatgtcaaatatataac

SEQ ID NO: 338278 - DNA, 541 bp, Homo sapiens
ttgagaaatctccaaactgcttcccacatggctgcactaataaacgctctcaccaacagtgtatacgcattcccttttctccacagttttaccagcatttgttgtctttygactttttagtaacagccattctgactgctgattgatatgaaatggtatctcattgtggttttgatttgcatttctctaattattagtgatgttagcatttttcatatgtttgttagccacttgtatgtcttcttttgagaagtgtctgttcatgtaccttgcccattttttataaggattattattattcattaaattgtttacattccttattgattctagctattagacctttgccagatgcatattttgcaaacattttctccattctattgtttgtctatttactctttttatggtttctttttctgtgctaatttttgtttttattgcaattgtttttgaggagttagccatctatcctttgccaaggccaatactgagaatatttgctagatttcttctagcatttttatagtttgaggtttta

SEQ ID NO: 338279 - DNA, 541 bp, Homo sapiens
ttgagaaatctccaaactgcttcccacatggctgcactaataaacgctctcaccaacagtgtatacgcattcccttttctccacagttttaccagcatttgttgtctttcgactttttagtaacagccattctgactgctgattgatatgaaatggtatctcattgtggttttgatttgyatttctctaattattagtgatgttagcatttttcatatgtttgttagccacttgtatgtcttcttttgagaagtgtctgttcatgtaccttgcccattttttataaggattattattattcattaaattgtttacattccttattgattctagctattagacctttgccagatgcatattttgcaaacattttctccattctattgtttgtctatttactctttttatggtttctttttctgtgctaatttttgtttttattgcaattgtttttgaggagttagccatctatcctttgccaaggccaatactgagaatatttgctagatttcttctagcatttttatagtttgaggtttta

SEQ ID NO: 338280 - DNA, 541 bp, Homo sapiens
ttgagaaatctccaaactgcttcccacatggctgcactaataaacgctctcaccaacagtgtatacgcattcccttttctccacagttttaccagcatttgttgtctttcgactttttagtaacagccattctgactgctgattgatatgaaatggtatctcattgtggttttgatttgcatttctctaattattagtgatgttagcatttttcatatgtttgttagccacttgtatgtcttcttttgagaagtgtctgttcatgtaccttgcccattttttataaggattattattattcattaaattgtttacattccttattgattctagctattagacctttgccagatgcatattttgcaaacattttctccattctatwgtttgtctatttactctttttatggtttctttttctgtgctaatttttgtttttattgcaattgtttttgaggagttagccatctatcctttgccaaggccaatactgagaatatttgctagatttcttctagcatttttatagtttgaggtttta

SEQ ID NO: 338281 - DNA, 572 bp, Homo sapiens
agacaacatctttgtgatattagaatacatttaagtttaagaagaagtatccttcctggaagatgycatttatactgtgtacgtgtgtatcagtggaaatggggtaaaagccctctggttgctttggaccctcataaagatagtggtgacaacaaaaagaatgtattcaccaggacagctctttatggccttgaaacataaaatggttaaacattggtcatgtttatcttatcactgagaaaaagttgtaaacggattgaggacagaaattactctttttttttgagacggagttttgctcttatcatccagactggagtgcaatggtgggatcttgactcactgcaacctctgcctcccaggtttgagaattctcctgccttagcctcccaagtagctgggattacaagcatgtgccgccatgcctgtctaattttttgtatttttagtagagacagggtttcaccatgtgggccaggctggtctcaaactcttggcctcaagtgatctgcccacctcagcctcccaaagtgctgggattacaggcgtgagccaccacacttggccaaaat

SEQ ID NO: 338282 - DNA, 572 bp, Homo sapiens
agacaacatctttgtgatattagaatacatttaagtttaagaagaagtatccttcctggaagatgtcatttatactgtgtacgtgtgtatcagtggaaatggggtaaaagccctctggttgctttggaccctcataaagatagtggtgacaacaaaaagaatgtattcaccaggacagctctttatggccttgaaacataaaatggttaaacattggtcatgtttatcttatcactgagaaaaagttgtaaacggattgaggacagaaattactctttttttttgagacggagttttgctcttatcatccagactggagtgcaatggtgggatcttgactcactgcaacctctgcctcccaggtttgagaattctyctgccttagcctcccaagtagctgggattacaagcatgtgccgccatgcctgtctaattttttgtatttttagtagagacagggtttcaccatgtgggccaggctggtctcaaactcttggcctcaagtgatctgcccacctcagcctcccaaagtgctgggattacaggcgtgagccaccacacttggccaaaat

SEQ ID NO: 338283 - DNA, 675 bp, Homo sapiens
tttctcaaaatttgaatgtggtccccttaattggtaatcaagattgcggagttttccaaaatattccttttcatcttatgtaattaaagatccacgagctttccaaagaagctctggattttccacggtacaaatctatatattttttctctctcttcctctctctctctctctgcctctctcgtgcgtgtatgtgcgcgcccctgtgcgtgcgttttctttcatttctggcattaggaaactcgtgcagggccactgaaaagtcaggggaggctcagatgttatttcccasggattcctgtttttccagaaacgttgtcaccaaataagtatgagactgttaatttggagaaacaattagcccctacaaaaaaaaaaaagaaagaaaaaagaaaaaaaaaagaaccggaggggagaaggctagggcggaagacaaggaagctgctgcttggattcgctggtggaggaaagtgcgacctggacctgcgcttaggggctcccgtccccttacttcagcaccagaggggatggacagcgtctccggactgagctgcagccacagggacggaactacgctgccgccgccgctgtccttgccgccactgtcgtcgccacgggcagctgggctacttgctcctcgcagctaaaaggcggtgcctcctattaccccctcgc

SEQ ID NO: 338284 - DNA, 593 bp, Homo sapiens
atggaacagacagggccagtttatcttccaggtcattgagccgcagtgagatataaagtctactaacaaagtttagatgggtctgcagaccscttgtatgcattcttcatgctccaaaatttcttttagaaaaatatgaaaattttacacaacatgaaaagcagagaaggcaaatcacgtagaagagaatataataggatgataaaataaaaagagacaccgttatctgaaatggatgtcagcctttcaagtaaagtcaacactaccttacatgttccaagtggagaactcagtcaattctcagtggctaaaacaaatgagcaactattgactattttatgtgtatattttatgcatattttacatgatcacttaaaattgaatatataatgaggtggagaaaagaaaactttaaacagatgtcttcccaggtagtatgtgtatctttttggttgactatactctcatttataattccaatcactagaccttaatcaccacagacagacctgatctgatcaaatgcaacaaagcactcatattcccagaaatgcagcatcacctaattctaaagcaggctgtaaaccggaagc

SEQ ID NO: 338285 - DNA, 565 bp, Homo sapiens
agtcatttagttttaataggctaatttctaaccttcacccaattaggtccagctctcatcatctcaagtctgaattctgcaatagaatcaactctggtccaccatggttccctgaagcttgtaaaatatgactttcaacatgtgattatgctgtccaaaaacctctctgtttgtataagattaagatcaagataacacatgaacccttcaagattcttgagaatctaaacgcctccagttacttagttagtaaaactaaagtcaatgaaattcagctgttctgtttgttgttgttgttgttgtttatttgtttttttatttatttactgcaatctaaagcaagtcaagcctataataggtgttataagawgagaggcagtttttcttcctaaaccacttatgaatagaaaagcattaaatattgatcctaaatctcaattttgacttaatctatagagaagcatttaactttcctggagcttgattgtcccatttgcaaaacaggaatgaaaaagtcagcttcctagtcctgctgtgagaatcacatgagattccctaaaacagg

SEQ ID NO: 338286 - DNA, 612 bp, Homo sapiens
ataacttttttcctttaattataaaaaattaagcacacacaatgcataaaatatatatgtatacttttatgtgtttaaagctagtaactactaatgactgtccaaatgaagatagtgaatatcgccagaatctcataacctccctcattcagccagaagccatcttattccaaccatggtgctacttaatatctatacatctaaaaacaatatttcttgccagttttgaaacttcatttgaatggaatcataatgtgttcttttccttttrtatcttgttgtattcactcagtattgtgattgcgacattcattcatattgagcaagtagccatcatcctctcatttccattgctgatggaattctagtgtgtgaatacataccgatattgattttgtttgttagtttgtttataaacttctaggttatttttgcttttttggttagttttttcatagacttctaggttattttcacactttaaaaatatttcaacttttattttagatttagggttacatgtgcaggtttgctgcatgggtatattgtgcgatgctgaggtttgggttacggatcccatcacccagatagtgagcattgtacccaataggt

SEQ ID NO: 338287 - DNA, 487 bp, Homo sapiens
gactgctagaggatgagaaatgatacagagaacagctgagtcttctcagctgactctatcctagcccagccattcctcagcaatccctccagcttacaaggwtatatgtgcaagcctgtctgagagtagatgaccaacattcatgacactaagttttggggtaatttgtttcattgcaataactaactaacacaatatcttatgcagaattcaaatatcgcatttccatgattccttttccaaacaaccaagttaattagtcacagtctcctctctctttatatacctatttgtgtgtgtgtgtaaagaagagatctcactatgtttcccaggctgatcttcaacttggtttaagtgctcctcccaccttggcctcccaaacaagtgctaggattacaggagtgagccccctcgcccagcctctgctcatacagcacttgataagtgttttttttttttttcctgtagtgaaagcaaatgaagtaag

SEQ ID NO: 338288 - DNA, 586 bp, Homo sapiens
acactttaaatactttagtcttttagtgagcctattcttttcactctatttttgcttgcatatttttgaggagaagtttcatgcgatttttattcttgctcctctacaggcaaagttttttgttacccctcagatgtctttcaagctcttttatttctcctttctatttttcttagatttaatacggtattcacaggtgtatattttttagtattgagcctgatggtgttctctgagcttcctagttctggggttaggtgtctatcattaattttgataattctcagttattatagcttcaaacawtttttgtccttctgatattcccattacacatatgttaatggtcccatagttttcagatacctgtactgtctctttcattgctttttctgttttcattttaattttggaagtttgtattgctatctcatcaagcaatgagtccatcaaatacatttatgttacaatgtttctaatttctaacatacattatatttgatttttttcttagatgctctgtctctttgcttatactacacatctttttttacattttgtccactttttccattaaaattcttag

SEQ ID NO: 338289 - DNA, 586 bp, Homo sapiens
acactttaaatactttagtcttttagtgagcctattcttttcactctatttttgcttgcatatttttgaggagaagtttcatgcgatttttattcttgctcctctacaggcaaagttttttgttacccctcagatgtctttcaagctcttttatttctcctttctatttttcttagatttaatacggtattcacaggtgtatattttttagtattgagcctgatggtgttctctgagcttcctagttctggggttaggtgtctatcattaattttgataattctcagttattatagcttcaaacaatttttstccttctgatattcccattacacatatgttaatggtcccatagttttcagatacctgtactgtctctttcattgctttttctgttttcattttaattttggaagtttgtattgctatctcatcaagcaatgagtccatcaaatacatttatgttacaatgtttctaatttctaacatacattatatttgatttttttcttagatgctctgtctctttgcttatactacacatctttttttacattttgtccactttttccattaaaattcttag

SEQ ID NO: 338290 - DNA, 586 bp, Homo sapiens
acactttaaatactttagtcttttagtgagcctattcttttcactctatttttgcttgcatatttttgaggagaagtttcatgcgatttttattcttgctcctctacaggcaaagttttttgttacccctcagatgtctttcaagctcttttatttctcctttctatttttcttagatttaatacggtattcacaggtgtatattttttagtattgagcctgatggtgttctctgagcttcctagttctggggttaggtgtctatcattaattttgataattctcagttattatagcttcaaacaatttttgtccttctgatattcccattacacatatgttaatggtcccatagttttcagatasctgtactgtctctttcattgctttttctgttttcattttaattttggaagtttgtattgctatctcatcaagcaatgagtccatcaaatacatttatgttacaatgtttctaatttctaacatacattatatttgatttttttcttagatgctctgtctctttgcttatactacacatctttttttacattttgtccactttttccattaaaattcttag

SEQ ID NO: 338291 - DNA, 588 bp, Homo sapiens
cttggttaaaaataagagaatactcagagcgtattttaaatrgttaatccccccgccttcccccttctggaagcataagagcttctgtttttgttatattctgtttgagaatcatgtaggggtccttgagctaaaactcccaaaatttaagagttgtcctaagattggatttttctggagtttttaactccccaactttttcgccctgaaccttcagaaatttatcaattacagtttaggttttcctgccctagtgctgcatcccacaaagtgggtatctcctccaccaagtgattctccctgtcttcctgtcttctgtccctccaatctggggagcatcactttgccctgagaattatcaaattaatccatggggagtttttgattttccatttattcaatattttgcctgatatgttaatgaaagtgatgatttcctgaatccttacatggtggccagaaacccaaactctttttcattatgaaagccagttttgttagatatagaattattgattgacaggccttttttattcttcaaacactttaaatatgtcattccttggtttctgataaaaaatcagttat

SEQ ID NO: 338292 - DNA, 428 bp, Homo sapiens
accagaaaacaagtaataaaatgacagacatgaatcttattttatcactatttcattatcaataaataacttaaacactccaattaaaaagatagaaattggaggaatgaataaaaagcctcacccaaatattaggtgtttaaaagagtcatattcatgttcaaaatcacaagtagattgtaaataagttgagagaaaatacataacatgcaaacagtaaacagaagagagctggaagggctgtactaatttaagaaaaatatactttacaatataaattgttactagagatgaggataattttattgtgattataatgtcaatcaatcaagatataactgatgmaaacttacatgcaactaccaacacaaccccaaatacagaaagtaaaaactgacataattaaagagagaaatatgaaattaagc

SEQ ID NO: 338293 - DNA, 562 bp, Homo sapiens
aactatatgttcagccgtaaaacaagtatcactacatgtaaaaaaactaaaatgatacaaactatcttctctaaccacaatgaaataaaagtagaaaaaatttacaaatatgtcataattaacacacccctaaataacmaaaaaaaaaaaaaaaaaaaagaagaggaaatcgcaagggaaattagaaaacaatttgagataaatttaaagaaaaatgtcatattaaaacttatgaaattcagctaaaacagtatttagaaagcagtttattgctgtaaacatatgtactgaaaactagaaacatcttacattggtaacataaacttccagcttaaagctataaaaacagcaaactagacctaaagcaaacagaagaaaagaaaggatgaatgttacgttgtaaataaattaaaataaacagtaaagagaatgtcatttaaatcagagaactttctttgacagagcaaacaactaactataccaactaagtaaaatagagaatattcaatactaatatgaggaatgaaacaagcacatcaacactgaccttacaaaaataaaa

SEQ ID NO: 338294 - DNA, 562 bp, Homo sapiens
aactatatgttcagccgtaaaacaagtatcactacatgtaaaaaaactaaaatgatacaaactatcttctctaaccacaatgaaataaaagtagaaaaaatttacaaatatgtcataattaacacacccctaaataaccaaaaaaaaaaaaaaaaaaaagaagaggaaatcgcargggaaattagaaaacaatttgagataaatttaaagaaaaatgtcatattaaaacttatgaaattcagctaaaacagtatttagaaagcagtttattgctgtaaacatatgtactgaaaactagaaacatcttacattggtaacataaacttccagcttaaagctataaaaacagcaaactagacctaaagcaaacagaagaaaagaaaggatgaatgttacgttgtaaataaattaaaataaacagtaaagagaatgtcatttaaatcagagaactttctttgacagagcaaacaactaactataccaactaagtaaaatagagaatattcaatactaatatgaggaatgaaacaagcacatcaacactgaccttacaaaaataaaa

SEQ ID NO: 338295 - DNA, 562 bp, Homo sapiens
aactatatgttcagccgtaaaacaagtatcactacatgtaaaaaaactaaaatgatacaaactatcttctctaaccacaatgaaataaaagtagaaaaaatttacaaatatgtcataattaacacacccctaaataaccaaaaaaaaaaaaaaaaaaaagaagaggaaatcgcaagggaaattagaaaacaatttgagataaatttaaagaaaaatgtcatattaaaacttatgaaattcagctaaaacagtatttaraaagcagtttattgctgtaaacatatgtactgaaaactagaaacatcttacattggtaacataaacttccagcttaaagctataaaaacagcaaactagacctaaagcaaacagaagaaaagaaaggatgaatgttacgttgtaaataaattaaaataaacagtaaagagaatgtcatttaaatcagagaactttctttgacagagcaaacaactaactataccaactaagtaaaatagagaatattcaatactaatatgaggaatgaaacaagcacatcaacactgaccttacaaaaataaaa

SEQ ID NO: 338296 - DNA, 588 bp, Homo sapiens
aaacagaagaaaagaaaggatgaatgttacgttgtaaataaattaaaataaacagtaaagagaatgtcatttaaatcagagaactttctttgacagagcaaacaactaactataccaactaagtaaaatagagaatattcaatactaatatgaggaatgaaacaagcacatcaacactgaccttacaraaataaaaacagattacaggagactatagaaccatccctatatactttatacaattaaacaaggaagaagagtgataaataaaattaaaccaagcttgcagcacattccacattaatcattaattagcctgctctcagatctgcttcctcatggttgttcactgcctactgcccctctcacccccttaacttctttacagataatgatgtaaacattaggaaacattatgttttccatttgagatatttattcaggtcctgcatatcagtgggatgtttcaaagtcagatggtctgaaggactccctgagaaacagactcactaaagaatgcagtttccacatcctgatgattttatcccccttacttcaacctatcaaagacccaaattttctagcatt

SEQ ID NO: 338297 - DNA, 588 bp, Homo sapiens
aaacagaagaaaagaaaggatgaatgttacgttgtaaataaattaaaataaacagtaaagagaatgtcatttaaatcagagaactttctttgacagagcaaacaactaactataccaactaagtaaaatagagaatattcaatactaatatgaggaatgaaacaagcacatcaacactgaccttacaaaaataaaaacagattacaggagactatagaacyatccctatatactttatacaattaaacaaggaagaagagtgataaataaaattaaaccaagcttgcagcacattccacattaatcattaattagcctgctctcagatctgcttcctcatggttgttcactgcctactgcccctctcacccccttaacttctttacagataatgatgtaaacattaggaaacattatgttttccatttgagatatttattcaggtcctgcatatcagtgggatgtttcaaagtcagatggtctgaaggactccctgagaaacagactcactaaagaatgcagtttccacatcctgatgattttatcccccttacttcaacctatcaaagacccaaattttctagcatt

SEQ ID NO: 338298 - DNA, 588 bp, Homo sapiens
aaacagaagaaaagaaaggatgaatgttacgttgtaaataaattaaaataaacagtaaagagaatgtcatttaaatcagagaactttctttgacagagcaaacaactaactataccaactaagtaaaatagagaatattcaatactaatatgaggaatgaaacaagcacatcaacactgaccttacaaaaataaaaacagattacaggagactatagaaccatccctatatactttatacaattaaacaaggaagaagagtgataaataaaattaaaccaagcttgcagcacattycacattaatcattaattagcctgctctcagatctgcttcctcatggttgttcactgcctactgcccctctcacccccttaacttctttacagataatgatgtaaacattaggaaacattatgttttccatttgagatatttattcaggtcctgcatatcagtgggatgtttcaaagtcagatggtctgaaggactccctgagaaacagactcactaaagaatgcagtttccacatcctgatgattttatcccccttacttcaacctatcaaagacccaaattttctagcatt

SEQ ID NO: 338299 - DNA, 613 bp, Homo sapiens
ataagtaaatggaaagacattttggttggaaaacataatattacaatagcaatacttggctgggcatggtcactcacgcctgtaatcccagcactttgggagactgaggccggtggatcacttgagatcaggagtttgagaccagcctggccaacatggtgaaacctcgtctctactaaaaacacaaaaattatctgggcatggtggcaggtgcctgtaatccmagctactccggaggctgaggcaggagaatagcttgaatccaggaggcgggggttgtggtgaactgagatagtgacactgcactccagtctgggcaacagagtaagactccaactcaaaaaaaaaaaaaaacaaaagaaagaaagagaataaaaaagaaaaaaaaaaagaatggcaatactctccaaatttttctatagattcaataaactctctttcaaatttgtggctgcatttttacaaaaattggcaagctgatcctaaaatttatacagaaatacaagcaactcagaacagccaaaaaaaaaaaaaaaatctttaaaagaacaaagtttgagaattcatacttttcaatttaaaaatttaatagtaagctacactgtatgaaaag

SEQ ID NO: 338300 - DNA, 613 bp, Homo sapiens
ataagtaaatggaaagacattttggttggaaaacataatattacaatagcaatacttggctgggcatggtcactcacgcctgtaatcccagcactttgggagactgaggccggtggatcacttgagatcaggagtttgagaccagcctggccaacatggtgaaacctcgtctctactaaaaacacaaaaattatctgggcatggtggcaggtgcctgtaatccaagctactccggaggctgaggcaggagaatagcttgaatccaggaggcgggggttgtggtgaactgagatagtgacactgcactccagtctgggcaacagagtaagactccaactcaaaaaaaaaaaaaaacaaaagaaagaaagagaakaaaaaagaaaaaaaaaaagaatggcaatactctccaaatttttctatagattcaataaactctctttcaaatttgtggctgcatttttacaaaaattggcaagctgatcctaaaatttatacagaaatacaagcaactcagaacagccaaaaaaaaaaaaaaaatctttaaaagaacaaagtttgagaattcatacttttcaatttaaaaatttaatagtaagctacactgtatgaaaag

SEQ ID NO: 338301 - DNA, 595 bp, Homo sapiens
tgaggctctataatcaagaataggtatttaaaaacatcttgcaaatcaacaataaaatgacaacccaacttgaaaatagataaattattcgaataaacatttccctaaagaagatatataaatggtcaatacaatataaatacgctcaacatcattgrttgttaggtagatgtaaatcaaaacagcaatcagatactacttcataccaactaggatgactagacatttacaagtgttggccaggttgtgaagaaattggtaccatcatatattgctcctgggaatgcagaaagatacagtcactttggaaaacagtttaacagttccgcaaaatgtcaagtacagaatttatataagacttagcaagtccattttaagtataaacccaagagatttgaaaaaatatttttacacataatctggtacatgaatgttcatagtgaatgttcatagcaacattattccaaataaccaaaaaaataaataaaactaatattcatcaactggtgaataaataaacaaatggtgacttatccatataatacaatattatccaaccgtaagaaaagaataaagcactgtgacatatcacacc

SEQ ID NO: 338302 - DNA, 586 bp, Homo sapiens
tgatcattaagagaaaacaaaatccctgtaaattagagtacaagggaacatattcattagccacctttagagtcagatgctcagggctgagctggtgtggggagtgttcagacctgtgcatgcctgggaaagcctccgatcatgtatgaatggtgaggcttctgggtgcatgagattgagtgcccttccttggcagagcaccactgagtgaacaattgatttaggatcaagcatatggagatcaactttattttgaatatctcaaagacagaaactgaaaagatttttttgcactttgaaattgagtaagggtgtcagaaacttcagtaaaaaagtcacaggaggaaacccagaagtcttattcatccccagaaaccaccaaaatcctgatccaaactgtaagaattcacctcrtaaaaatttgatttttgaataggaacagctccggtctacagctcccagtgtgagcgatgcagaagacggttgatttctgcatttccatctgaggtaccaggttcatctcactagggagtgccagacagtgggcgcaggtcagtgggtgtgcgcaccgtgcgcgagtgaagca

SEQ ID NO: 338303 - DNA, 432 bp, Homo sapiens
cctgtctcaagaaaaagatgccaaagcatataaacttaaacttatgtttaataattaatgttttaggctgagcatggtggctcatgcctgtaatcccagcactttgggaggccgaggcagatggatcacctgaggtcaggagttcaagaccagcttggccaacctagtgaaaccctgtgtctactaaaaatacaaaaagtagctgggcatggtgrcgggtgcctgtagtcccagctacttgggaagctgaggcaggagaatcactggagcccaggaggtggaggttgcagtgagccaagatcatgccattgcactccagcctaggctacagagtgagactccatctcaaaaaaagaaaaaagaaattaacgttttagtattttaatatacaaatgactcatagattttatgactattattaaattaacatag

SEQ ID NO: 338304 - DNA, 582 bp, Homo sapiens
taactgtcttctattttctggaaggccttgtgaagagttggcattaattcttcactaaatgtttagtagaatttatcagttaagccacatgactctgggcttttttgtgtgtgatgatttttaattaattgaatccctttacttgttatatatgtattcatatattctgttccttcttggatttacttttatgattggtgcctattgaggtatttatttctagtttgtggtacttcatgtgtttaggttttctagacagtggacatagaagattcaagaagctaaatgtaggagaatgtttaatgtaggagaatgaggctttgatatcatcaatgaatgacttgaagtttcctctgttgtaaagaatgatattaccataactgccatagttaatattgatggtgtaagtcaaataagaaggcaggaggaaagggacatccatctgtgacccacaaatcagtgtactcattgaagcctttgagaagaatccacaaaattttacaggataattcatttcctgcgatcmccagtagagagaaactggttaaacagacaggtattccagagtccaaaatttacatt

SEQ ID NO: 338305 - DNA, 573 bp, Homo sapiens
tattacccacaaattaagcttcataacaaccatgaggttacagctttctcttcctgaatttggcagtgttatttggtgtccaaattgccacaatgtccacacatatttacaatattttatattattcaattttgtatcactaattgtgcacattggccaccagtgtttcatacatcacggttggtttcccaccttgcttgaaaattggaagtgacaaccctttatggaatgttgtttttaacacactttcatctaaggctctgcatccccacagtgctaagatgacaaatagtcatcactcttccattttgaggggggcasggtaagcacatgcactttgagaatacaacagtaccttggaatcagaattcatctgtcaatcagttttaatgtgaatttcacgtgcattagaatagcctgttcatgcactcttatgatttcaaggagggacaaatgttacctttgaaaaatctaagtaaccaatggacttacctcacatattttgtttgtttgtttctggcactcgggctcatgccattgtagattgtttcttttggaatcactgggtgatga

SEQ ID NO: 338306 - DNA, 573 bp, Homo sapiens
tattacccacaaattaagcttcataacaaccatgaggttacagctttctcttcctgaatttggcagtgttatttggtgtccaaattgccacaatgtccacacatatttacaatattttatattattcaattttgtatcactaattgtgcacattggccaccagtgtttcatacatcacggttggtttcccaccttgcttgaaaattggaagtgacaaccctttatggaatgttgtttttaacacactttcatctaaggctctgcatccccacagtgctaagatgacaaatagtcatcactcttccattttgaggggggcacggtaagcasatgcactttgagaatacaacagtaccttggaatcagaattcatctgtcaatcagttttaatgtgaatttcacgtgcattagaatagcctgttcatgcactcttatgatttcaaggagggacaaatgttacctttgaaaaatctaagtaaccaatggacttacctcacatattttgtttgtttgtttctggcactcgggctcatgccattgtagattgtttcttttggaatcactgggtgatga

SEQ ID NO: 338307 - DNA, 573 bp, Homo sapiens
tattacccacaaattaagcttcataacaaccatgaggttacagctttctcttcctgaatttggcagtgttatttggtgtccaaattgccacaatgtccacacatatttacaatattttatattattcaattttgtatcactaattgtgcacattggccaccagtgtttcatacatcacggttggtttcccaccttgcttgaaaattggaagtgacaaccctttatggaatgttgtttttaacacactttcatctaaggctctgcatccccacagtgctaagatgacaaatagtcatcactcttccattttgaggggggcacggtaagcacatgcamtttgagaatacaacagtaccttggaatcagaattcatctgtcaatcagttttaatgtgaatttcacgtgcattagaatagcctgttcatgcactcttatgatttcaaggagggacaaatgttacctttgaaaaatctaagtaaccaatggacttacctcacatattttgtttgtttgtttctggcactcgggctcatgccattgtagattgtttcttttggaatcactgggtgatga

SEQ ID NO: 338308 - DNA, 555 bp, Homo sapiens
tgtgggagaagtgttattacggtggcccaaagtggaaggcactgcagaccatgagaaagccccagccaagattctgtctggcatgaccaggtgctgggtgaggtagccaagagcttattctgggtctggaatggagaccccccatcataggtgcggctccaggttccagggagcaggagagggacagggagcaccttgcacgtaggcctgcatttgccactgggtgccccacttcttcctgcagtggtgggtcttgttacattgcttgtggaggcttcaaaggactttcctccctgactcccagcactttcgcgtggacgtttcaggaccccagatgtgtacatttctmgagtctatagggcgtcaggtgccatattgtgacaaggaggatgaccgaaagtaggtgattagggcctttcgaaaaacaaaacaaaacaaaatgttgtaagagggaggcctgatgtgactgcctatagcctgcggctgctggtgtggcatgcaggcaggagttgtctctgccaggacgatgggatttgctgtgctaaagattctcgc

SEQ ID NO: 338309 - DNA, 555 bp, Homo sapiens
tgtgggagaagtgttattacggtggcccaaagtggaaggcactgcagaccatgagaaagccccagccaagattctgtctggcatgaccaggtgctgggtgaggtagccaagagcttattctgggtctggaatggagaccccccatcataggtgcggctccaggttccagggagcaggagagggacagggagcaccttgcacgtaggcctgcatttgccactgggtgccccacttcttcctgcagtggtgggtcttgttacattgcttgtggaggcttcaaaggactttcctccctgactcccagcactttcgcgtggacgtttcaggaccccagatgtgtacatttctagagtctmtagggcgtcaggtgccatattgtgacaaggaggatgaccgaaagtaggtgattagggcctttcgaaaaacaaaacaaaacaaaatgttgtaagagggaggcctgatgtgactgcctatagcctgcggctgctggtgtggcatgcaggcaggagttgtctctgccaggacgatgggatttgctgtgctaaagattctcgc

SEQ ID NO: 338310 - DNA, 586 bp, Homo sapiens
tgactttcttacttacaataggtcaagcatcagtgctcaggtttatagccagaagaagttacaacacaattatgggtatctgtaaaaagaaaaataacaattacttgatgtatctcaaataatacaaaaactcttagtgatagtatgatacctcaaattacctaaacccatgtaagaatctcttcttcttgccctcctttcaggttctattctcagcattctgtttttaggtttttgcagtgttttttctgatgtaacatgacgtgcaaattcccagtaacccccaaaatacttaaaatcaaatatttcttcctagaaaatgtataggaaactgtctcgacaaatatctccttatgaacttctataaatttatctactaattcttactagggtttgraatatgtaaatatcaatattcatttttaaaatatctgtcaacatgaaaaagtttgtataagaaaatgtaggaaaaatagaatcctagtgaaatataaaaagagagaaatctattgaaatccatcaaccatatgaattttacttctctaagttaagagaagcttctacttaaaatgagctttagaataga

SEQ ID NO: 338311 - DNA, 574 bp, Homo sapiens
aactcattacacttactaattgatgtacatgtgtcttcctaaaaaggctatgtactacttaagagtggggctctgttattcaactttggattcttacatggaaaaaaaaatctgtcatctagtgggcatttggctaatgtctggcaaataaataaataatgaatgaatgaatgaatgaatgctaattgtacattcaaagatggtttgatgcattttgagggcccacaatgtgttggttaacctcmagaatccctttatgagaccatagtactcctgcatccaattcttttctcctgctatcttttttacacagaatatattttttaatagtttctagaatcctatcttatcaagattttttgcaagtaatgggatgaaaagaagacctaccctatctgtacatatattttcctgagactcacacttgattaaataaatatgttttcattgatttttctaaaaaatgtatatttagccattaggtatatttgctagatagacattcttttgcctgttaatgtatgggaaaatgcttaaaagtgtatttttgttggaaggaactaggggagtgcag

SEQ ID NO: 338312 - DNA, 626 bp, Homo sapiens
gactcaatgattaagtaatgtcaattaatccttgacatgatcccaaatgaaactcaaaactaaaatcccttaatctcaagactttggccaacataaaaatagatgagatccatatcctgtaactttaaatatcctccatattgaatttagttgaaaaagataaatttaatttcacaagcagtttattattaaagtatctaaagattggtggtgtagggaagagaggaagaaatggggacaaagcagagaaaaagggggtgagaaagaatttttgttattataattttacctatcctacagatagaggcactaaaggataaaaaaaaatccttattttatttttatttatttaatttttttctaagatctgtcagattctgagattccgaaggatctttattttagctcaggccacaaagctagaatttagtcaggactggaatcttaaacagtccaaaatcttctaaagctcttaactgtttcttaatgtaactttatggaagcttttctgttagaaaattgttttctcaccactcagtacactttttwagaaaaaacaaatatttgtttgtagtctgtctaaatctaccttttcaaccagactttcatatttgtctttaaagtct

SEQ ID NO: 338313 - DNA, 572 bp, Homo sapiens
ttatattccccttcaaaggcatgactctaatgggctctgcagcaactgtggaatattaaaaggattgctgtaattggaattatacatattaacaatagctctaccatcaagcagttaagagcattgcacttttctacattatctcatttcatcttttcactagaactgcaagttrctaaaaattgtccctgatgaagaattgaggttcagaaaagctgaattacttgctcaaggccaggatacagtaaatccaggtctggcttcccactataccatacatattgcctctctaaaattatagaaatcacagaaatgtggatttgaaagagccctgtagaacctattttttttaattttttatttttaatgttttgggtacatagtaggtgtatgtatttatggggtacctgagatattttgatacagacatacagtgtgtaataatcaaaggacctttaggtcctttgtaaacaataaagcactttgcaaacaataaagcactttacaaatgctccctgacctttctttataagcaggttagacctgtaaaaaaattatttttaaatgtaaat

SEQ ID NO: 338314 - DNA, 497 bp, Homo sapiens
caagatctttctagcttttgcatgtgggcatttcatgctataaatttcgctcttaacactgctttagtcgcaccccagaaattctggtacattgtctctttgatctcattagtttcaaataacttcttgatttctgccttaatttcattatttacccaagagtcattcaggagcaggttgttcaacttccatgtagttgtgtggttttgagtgagtttcttgagttctaatttaattgtgctgtggtctgggagactgttatgatttcagttcttttgcatttgctaaggagtgttttacttctgactgtgtgatcaattttagagtaagtgccatgtrgtgataaggatgtatattctgttgaatttaggtggagagttatgtagatatctatcaggtccacttgatccaggtctgagttcaggttctgaatatctttgttaattttctttctcaatgatctttctaatattgtcagtggggtgttaaaagtgttg

SEQ ID NO: 338315 - DNA, 507 bp, Homo sapiens
tgagtcctgctttctaacttaaaaaacgcatgtgtgttcatcacctggtcactgaaaaacagctctggaataggtgccatgcaaaaaaaaaaagggaactggaaagacccactgatctgtgggtctcacagcctcccgttacacaaaaattgcttcttttctctcatgttgcgttcttcctcttgattctcgacccttctccactctttcatttactccactcttactttgctttcacctccttttgtaaccgttcatcatcactcttcatatggattaatgkgattatcttaaaagcatgtaatatgtagttgctgggtttgtatgagtaatgagtgaacctgaagccaacataatgatcccgtttagtgctcccgagttaagattccagagttgcctgactttggacaaatcacatctccctttgcctttcaccccctgtaaactgaggataatggctcttacctcaaagcattgttaggattggagagaacgcatgttacatac

SEQ ID NO: 338316 - DNA, 629 bp, Homo sapiens
tctccccagtgtccagctgcttcttctgatgtccagccacttcttctctctgtcagctgagtatgggttctttataggcacaggatgggatcaagggggctgtaggtagttttggaaaaggcaacattcaattggtaaaaagacattactcagaaccaatcaggagagagtgggctaacagaaatggaagttctcactttgggccgtgggtttcaggctttttgtctygaaggtggggttttgccagagacctaccccatttgtctagaatttctgtgccttctgttgctaacactgtttttaccaccaggccatatagttgcatttactgctaaccccaattatgctagatggagtgaagtacaacccacttctatcaggcccttaggaattctagcataagatttcttaggaattatacctacttccagcacttgtagtcgtagccctggtcctgtgaccactgcatcaggtagggagataaaagttgaggtaatacatggagaaaaggaaaaaagtaggatcattataccagcatattccccccttggcaagaatcgcatagtcatacctgcatactctccaatccctcttcctcagatgcaccagaaaaatggagaattttagat

SEQ ID NO: 338317 - DNA, 516 bp, Homo sapiens
tgcctttgctcccattatggtgtcttttgagaaagagcagctctcatttttcttggagcccaatttttcaatgtatcaataaagtatgatgaatacttttttaatgaagtctttgccaaccccaaagtcataaagatattctcttatgctttcttctgaaagcttcgttagtttaatctgttacattaggtctaaaatccttcttgtggtttttgtaaagaagaagcgttctggatacatgtattttacttatagatatctgattggcacagcaccatttattgggaagaccatacccactgcactacaataacacctttataaaaaaaaaatcaatagtggtctatttctggattttctattctgttatctagtcagcttgcctatctgtgctaataccacactgtcttaattacgatcactktaagttttagaatctagtagtaatatctacaaatcttcttcaagcacacctttgcaatatgcggcacatttgtttttatatatattttagaa

SEQ ID NO: 338318 - DNA, 632 bp, Homo sapiens
taataaggcctatcactgttcctggcatgtagtgtttatgaagtgatagttcttatttattatgaataagttctcacagtgggaaggaatgagagaaggatggagaagtgcttgggaatgcagttaggggtatgtaggatgaatgagaatagtaaaagtatgaggataatgagatcaaggatgcaaatgcattttggtgacaggttggatggtaatagtatggccagaaatgcaaccactgggaaggaaaatcagttttctgggggaagacagtgaattattttgttcctctggagtttgaagtgcagtggtgcaatcatagctcrctgcagctttgaactcctgggctcaggtgatcctcctgcttcagcctccctggtagctgccaccaagcctgactgattttttactatttttttttttttttgtagagacaggatctcaccagctgaccagggtagtcttgaactcctggcctcaagcaatcctctggtcttggcctcccaagtgctgataatacaggtgtgagccactgcacctggcctctttgtcttaaaaatgacttaaaagtgctcagaggtggctgctgtagagtgggcaagtcctaaaggtggccatgctgctgtgctgta

SEQ ID NO: 338319 - DNA, 632 bp, Homo sapiens
taataaggcctatcactgttcctggcatgtagtgtttatgaagtgatagttcttatttattatgaataagttctcacagtgggaaggaatgagagaaggatggagaagtgcttgggaatgcagttaggggtatgtaggatgaatgagaatagtaaaagtatgaggataatgagatcaaggatgcaaatgcattttggtgacaggttggatggtaatagtatggccagaaatgcaaccactgggaaggaaaatcagttttctgggggaagacagtgaattattttgttcctctggagtttgaagtgcagtggtgcaatcatagctcactgcagctttgaactcctgggctcaggtgatcctcctgcttcagcctccctggtagctgccaccaagcctgactgattttttactatttttttttttttttgtagagacaggatctcaccagctgaccaggstagtcttgaactcctggcctcaagcaatcctctggtcttggcctcccaagtgctgataatacaggtgtgagccactgcacctggcctctttgtcttaaaaatgacttaaaagtgctcagaggtggctgctgtagagtgggcaagtcctaaaggtggccatgctgctgtgctgta

SEQ ID NO: 338320 - DNA, 621 bp, Homo sapiens
aaacattcacctgcatgcatcaattacacatacacaatgtgtgtacgtgtgcatgccttttattgattaaaaaaataatttctaggaatgtgactacactgaattttactaataggagttttggtgggtggaaaaaaggatagattttgtaatcaaacagatactgattttgatttcaattattcatcttacaacccgttggagagttaacttggatatttagattactgtgggcaataatatgatgtgcacgatagattttgattcctaacaacataaaaagaaatagaaatcctgagataaacattcatttttaagcaatttctgttatatatcttctctatttttaatatggccttgctgatataccttggagaagataaatgacagattcttcctcttttagcactatgtaggaatcataaaagtatccaagaaarattttgtgtgtctttgtgcttgaaagtaatcattattagtgataaaatttcaaatgtcttataaatccctcaaaacatttggattgaaagggattgtttagagttaaataatattattgtgaatgctaattttgttatctgttatttttttcatgataactcactactccatgataatgtc

SEQ ID NO: 338321 - DNA, 623 bp, Homo sapiens
ttacatgatagctgtccaagaaagtttcccagtattgctacagattttgagtggtaaraactatgataagccattgtttttacttttgtttttgttttgtatccttacactaaagtttaggggttgcttgttaacacagcattatctagattattctgactgataaagttgggaaccactgggattctaggaaaatgtagaagaatttttgtcatcattaaaatttcacttgattttcatgatcctaaatttaacgcagcagtggtaagggtgtttgcatgtgtgcatgtgtgctcatgtgcacatgcctgcacatgtgttttattatatttactgcattagtttttttttctcatgctactaataaagacataccagagagtgggtaatttataaaggaaagaggtttaattgactcacagttccacatggatgaggaggcctcacaatcatggtgcaaggaagatgagaagcaaagtcacatattacatggtggcaggcaagagagcgtgtgcaggggagctcacctttataaaaccatcagatcttgtgagacttactcactatcataaaacagagtgggaaagacctgcccccatgattcaattacctcccactgggtc

SEQ ID NO: 338322 - DNA, 542 bp, Homo sapiens
taagaaaaaggggaagattagtagagaggcatattttgggtagttaagaaattgaaaacagttacaaaatagatgtagtgagatagttcaggttctaaagttttggccactttcacttggatttgtcccttcccttcacctcattgtggagggaataattttcatctcagggttatggagatggcagaacatacaaaccctgacactggcaggataatatttgcagcagtttattagtcacatatgcatacagcccaggagtagaggacaccatgggccacacaggccaatatggggttttattttggagcagagtgaacaagctgggctgtggaaggcaagctgtatattaataagaaattgaggtgagccaggtgacccctgggttccagatgagggtatgattatctttttcaagtaattycatgggctgctgttagggcaccgaagcccattactcagggataagcaggcactgtagctggtcctcatgataaggattaggggaaaatatttgtgggaacataatgtgcagtaaaatg

SEQ ID NO: 338323 - DNA, 542 bp, Homo sapiens
taagaaaaaggggaagattagtagagaggcatattttgggtagttaagaaattgaaaacagttacaaaatagatgtagtgagatagttcaggttctaaagttttggccactttcacttggatttgtcccttcccttcacctcattgtggagggaataattttcatctcagggttatggagatggcagaacatacaaaccctgacactggcaggataatatttgcagcagtttattagtcacatatgcatacagcccaggagtagaggacaccatgggccacacaggccaatatggggttttattttggagcagagtgaacaagctgggctgtggaaggcaagctgtatattaataagaaattgaggtgagccaggtgacccctgggttccagatgagggtatgattatctttttcaagtaattccatgggctgctgttrgggcaccgaagcccattactcagggataagcaggcactgtagctggtcctcatgataaggattaggggaaaatatttgtgggaacataatgtgcagtaaaatg

SEQ ID NO: 338324 - DNA, 602 bp, Homo sapiens
tatgtgttataggaggtgtgcgtcaccctatgttttcatttagtcagtttattcactgacttcaagcctgagcattgaggcccctttttcacagaacacttctttattttctaattgtgcccatctcattgccttttttccctcatactcttatctagcttaagaatatgatatacactttcatagcaccacttttatacaagactatagattcaatgaggctgacagcatatttgacttatcaaccrttatgcctgcagaacctagacagtgcataacatttccagtgtttaataatcttttacaattttaagttattttcaggtaagtatgcattgagaagaaccaggaaaatacccaagggatgtaggtcatctatcccatatggtttggtagaaatgtaattgaattctcaaattctaaacatgaattcaattttttttgctgactgtgatgaaatatcctgacttgaaagctgtttaaccatcacattttataattaatataaccataaccatgctatatatttcaataaatttttatttgatattaatatttgccaatataatacttgagatctctgtatgggctcctcatatata

SEQ ID NO: 338325 - DNA, 602 bp, Homo sapiens
tatgtgttataggaggtgtgcgtcaccctatgttttcatttagtcagtttattcactgacttcaagcctgagcattgaggcccctttttcacagaacacttctttattttctaattgtgcccatctcattgccttttttccctcatactcttatctagcttaagaatatgatatacactttcatagcaccacttttatacaagactatagattcaatgaggctgacagcatatttgacttatcaaccgttatgcctgcagaacctagacagtgcataacatttccagtgtttaataatcttttacaattttaagttattttcaggtaagtatgcattgagaagaaccaggaaaatacccaagggatgtaggtcatctatcccatatggtttggtagaaatgtaattgaattctcaaattctaaacatgaattcaaktttttttgctgactgtgatgaaatatcctgacttgaaagctgtttaaccatcacattttataattaatataaccataaccatgctatatatttcaataaatttttatttgatattaatatttgccaatataatacttgagatctctgtatgggctcctcatatata

SEQ ID NO: 338326 - DNA, 602 bp, Homo sapiens
tatgtgttataggaggtgtgcgtcaccctatgttttcatttagtcagtttattcactgacttcaagcctgagcattgaggcccctttttcacagaacacttctttattttctaattgtgcccatctcattgccttttttccctcatactcttatctagcttaagaatatgatatacactttcatagcaccacttttatacaagactatagattcaatgaggctgacagcatatttgacttatcaaccgttatgcctgcagaacctagacagtgcataacatttccagtgtttaataatcttttacaattttaagttattttcaggtaagtatgcattgagaagaaccaggaaaatacccaagggatgtaggtcatctatcccatatggtttggtagaaatgtaattgaattctcaaattctaaacatgaattcaattttttttkctgactgtgatgaaatatcctgacttgaaagctgtttaaccatcacattttataattaatataaccataaccatgctatatatttcaataaatttttatttgatattaatatttgccaatataatacttgagatctctgtatgggctcctcatatata

SEQ ID NO: 338327 - DNA, 602 bp, Homo sapiens
tatgtgttataggaggtgtgcgtcaccctatgttttcatttagtcagtttattcactgacttcaagcctgagcattgaggcccctttttcacagaacacttctttattttctaattgtgcccatctcattgccttttttccctcatactcttatctagcttaagaatatgatatacactttcatagcaccacttttatacaagactatagattcaatgaggctgacagcatatttgacttatcaaccgttatgcctgcagaacctagacagtgcataacatttccagtgtttaataatcttttacaattttaagttattttcaggtaagtatgcattgagaagaaccaggaaaatacccaagggatgtaggtcatctatcccatatggtttggtagaaatgtaattgaattctcaaattctaaacatgaattcaattttttttgctgactgtgatgaaatatcctgacttgaaagctgtttaaccatcayattttataattaatataaccataaccatgctatatatttcaataaatttttatttgatattaatatttgccaatataatacttgagatctctgtatgggctcctcatatata

SEQ ID NO: 338328 - DNA, 442 bp, Homo sapiens
caccttatcaccaactctatcaaaaatcgaacaaatatctaatgtcttaaatttttgttttatcatactgcatatttgtctttgtatctgatttcaaatgattaaaatttatgaacctaaactaaaataatttcatggtgtttttacctgacaggcatcaactatratgaaaataatcctacaatttaagctaatgcagaaagcgcaaaatgtttcaattacatcaaacacttagaaaaataactttctaccaagtgatatttttggctatttatgcttaagaggaaactattttctggtaatctatagacattaaaacaaaaataacaacctcatttttcctgttcttcttccgtttgaaaagctgctattgctattcaatttgttcacgttctttttctcctctctcctgtggagagttctaaaatatttcattttgcca

SEQ ID NO: 338329 - DNA, 442 bp, Homo sapiens
caccttatcaccaactctatcaaaaatcgaacaaatatctaatgtcttaaatttttgttttatcatactgcatatttgtctttgtatctgatttcaaatgattaaaatttatgaacctaaactaaaataatttcatggtgtttttacctgacaggcatcaactataatgaaaataatcctacaatttaagctaatgcagaaagcrcaaaatgtttcaattacatcaaacacttagaaaaataactttctaccaagtgatatttttggctatttatgcttaagaggaaactattttctggtaatctatagacattaaaacaaaaataacaacctcatttttcctgttcttcttccgtttgaaaagctgctattgctattcaatttgttcacgttctttttctcctctctcctgtggagagttctaaaatatttcattttgcca

SEQ ID NO: 338330 - DNA, 442 bp, Homo sapiens
caccttatcaccaactctatcaaaaatcgaacaaatatctaatgtcttaaatttttgttttatcatactgcatatttgtctttgtatctgatttcaaatgattaaaatttatgaacctaaactaaaataatttcatggtgtttttacctgacaggcatcaactataatgaaaataatcctacaatttaagctaatgcagaaagcgcaaaatgtttcaattacatcaaacacttagaaaaataactttctaccaagtgatatttttggctatttatgcttaagaggaaactattttctggtaatctatagacattaaaacaaaaataacaacctcatttttcctgttcttcttccrtttgaaaagctgctattgctattcaatttgttcacgttctttttctcctctctcctgtggagagttctaaaatatttcattttgcca

SEQ ID NO: 338331 - DNA, 402 bp, Homo sapiens
tattaagcatataaaagtggcagagatctataactctatgcatttcatgggtatatacgtatgtagttcaatagattatagtgtccggagactagaaaaggagaaaaatgagtgtggagtattggatgcattaattattattttataccattrgtggagaccacaaacttttttctttgatcttgaaaatatatgtaaagagagatatcgtctaggactgtgttttttccagagtataagaattaagcctattattatgtttttgataatatagaagattttagaaggtaatttgatgattgtaaattgcaatgattgatacattttctcaaagataattgcttcttacatatttttaaggtgatataaaataaatttataataatttttgatatcagtcat

SEQ ID NO: 338332 - DNA, 402 bp, Homo sapiens
tattaagcatataaaagtggcagagatctataactctatgcatttcatgggtatatacgtatgtagttcaatagattatagtgtccggagactagaaaaggagaaaaatgagtgtggagtattggatgcattaattattattttataccattggtggagaccacaaacttttttctttgatcttgaaaatatatgtamagagagatatcgtctaggactgtgttttttccagagtataagaattaagcctattattatgtttttgataatatagaagattttagaaggtaatttgatgattgtaaattgcaatgattgatacattttctcaaagataattgcttcttacatatttttaaggtgatataaaataaatttataataatttttgatatcagtcat

SEQ ID NO: 338333 - DNA, 583 bp, Homo sapiens
atacacaaaacaaaataaaatgaaacttagtagggatatggaagattgaaatagctcttttaatgaactggaccaaaatgattacttacaaacactatacaaaaatgcagaatccacattcttctcaaatacacatggaatatttaccaaattrgatcacattctgtttcattcaacagttgttaataaattgcaaatggcaaaaatcacagcgtgtattttggaccataaaatactgaattataaataaatgaaaacatatatagaaaatggccaaatatttggaaattaatcagcatgcctgctaataaatcatggaatgcaagagaaataacaatcatattaggaaatactttaacaaaaccataatacagacaaacttgcagaatttgataatgttaaaacatgttaaaaaattaactcactaagcttttagcactaaagcgtaaagaagaaaggaaacattaaagctaataacatgaaagaaagagatatataaaacaataataatagagacagacattagaagaagtcaactaatttaaattatatttatttaaaaggattccttaaatttataaat

SEQ ID NO: 338334 - DNA, 583 bp, Homo sapiens
atacacaaaacaaaataaaatgaaacttagtagggatatggaagattgaaatagctcttttaatgaactggaccaaaatgattacttacaaacactatacaaaaatgcagaatccacattcttctcaaatacacatggaatatttaccaaattagatcacattctgtttcattcaacagttgttaataaattgcaaatggcaaaaatcacagcgtgtattttggaccataaaatactgaattataaataaatgaaaacatatatagaaaatggccaaatatttggaaattaatcagcatgcctgctaataaatcatggaatgcaagagaaataacaatcataytaggaaatactttaacaaaaccataatacagacaaacttgcagaatttgataatgttaaaacatgttaaaaaattaactcactaagcttttagcactaaagcgtaaagaagaaaggaaacattaaagctaataacatgaaagaaagagatatataaaacaataataatagagacagacattagaagaagtcaactaatttaaattatatttatttaaaaggattccttaaatttataaat

SEQ ID NO: 338335 - DNA, 567 bp, Homo sapiens
gcttaaaaaacctcagatttttagcactagaaatgaaacacaatcttgtaagagaactatttacagtataagggttttaaagacatatatagagcaactttatgttgataacttgaacaacttcatgtatatagacaaattccttgatatcaaaaattacaaaaactgctctaaaagaaaagataaatatgaataatactgtattaaataatgcagttaaatttataatctaaaatcttaccacaatgagtgtttcaatagtaaagcagtcactggtgagttccacaatatatttaagaaagaagcagtaccaattttcaatactttttcatagaataaagggaaagagaatatattcaaccaatttgatgaagccaatataaactggtaatcaaacattgataaggscattatgacaagactacagagcagcaacactcataaacatagttgcaaacatccttcaagaaatactagtcaattatatctggcattaataataaaaggtaatccatcatgattatgtgggatttattccagaaatacaaggattgcttaacattgaaa

SEQ ID NO: 338336 - DNA, 549 bp, Homo sapiens
cccaccaagaataaagaattggatgcaaagcagtaagagttcatttgtttttgtaattctgttattattaacctattattttttcttctgagcccaagcttgatactgtatctgaagcactgggatggtttagtaatttaaaatgtaaaacttaatagaataatactttgctgcaacctttaattatatttttacattgagacttggtcgatatttgtgtttattttcttaacttcaaacataattgacaatcttcacaaatgtcacctytctaaagaaagggtcaacatttagcagtgcattactagatttttcacacatattcattattttgtggtctttaagtatttaatgttgaataagaaattcaagctttacttctacatgcccacatgtcggatagttaataaatatgtttttcatttgaattcattaaatttgtctgaagtttcagaaactactaatacttgttataaaataagtgatataatttagtcaaaatgctgagttatttttgagtattgagaaggatgtcaaatgttaaatggc

SEQ ID NO: 338337 - DNA, 401 bp, Homo sapiens
agtgaatcttatttagacagacattagctcaattatttgtattataaggttattcactgcaaatgattaattgtaagtagatcaaaaaagttgcagtgtgtatctgtaaaatggaatcttttgcagccatataaaagtacggacatttgcaacaacatggatgaatcttgagtgcattttgtcaagtgccayaaataattcagagaaagacaaataagatatggtatcacttatgtgtggaatctaaaaaagttatctaaaaaactcatagaaacagtagaattagaacgatggctgccaagggctgagtggagggcaaaatagggacatgttggttgtagggaataattttcagttaaaagatgagtaagtttgggtggttccaagatggctgaatagga

SEQ ID NO: 338338 - DNA, 376 bp, Homo sapiens
agattatgtaatagcaataattttaagattgaagatattagtgagataatgtttattttttgctgtttcttcctgtcttactttactttgttgacagtgatattaagaggttattttctacataattgatattattcatttattttcttctcattcttcatagccattaaatggtagctgcatatggcagaaataaactctagtccttccagagttatgggcargagggaaatgggggtaatatttattaggagacttgattaaaaaagagaatgatagtcagtgattgaaatttcacctgaacaatttctttcgctattcttttcttcccaacttctagaggaaaggatcatatttaggattacctgataattca

SEQ ID NO: 338339 - DNA, 570 bp, Homo sapiens
ctacacataagccaccaaggtttggagctcaccccctgtagagtaacagcgtgaactccacagtggccctttatagccagtgctcagacacagggccccgagtcgtgagtgtgcacaaagcagcaaggccgtgggcgtggcctacaaaaccattttttcctcatacacctcccagcttgtgatggraagagctgctgtgaacacctctcacatgtcttggacacagcgcatttggctcctttttacatatgcaaatttgtgtagttggcttaaattcctccccagaaaatgggatttttttttctagtgcagtgtcaggcttcaaattttccaaacttatatgctctgcttcctcttgaacacttttccacttacaaacatcttcagtcagataccctcaaatcacctctctcaagttcacagttccacagatctgtagggcagaggcaaaatgctgccagtctctttgcatagcaagagtgacctttactccagtaccaaacaagttcctcatctccatgtgagaccacctcagcctggactttatagtctacgtcactatcaacattt

SEQ ID NO: 338340 - DNA, 570 bp, Homo sapiens
ctacacataagccaccaaggtttggagctcaccccctgtagagtaacagcgtgaactccacagtggccctttatagccagtgctcagacacagggccccgagtcgtgagtgtgcacaaagcagcaaggccgtgggcgtggcctacaaaaccattttttcctcatacacctcccagcttgtgatggaaagagctgctgtgaacacctctcacatgtcttggacacagcgcatttggctcctttttacatatgcaaatttstgtagttggcttaaattcctccccagaaaatgggatttttttttctagtgcagtgtcaggcttcaaattttccaaacttatatgctctgcttcctcttgaacacttttccacttacaaacatcttcagtcagataccctcaaatcacctctctcaagttcacagttccacagatctgtagggcagaggcaaaatgctgccagtctctttgcatagcaagagtgacctttactccagtaccaaacaagttcctcatctccatgtgagaccacctcagcctggactttatagtctacgtcactatcaacattt

SEQ ID NO: 338341 - DNA, 570 bp, Homo sapiens
ctacacataagccaccaaggtttggagctcaccccctgtagagtaacagcgtgaactccacagtggccctttatagccagtgctcagacacagggccccgagtcgtgagtgtgcacaaagcagcaaggccgtgggcgtggcctacaaaaccattttttcctcatacacctcccagcttgtgatggaaagagctgctgtgaacacctctcacatgtcttggacacagcgcatttggctcctttttacatatgcaaatttgtgtagttggcttaaattcctccccagaaaatgggatttttttttctagtgcagtgtcaggcttcaaattttccaaacttmtatgctctgcttcctcttgaacacttttccacttacaaacatcttcagtcagataccctcaaatcacctctctcaagttcacagttccacagatctgtagggcagaggcaaaatgctgccagtctctttgcatagcaagagtgacctttactccagtaccaaacaagttcctcatctccatgtgagaccacctcagcctggactttatagtctacgtcactatcaacattt

SEQ ID NO: 338342 - DNA, 511 bp, Homo sapiens
ttttgttatatctatattttgttacaagcctcatgttaaccacaacacaaaagcctattatgaattcattcaaataaaaagcaatgaattgaaacatattatcagaaagatatcaattaacccattagaagacaatagaagagagtaattacaaaacaaccataaaacaagaaacagaaaaaaatcctgtcttatcaacaaaaatgcccactgcaaattgattcaattatctaattaaaaagcatagaaaagttgaatagattaaaaataaattaagagctaactacatgctgcctatattaaaccaactcaacctttaaaggctcacatagacagaaggtatagtggtgtraaaagatatcccatacaactgaaaattaaaaaaagaacaggagtaactatatttattatattagataaagtagactacaaattaaagactgtaataaaagacaaagaatgtcatcatataattatgaaggggtcagttcagcaagaggatagaacaatt

SEQ ID NO: 338343 - DNA, 584 bp, Homo sapiens
atttttaccatagaaacaataaatacagcaagtgtcttccattttcagtgtgggatagaatccttactgaaattaggagcaytgggagcctctgagactaataagtctacagaacatctggaagaggggcaaataaaatgtttcttgcaggatttttagggagaaacaaatgggacttggggagtaggaggtaggtgactgcaagtgctttgtttcacatgaaagataaaacatgattaggccaggaggttcccaaggaaccctgaataatacaaaccaaagcctattaggcatcacgtacttcatgtgtgaggggttgtttgccagtccagggcctatttgcctctgatccgttctttgttgctctactactgtgctcaaggaagaggggattgaccctcgcaggctgtgtttctcaggttcttttatcacctgtctgggttgggccaatgggatgcaggggtaggaggttagaggccagggggcaggaataaacaagggaatcttccccactagccctacctttctgccttgggcagtgtttctggcagcagctctgtctccattgtatgcctgaaggcatg

SEQ ID NO: 338344 - DNA, 584 bp, Homo sapiens
atttttaccatagaaacaataaatacagcaagtgtcttccattttcagtgtgggatagaatccttactgaaattaggagcattgggagcctctgagactaataagtctacagaacatctggaagaggggcaaataaaatgtttcttgcaggatttttagggagaaacaaatgggacttggggagtaggaggtaggtgactgmaagtgctttgtttcacatgaaagataaaacatgattaggccaggaggttcccaaggaaccctgaataatacaaaccaaagcctattaggcatcacgtacttcatgtgtgaggggttgtttgccagtccagggcctatttgcctctgatccgttctttgttgctctactactgtgctcaaggaagaggggattgaccctcgcaggctgtgtttctcaggttcttttatcacctgtctgggttgggccaatgggatgcaggggtaggaggttagaggccagggggcaggaataaacaagggaatcttccccactagccctacctttctgccttgggcagtgtttctggcagcagctctgtctccattgtatgcctgaaggcatg

SEQ ID NO: 338345 - DNA, 554 bp, Homo sapiens
tctgaagtactaagatttgggacttcaacatacaaattttggagggacatattccaacccatagcattcgggtactatttttaatatccagtttacttctgtagaaattgagtttcaggccgggcgcggtggctcacgcctgtaatccccgcactttgggaggccaaggcaggtggatcacgaggtcagaagatcaagaccatcctggctaatgtggtgaaaccctgcctctactaaaaatacaaaaaattagccgggcgtggtggcgggcacggtggcgggcgcctgcagtcccagctacccaggaggctgaggtaggagaatggcgtgaacccgggaggtggagcttgcagtgagctgagatcgcgccaccacactccagcctgggagacagagcgagactccatctcaaaaaaaaaaagaaagaaatagagtttcagataaagtaactttttcaagatcacagagcagagacatgtgaagcactgagcttgaagtcagacatctgacagastctttgttcttaaaacgtccgctatcctgcctactcacta

SEQ ID NO: 338346 - DNA, 622 bp, Homo sapiens
aaatgtatgcacagcctgaatgtggataagacatttaaaaatgtagaggaaatgcagttgttttacgctgtagtataataaaaccactagttagtgtcactgatatgatagcaccaattgcaaaacagtgaaaaagcagaaatcaaaatggaagacccacatctgatagagcaaagaaactggatttttaggtattattggaaaagaggaaataccactgaggagttaagacaggagtgtatgaattttttaaaactcaagaaaagtcagaggatatataaatctaaaattggctcatgagtacattcaaacattccaaggctatgcaatacattggacgcactgattattgaagtctcgctcatgaagaaagtgtgtaggacaaatgaaataartgttaaaatgtgcatgtgatatgagtttgcttttctcaaaaatgccaagaaaatatgcaaagaaacagagtaaacattctgtaaagatggaattctataatattctaccacccacatttccattaccaataaatgcacttgttcctaaatgatacatataatatgaccttcatatctaggtatatgtaccttaggagactgtttctttgcctaatcttgagtgagtg

SEQ ID NO: 338347 - DNA, 622 bp, Homo sapiens
aaatgtatgcacagcctgaatgtggataagacatttaaaaatgtagaggaaatgcagttgttttacgctgtagtataataaaaccactagttagtgtcactgatatgatagcaccaattgcaaaacagtgaaaaagcagaaatcaaaatggaagacccacatctgatagagcaaagaaactggatttttaggtattattggaaaagaggaaataccactgaggagttaagacaggagtgtatgaattttttaaaactcaagaaaagtcagaggatatataaatctaaaattggctcatgagtacattcaaacattccaaggctatgcaatacattggacgcactgattattgaagtctcgctcatgaagaaagtgtgtaggacaaatgaaataaatgttaaaatgtgcatgtgatatgagtttgcttttctcaaaaatgccaagaaaatatgcaaagaaacagagtaaacattctgtaaagatggaattctataatattctaccacccacatttccattaccaataaatgcacttgttcctaaatgatacatataatatgaccytcatatctaggtatatgtaccttaggagactgtttctttgcctaatcttgagtgagtg

SEQ ID NO: 338348 - DNA, 488 bp, Homo sapiens
cagcatctgggtgttgccatggcaatggtaaactgacatggcccagtggtgggtgtgtcttatgggaaacttcttccacccccatccctgttttagctagtcttcaatttgktcctgtgtctgagccctgcctctggagttgagccccacttcctacctcagctccattaaaacaaagctactttgtgggccaactgaaagatatacataccccagactgtgggttgaagggtttgtgactgttcataacatcaagtaggcagcctttatagaatttatgagtgattcaaaatttcctgtcttctttatggctttgccacttaaaagaaatccccaaccaaaagcacaagcatcaaaagaaaaattagatcaattgaacttcatttaaaaaaaaaagttggttcaaaggataccatcgagaaattgaaaggacaattcataaaatggaagaaaatattttcaaattatatatctgataaaaaactagt

SEQ ID NO: 338349 - DNA, 401 bp, Homo sapiens
gagaagagagctgctctgtatactgaaagacttggttggctcagctgtgttgtgtcagtaagccacktgatcaatggaggaatggccataaagtatccttgtgaaaccttgaaaggatttggacatttacaatagtgaaatgggatgttaggtatcaaaggatcagtcgctgtagctgttaaaatcaggatttagggatttatgatgctctttagttattccctctcaattgccaagggatgaaatttgacatatggcctttcctcttgttaaaactcacaggtcaaatgttgtaaattctgttttcatccaccaggaggaatgataaagcaaagaatttctttatgcaagcaaaggattaaagaattaataataatcagcatgtactggaaattgttatg

SEQ ID NO: 338350 - DNA, 550 bp, Homo sapiens
tttttgtagacatagacaagcttattctgaaatttatacagaaaggcataagccctagaacagccaaaataatcttgaaaaaaagaatgaaacaggaggattcactgtacttgatattaaggcttactatatagctacataagacaatgtggtattggtggayggagagatacatagaacaacagaacagaataaagaactcagaaatatagccacacaaatatggccaactgatttttcacaaaagtgcagaagaatggaggaaggatgacctttctaacaaatggtgctggagcacatggacatctgtaggctaaaaataaactttgacctaaattttacacattatatgaaaatcaactcaaaatgggtcctgaacataaatgtaaaatacaaaactggaaaacattcagaacacacataggagaaaatctttgaaatctggggctaggcaaagagttcttagacttaaaaccaaaggtatgatccgtaaaaggaaaaattggtaaattggacatcatcaaaattaaaaacatctcttcagaagacc

SEQ ID NO: 338351 - DNA, 525 bp, Homo sapiens
atctgcccacctcagactcccaaagggctgggattacaggcatgatccaccacgcccagccccatttcttctaattgttaaatttatgagtgtaaagttgtatttagtattccctgattagcctccttttcttggcttcaggatctgtagtgayagctcttgtgtttgattcctaatattggtgatttgtgtctcctttctttttatttttttagtcttgctagatgtttattacttttattaacgtttttccaataatcggttttggtttcattgattttctctactttcttcctatcttaaatttcattgattgctgattactatcattctttctttactgttactttgtttttctttttttctagttttttgatttagtacttaaattattgatttgagatctttcatctttttaaatgtaagcacttggtgttataaattttcacctcaacattgctttagctatgctatgcatatttttaaatgttgtattttaattttcattctgtttatgtttttttt

SEQ ID NO: 338352 - DNA, 604 bp, Homo sapiens
atgtcaattttgaggcatatattcagatgatagcaatgtgttttgaagctctgttgcttggtgcatatgcatttaggattgctgtgacttcttggtgaattgttttatctttatgtaatatccttctttattctttatagttttatttgctctcagctctgctttatttgacttactatagccactcttgctttttaattaytattaatgttagcatgatatattcatttccatttttttactttcaaactttgtcattgtgtttgaagtaagttgcttgtagacagtgtacctttggactatgtgtctttatccactttgtcaatccctgtcttttagttgttacatgtagatcactaacattcataactatcaatatgtcaggcttcagtctacatttctttattttttgtttgttcctctgtttctcatttctctgtttctcttttcttgctttcctatggattacttgaacattttttagggattattttatttacgctggtttcgagtatatttatattgtttgtattattttttatatagtattcatagattttttagtggttgttctagatattacaatgtatgtatatacttttcc

SEQ ID NO: 338353 - DNA, 636 bp, Homo sapiens
tctctttactctccatagtttttaaatacaattgtctcaaatatttcctctacatacattaagtgccacatcagttggtattataaattttacttcaaccataaaatatgatttttaaaactcaggagggcaagggtataatttctgtcttttttttgagatggagtcttgctctgttacccaggctggagtgcagtggcgcaatctcagctcactgcaacctccacctcctgggttcaagtgattctcctgcctcagcatcctgaataactgggattacaggcatgcaccaccctgcccaactaatttttgtattttgtttttagcagagatggggtttcaccaggttggccaggctgatcttgaactcctgacctcgtgatccaaccaccttggcctcccaaaatgctgggattacaggcrtgagccaccgcgcccagccaatagtctataattttaatccttatttttatctatttcatgtagtctgtcttagtgtgttgggactactataacaaaatgccataaaccaggtggcttataaacaactgaaatttattctttgcagttctggaggctggaaagtctaagatcaaggtgctggcagagtcagtgtctggtgagggcccacttcct

SEQ ID NO: 338354 - DNA, 585 bp, Homo sapiens
tgcactactctcttgagagaaccaatttttggtttgttcatcttttctgcaggatttcttgagatgccccttttttgttacttatcttgaatatatatatatttttccatcagcacatgtttatcaagtgcactaktctcttgagagaaccaatttttggtttgttcatcttttctgttatttcctgtgtccttgacttatgctctgtttactgttgtcttccttctctttttgagattaatttgctgtctttttataacaactttttaagccagatgcttagctcattagttttcagactttgaaaatttcccttatatacatttaaatatataaaatttcctcctcttgttctttagttgtgctatgaagtatttttatttttgttcagtttagtattttcattatgaaatgaaatggctctttggaagaactgtggtttttaatttacaaatttgtggcgatttactacttgttttctttgttagtgatttctggcataattgcatatgggccacagtgcatatcctgtatgtttccagtcctttgaaatttaatgagacttgctatataacccagcttatt

SEQ ID NO: 338355 - DNA, 585 bp, Homo sapiens
tgcactactctcttgagagaaccaatttttggtttgttcatcttttctgcaggatttcttgagatgccccttttttgttacttatcttgaatatatatatatttttccatcagcacatgtttatcaagtgcactattctcttgagagaaccaatttttggtttgttcatcttttctgttatttcctgtgtccttgacttatgctctgtttactgttgtcttccttctctttttgagattaatttgctgtctttttataacaactttttaagccagatgcttagctcattagttttcagactttgaaaatttcccttatatacatttaaatatataaaatttcctcctcttgttctttagttgtgctatgaagtatttttatttttgttcagtttagtattttcattatgaaatgaaatggctctttggaagaactgtggtttttaatttacaaatttgtggcgatttactacttgttttctttgttagtgatttctggcataattgcatakgggccacagtgcatatcctgtatgtttccagtcctttgaaatttaatgagacttgctatataacccagcttatt

SEQ ID NO: 338356 - DNA, 585 bp, Homo sapiens
tgcactactctcttgagagaaccaatttttggtttgttcatcttttctgcaggatttcttgagatgccccttttttgttacttatcttgaatatatatatatttttccatcagcacatgtttatcaagtgcactattctcttgagagaaccaatttttggtttgttcatcttttctgttatttcctgtgtccttgacttatgctctgtttactgttgtcttccttctctttttgagattaatttgctgtctttttataacaactttttaagccagatgcttagctcattagttttcagactttgaaaatttcccttatatacatttaaatatataaaatttcctcctcttgttctttagttgtgctatgaagtatttttatttttgttcagtttagtattttcattatgaaatgaaatggctctttggaagaactgtggtttttaatttacaaatttgtggcgatttactacttgttttctttgttagtgatttctggcataattgcatatgggccasagtgcatatcctgtatgtttccagtcctttgaaatttaatgagacttgctatataacccagcttatt

SEQ ID NO: 338357 - DNA, 597 bp, Homo sapiens
acacccttgggttgacccttctccactgctcacttgtgactgtttccattaacagccagtgaaatcagatgagtattctcatgatatgagatccttacgctgaggctgcactgtaataatgagttagatccacctctctatcttgcacagatattaaaaaaaagagctgagtggaaattcaggagacagaaatgtatcctgtgggatttcttttacagctatctggtcattatgaatcatgccaggattacaaagtttgggatttgaagacatttataatagaaaatataacagaatttgcaatgactgggttgagagacaggctcmcagcaaaaaaaaaaaaaaaagcagctggctgttacagtagttaatttctgaacttctatgtgcaaagatgaagtgaaagccactctatattgaaaaacactatgatatgttcagtttcttctgcagttaaaggaacttattttatattgtaagtttccattttatttgtgtgtcattatataatgacatttccatctctggccataagtcatccaacttcttatttgatgtaatataatagaattaatagctatttatcctaaaacgcat

SEQ ID NO: 338358 - DNA, 646 bp, Homo sapiens
tgttagtacttttatctttatgtagttttgtactcaaaactgtgtaataatggaattcacatgttaaagttagtgttcccttttcctgaaaatgtrtcaaggacctataccaaaattataggagctctattttcttctctagttctcttggatatgggtggcaaaaagtactggcacaaagcactgttgggggaaagagattatgatccaatgaatccatgtcattatatgatgtgaagattaagaatttcatatttgaaataaagacaagtggtgggagatcacaaaaagaaaatataattctcctaatctttagttatcctttcctcttcttaattatatttatgataatgatagaaatgattttttaaagatatataagatcttttttcaatgaagtagaacatttattcagattatttatttttattttctcctgcttctattttgcagccttaaattgtcttatgactttttttcccctcccagttcactcccttttccttctttcaaggtctctaaccctctgataatgtcacatacgtgtccgttgaatgcaacagtgactttgtatctaatacatacagtgatgatgagaaacatagtacgtttaatatgagcttcccctaaagcaatttgtttgcat

SEQ ID NO: 338359 - DNA, 448 bp, Homo sapiens
actgactacaatggccatcagtcttgaaacagattctacaaataacgtaattaagaatggggaaaagatctgaatacatacttaaccaaaaaagagatacacaatggcagataaacctagggggraaaagacacttaacgctgttagtcattagagaagtgcaaactaaaactgcaatgggataccactacacatgcattacacttgctacaatggaaaagactgatcataataaataatggaaaggacatggagaaaccgggaccctcataaaatgctggtcagaatgtaaaatgctacaattgctttggaaaacaatttggcagtttattaaacagttaaacatattcctttcatatggtccagccactccacttctagatagttaacagagaaaactaaaagcatgtttatacccaggcccatacacaaatgcttacagcagctt

SEQ ID NO: 338360 - DNA, 593 bp, Homo sapiens
acatgacacacatctacctatgtaacaaaactattttgttgtaaataagatatctattactatgtaaaaagttaactttttaacttttttaacttaaaagttgaaaagaaagaaagaagcaatatgaccatatatacttgcagggaatttgggaactgtgatctttatctggagtttctgtattttctacaacgacgaaagaagaaggaaaggaaccagatcccaaacactaagaaagagtaaattccacctgttgctctaaatcatggcatattgactttacatttggagcttgtaagtcttgtaaaacgccccagctctgtcctctggatcttgaaacaagaatcattatgggttttctgtagaagttttagccatcacttccatacccaaggtcaagaatgatacgtgccctcaggctggaagcagtgaatacaaaaataactttcagtatcatttccttccttstagggtcaacctcaacttaattcttccttgtttccattgctttccaatgccttcagggaattgttttttgtattttgtctagaatttatagctgttatctgtaggacagttagtccaacgggagt

SEQ ID NO: 338361 - DNA, 510 bp, Homo sapiens
aaatcatggcatattgactttacatttggagcttgtaagtcttgtaaaacgccccagctctgtcctctggatcttgaaacaagaatcattatgggttttctgtagaagttttagccatcacttccatacccaaggtcaagaatgatacgtgccctcaggctggaagcagtgaatacaaaaataactttcagtatcatttccttccttctagggtcaacctcarcttaattcttccttgtttccattgctttccaatgccttcagggaattgttttttgtattttgtctagaatttatagctgttatctgtaggacagttagtccaacgggagtttaccagccataactagaagaggaagctcatggaagttttttccctgatattttcatggatggtttcttcctgtcactcagatccaacataaatgtcacctttttactaagacttttcccgaccttgatttaaagtagccctcaatctcttgtttcagcactacaaggacttgtagc

SEQ ID NO: 338362 - DNA, 544 bp, Homo sapiens
aggctaatgtgtgtcaaacctgtgtatccaaaacctacgtctccctyggcctgggggggtggagtgtaaggcatatggacgtgctttggtcaaggaataggctgaggtggatatccaggcctgcatgagtccagcgagtttggtgtgcaggcgcacacctccacttgttatataacctgtttgtgtaagttcatacttgacttggagccactattgtctgtaaaaggtataactgccctgttgacgctgtgcacaagtgacatggctcttaggctcttggggctcagcttggctcaacatggcttaacatggtgggtgccagggtgcccagagaaagaaagagccaaagctatccatctatgcagacagacaggagggagctaggacacagcttggtttgcttgtgcccagagagagaaagagagttaagctgctgatcctgaaggcaagggagagccagccacgcagctgtgtgtgagggtggctggctcaagcagcctagacaaggcgaacagtgtaagagtaagctgctagtgagaaagct

SEQ ID NO: 338363 - DNA, 544 bp, Homo sapiens
aggctaatgtgtgtcaaacctgtgtatccaaaacctacgtctccctcggcctgggggggtggagtgtaaggcatatggacgtgctttggtcaaggaataggctgaggtggatatccaggcctgcatgagtccagcgagtttggtgtgcaggcgcacacctccacttgttatataacctgtttgtgtaagttcatacttgacttggagccactattgtctgtaaaaggtataactgccctgttgaygctgtgcacaagtgacatggctcttaggctcttggggctcagcttggctcaacatggcttaacatggtgggtgccagggtgcccagagaaagaaagagccaaagctatccatctatgcagacagacaggagggagctaggacacagcttggtttgcttgtgcccagagagagaaagagagttaagctgctgatcctgaaggcaagggagagccagccacgcagctgtgtgtgagggtggctggctcaagcagcctagacaaggcgaacagtgtaagagtaagctgctagtgagaaagct

SEQ ID NO: 338364 - DNA, 609 bp, Homo sapiens
cagggcagcaacccagtctgtgcagtamaccccataaatcaaagacaccataatgctgatcagaagctgtctttaagccctgttgacaaggctgagtaatatagagtggattaacttcttccaccagtgcttgttttagctgtccccactccatgttcagatagacactctcagttcaaacaggagtgagcaaaaatatattgtagattcaaccggtggaaaaataactttacagcagagtttcattttcagtaggaccatttttttctgggacctctctgtgcacacaattaaatgaatgctccttgattaaatataaaacttctgggaaatggtcgtttaaatggcataattttatgtaacagatattttaaagacaagtagcgacatttagttcatgataaaatagggacactctattaaaccatcaaattataagattttactatgtaacattatctggataattcttttttttttttttaaaacagatcttgctctttcgcccaggctggaatgcaggggcatgatcttggctcactgtaacctccacctctcgggttcgagggattctctggcctcagcctcatgaatagctggaatcacagg

SEQ ID NO: 338365 - DNA, 609 bp, Homo sapiens
cagggcagcaacccagtctgtgcagtacaccccataaatcaaagacaccataatgctgatcagaagctgtctttaagccctgttgacaaggctgagtaatatagagtggattaacttcttccaccagtgcttgttttagctgtccccactccatgttcagatagacactctcagttcaaacaggagtgagcaaaaatatattgtagattcaaccggtggaaaaataactttacagcagagtttcattttcagtaggaccatttttttctgggacctctctgtgcacacaattaaatgaatgctccttgattaaatataaaacttctgggaaatggtcgtttaaatggcataattttatgtaacagatattttaaagacaagtagcgacatttagttcatgataaaatagggacactctattaaaccatcaaattataagattttactatgtaacattatctggataattcttttttttttttttaaaacagatcttgctctttcgcccaggctggaatgcagkggcatgatcttggctcactgtaacctccacctctcgggttcgagggattctctggcctcagcctcatgaatagctggaatcacagg

SEQ ID NO: 338366 - DNA, 632 bp, Homo sapiens
acatattttacatatcacaaatttgagggacagcagaagagaagcaccgttcatttggtggactctgaggcctaatgtggcaacccattttatggaaataagaaaaccatccgggttctgaaagaaattattcttgacctaaaagaatcaaagttagggcaaatctccatctcccccaacccaaatgcaaaatagatactctatgccttctgaaatatagtggcttaatagaatagaagcggaggctaattcccttttctaaaacttctgtacctccacttcctcatctggtaaatgggataataattcttgaatctcaacattatatgtatgaatcaaatcagacaatatagaaaaaatcttagcacttaagttctggcaataagcaatgaaaatgttagacttctatactacttaaaagaagaggtaaaatgattatcactggtttcactcagaacaacaaaatataatttttctctacctgtaatagagcaaactaaatacatttttctctaccagtaataggcaaaaataaataactaaataaataagcttatgtcaccaayttcttaatgtattgctttatttctcttcttttgacttatgcacgcaaacatagcccttgacatatt

SEQ ID NO: 338367 - DNA, 618 bp, Homo sapiens
tttttatatagtgtgatgatttgattcacacatataatgttgagattcaagaattattatcccatttaccagatgagraagtggaggtacagaagttttagaaaagggaattagcctccgcttctattctattaagccactatatttcagaaggcatagagtatctattttgcatttgggttgggggagatggagatttgccctaactttgattcttttaggtcaagaataatttctttcagaacccggatggttttcttatttccataaaatgggttgccacattaggcctcagagtccaccaaatgaacggttcttctcttctgctgtccctcaaatttgtgatatgtaaaatatgtgtgaagatgcagataacatgtgggatctcattggctctaccattccttagagaaaatgtaattgttattgattctaactgatcattcaaaaattaagttcctccaaatttactctttttctaattgaaggttccagctgccatgggattgagatttcctatttttttttttcttgtcccgaaactctctgtcaaagattttatttctctaggcaaccagctggtttttcacatagataaggtcaattaatttgaccttt

SEQ ID NO: 338368 - DNA, 608 bp, Homo sapiens
tgtacctggaaggtccatgaacactgcattgctatctctatatgagctctattgttgccagtctttattctttctcaataccaagtaaacttggtgctaggtgaagactattgtgtgtctcatgaatttgattgtcaacttgaactcaagactactattgttaggtataaaggagagaatagtcatataaaaaaccygtactacaagtcctgagaacagtgccagagatgatggagaaacaataatgaaaatgttctggctacattattttataattagaatatttcagaggggcatataggtggaaagaccaaagatgaaaatatgccttgtgtgaataaatggttcaacgtttttgagatgcagaaaatttagcatataaattctcagaaaaaaaaaaaattaaagcgatttatgtctgtataccctggagaggggaaaagaggtgggaagagctgccaactctaaaatgtacctcctaaatactggtgttatatgttttgcctagtatttgcttggtactccaaagaatctatttcaatagaaaaataatagaagttcaagacttacttaaacacctgtggtttggtggtttgggggttggctga

SEQ ID NO: 338369 - DNA, 608 bp, Homo sapiens
tgtacctggaaggtccatgaacactgcattgctatctctatatgagctctattgttgccagtctttattctttctcaataccaagtaaacttggtgctaggtgaagactattgtgtgtctcatgaatttgattgtcaacttgaactcaagactactattgttaggtataaaggagagaatagtcatataaaaaacctgtactacaagtcctgagaacagtgccagagatgatggagaaacaataatgaaaatgttctggctacattattttataattagaatatttcagaggggcatataggtggaaagaccaaagatgaaaatatgccttgtgtgaataaatggttcaacgtttttgagaygcagaaaatttagcatataaattctcagaaaaaaaaaaaattaaagcgatttatgtctgtataccctggagaggggaaaagaggtgggaagagctgccaactctaaaatgtacctcctaaatactggtgttatatgttttgcctagtatttgcttggtactccaaagaatctatttcaatagaaaaataatagaagttcaagacttacttaaacacctgtggtttggtggtttgggggttggctga

SEQ ID NO: 338370 - DNA, 608 bp, Homo sapiens
tgtacctggaaggtccatgaacactgcattgctatctctatatgagctctattgttgccagtctttattctttctcaataccaagtaaacttggtgctaggtgaagactattgtgtgtctcatgaatttgattgtcaacttgaactcaagactactattgttaggtataaaggagagaatagtcatataaaaaacctgtactacaagtcctgagaacagtgccagagatgatggagaaacaataatgaaaatgttctggctacattattttataattagaatatttcagaggggcatataggtggaaagaccaaagatgaaaatatgccttgtgtgaataaatggttcaacgtttttgagatgcagaaaatttagcatataaattctcagaaaaaaaaaaaattaaagcgatttatgtctgtataccctggagaggggaaaagaggtgggaagagctgccaactctaaaatgtacctcctaaatactggtgttatatgttttgcctagtatttgcttggtactccaaagaatctatttcaatagaaaaataatagaagttcaagacttacttaaacacytgtggtttggtggtttgggggttggctga

SEQ ID NO: 338371 - DNA, 439 bp, Homo sapiens
ttaggagttcaagaccagcctggccaagatggtaaaaccccgtctctactaaaaatacaaaagtagccgggcgtggtagcaggcacctgtaattccagctacttgggaggctgaggcaggagaattggttgaacctgggcggctgaggttgcagtgaggcaatattgygccactgcactccagccttggtgatagagtgagactctgtctcaaaaaaacaaaaaaaaaaactaaatatctaaaagctgcacactggattctgttgctttggggttcattgctaaccattcatttatagcacatgtcctatggatagtttcctataagtcccattttgaaagcagttaactttgattacctttataagatatataaaacattggtggtgattcgggagactgttaaatgtcattagtgagactcacaaagccagagaaag

SEQ ID NO: 338372 - DNA, 439 bp, Homo sapiens
ttaggagttcaagaccagcctggccaagatggtaaaaccccgtctctactaaaaatacaaaagtagccgggcgtggtagcaggcacctgtaattccagctacttgggaggctgaggcaggagaattggttgaacctgggcggctgaggttgcagtgaggcaatattgcgccactgcactccagccttggtgatagagtgagactctgtctcaaaaaaacaaaaaaaaaaactaaatatctaaaagctgcacactggattctgttgctttggggttcattgctaaccattcatttatagcacatgtcctatggatagtttcctataagtccyattttgaaagcagttaactttgattacctttataagatatataaaacattggtggtgattcgggagactgttaaatgtcattagtgagactcacaaagccagagaaag

SEQ ID NO: 338373 - DNA, 586 bp, Homo sapiens
tagaatgacagtgtttttttgtaggaatttttgccaatcattgctaaaggaaaaagaagaaatagcctgaaacctctttagagtttttctatatgttcttccaaataaaattcaaatcagtcagagggtttctttgaaagcccatataatacaagsaccttttccatataagccagtgcaaagagtctgttctgaacccatttctttctcttcatcaatacctgtggattcctcataaacactctcaattccacccttgcctgtggctgagcctatagcttctattttgtttacctgatcctacagtgcacaacttttggggtagatcagactgacagtccccaggcacaatgtattcataggccctttccaactaaaaaggtaaccagttctctatacattgccaaacacacaatgttattcaattgaatgagattttcaagtcaaaaatcttgcataaaatctacatttccagaaacatctgtttttaaatgagatagcagtaagaaggaactttttgtccatttttaggtactgtgaatttggacatgtaatagactaatgtttattattcaaaatatactga

SEQ ID NO: 338374 - DNA, 586 bp, Homo sapiens
tagaatgacagtgtttttttgtaggaatttttgccaatcattgctaaaggaaaaagaagaaatagcctgaaacctctttagagtttttctatatgttcttccaaataaaattcaaatcagtcagagggtttctttgaaagcccatataatacaagcaccttttccakataagccagtgcaaagagtctgttctgaacccatttctttctcttcatcaatacctgtggattcctcataaacactctcaattccacccttgcctgtggctgagcctatagcttctattttgtttacctgatcctacagtgcacaacttttggggtagatcagactgacagtccccaggcacaatgtattcataggccctttccaactaaaaaggtaaccagttctctatacattgccaaacacacaatgttattcaattgaatgagattttcaagtcaaaaatcttgcataaaatctacatttccagaaacatctgtttttaaatgagatagcagtaagaaggaactttttgtccatttttaggtactgtgaatttggacatgtaatagactaatgtttattattcaaaatatactga

SEQ ID NO: 338375 - DNA, 586 bp, Homo sapiens
tagaatgacagtgtttttttgtaggaatttttgccaatcattgctaaaggaaaaagaagaaatagcctgaaacctctttagagtttttctatatgttcttccaaataaaattcaaatcagtcagagggtttctttgaaagcccatataatacaagcaccttttccatataagccagtgcaaagagtctgttctgaacccatttctttctcttcatcaatacctgtggattcctcakaaacactctcaattccacccttgcctgtggctgagcctatagcttctattttgtttacctgatcctacagtgcacaacttttggggtagatcagactgacagtccccaggcacaatgtattcataggccctttccaactaaaaaggtaaccagttctctatacattgccaaacacacaatgttattcaattgaatgagattttcaagtcaaaaatcttgcataaaatctacatttccagaaacatctgtttttaaatgagatagcagtaagaaggaactttttgtccatttttaggtactgtgaatttggacatgtaatagactaatgtttattattcaaaatatactga

SEQ ID NO: 338376 - DNA, 586 bp, Homo sapiens
tagaatgacagtgtttttttgtaggaatttttgccaatcattgctaaaggaaaaagaagaaatagcctgaaacctctttagagtttttctatatgttcttccaaataaaattcaaatcagtcagagggtttctttgaaagcccatataatacaagcaccttttccatataagccagtgcaaagagtctgttctgaacccatttctttctcttcatcaatacctgtggattcctcataaacactctcaattccacccttgcctgtggctgagcctatagcttctattttgtttacctgatcctacagtgcacaacttttggggtagatcagactgacagtccccaggcasaatgtattcataggccctttccaactaaaaaggtaaccagttctctatacattgccaaacacacaatgttattcaattgaatgagattttcaagtcaaaaatcttgcataaaatctacatttccagaaacatctgtttttaaatgagatagcagtaagaaggaactttttgtccatttttaggtactgtgaatttggacatgtaatagactaatgtttattattcaaaatatactga

SEQ ID NO: 338377 - DNA, 608 bp, Homo sapiens
ctttagggccatggtaggtaataatcgttggaaacatactacccaaggttttaataggcttctagaatagagctcagttgttatgagtattttctatactgggggaggcactcaaataactttaacccaagattagacatagaagaggtttacttcttctgaaaagttttctttaattcattagttttatttttataattttaaaacttttgctttattgacactctcaaacatatacaaaattaggatagtactatgaacccacattgcccattgcccagcttcaacaaccatcagtgcctgccacccttgttttatctctcattccctctccagmtatattttttgatattttaaagcagtttgggtgaaatgccctttcttagttttcctgtttgcaaaatgtctctacttcatttaggcgacggttggaagacaagttgtaaagttttaagaataaaacctcacgaaagtgaagtattcaaataaatgttcattttaatccttatgtgtggacacataaaaacaataacagaaggtagagaaagatgagatttttcactgtcaaatgtagtagaacaaaactagaacaagaaaatcaggtgctt

SEQ ID NO: 338378 - DNA, 623 bp, Homo sapiens
tattgtctatcttctatgaagtagtggttacaaagctgtaaacatttgtaaagctgattgaagtgtatacgtaagaaaggtgaaattcactgtaggcaaattatatctcaataaaactgttttttaaaaaaatcttgtttctaatgtcctgaaaccattacaaatcaggattcttttgatcacaagrgaaaaaaatccatttattgtcctaatcaaaaaatagtaattcataagctcttgtaagtgaacatgccagagatagctttaagtatggatgaatctaaggagtcaaagatcgactgggaatttgttctcttcatctttcacccgtgcttccttagtgagggttttcctctcaggcaggttatcccttcacaggaagatggcagctggaagctcggttgttctgacaatagccttgggactgataatcactgggccctcataggccaagtgatgtgaaccagtcatggtggctagagagatggtatatgccagttgactagaaccatcaccagctaaacctcatggtccaagagccaggaagagatggtttcccaaaggaaaatcagagtgttatgaccagaagaattcataatcagcaggccagtgcaatggacatc

SEQ ID NO: 338379 - DNA, 573 bp, Homo sapiens
ccgttgttctaattctattattatatggaagacaggggccttgctaggtattcaatacttactgtgttattgaattattggaactctgtgatgcctgtgtataatcatccccatttcattgtatgtgcatgatctgtcaacactttatggcgcagcgcctcctatatattccctctgtgtgctctccatgytaccctggtcacacagagctccttgctgtttctttaagacaccaaataggcatccatttcaaggtcttgctaattgtggtttcccattcctggaatggatgtctccaaaataatagttttattcatttttgcacttcctttgggccttgctgaaatagcatcttatgcttccatgaaagacttctatgggcactctacgtaaaacagcatcacacttagtgtctcaaatagattgctaaataaatttacttactgggttttagagatgaataacttggagctcagggtgattacaagtcttagctgagcaggcatatctgaaaagcagcacagctaggattttagctgtgttttccaggctttacacatgctcttcccatga

SEQ ID NO: 338380 - DNA, 486 bp, Homo sapiens
ctgctgatcagcacctcagatcttgaagggcctcccttgctgagagagtcacactgagaacatggagtctctgagcagcattttggggagctgtgtctgccttgggtgaggcagctgggggtgctgctattatttttcttctcgaaggttgaaagtggccttctgttggctactcttttacttacacatagcaggagacccaggtgtgcagtggaggactgtttcttatggctcaagagaagatcaccattgtcaactgttgtggggagaagagggctggttgtaattttcaggtctataattaaaacagttatgaggytttctttggtgttaattttgtttggcgcagggagggattgtaggatggcctctttctctgtgaactccagtgaagccagagaacttcatgaggatggggaatatgggatggcgtgttgatttggtctcttctgtgattaaacatcaatccctgaaagactcttaagt

SEQ ID NO: 338381 - DNA, 545 bp, Homo sapiens
cctatgctgcttctacttacctggggtctaaggaccagaggtttaaacttcccgagctttagaatttgcagagaatagtggggacctcatggtatgtggaagcatcaggagaccaagcgtgagaaagaacttcatacactacacgatttgctacataaactatgagcaatgtaagaaggtactacactggacttctcatttcaccaaatgggattagaagtaatgcaggaaaatcccacctgccttaattcatagaatggcaacattgtatgtgtgtttggaggtgggggcaggggggagctawgaagttggtgaattcttcataactgaaaaaactagtgtgattgtggtatttgcatgtgcagggagccccttgtcattgacatggacttgtaaattgcaggctatcaccttgtcagggaagtcactgaacagagttaaaacagaaagcccatgcagcacaggcttgtgaatgatcctgacccatcagcctctttctgtccccgtgaatccacctgcacccagatccaaggaaggtgacagca

SEQ ID NO: 338382 - DNA, 609 bp, Homo sapiens
gctataggccttggagatgcaaaggtgaataaaagtgacatagagttcacaggtgtctacagagttaggrtacaaaacaaagatatgatattgaatatggtataatatgtcttaaaatagacctctgatatgatttggctgtgtccctacccaaatctcatcttgaattgtagctctcataattcccacgtgttgtgggagggatccagtgggaggtaattgaatcataggggtgggtctttcctgtgctgttctcatgatagtggagaagtctcatgagatctggtagttttataaaggggagatctggtctcatgagatctggttttataaaggggagttcccctacataagatctcttgcctgctgccatgtgagatgtgactttgctcttccttcaccttctgccatgattgtgaggactctctggccacacagccatggaactgtgtgtcgattaaacctcttttctttataaattacccagtcttggctatatctttattagcagaatcagaacagactaatccaacctgttttacttccatttatatggcagctctaaaacttcatttatccacgtaccactttcaagatacttcctttttc

SEQ ID NO: 338383 - DNA, 466 bp, Homo sapiens
ctttgttatagcagccctagcaaactaataaagaccgggctagggctctgcagccagcaacgttcactgttgcagctggtatctggaaagtccctcaccttgctgggttgttgtgaggttggatggaacaggcctgtgtcactggtgcctgactctttaggctgacggctgggtcatggaactatctgcagatggactgtgggaaatggttcgttcaccctctgtctcctatttttaactccactgtgagtttgtgtaggtatttgtgtgtatgtgagtgtgtgtgtacacactgtgggagtgtgtggatgtgtgtgctcggtttgtgtgtacatgagtacatgtgagtgcacgagtgcgtgctcgtgcagcagtgcatttttaagtgtgcacatatatgtgcacatgagctcctgtgtgtgtakgtctatgtgtatagagacgagtgcatgcctgcagtcagtgt

SEQ ID NO: 338384 - DNA, 582 bp, Homo sapiens
  misc_feature (1)...(582): n = A,T,C or G
nnnnntactcaacaccgataaatctgaagacgaaatgttaagtggaaaaaaaccaggtgtataaaaagttaatgagaaagcaaaagcgatctacagtggcagaggttagaatagtggttacctctggaagacgtcaactggaaggatgcacatgggagccgctggggttctataaatagtcttatgtctagatctgagtaaggtgtacataagtgtrtgcacatctgtaaaaatttattgagctgtacctaagatttgtatactctactatttataagttctaccacaaaacacagaaagaaaaggaggggagggagagagaaaggaggggaaaaaatggaaaggagagataaacccttttgtcctataatttgaaagtgtgaaaaagtttaaaacccctttgggtccttgccactaatggtgtcacaaactttatgatgtcccttctcagctgtcatatttccaggctataaagaaagcctacgtggagataatattttctgtaaataaatgttaacagtagatggaaatcatatgtgcaaacacataacaagaaaaatattgtgtacttttttttggggt

SEQ ID NO: 338385 - DNA, 582 bp, Homo sapiens
  misc_feature (1)...(582): n = A,T,C or G
nnnnntactcaacaccgataaatctgaagacgaaatgttaagtggaaaaaaaccaggtgtataaaaagttaatgagaaagcaaaagcgatctacagtggcagaggttagaatagtggttacctctggaagacgtcaactggaaggatgcacatgggagccgctggggttctataaatagtcttatgtctagatctgagtaaggtgtacataagtgtgtgcacatctgtaaaaatttattgagctgtacctaagatttgtatactctactatttataagttctaccacaaaacacagaaagaaaaggaggggagggagagagaaaggaggggaaaaaatggaaaggagagataaacccttttgtcctakaatttgaaagtgtgaaaaagtttaaaacccctttgggtccttgccactaatggtgtcacaaactttatgatgtcccttctcagctgtcatatttccaggctataaagaaagcctacgtggagataatattttctgtaaataaatgttaacagtagatggaaatcatatgtgcaaacacataacaagaaaaatattgtgtacttttttttggggt

SEQ ID NO: 338386 - DNA, 582 bp, Homo sapiens
  misc_feature (1)...(582): n = A,T,C or G
nnnnntactcaacaccgataaatctgaagacgaaatgttaagtggaaaaaaaccaggtgtataaaaagttaatgagaaagcaaaagcgatctacagtggcagaggttagaatagtggttacctctggaagacgtcaactggaaggatgcacatgggagccgctggggttctataaatagtcttatgtctagatctgagtaaggtgtacataagtgtgtgcacatctgtaaaaatttattgagctgtacctaagatttgtatactctactatttataagttctaccacaaaacacagaaagaaaaggaggggagggagagagaaaggaggggaaaaaatggaaaggagagataaacccttttgtcctataatttgaaagtgtgaaaaagtttaaaacccctttgggtccttgccactaatggtgtcacaractttatgatgtcccttctcagctgtcatatttccaggctataaagaaagcctacgtggagataatattttctgtaaataaatgttaacagtagatggaaatcatatgtgcaaacacataacaagaaaaatattgtgtacttttttttggggt

SEQ ID NO: 338387 - DNA, 582 bp, Homo sapiens
  misc_feature (1)...(582): n = A,T,C or G
nnnnntactcaacaccgataaatctgaagacgaaatgttaagtggaaaaaaaccaggtgtataaaaagttaatgagaaagcaaaagcgatctacagtggcagaggttagaatagtggttacctctggaagacgtcaactggaaggatgcacatgggagccgctggggttctataaatagtcttatgtctagatctgagtaaggtgtacataagtgtgtgcacatctgtaaaaatttattgagctgtacctaagatttgtatactctactatttataagttctaccacaaaacacagaaagaaaaggaggggagggagagagaaaggaggggaaaaaatggaaaggagagataaacccttttgtcctataatttgaaagtgtgaaaaagtttaaaacccctttgggtccttgccactaatggtgtcacaaactttatgatgtcccttctcagctgtcatatttccaggctataaagaaagcctacgtggagataatattttctgtaaataaatgttaacagtagatggaaatcatatgtgcaaacasataacaagaaaaatattgtgtacttttttttggggt

SEQ ID NO: 338388 - DNA, 592 bp, Homo sapiens
ctgaaaaaaaaaaaaaaaaaaaagaattacctggagcttcagtatccagtgtgcatagttaacaatattgttcactcatttgttcattcattcaacacctatcaatggggcacctcatctattataggaactggggatatagaaaagaaaaaaattaacagaaatccctggctctgtatagaaagaaagtagacccaatctataaatatatagactgttagacaagttgctaaggagtaaaataaagcagagaaacacaaaataatattttgatatgtaaagattcatttttcagggaagttgccctgagaaagtcaactaaaaatgtaaggaaatggttaaagaaatcctgccaacacctggagaaagagcagttcagtagacagtgtgacatgtgccaaggtcctgaggcaggaaygtgtctggtgtgttaaaggaacaccagggagaacagtgagaccaaggggagaaggaggagataagtctgagagtaggagagacagggagagactgtgttgaacattatagactccacttctataaacgctttgactgtgtgtgtgacatgggttgagaagaagaggctgataga

SEQ ID NO: 338389 - DNA, 511 bp, Homo sapiens
tgcatacctgagctattgggtccctaagaaatcaaatttgtttgtttttcaacttggcatcataatgaagcagagatgtcagcatatcatttcttagtgctgccaatatcttgagtaatcttaatcttgttagatcaataatgtgaaattttgctagttgccattttaattgatttaattgaaattgatttggcataaatgagtggacagaaatttattaacagtgaccatgagggtttgaagtatctgctctgtaagaagtatgtgactttgatttatacatctaaaggctccctctttccaagttatattagagaaacaaacctaatgtttagtcctaaaaactattaaacattggtgaargtagtatatggagattctgaaaactaagtatttgggtattcatttcagtttatcccatttctatcatgtggttggttgttataattcacagttactgtaaactacatatgtgtgcatttatccttatgtctatgtatcagaaaatttg

SEQ ID NO: 338390 - DNA, 591 bp, Homo sapiens
ccttgtttgacctcctgtgcctctcaagctccttacaggagacctctgctgagatgcctcactctctaatcctctccaatcaatgcaggttggaagcctatactctatgaarctgctctgtgaaggtcacctctaccttaacacatcctgtgcaaagttcattctctacatcagagggatctttcagcaaagtctggcacagagctctgctcctttcttctagaaatagtttcccccatggatttgtgggacataaacaatcttatgggtgctgttctgcccgggttccctggccactctttctctcatagtgactccctgcattaatttcctattccgctgtgaaaaatcaccacaaacttagtggcttaaaacaatgtgaatttgatattttacccttttgtaggttagaagttcaacaaggatctttctgggctaacaccaagggggtggcagggctgtctgtgttcctgctagtggttataagggagaaattccttccttgctttttccagatcctagaggccacctgcagtccttggcttgtgacctcttcctctatcttcaaagctaagagcctagtgtcttctc

SEQ ID NO: 338391 - DNA, 413 bp, Homo sapiens
ctgcaaaaaaaaaaaaaagatgytatgagccctgaaggcagtgtgaagcaagcccctgcatctatagataaacttttaggaaaggcatcactagtgaactagataaaatagcaattgaaccactttattaaggcttgcagctttctaaaagcttcttatttctctccagtaggagtgaactctgataatatctatggtgaagggtagcatcctcggtctgaaggaactccatttttattttaagcattaatataaagcaccttttcactcttcttccactcacattgcttccactcacctcctctacatcctctcctttccactacccttccactcactcctgccttccaaaacatattcccttcctaaaggatttagtcccttgccaaagaagaaactcactcggcataaga

SEQ ID NO: 338392 - DNA, 556 bp, Homo sapiens
caaaactgataatttttctaggtatrtgattttttatattggcaaatattatttcttagcactttgatgctattgttgtatctttgtgctattaggaaaagcgctgtcagtctaatatttatttctttggaagtgatctgtcttgtctatttggctgtttttagaccttgtctttgtctttggtacactatagaaatgaatttcttaatcttgcttagaatatactgttcttcaaggaataaaggatatatgtctttaatcaaggttggaaaattttcaccatatttctcaatgttccctcaccattgttttacttttttcaggaactcagattacatatgtggtataccttcttatttactgaatctgcctcttatctcagttaaaaatttttctctttctttaggctacatcataatttcaggtcaattcattgtctccacttctttctaatctgctttttaaactaacctccaagatttgttttttaattttaattttaatcttaattactagaggttgtaagtaatttatttctaaatctaaagttatggta

SEQ ID NO: 338393 - DNA, 579 bp, Homo sapiens
ccttcttctagaaaactaaacatcctgtacattctaatatcaaagcaggttagcacatcagataattacctttcaaattaatcttcagacactaccagtaaagatcaaaatgtcaagaattttaagaggttatctcaacacttaacacccttctgaaagaaatacagtcatgcatatttacatttcaatcaacagaccacatatacaacagtggtcccaaaagattgtaatactgcatttttactgtaccttttctatgtttagatatgttttagacacacagatacttaccattgtgttakaactgcctataatatttggtatagtaacatgctatacacgtttgtagcttaggagcaacaggctacaacatacagcttaggtgtgtagtaggctataccatctaggtctgtagaagtacactctatgatgtccacacaacaaaatcgcctaataatgcactttcctggcaggacacatgaccctattaggtaaaattctccattagaaagaacttcggctcttctgttattattaatgcatagctcacactttataccataatgcattccaagaagc

SEQ ID NO: 338394 - DNA, 572 bp, Homo sapiens
tacagagttcatttaatgcaatgaggaaacaggtcacagagatgttaacaaactaataagtaatatagttaattggtggttaaattgttttgttacactgaatagaatgtaacaattcaacagatgcccctgaatcttaattatgaaatgtgtaatacatagcacattaagaatacttagaaaatgaaaggctgttccaactgtacaactgcaagacttttggcatatttatacattctatttttagaacctttctgaatatattaatgtgtttttattaagtgttttataacctggtgctacatattacacgttactgacagcattatctacagaattgcatatcacctttaccactgcccaaatacagtccaatatggtaggcagtggctacagggagacgatgaaactaccggatgctataggaaaaaaaaatttcctttcctaaataaagataaatatcattgatatttatgttttcagattcactgcaccaactacattattattaagartagtttcttcaaaaacaaaaacagccctttgaagaatggcagttgaaatgctttaaa

SEQ ID NO: 338395 - DNA, 292 bp, Homo sapiens
tttcttaaatatacatttaaacatgtggtctctgctctcaattatctttcttagaaaatgaataaagtccaaatatccaacattagtgagaatattaaataaattacagtactttcctactgtgaaatattatayggtcattaacatgaatgaggcacatacagtaatatggaaagatgtccatcacatgtagttgagtgaaaggagccagttacaaaacaatatgatccagcaaataaatattagaaactcatgtatgcagaagcttatgggaaaatatctggaaagatat

SEQ ID NO: 338396 - DNA, 292 bp, Homo sapiens
tttcttaaatatacatttaaacatgtggtctctgctctcaattatctttcttagaaaatgaataaagtccaaatatccaacattagtgagaatattaaataaattacagtactttcctactgtgaaatattatacggtcattaacatgaatgaggcacatacagtaatatggaaagatgtccatcacatgtagttgagtgaaaggagccagttacaaaacaatatgatccagcaaataaatrttagaaactcatgtatgcagaagcttatgggaaaatatctggaaagatat

SEQ ID NO: 338397 - DNA, 545 bp, Homo sapiens
tcaagactatagtaataaaaacaatatggtatatgcataaaaacacaaaaaacaaacagaatagagagctcagattactttgtcttagttgtaactgttgccaccaaagaaatacggataagatctaaagacagacaatgataaaatcattcatcaaaaaaaactcaagtatgacatcccaggtcatttggctgtaatcaggtggtgaaggtactgaaagttcaccggaaggcaggtttttaactcagtattgaaaggccacctactggtttaaaaaaaaaaaaaaaaaaaaaaagcttgtatggtaaaaatcagtggccttagattgggagtacttaagtatctcccaacaatataataaacacataatttgttttaatatagcaaatcatgtaggaataaaaaagacagcattcttgtatgtattgttgtagmtttcataaataaatgctaaatatttttaaagcaaaagacaagaagggaaaaagacattcgtgaatggtaaacagagagtcttgccaagttataatgacatggtgagggat

SEQ ID NO: 338398 - DNA, 545 bp, Homo sapiens
tcaagactatagtaataaaaacaatatggtatatgcataaaaacacaaaaaacaaacagaatagagagctcagattactttgtcttagttgtaactgttgccaccaaagaaatacggataagatctaaagacagacaatgataaaatcattcatcaaaaaaaactcaagtatgacatcccaggtcatttggctgtaatcaggtggtgaaggtactgaaagttcaccggaaggcaggtttttaactcagtattgaaaggccacctactggtttaaaaaaaaaaaaaaaaaaaaaaagcttgtatggtaaaaatcagtggccttagattgggagtacttaagtatctcccaacaatataataaacacataatttgttttaatatagcaaatcatgtaggaataaaaaagacagcattcttgtatgtattgttgtagatttcataaataaatgctaaatawttttaaagcaaaagacaagaagggaaaaagacattcgtgaatggtaaacagagagtcttgccaagttataatgacatggtgagggat

SEQ ID NO: 338399 - DNA, 536 bp, Homo sapiens
tttactgaattctccagacaaggcaacttctccttcctttagactggcataataaattccatgtttcacaggaactgttcataaacattgagcagtgactagagttacccttcaattatttccattcaaaccctatcatagaatcataatttagggactctgttcaggaaccatatcttggtgattattttgtatctgccttacaatacctaacccagagcctaatatatgayaagcacttaaaaaataccatgaatgcttcaatataatataattccccaaatagagtgagcctccatattcccaatgagaattttactaatcaaatgattttgccctagaataatatacattcacttatcagtttaatgtttatgaggttatctgataactagttttaattctgtttattaaattagttacatttatatatttaaaccacatattttaggctgagctccgtagctcacacatgcaatgcttgcatttcaggaagcctagggaggaggatcacttacattcacaagttcgagact

SEQ ID NO: 338400 - DNA, 568 bp, Homo sapiens
gcagtgtcacttatgtgacctttatatttgtggtattttaatctattctgaaggaggagaaaaaaattcttatcccttaggaacctactttttttcctaatattttataacatgattttgttgctttatggtaaaaatatatcttgattctgacagttatttttatttttcttcaagtacaaagaaaaagagtttaattcaaaaaataaaaccaaattgtatattttaaaatttaytgcagttctctaacttctgtagactccactagaatgtgcacttcttaaagtcaagggtttatcctgctccactgctatttttctactgcctaaaatagtgcttatgacttataataagtgctcaataaatattcattgattaacttagtgaccagaagtgtataaacaacttttgttgtgattgttgttgaaacacgtgactggggagtcatctggttttaacagatatttgagctcattttcaatcttcaaaaaggaggtctatattttagcaaatggcatgtagtaacatgacagttattaagtaacaaacagtaacattaagtaacaga

SEQ ID NO: 338401 - DNA, 493 bp, Homo sapiens
gccaggaagcattcactacaagctgactgaggagcccttggaccttgaatgaacataggcagtagctatgcagtacctcactgtgggcctgaggtgggttatattagttgcaagcctcactgtaaccacaaatcagaaaacatacaacagatacataaaaaatagaaaaagaagaaattaaaacatacccccagagaaaatcaccttcaccaaaaggaagacaggatggaaggaaagaagaaagagaagaccacaaaacaatcagaaagcaaataagaaaatggtaccagaaaggccatacttatcagcaattacatagaatgtcaatgaaataaaccatccaatcaaaagacatacagtggttgaatgcagaaacaaaaagacccaacgatctgctggttacaagaaacacacttyacctatgaagatacacatagactgaaaataaacagatggaaaaacatattccatgccaatggaaaccaaaaaggaa

SEQ ID NO: 338402 - DNA, 358 bp, Homo sapiens
caatgattttaatcatttgagatgtgtgtcacaagttgttgaacctaccagaatatcaaattttgtaaaaaataaacaagaataagaataaaaatatgaawttacaaattttcccaaatagccaaattctgtttatatatcactgtagggctgctttaaatgtgtttctagtattgtcacattatctcttttttttttgtaagagacagagtctcattctgttgccaggctggaatacagtggtgcaatcatagctcactaaaacctggaactccagcttcctgagtagataggactacagacacatgccaccatgcccagataagttaaaaaaatattttgtagagacagagtctca

SEQ ID NO: 338403 - DNA, 635 bp, Homo sapiens
ctgcttggctatataaaatttctttctgtctttgcaatctctttgtggattgcctgtgatatgctcacattctagattaattcttattcaataatgatttttttttgtttctctactacttttataggaaacatttctaggttgagagattattttatcaccaatattgctaatacagattttctctgctgtaaatagcctttgtattagtttgttttcacactgctataaagaatacgtgaaactgggtaatttataaagaaaagaggcttaattgactcacagttycacatggctgggaaggcctcaggaaacttacaataacagcagaaggggaagcaagacagcaggagagagagtgaggcaggggaaattgccagaaacttatcaaacaaccagatcctgtgagaaatcactcaccatcatgagaacggcatggggaaactgtccccacgatccaatcacctcccaccaggaccacccctaccctgcccttgacatgtagggattacaatttggattacagctggagatgagatttgggtggggaaacagccaaaccatatcagccctgtttttatattggttctcttgtccgggttggaattctgactaggaccctgtgtggggtaaaa

SEQ ID NO: 338404 - DNA, 358 bp, Homo sapiens
caatgattttaatcatttgagatgtgtgtcacaagttgttgaacctaccagaatatcaaattttgtaaaaaataaacaagaataagaataaaaatatgaatttacaaattttcccaaatagccaaattctgtttatatatcactgtagggctgctttaaatgtgtttctagtattgtcacattatctcttttttttttgtaagagacagagtctcattstgttgccaggctggaatacagtggtgcaatcatagctcactaaaacctggaactccagcttcctgagtagataggactacagacacatgccaccatgcccagataagttaaaaaaatattttgtagagacagagtctca

SEQ ID NO: 338405 - DNA, 358 bp, Homo sapiens
caatgattttaatcatttgagatgtgtgtcacaagttgttgaacctaccagaatatcaaattttgtaaaaaataaacaagaataagaataaaaatatgaatttacaaattttcccaaatagccaaattctgtttatatatcactgtagggctgctttaaatgtgtttctagtattgtcacattatctcttttttttttgtaagagacagagtctcattctgttgccaggctggaatacagtggtgcaatcatagctcactaaaacctggaactccagcttcctgagtagataggactacagrcacatgccaccatgcccagataagttaaaaaaatattttgtagagacagagtctca

SEQ ID NO: 338406 - DNA, 598 bp, Homo sapiens
tattatcactgtcattttagtactatttttacaaacctatgctttgacatataaattagctccagtcatcacagcagtgctgtaagattgcagacagttgtatagattgttcaaggtcagctagctaatggatagaagaataattttctgaccaaatggtgatttgttatatttggatggaatgcatgtttcctagcaatttacctgctgggttgcacttcatctgccttatatcccttagctttcttccaccttctgcttatatattgaagaattgcaggcttatcattatatatttgcctactgattaaatgtattttaatcctttatggaattaccataagagatgctatggataggctagaacaaactttgaaagagaggtggtgtcttcgtttcctagagctgctgtgttagggttcttcwgggagagagaactgataggatatatatatatataatctattatatgtgtatgtgtgtatatatatatgatctattatatgtgtatgtatatatatatatatacacatatatatatatagagagagagagatgagatgagatgggatttttttaggggaattagctcccatga

SEQ ID NO: 338407 - DNA, 598 bp, Homo sapiens
tattatcactgtcattttagtactatttttacaaacctatgctttgacatataaattagctccagtcatcacagcagtgctgtaagattgcagacagttgtatagattgttcaaggtcagctagctaatggatagaagaataattttctgaccaaatggtgatttgttatatttggatggaatgcatgtttcctagcaatttacctgctgggttgcacttcatctgccttatatcccttagctttcttccaccttctgcttatatattgaagaattgcaggcttatcattatatatttgcctactgattaaatgtattttaatcctttatggaattaccataagagatgctatggataggctagaacaaactttgaaagagaggtggtgtcttcgtttcctagagctgctgtgttagggttcttcagggagagagaactgataggatatatatatatataatctattatatgtgtatgtgtgtatatatatatgatctattatatgtgtatgtatatatatatatatacacatatatatatatakagagagagagatgagatgagatgggatttttttaggggaattagctcccatga

SEQ ID NO: 338408 - DNA, 584 bp, Homo sapiens
tattttctaagtagtatagacttaattgtgagaacaaaataaaaacttggggaaatattagggaagagaaataagggtgtgaagagctgattattacaattccttctttcccttcttgtcttttattgctgatgggtaataaaatatgcaaagaatgtgctgagaaataaactaaacaaataagccagtataccacaaagatcatttgaaacttaaacaattaaaataagatatctgctaaaataataattggcagggctagcacagtttcttctttcatgtatttcttccctcatttgacaaatagacatacaactgtaggtcaaatcgtgtrgtatacttgaggcattcagaattaattgggcatcattcctgcctttgcgtcagtctaatgaggaagaaaatctttcaataatgatttcatgtccttcatgtcattacagatgggtagatagagtactatgacagcacaaaagatggaataaaaatatcttcctgcagaaggtccaaataagtccaatgcaagggtgatatttgagacgagccctaatgcatgactaaaacatttccagaaagctaagtgg

SEQ ID NO: 338409 - DNA, 486 bp, Homo sapiens
tgaggcaaaacctatggagcaaaaacacatggagcaaaacctatgtccttgcggaaacaccttataaatgttaaggctagtagctttagggttttattttagagtggattttggcatggcttagtgtgtaagaaagagcgctggactgggaattgagactcctgtattttagccccaattctgtcattttaaaatatttgaccacctggtagatttctttacctttctgggctgtgaaagatatcctcatctgaaaataagggtggccaaagaacctcacaatcttcaagctctaacatccagtgattctattcccttcttttgctaatttcttggaaagtagccagaagactttactaccagggatgatttggraagtcagcataagtgagaataatgagtacctattgcatactctattttattctaaacacagtctctgctaggctttgacctaccatgaagtggggaaacctttatggtcac

SEQ ID NO: 338410 - DNA, 627 bp, Homo sapiens
ttcatgctgctccacagcgtgccgtaatcataacccacttgtggtagactcagacactgttgttgtatgaatgcctcatttatctctttctgtgcatatttatgtttcagttagctattttcattgcatgtagttccttccatagtgtgggttcttgtattctcagccattttctttgtcattattttactcagagtcgaaccacagagtaaatatttttgagaacagtctgaattatatggagcctttaacacttagaggcactatcctaatacccaaattattatatagaacaagytgacacgtgcttttatagaattatctaatcctgaaacatatcttgagtatttactaaatgctccacactgttgatgttctgggattgaaacaacagataacacagtgtggcacagagagagcaggaacaagcatttacacagcaaagtggtgaccgttacagtggagttgtgtgcaacacactgtgggaggctagaggaaggcagccaggcttcacagaggatggtatagacttacccttgagctgaccttcaaaaatagtcaggaaggtttgcatgggaggttgggagtctattccaggcagagggggcagcagaggcaaagaaaaag

SEQ ID NO: 338411 - DNA, 627 bp, Homo sapiens
ttcatgctgctccacagcgtgccgtaatcataacccacttgtggtagactcagacactgttgttgtatgaatgcctcatttatctctttctgtgcatatttatgtttcagttagctattttcattgcatgtagttccttccatagtgtgggttcttgtattctcagccattttctttgtcattattttactcagagtcgaaccacagagtaaatatttttgagaacagtctgaattatatggagcctttaacacttagaggcactatcctaatacccaaattattatatagaacaagctgacacgtgyttttatagaattatctaatcctgaaacatatcttgagtatttactaaatgctccacactgttgatgttctgggattgaaacaacagataacacagtgtggcacagagagagcaggaacaagcatttacacagcaaagtggtgaccgttacagtggagttgtgtgcaacacactgtgggaggctagaggaaggcagccaggcttcacagaggatggtatagacttacccttgagctgaccttcaaaaatagtcaggaaggtttgcatgggaggttgggagtctattccaggcagagggggcagcagaggcaaagaaaaag

SEQ ID NO: 338412 - DNA, 416 bp, Homo sapiens
gatcatttttattacaggcttgatttgaaaaacgcagagttccactccctcaagatgaagcacccgtgccttgttctgcctgacagcctaggactgatgctacttgcagaattttagtgctcagccccttcagagattgccccagctacagagcggccataaccaaccacacaccctccagagggttgcctggataaaatgaccactccatatagaaggagctgccaaaytggcccgagtctggacaacaatgaagggccctgatagcttcagagctcccatagggttggtggaggctgctattgagattactttgcccatcaacttctccctgctgcttcctgcttccttccccttccttcagcagatgtggactccatggacactccttaataaacatcttgcaagctaaactg

SEQ ID NO: 338413 - DNA, 416 bp, Homo sapiens
gatcatttttattacaggcttgatttgaaaaacgcagagttccactccctcaagatgaagcacccgtgccttgttctgcctgacagcctaggactgatgctacttgcagaattttagtgctcagccccttcagagattgccccagctacagagcggccataaccaaccacacaccctccagagggttgcctggataaaatgaccactccatatagaaggagctgccaaactggcccgagtctggacaacaatgaagggccctgatagcttcagagctcccatagggttggtggaggctgctattgagattactttgcccatcaacttctccctgctgcttcctgcttccttccccttccttcarcagatgtggactccatggacactccttaataaacatcttgcaagctaaactg

SEQ ID NO: 338414 - DNA, 592 bp, Homo sapiens
ctatcatctctgcacctcctgctttccaagaattcactggctactagatagccttctgctattttctaatatcctcatgtgctctcaaaatatgtgatacataagcaaaacactgttaaccatcacgaaagtttagattaacagcttctttcttttttgtagttgcaatctttcctctctccttctaccattttttatttgttttaatgaaaagaggcttctaagcactgattttcactacctcttcaagagccacaaaaatcaaaagtactaagagtaatatttttaactttaggagcccaggcaatctttcaaatagatgacaagcttacggtcaataaagaggaattttaaccacatatctcatggatacaatgatgaaacttgtccctttttacagtcaggaagtagaatcaccagacytcaagtcaaagtccacatttaaatcccaaacactcagcttcctatgacgcatgcagacatccttgccctttgaacatactacatcccgtaatagctgttttgcagtgaatgcacatttcctggagaatcgaggttgcctcctggccttccaatgtcctgtgcttcactt

SEQ ID NO: 338415 - DNA, 523 bp, Homo sapiens
aattatcatcaagagactgcaaagcacatatcaatcataactgccaggcagccatatggatgccagaataaggctcgtagtcctattgtggctatttacataggcatttctgcacataacctctgtcaagggtacatgttggctgttctcagcaccatcggacagaacaaaccattaccacttgcctctccatgtgtgaggacctcccagcagaaatactgcttacctgtgccatgagatttgtttagtacccckgtgctgtctgggtaccttcctctaagcttcccaggaaattcctaaggtctggaaacacaggatagtgttcttgaccagtagtggtttcaaagagaattttcattccacttccagcctgtgcatttgggtagaacaagaccacaataaaatgaattccattacacaaatattacttacaaattctgatccttcctgaagtgacttggaatattgtatttctcttttgatttggaaagagttgatatttcttctcaccaacctgcactaa

SEQ ID NO: 338416 - DNA, 523 bp, Homo sapiens
aattatcatcaagagactgcaaagcacatatcaatcataactgccaggcagccatatggatgccagaataaggctcgtagtcctattgtggctatttacataggcatttctgcacataacctctgtcaagggtacatgttggctgttctcagcaccatcggacagaacaaaccattaccacttgcctctccatgtgtgaggacctcccagcagaaatactgcttacctgtgccatgagatttgtttagtacccctgtgctgtctgggtaccttcctctaagcttcccaggaaattcctaaggtctggaaacacaggatagtgttcttgaccagtagtggtttcraagagaattttcattccacttccagcctgtgcatttgggtagaacaagaccacaataaaatgaattccattacacaaatattacttacaaattctgatccttcctgaagtgacttggaatattgtatttctcttttgatttggaaagagttgatatttcttctcaccaacctgcactaa

SEQ ID NO: 338417 - DNA, 523 bp, Homo sapiens
aattatcatcaagagactgcaaagcacatatcaatcataactgccaggcagccatatggatgccagaataaggctcgtagtcctattgtggctatttacataggcatttctgcacataacctctgtcaagggtacatgttggctgttctcagcaccatcggacagaacaaaccattaccacttgcctctccatgtgtgaggacctcccagcagaaatactgcttacctgtgccatgagatttgtttagtacccctgtgctgtctgggtaccttcctctaagcttcccaggaaattcctaaggtctggaaacacaggatagtgttcttgaccagtagtggtttcaaagagaattttcattccacttccagcctstgcatttgggtagaacaagaccacaataaaatgaattccattacacaaatattacttacaaattctgatccttcctgaagtgacttggaatattgtatttctcttttgatttggaaagagttgatatttcttctcaccaacctgcactaa

SEQ ID NO: 338418 - DNA, 523 bp, Homo sapiens
aattatcatcaagagactgcaaagcacatatcaatcataactgccaggcagccatatggatgccagaataaggctcgtagtcctattgtggctatttacataggcatttctgcacataacctctgtcaagggtacatgttggctgttctcagcaccatcggacagaacaaaccattaccacttgcctctccatgtgtgaggacctcccagcagaaatactgcttacctgtgccatgagatttgtttagtacccctgtgctgtctgggtaccttcctctaagcttcccaggaaattcctaaggtctggaaacacaggatagtgttcttgaccagtagtggtttcaaagagaattttcattccacttccagcctgtgcatttgggtagaacaagaccacaataaaatgaattccattacacaaatattacttacaaattctgatccttcctgaagtgactkggaatattgtatttctcttttgatttggaaagagttgatatttcttctcaccaacctgcactaa

SEQ ID NO: 338419 - DNA, 648 bp, Homo sapiens
ttttattaaaatctcatttattggcaagagttgcttctttctgaagagttctagtctgcctctcaagaattaatctgatgttttccatttgttttatagtatgttttttacccttttcctcacacaggtctcatacctttatgaaacttttcccttatgactctacttcagtgtcgtcttcccagagaacccaaccagtgacatcctgaaagcatatgctgtgagctttgtgagagctgggacttaacggcggttttgttcagggctctgtttccagtgtcgtgctccgcagacgacataaagcaggcactggataggaatgttgaatgttaaatgaatgaacagcatccatgcttatggtcaacaaacctagtggcctctgagtgtcatgatgaagagcacttgttctggaatctgaccatatgagttcagkttggctcagttgcttcccagtttgtaacattggatgagttcattaacttttctactcttttattttttcatgtgtaaaatcagaaccatagttgtatccacaagatagtttttcttaaatttgtattgttttatcttgtttttgaagattaagtgaattgtgaagcacttaggataacactgagcagatagatgttctcaattaaagtcaatgat

SEQ ID NO: 338420 - DNA, 577 bp, Homo sapiens
aactgataaatctacaacactgaaaatgaatgaactattgctacatggaaagacagggagtgtccagtggtgtgctgcagcctgcttctgccagcttacaaaaggcaattgtggccttccctttcagactgcacattcagtaacttcttgttgtttccttgatatctgccatggttgggaatatttgcatcacagaaatcagtaaatgctgcaaaccaaggctttcccccttctttagagctgatttactagcacactactaatgtatttcacaagcatagttcctagggaaacaagccaaacacaaaaatacaagtactacgtgattccaattacagaaatttcaaaacagcaaaactagacattatttagaatttagaacaggagaatagtggatatccgtcagcatgaaagatagtgatgtaaaggggatgtgatgagggcttgtggagttttgttgataccctgtctcttgatcwtgatgctgaatgaccagtgtgttcattttgtaaaaactcatcaagctgtacacttaagacttgtacattttatgtatgtatatgttaattaaaagttt

SEQ ID NO: 338421 - DNA, 577 bp, Homo sapiens
aactgataaatctacaacactgaaaatgaatgaactattgctacatggaaagacagggagtgtccagtggtgtgctgcagcctgcttctgccagcttacaaaaggcaattgtggccttccctttcagactgcacattcagtaacttcttgttgtttccttgatatctgccatggttgggaatatttgcatcacagaaatcagtaaatgctgcaaaccaaggctttcccccttctttagagctgatttactagcacactactaatgtatttcacaagcatagttcctagggaaacaagccaaacacaaaaatacaagtactacgtgattccaattacagaaatttcaaaacagcaaaactagacattatttagaatttagaacaggagaatagtggatatccgtcagcatgaaagatagtgatgtaaaggggatgtgatgagggcttgtggagttttgttgataccctgtctcttgatcatgatgctgaatgaccagtgtgttcattttgtaaaaactcatcaagctgtacrcttaagacttgtacattttatgtatgtatatgttaattaaaagttt

SEQ ID NO: 338422 - DNA, 292 bp, Homo sapiens
tttcttaaatatacatttaaacatgtggtctctgytctcaattatctttcttagaaaatgaataaagtccaaatatccaacattagtgagaatattaaataaattacagtactttcctactgtgaaatattatacggtcattaacatgaatgaggcacatacagtaatatggaaagatgtccatcacatgtagttgagtgaaaggagccagttacaaaacaatatgatccagcaaataaatattagaaactcatgtatgcagaagcttatgggaaaatatctggaaagatat

SEQ ID NO: 338423 - DNA, 563 bp, Homo sapiens
cctgtaatcaggccacctcgcctggcctcaaaaaaagtttaaaaattttaattgtagatattatacagaatacagtctttcaaagagtaactctggctctaatacacaaggtgatggctactgtctttccttaacagtttcacaactatcttcactttatcaaatgtcagaaacatcttttaagttctgatctatcataaaagacctctaaaacaaaatgaaatgaaaacatacctgccataagaaataagagasagaagggagttctgacattgcaacatggatgaaccttgaagacattatgctacaggaaatgagactgtcacaaaaggacaaatgctatcacgattccacctgcatgaggtatctaaagttgtcgaattcatagagacagaaagtagaatggtggttgccaagggctggtggtggggatggggagggagagtttaataggtacagagtttcaatctgggaagataaagttctggagatggaccttggtgatggctatgtaacaatgtaaatgtacttaataccttgaaatgtaaacctaaaagtaagag

SEQ ID NO: 338424 - DNA, 563 bp, Homo sapiens
cctgtaatcaggccacctcgcctggcctcaaaaaaagtttaaaaattttaattgtagatattatacagaatacagtctttcaaagagtaactctggctctaatacacaaggtgatggctactgtctttccttaacagtttcacaactatcttcactttatcaaatgtcagaaacatcttttaagttctgatctatcataaaagacctctaaaacaaaatgaaatgaaaacatacctgccataagaaataagagagagaagggagttctgacattgcaacatggatgaaccttgaagacattatgctacaggaaatgagactgtcacaaaaggacaaatgctatcacgattccacctgcatgaggtatctaaagttgtcgaattcatagagacagaaagtagaatggtggttgccaagggctggtggtgggratggggagggagagtttaataggtacagagtttcaatctgggaagataaagttctggagatggaccttggtgatggctatgtaacaatgtaaatgtacttaataccttgaaatgtaaacctaaaagtaagag

SEQ ID NO: 338425 - DNA, 496 bp, Homo sapiens
aacccataattgtaatgatttccattgttctagctcctccctggatcaggcactgagcatgaccatgttttttctttatggttgttacaggagcccaacgtgcctcacatacatggtctctgcggagagaacaacctcggttcagctcctgcctcccacacttaatctacgggaacttctgtttaccatctttagggtagtggtaatactaattctttctgcaaggaccgttgcaacaattcaataagaccacggatgtgtgagggcttcttcaaggaagccagagggagggccagtgtggccaccgaggctcctgtctgtgggtggacaccagcacaggggaagcagacgtgttcctgccattgtcagatacaaggctgcagttagggggtcctgcctagtccactggcttgctctgagcagctgttcttaytgaagcacgtgcccaggagacggctttatttccctccctctctctgttgttaagcagttcaaa

SEQ ID NO: 338426 - DNA, 522 bp, Homo sapiens
ggtgctgggggagcgaggtgaagggcccttggtcctcgttggtccaacccagggcctctgagccctactcacagctagaaatgctgctgcagctgctgcagaccaagctgctccctgagggccacgaagcccagccccaccttcgcacatgggaaaggaccccacacagactctcagctgtcctcatactgaccctggaatgtagagatacctcttcttcctaatttacaaataggaaaagtaaggttcagagagaataagtgatttgtccaaggtcccacagaacaattgactgtagtccattgtggagccagggttcacaaaagataagtgcctgctgggacgcagggtcaccctctgtacattgactccgaggtggtagcaagccctggtttctctcaccagctgccctttcatgtttctcttcctccattcccaaatcagctggaagtacaggaggcagtgggagtcaatggcgccaggcgyaccacagcaacctccttcccgagggttttttatctg

SEQ ID NO: 338427 - DNA, 458 bp, Homo sapiens
attcctcttcggccacctctgtttctctgttcctcttcacagcaaaaactgttcaaaagagttgttgattactttcatttccactttctcacccccattctcycctcaattaactctccttcatccccatgatgccattatgtggcttttattagagtcaccaaccttattctccaaaacaaaagcaacaaggactttgacttctcagcagcactcagctctggttcttgaaacacccccgttacttgctattcctcctacctcataacaatctccttcccagcctctactgctgccttctctgagttcttcccagggtcctaggctcagatgtagtgtagctcaaccctgctacacaaagaatctcctgaaagcctgtaaaaatgtccatgcatgttctgtgagtgatctaccaagaaaataaaaaattttaaaaatcaaatgcccatgcctgggcc

SEQ ID NO: 338428 - DNA, 556 bp, Homo sapiens
tgctcgccttggcctcccaaagtgttggggttacaggtgtgagccaccgctcccggcctttttttttttttttttttgagacagagtctcactgtagcccaggttggagtgtagtggtgtgatcttggctcactgcaacctctgtctccygggttcaagcaattctgccgcctcagcctcccaagtagctgggatttcaggcatgcgccaccacacctggctcattttttgtatttttagtagagatgaggtttcaccatgttggccaggctggtctcaaactcctggcctcaggccatccacctacctcagcctcccaaagtgctgggattacaggtgtgaaccaccgtgcccgccaaaaaactttttttttttcatgtggaagaattagttggcagcatgagcccagattgcatcatcccattaggggaagcagcccccaaacttgtctccttcttcctggtctttctcacacactgctgtaacctccctcacatttcttattagaaggttcttctcaaaactgcctgcccatttgcctcccccaacccccaac

SEQ ID NO: 338429 - DNA, 635 bp, Homo sapiens
ttaaaactaggacagataattggcaacttcccagaaaaaaattcttgaatcagtgtaaagaattggtttctagattggaggccagtggattccctaatacaggttacattcaggtgtttgctaagtaactggttgataggtctttgtaagtagctagttgtaagtttgggataggggtggggatagattatgtgatctttaaggtctcttgctgtgctttctcaagtaactctagagttgagaactctgtgtgctttcctgtttttcagatatatatatatatatttaaacattttaaattgtcaaaaaatacatacaccataaaatttacyatcttaactatgttaagtatacagttcagtattaactgtatatgcacccaatctctagtactttttcatcttgcaaaactgaaactctatacttactcagtaacaacttttccttctacctccagacctaggcaacaaccattctactttctgtttctgtgagtgtgactactctagataactcacataagtggaattacacagtattgcctttttgtgtgtggctcatttcatttagcgtaatgtcctcaaggttcatccattttgtagcaagtgtcagaagttccttcctttttagagctg

SEQ ID NO: 338430 - DNA, 635 bp, Homo sapiens
ttaaaactaggacagataattggcaacttcccagaaaaaaattcttgaatcagtgtaaagaattggtttctagattggaggccagtggattccctaatacaggttacattcaggtgtttgctaagtaactggttgataggtctttgtaagtagctagttgtaagtttgggataggggtggggatagattatgtgatctttaaggtctcttgctgtgctttctcaagtaactctagagttgagaactctgtgtgctttcctgtttttcagatatatatatatatatttaaacattttaaattgtcaaaaaatacatacaccataaaatttaccatcttaactatgttaagtrtacagttcagtattaactgtatatgcacccaatctctagtactttttcatcttgcaaaactgaaactctatacttactcagtaacaacttttccttctacctccagacctaggcaacaaccattctactttctgtttctgtgagtgtgactactctagataactcacataagtggaattacacagtattgcctttttgtgtgtggctcatttcatttagcgtaatgtcctcaaggttcatccattttgtagcaagtgtcagaagttccttcctttttagagctg

SEQ ID NO: 338431 - DNA, 572 bp, Homo sapiens
tatttctcagtagtggtcatattggctttgccggcaacctcaggatgggattagagaaagaaaggagcatgtcctatcttagacacctgggtgggtggctgcctgcaaggagaaggaggcttagggacacatttcacaagaaaccagcacccacattggtcagatgaagcttcctcaattttcagccaccacttacacctttcygtaccggctgcaagaggaagaagaaaactaaacttataatgttgtttggcaaggagagattcaaacttaccatagtcaaaagaatctatgttaagttagtttgcaaatacaccatgaagaattcaggtacattaagtttctctagcttcctcttatctttctgggatttgccctgcataaacacagtcctctgcccaaacaatcccaccaaaacaggtcctcagaaaacaacttcatgttcactcctgcgcagagtggctggcttcccagaaagccttaacataacagagaaccaggttatgcccggacagctcagccaaaccacaggaccaccacccaagttttgggtattcagctgcctataaatt

SEQ ID NO: 338432 - DNA, 520 bp, Homo sapiens
tgtttatagtattcttcttttctccttttaatatctgtgtgatcagtagtgataacccttcttttatttctgacattggtaatttgtgtctcctctttttttcttggktagtttgggtaaaggtttatcaattttattgttctttccaaagaaccagtctttggttttgttgattccctctattgtttttctgtgctcaacttcattgatttctgttgtaatttttatttcttctgttcctccattgtctttcttgctctagtttcttaggtggaagcttattggttttacatctttctgtttttctaacacatgcactaaatttccctttaatcactatttttgctgcacctcacaaattttgataagttgtatttccattttcatttagttcaagatattataaacttcccataaaagataagttgttgagcctgcataacttaaaaactgacatatttgctgactacccgtgcttagagaaaaatgcagagagcaatgtgaggccgaagttgtggaa

SEQ ID NO: 338433 - DNA, 544 bp, Homo sapiens
aagttttgttctcttatatagtagattttcccagtagtattatcttatctacttcttgctctaccttagagattctctctaaggcaactttcttcttctctagtcaagcttttaacatctattatgagagtctttgcagatgtccctacgtaggattggagagaggccctaatccatccctgtagtgactctttctccttctrggaagcagatgggattaacagaccattactaattattgttcttaaacaaggcactgcaagatttataaacctcttcccaaaagccaggctgcacatctgacacaaagaggaaaacgtcgcctttttttttttgtttaacaacttcaccatgaggagtccctctttgctgagaaattgtgctttgtattttttcctgtttctaagaggacaggcatacacttgtccttcggtgaaccaaatgaagtagaggataagatgtgatatctctgtaagcccacaggatctgctttgaacaaagtaatatatttgaagtgaaaagcaatccttcttgaaatagtcac

SEQ ID NO: 338434 - DNA, 544 bp, Homo sapiens
aagttttgttctcttatatagtagattttcccagtagtattatcttatctacttcttgctctaccttagagattctctctaaggcaactttcttcttctctagtcaagcttttaacatctattatgagagtctttgcagatgtccctacgtaggattggagagaggccctaatccatccctgtagtgactctttctccttctgggaagcagatgggattaacagaccattactaattattgttcttaaacaaggcactgcaagatttataaacctcttcccaaaagccaggctgcacatctracacaaagaggaaaacgtcgcctttttttttttgtttaacaacttcaccatgaggagtccctctttgctgagaaattgtgctttgtattttttcctgtttctaagaggacaggcatacacttgtccttcggtgaaccaaatgaagtagaggataagatgtgatatctctgtaagcccacaggatctgctttgaacaaagtaatatatttgaagtgaaaagcaatccttcttgaaatagtcac

SEQ ID NO: 338435 - DNA, 344 bp, Homo sapiens
atttttttttaattaaccatgtgtggtggtgtgcacctgtggtcccagccagtactcagaaggccgaggcaagaggaccacctgagcccaggatgtcgagactacagtgagccgtgatcgcagccactgcactccaggctgagtgacagagaaagaccctatcccaaaagaaaaaaaaattacttttaaaattttttaaattttttttttagaaaaagaaaatctcagtaaaggggagcatgtaagaaccggytgaaaccttgaatacattatgatatgaaaccaagtatatcaaaagatggtgcttgaaaacaacaaattttaccacctgactcagacttctt

SEQ ID NO: 338436 - DNA, 611 bp, Homo sapiens
atgaatttgtgttgagaaggaggaggcagagaccagggagagactgaaataacaaggacagagtagatggtagaatgaaattcctgagcaagtgagagacctggcccccagcacagacgacacaatgagctttggatggaaggtgggacacctcatcctctgagagagggaaggaggcaagggtagtgttcyccaatgaccgagaagcctcttctcctaataattaaatcaactctcgtaagtccacttcctccgtggagcctttgcagatacatccaagtgctgaagcttccttttgattcttagaatggttgaggctttgctgggctctgcctccagtttagggcccccctcataagacacattctgctcacaccggcagacaccctggtgtgaatccacaatctgctagcccctaagaaagggctctaaaaagtaagcagagacaacaggatcacaaacatacattatatattcagaagtatgtcatagacattatgtaagaaggggcaatagtcttgtgtttgtattggtggcataagaatttcttttagctgagttttactatatgagagaaaacaagggctgctaatttgacaagcggcaaatag

SEQ ID NO: 338437 - DNA, 611 bp, Homo sapiens
atgaatttgtgttgagaaggaggaggcagagaccagggagagactgaaataacaaggacagagtagatggtagaatgaaattcctgagcaagtgagagacctggcccccagcacagacgacacaatgagctttggatggaaggtgggacacctcatcctctgagagagggaaggaggcaagggtagtgttccccaatgaccgagaagcctcttctcctaataattaaatcaactctcgtaagtccacttcctccrtggagcctttgcagatacatccaagtgctgaagcttccttttgattcttagaatggttgaggctttgctgggctctgcctccagtttagggcccccctcataagacacattctgctcacaccggcagacaccctggtgtgaatccacaatctgctagcccctaagaaagggctctaaaaagtaagcagagacaacaggatcacaaacatacattatatattcagaagtatgtcatagacattatgtaagaaggggcaatagtcttgtgtttgtattggtggcataagaatttcttttagctgagttttactatatgagagaaaacaagggctgctaatttgacaagcggcaaatag

SEQ ID NO: 338438 - DNA, 611 bp, Homo sapiens
atgaatttgtgttgagaaggaggaggcagagaccagggagagactgaaataacaaggacagagtagatggtagaatgaaattcctgagcaagtgagagacctggcccccagcacagacgacacaatgagctttggatggaaggtgggacacctcatcctctgagagagggaaggaggcaagggtagtgttccccaatgaccgagaagcctcttctcctaataattaaatcaactctcgtaagtccacttcctccgtggagcctttgcagatacatccaagtgctgaagcttccttttgattcttagaatggtygaggctttgctgggctctgcctccagtttagggcccccctcataagacacattctgctcacaccggcagacaccctggtgtgaatccacaatctgctagcccctaagaaagggctctaaaaagtaagcagagacaacaggatcacaaacatacattatatattcagaagtatgtcatagacattatgtaagaaggggcaatagtcttgtgtttgtattggtggcataagaatttcttttagctgagttttactatatgagagaaaacaagggctgctaatttgacaagcggcaaatag

SEQ ID NO: 338439 - DNA, 575 bp, Homo sapiens
  misc_feature (1)...(575): n = A,T,C or G
taaccttggaaaaactaaatactttgcattatacttagcttttcaataactggaagttcctggccaacagagtgacatatttaaaacaatctatatgtcagaggaatttgttcacagtggttaatgcatcctctgcctttaggaacacttatgcaatggtaaaaagtgataaatgattttcgtcattggagtaagtgttatggctaaacataatctctcaaaataatcatgtaataagcctggtttcaaaaagatggatgcatgactgcaggggccaatctaagaccttcaacaaaagcattcctcaagcagaaggcaatctgtattatttatcctgtgatccacagtctctctccatcaggtgatccaatttaaccttaccttncagtttatcatctgtggtgatatagtttggctgtgtccccaccanaatgtcaacttcagttgtatctcccagaattccgacrtgttgtgggagggacctggggggtgtgggggcataattgaatcatggggaccagtctttctcatgctattctcatgatagtgagtaagtctcacgagatctgatgggt

SEQ ID NO: 338440 - DNA, 575 bp, Homo sapiens
  misc_feature (1)...(575): n = A,T,C or G
taaccttggaaaaactaaatactttgcattatacttagcttttcaataactggaagttcctggccaacagagtgacatatttaaaacaatctatatgtcagaggaatttgttcacagtggttaatgcatcctctgcctttaggaacacttatgcaatggtaaaaagtgataaatgattttcgtcattggagtaagtgttatggctaaacataatctctcaaaataatcatgtaataagcctggtttcaaaaagatggatgcatgactgcaggggccaatctaagaccttcaacaaaagcattcctcaagcagaaggcaatctgtattatttatcctgtgatccacagtctctctccatcaggtgatccaatttaaccttaccttncagtttatcatctgtggtgatatagtttggctgtgtccccaccanaatgtcaacttcagttgtatctcccagaattccgacgtgttgtgggagggacctggggggtgtgggggcataattgaatcatggggamcagtctttctcatgctattctcatgatagtgagtaagtctcacgagatctgatgggt

SEQ ID NO: 338441 - DNA, 575 bp, Homo sapiens
  misc_feature (1)...(575): n = A,T,C or G
taaccttggaaaaactaaatactttgcattatacttagcttttcaataactggaagttcctggccaacagagtgacatatttaaaacaatctatatgtcagaggaatttgttcacagtggttaatgcatcctctgcctttaggaacacttatgcaatggtaaaaagtgataaatgattttcgtcattggagtaagtgttatggctaaacataatctctcaaaataatcatgtaataagcctggtttcaaaaagatggatgcatgactgcaggggccaatctaagaccttcaacaaaagcattcctcaagcagaaggcaatctgtattatttatcctgtgatccacagtctctctccatcaggtgatccaatttaaccttaccttncagtttatcatctgtggtgatatagtttggctgtgtccccaccanaatgtcaacttcagttgtatctcccagaattccgacgtgttgtgggagggacctggggggtgtgggggcataattgaatcatggggaccagtctttctcatgctattctcatgatagtgartaagtctcacgagatctgatgggt

SEQ ID NO: 338442 - DNA, 606 bp, Homo sapiens
agaaaatatatggttaaaccattcaattaactcacaaatttatggaaggcatgccaccgtgtgtatccaaatctggtgaattcaaatgtatatgttcagccaggaaaaaaattcctttacaaagactgccaactaccctacccaccattacactctgtgagcatatgtgccacagagggagcaactggtctcattttcctcaatatgttaatatatttttgccctgagtattatctggtcttttaaataaaattatttttcatgcacatggcccctaaactcagccatgtactttattgcctakttaagggattattaagagtattttgactgtacacagtttttgcctttagactggtatctcctacatgagatgcaaatgtaagtgccagattttatgtgatgtgttatccaagatgaccccttgaagctgaaactgtggtaggcaagacaaaggcatgtacacagacaacttcaaaatttggcagaaaaccctagtataatatacattagttaaaaggaaatatgaaaccccaaaaaagaaataaatatttctgccaggtcaaggggaaaatatcatggaagtccttttaagaaggtaaaatt

SEQ ID NO: 338443 - DNA, 500 bp, Homo sapiens
ctgatttcttccacagcatccttcaaagccaaaagacagtaaagcagtacctacaagatcctcaaggggaaacatgtcagcaagaattttatagccagccaagctatctttctgaatagaggctatagaaaaacagtgttgaaaatataaatcagggaatatttttctcatgagccctttggaggaaatgtctaggcaacaaattctaaccaactgagagagaastggagaaaacatagcaaaatcactgatagtgtgcattcaataaatttaacctcagaactaagattaaaataaatgtagggattacaaggacatcagattgtaagtatgtacatactctgtgccaagcaatgaccttcatagctgtattccctagagaaacacgtgtgcaagaagacatctttaaaaaatttattgcagcattgtttataatagaaaaaaattccacaaaaattgaaacaacctaaatgttcatcaaagtttaaaagcatgcaaaa

SEQ ID NO: 338444 - DNA, 500 bp, Homo sapiens
ctgatttcttccacagcatccttcaaagccaaaagacagtaaagcagtacctacaagatcctcaaggggaaacatgtcagcaagaattttatagccagccaagctatctttctgaatagaggctatagaaaaacagtgttgaaaatataaatcagggaatatttttctcatgagccctttggaggaaatgtctaggcaacaaattctaaccaactgagagagaactggagaaaacatagcaaaatcactgatagtgtgcattcaataaatttaacctcagaactaagattaaaataaatgtagggattacaaggacatcagattgtaagtatgtacatactctgtgccaagcaatgaccytcatagctgtattccctagagaaacacgtgtgcaagaagacatctttaaaaaatttattgcagcattgtttataatagaaaaaaattccacaaaaattgaaacaacctaaatgttcatcaaagtttaaaagcatgcaaaa

SEQ ID NO: 338445 - DNA, 583 bp, Homo sapiens
actctaaccatatgcagggacaatattatgggtatgattctctcacctactccacccatttcatgggaattctgaagaccgctattgtgcctgcaaaatagaagatctggaaagtttccttttttctatttttattttaggttcagggagtacatgtgcaggttttttacatggctaaattgcaggatatgcagaagattgaaactggactccttcctttcaccatagacaaaaattaacttaagatggatttaaaacttaaatgtaaggcctaaaacaatgaaactatagaagaaaacctaggaaataccaatgtggacatcagccttggcaaagaatttatgattaattccctgatacggtttggatttctgtccctgcccaaatctcatgtcaaattgtaatctccaatgttggaggggtggcctggtaggaggtgattgggtcatgggggccatttctcatgagtggtttagtaccatccccttygtgctgttctcgtgataacaagtgagttctcatgagatctcgttaagagtgtgtagcacctccccttttccttgctcctgctcccaccatgtga

SEQ ID NO: 338446 - DNA, 583 bp, Homo sapiens
actctaaccatatgcagggacaatattatgggtatgattctctcacctactccacccatttcatgggaattctgaagaccgctattgtgcctgcaaaatagaagatctggaaagtttccttttttctatttttattttaggttcagggagtacatgtgcaggttttttacatggctaaattgcaggatatgcagaagattgaaactggactccttcctttcaccatagacaaaaattaacttaagatggatttaaaacttaaatgtaaggcctaaaacaatgaaactatagaagaaaacctaggaaataccaatgtggacatcagccttggcaaagaatttatgattaattccctgatacggtttggatttctgtccctgcccaaatctcatgtcaaattgtaatctccaatgttggaggggtggcctggtaggaggtgattgggtcatgggggccatttctcatgagtggtttagtaccatcccctttgtgctgttctcgtgataacaagtgagttctcawgagatctcgttaagagtgtgtagcacctccccttttccttgctcctgctcccaccatgtga

SEQ ID NO: 338447 - DNA, 629 bp, Homo sapiens
tttttttttttttgagaaatgtctattcaggttttttgcccttgatttttcactattgagttgtttgagttccttacgtattttggatattaccgcccccccttatgagatgtagggtttgcaaatatattcccccattctgtaggttgtctcttcactctgttgtttccttttccrtgcagaaacttttcagttggatgaaatcccatttgtctgtttttgctatctatccctgtgtttttggagtcatatacaaaaacttattgcctagaacaatttcaggagggttttttccccatgttttcttctagcagttttgcagttttatatcttacatttaaacctttaataggccaggcatggtggctcatgtctgtaatctcagcaatttgggaggtcaaggtgtgtggatcacctgtgggcaggagttcaagaccagcctggccaacatggtgaaactctgtctctactaaaaatacaataattagctaagcatggtggcacatacctgtagtcccagctacttgggaggctgaggcaggagaattgctcgaacctgggaggaggaggctgaagcgagccaagatcacatcacagcactccagcctgggcaacagagcaagattctg

SEQ ID NO: 338448 - DNA, 629 bp, Homo sapiens
tttttttttttttgagaaatgtctattcaggttttttgcccttgatttttcactattgagttgtttgagttccttacgtattttggatattaccgcccccccttatgagatgtagggtttgcaaatatattcccccattctgtaggttgtctcttcactctgttgtttccttttccatgcagaaacttttcagttggatgaaatcccatttgtctgtttttgctatctatccctgtgtttttggagtcrtatacaaaaacttattgcctagaacaatttcaggagggttttttccccatgttttcttctagcagttttgcagttttatatcttacatttaaacctttaataggccaggcatggtggctcatgtctgtaatctcagcaatttgggaggtcaaggtgtgtggatcacctgtgggcaggagttcaagaccagcctggccaacatggtgaaactctgtctctactaaaaatacaataattagctaagcatggtggcacatacctgtagtcccagctacttgggaggctgaggcaggagaattgctcgaacctgggaggaggaggctgaagcgagccaagatcacatcacagcactccagcctgggcaacagagcaagattctg

SEQ ID NO: 338449 - DNA, 629 bp, Homo sapiens
tttttttttttttgagaaatgtctattcaggttttttgcccttgatttttcactattgagttgtttgagttccttacgtattttggatattaccgcccccccttatgagatgtagggtttgcaaatatattcccccattctgtaggttgtctcttcactctgttgtttccttttccatgcagaaacttttcagttggatgaaatcccatttgtctgtttttgctatctatccctgtgtttttggagtcatatacaaaaacttattgcctagaacaatttcaggagggttttttccccatgttttcttctagcagttttgcagttttatatcttacatttaaacctttaataggccaggcatggtggctcatgtctgtaatctcagcaatttgggaggtcaaggtgtgtggatcacctgtgggcaggagttcaagaccagcctggccaacatggtgaaactctgtctctactaaaaatacaataattagctaagcatggtggcacatacctgtagtcccagctacttgggaggctgaggcaggagaattgctcgaacctgggaggaggaggctgaagygagccaagatcacatcacagcactccagcctgggcaacagagcaagattctg

SEQ ID NO: 338450 - DNA, 592 bp, Homo sapiens
ggcattgagtttctgtggcttttccatgtgtacagtgcaagttgtcaggggatctaccattatggggtctggaggtctggcccacttctcatagctccactaggcagtgccccagtggggactctgtgtggaggcttgaccctacatttcccttccacactatcctagcaaaggttctccatgagggttccactgctgcagcagacgtttgcctggacatccaggcatttccctacatcctctgaaatctaggtggaggttcccaaaccttaattctttccttctgcgtacccacaggaccaaaccaactgaaagctgctaaggcttggggcttgcaccctctgaagcaacagtctgagctgtaccttggccccttatagccactgctgaactgggtggtactcagggtaccaagtcctgaggctgcacacagcagaagggcccaggccctggccaaggaaatcatttttccctcctatgcctttagacgtatgatgggatgggctgccatgaaggtctctgacatgccctggagattatatactcattgtcctagtrattaacatttttttttttttgagatggagtttcg

SEQ ID NO: 338451 - DNA, 573 bp, Homo sapiens
actcagtatatcctcaaggtgaaaacatttaagtccctgcagctcttcctcatgttgaggagaaagttaagcccttgaaatgtgagtgtaaaataaagagagggatagagtaacatgagtttctctaaaagacagaccagatgattttaaaagagatcacacaatcatagaaagattgcttgttatttacgaaaattaactattgttcatactgtttctcagccagggttgtacttgagaaagctttgctttctttttcttctttaagctctaacatagaagtagaaatctcctcaaggcgacagagataaytcaatctatcatcatgggattcaaagtaaaggcacgactgctaggttaaaattcatggtggtctcatgtacaactactcttagaaatgagatcatctattcaactaagagatccggatttgcattgatcaaccatttctcagcactagctgtcatcatcgtgatttttatttatttattttgtgattctgttttaaatggcttatctaatattgaaggggatttgactacagtgtgaagaaaattctaggagaacaaagca

SEQ ID NO: 338452 - DNA, 568 bp, Homo sapiens
tatatccatccaaactaaaaaagaaaaattaaaacaaagaataagagtgttacctactcataaactatcactgagaggtttactttagcaagagaagaattgaaatctgaataaagagtggaacatgaaaagcaatggtaaacaaacaactcaataaattagcttggtaaacctgttgactataaaaacaaaacatgctgggcatggtggctcaygcctcttatcccagcactttgggagcctgaggcaggtggatcacctgaggtcaggagtttgagaccagcagggccaacatggtgaaaccctgtctctactaaaaatataaaaaattagctggacatggtggcagatacctgtaatctcagctgcttggaaggctgagacaggagaattgcttgaacctgggggtggaggttgtagtgagccaagatcgtgccactgcactccagcctgggcaacagagcaagactctgtctcaaaaaacaaaaacgaaaacaaaaaaaccctaattttttggttttcatgacaatattgaactaaattgctcaacaaaaacatggatgacata

SEQ ID NO: 338453 - DNA, 587 bp, Homo sapiens
ccacatacagcttccccatgacaaaagcctccattcagggtaaacctgaagtcttcccctttttccactataaaggtttgcccttctctgcttgcctgagtctctgcccaaacacatgtgatggtagttgactcttttgctatagcaagctcagaataaatagcctttacttttctcatttggtttttctttatttccatactaattatatattctcatattgcttcttcagtggtgtcacacagagagagccttcttcatcccaaggttgtgtaatttttatctgtacttattataccttattgaagaggccatatggtatgttgrttcaaagtgctggttgggaaattcatctatctggattttgatatttgcgctgccactaacaaaaaatttccaacaagttacctaaactctctggcctcaatttgtacgtctgtataaggggtaaaatattagctccatggtgtttctgcaaggactacatgaagatgcttggaatagtgtctaacactacatatgttactgtcacccaatatatgttactgtcacttcctatattttttcaagcacttctatgattacat

SEQ ID NO: 338454 - DNA, 581 bp, Homo sapiens
ttaactgtaatatctaattatttaagaaatacattttgtaaggctatagctgccatacatagtgattcctctgatggatctagaaaaagtaaattgaaaactctttggaaagtatttaccattctagatgccattaagaacatttatgattcatgtgaggaggtcaaaacatcaacattaacaggactttagaggaagttgattccaaccttcattgatgatgtagaggggttcaagactttagtggagaagtaacttcagatatgatggaaatagcaagagaactagaattagaggtggagcctgaagatatgactgaattgctgcaatcaacgaatgagcagtggtttcttatgaatgagccaagaaagtggcttcttgagataaaattttctggtaaagatgctgcgaactttgttgaaaaggcaacaaaggacttaaaatattccataaacttagttgataaagcgggagctgggwttgagagtattaactgcaattgtgaaagaagttctactgtgggtaaaatgctatcaaacatcatcacatgctacagataaatctttcatgaaaggaatagt

SEQ ID NO: 338455 - DNA, 394 bp, Homo sapiens
cattccttggtctggctctgttaggattatcatctggtttcccctgctggtgttggaagagctgtgttggtgcaggccagtgctatcctgtgactagagggaagaagctctgcctgggcctgatttggccacaagctcctagtaagatgctgaaaaggaacacaaactctaggcccaggacrccctccccatgccatcccacacctgacttctgcgcaccttgtgagcagatcagatttggtgttgcttcttccacatcatcctcgcatcccctttcacagactcggatatatcccctcatgggaacctatggatctacagcatatctatggatatgccaccccatggcaactgtcctttccccttcatagcatacatcaccctgaattatagc

SEQ ID NO: 338456 - DNA, 358 bp, Homo sapiens
tcttttacgcctccctctcccataaatacagactacctgttatcttgtacattgatgttccttagcacatcgtgttgccattatctgtttaaagtctttctgcctactcagctgtgacatcttcagracagggatcaggtctaatttcactccttagcccttgctccaggcccagtgcaaggcacataacatgcgctcagtaaacatcactgaataggctgttctctgggtacctagaagtctctagggcttaaggttaggatacaagcacacggaaggagggtagggcaaagcatggaagaggggtggggtctgtgaggctgggttgggggtcatgtctgtctcccacaatgactgg

SEQ ID NO: 338457 - DNA, 358 bp, Homo sapiens
tcttttacgcctccctctcccataaatacagactacctgttatcttgtacattgatgttccttagcacatcgtgttgccattatctgtttaaagtctttctgcctactcagctgtgacatcttcagaacagggatcaggtctaatttcactccttagcccttgctccaggcccagtgcaaggcacataacatgcgctcagtaaacatcactgaataggctgytctctgggtacctagaagtctctagggcttaaggttaggatacaagcacacggaaggagggtagggcaaagcatggaagaggggtggggtctgtgaggctgggttgggggtcatgtctgtctcccacaatgactgg

SEQ ID NO: 338458 - DNA, 316 bp, Homo sapiens
cttcagaacagggatcaggtctaatttcactccttagcccttgctccaggcccagtgcaaggcacataacatgcgctcagtaaacatcactgaataggctgttctctgggtacctagaagtctctagggcttaaggttaggatacaagcacacggaaggagggtagggcaaagcatggaagaggggtggggtctgtgaggctgggttgggggtcatgtctgtctcccacaatractggcttcaggatgttcccagaatgggaaaagggtggaggaccatgttctgcactgtgatttaggaatccttaggtctctac

SEQ ID NO: 338459 - DNA, 571 bp, Homo sapiens
cgaggaggcctctgggctgtggagcgaaagtcagatccaccgcctactgcggggtaggggccgcagtggggaccgccagccctgtggtccctctcgcgctgactggcgtaaagttgtggccgaattcgcatctcttctggtgcttctcgcccgccagcgcagggcccaggtgtttgaggcgaaggggctctagctccccgcaagcctggagccaggcgtcgcgcttcctccgggcttaatccagacctttcaacacacacctcattcgggggaggagaaaagcacaggaccgcggagagcccagctttgaggccaggcctgaagggataacccacacagggaacgttttcctatcagagaataatggagcmcaaaataattcagaaagcgaatgggcaggaccacagcctgagagtcccgcgccgcggggccgctgcagagccggtctcccgagcaccgcggcaggaccatttcgttggaatgtagggcgaggccgaagcccgccccggacccaggccgcgaggtgcgcgccggccgccgaggggccgcctgtaaattacagcccgccggg

SEQ ID NO: 338460 - DNA, 562 bp, Homo sapiens
tcatctttaaatttttaacagaaatataccacacagataactgactgtgttctctctcacaaatatgtaatcacacacacacacacacacamaataagaattggaactatttttcaagataatgaatccgttttagacatcactgctgagagaatcaggagtgctggggatggagagatgctccagttcccaggaagagaaagatggtagtctccccgcttccccacatttccaaaggaaatgaggaaaaaccatctacacttttctttccaacttaaacctttccctcactcccccttattagctctgtactctctgacacatgaaaataaaaaacaggggccgggtgcggtggctcacacctgtaatcccagcactttgggagtccgaggtgggcggatcaccggagatcaggagttcgagaccagtctgcccaacatggcgaaaccctgtctctactaaaaatacaaaaactagttgggcatagtggtgggcacctgtaatcccagctactcgggaggctgaggtaggaaaatcacttgaacccaggaggcagaaggtg

SEQ ID NO: 338461 - DNA, 519 bp, Homo sapiens
ggaagcctggggcaggcggatcacctgaagtcaggagttcgagaccagcctcaccaacatggagaaaccctgtctctactaaaaatacaaaaattagccagacgtggtggcgcatgcctataatcccagctacttgggaggctgaggcaggagaatcccttgaacccaggaggcggagattgccatgagccaagatcatgccattgcactccagcctgggcaataggagcaaaactccgtctcaaaaaaataaaataaaataataaaataaaataaaataaattgggtggccagagaaagtttctctgaggaagtgacacttgggctgaggtttgaagaatgagagggagccatgtaaagagtgaggtaacagcattctagaaacagttcagtcacctgggtgtgcacagcagcatttgggggatrggagtgggagaggagctttcccaaactgcacactcctatctcttttacattttgaaagaccctacccttccaatgtgggaggaccattgctta

SEQ ID NO: 338462 - DNA, 570 bp, Homo sapiens
ttaatggcctctggaagtaatgtctgtactgaagtccccttcctaccctttctgactgtgttcctccctgggaaataattccagtgggcttgtgcttatctgcaagtctggggtaattatgaattattaattcatcattaagacttgattgtgaccgttgctctccagtggacccatttatctccttctttatgaggcagagggcggtctctgttagcccttggcttctgtaacaggcaaactgaggccarcccctcttgaaggcagtccttgaactctgccctaggtgggatggttgcctcattaccagtcaagtcatgttgcacctcagagtatttgtgcaatacagccacctcccacaaacttcagatttcaaagtgctttgtaggctcctggagagatagagtaggggattgggagtgagactccaacaggggaagaaacttggccaagctgtgtgtggagacaggaattaaggcgaggtgggaggacacccaggcacagtatctaagcaatctgggatcaggaatgggcattttgccttccttaccctaaggagatgctagtctc

SEQ ID NO: 338463 - DNA, 570 bp, Homo sapiens
ttaatggcctctggaagtaatgtctgtactgaagtccccttcctaccctttctgactgtgttcctccctgggaaataattccagtgggcttgtgcttatctgcaagtctggggtaattatgaattattaattcatcattaagacttgattgtgaccgttgctctccagtggacccatttatctccttctttatgaggcagagggcggtctctgttagcccttggcttctgtaacaggcaaactgaggccagcccctcttgaaggcagtccttgaactctgccctaggtgggatggttgcctcattaccagtcaagtcatgttgcacctcagagtatttgtgcratacagccacctcccacaaacttcagatttcaaagtgctttgtaggctcctggagagatagagtaggggattgggagtgagactccaacaggggaagaaacttggccaagctgtgtgtggagacaggaattaaggcgaggtgggaggacacccaggcacagtatctaagcaatctgggatcaggaatgggcattttgccttccttaccctaaggagatgctagtctc

SEQ ID NO: 338464 - DNA, 487 bp, Homo sapiens
gaggtcaatgagtagacgaggtcattgaggatcagaaaagaaagacaacactgagagtctggacagctaagccccagaattttgctagtcttaaatgctgggtgacatcaggccagccacacccctctctgagcctgtagagaatggagatgccagatgwggaggagggtacacatgggcaagaggaggcaggtcattgccttcagggtagcaattggaggcatcaagttcccacttccctagacctattctttgttgttattattgttgtttctttcatctgattttaattgttttatgtttttgaataggaaatacatgtacatggttcaaaactcaaaaggcaccaaaagttatacagtgacaagtaagtctccccggaacctcagaactcccaggccacccatgtcctcactccattataactgcagtaaccactgaattgtataacctccaaaggtattttctgcttctcctggcttgtacc

SEQ ID NO: 338465 - DNA, 487 bp, Homo sapiens
gaggtcaatgagtagacgaggtcattgaggatcagaaaagaaagacaacactgagagtctggacagctaagccccagaattttgctagtcttaaatgctgggtgacatcaggccagccacacccctctctgagcctgtagagaatggagatgccagatgaggaggarggtacacatgggcaagaggaggcaggtcattgccttcagggtagcaattggaggcatcaagttcccacttccctagacctattctttgttgttattattgttgtttctttcatctgattttaattgttttatgtttttgaataggaaatacatgtacatggttcaaaactcaaaaggcaccaaaagttatacagtgacaagtaagtctccccggaacctcagaactcccaggccacccatgtcctcactccattataactgcagtaaccactgaattgtataacctccaaaggtattttctgcttctcctggcttgtacc

SEQ ID NO: 338466 - DNA, 487 bp, Homo sapiens
gaggtcaatgagtagacgaggtcattgaggatcagaaaagaaagacaacactgagagtctggacagctaagccccagaattttgctagtcttaaatgctgggtgacatcaggccagccacacccctctctgagcctgtagagaatggagatgccagatgaggaggagggtacacatgggcaagaggaggcaggtcattgccttcagggtagcaattggaggcatcaagttcccacttccctagacctattctttgttgttattattgttgtttctttcatctgattttaattgttttatgtttttgaataggaaatacatgtacatggttcaaaactcaaaaggcaccaaaagttatacagtgacaagtaartctccccggaacctcagaactcccaggccacccatgtcctcactccattataactgcagtaaccactgaattgtataacctccaaaggtattttctgcttctcctggcttgtacc

SEQ ID NO: 338467 - DNA, 556 bp, Homo sapiens
ccttttttcccattaagttcacactccaaagtcaattacttaccaaaattaagctacagtcagtaaagcttgctacttgactgactaaagaataagtaccaaagcaatattaaaaggtctaacattaatttttcaaaacatcaaatccttttgacaaattcttaccaaagcaaattcgtgagatatccttccatctggaggcagttttgcaccaaatcctagagctggaaacattttatcactgtcataatcttgaacaatttctcccactgcttttagtgccataccataggcattcagttggtaaggattcatgtagtggagggaagtgggctgagcagggttgcctgatgacagaacacatatttcaaacataagcaattagggtaaatamatttaacaaaatttttcttggtgtctatttcagaatgaaatattcaaaattatgtttttctgcctatatacagtgtgtcaaatcatttctttttggatggatattaacacagaaatatttgttatattatattagacatatagaaagttctaagatatgcca

SEQ ID NO: 338468 - DNA, 456 bp, Homo sapiens
gagtgcagtggcacgatctctgcaacctcctcctcctggkttcaagcgattatcttgcctcagccttctgaatagctggaactacaggcacgtgccatcgcacccagctaatttttgtatttttagtagagacggggtttcaccatgttggccaggctggtctcaaacacctgacctcaggtgatctgcccacctcagcctcccaaagtgctggaattatagacgtgagccaccgcaccaggcaaggtccttttctttctgatttgagatattctctttagcatttctcataggagaggtcttgtgttgatgaaatccctaagattttgtttgtctgagaaattctttatgtcttattcatgtttgaaggatactttcaccaggtatattattccagggtaaaaagttttttttttccttcagcattttatatatgtcatgccactcttttgtgtc

SEQ ID NO: 338469 - DNA, 456 bp, Homo sapiens
gagtgcagtggcacgatctctgcaacctcctcctcctgggttcaagcgattatcttgcctcagccttctgaatagctggaactacaggcacgtgccatcgcacccagctaatttttgtatttttagtagagacggggtttcaccatgttggccaggctggtctcaaacacctgacctcaggtgatctgcccacctcagcctcccaaagtgctggaattatagacgtgagccaccgcaccaggcaaggtccttttctttctgatttgagatattctctttagcatttctcataggagaggtcttgtgttgatgaaatccctaagattttgtttgtctgagaaattctttatgtsttattcatgtttgaaggatactttcaccaggtatattattccagggtaaaaagttttttttttccttcagcattttatatatgtcatgccactcttttgtgtc

SEQ ID NO: 338470 - DNA, 631 bp, Homo sapiens
ttttgtagttgtgtcaattttgctttatgtattttggagctataatagtagatgcatgcagtattgaggttactatatcttcccaattaattgaatgttttgtcattacacaataactatttcttgcaacccttttcaatttaaaatctgtatgtatgctattaatgtaggtrtactgattttcaatagaattagttttattttctgagatatctttccattcttttcttttgaattttttgaatcaaattttgttatctattttaaatagttcatggctgaatttaatttttatataattacatacaatatttgcatttaatctggagcatttagttcatttacatttacatcagtaactattcctctaggtttatttctactacctacttagtgatcctcatctgccccattctttctttagtcttagttccttttgaactgattgcattttagaaacataatttcaaaaattttcttttctaaacttgaaactataaagtacttaaataattgtagtttctttgaagtttttaaacatatttactcattttttatgaaattctattttttcagcatatttaatttcttcctgaacagtaagagaccatgagaaggctttaacttaaat

SEQ ID NO: 338471 - DNA, 570 bp, Homo sapiens
cttctgagagaattgcagaaggagggtgctttaaggacccttggaaatatcaccatattatatgaatggtaaaaatcaagtttggacatttatgttgtattttcccaaaatcagactaccaagatggaaactaaggttttttgactctcagtagatggcacattgatgagtcacactccttccattgaagcgtctagcaatttcmtaaccagcctatagaagataccaagcacacatgtaacttttaatttaggtttcaaatcattgattgaaaacaacaggatatcctcagaaaataaatgaaagataaaaggcacctataattcatctttcaagactaatctgatgacctatctcaagatttgcaagccgatgtcacagacttttttttaagggagatgggttaggtccatataatgtttagggatttaaaagttgatgcttgatgatgcaaagtggtttctagtgattgtcattttgttttctcagggatcacccactttctttgaaatctggtgcagaattgtcatctaaagtgcatgacaaatttgccaatgtctaaattacagt

SEQ ID NO: 338472 - DNA, 597 bp, Homo sapiens
atgttgtattttcccaaaatcagactaccaagatggaaactaaggttttttgactctcagtagatggcacattgatgagtcacactccttccattgaagcgtctagcaatttcataaccagcctatagaagataccaagcacacatgtaacttttaatttaggtttcaaatcattgattgaaaacaacaggatatcctcagaaaataaatgaaagataaaaggcacctataattcatctttcaagactaatctgatgacctatctcaagatttgcaagccgatgtcacagacttttttttaagggagatgggttaggtccatataatgtttagggatttaaaagttgwtgcttgatgatgcaaagtggtttctagtgattgtcattttgttttctcagggatcacccactttctttgaaatctggtgcagaattgtcatctaaagtgcatgacaaatttgccaatgtctaaattacagtgtatgccttttgccatggttgaaagtgatagtaaaattttgtgaattttaagcagattctgatttaaatattgttttaaagatttgaaaggtgcattatttattgtttcttgtcagca

SEQ ID NO: 338473 - DNA, 597 bp, Homo sapiens
atgttgtattttcccaaaatcagactaccaagatggaaactaaggttttttgactctcagtagatggcacattgatgagtcacactccttccattgaagcgtctagcaatttcataaccagcctatagaagataccaagcacacatgtaacttttaatttaggtttcaaatcattgattgaaaacaacaggatatcctcagaaaataaatgaaagataaaaggcacctataattcatctttcaagactaatctgatgacctatctcaagatttgcaagccgatgtcacagacttttttttaagggagatgggttaggtccatataatgtttagggatttaaaagttgatgcttgatgatgcaaagtggtttctagtgattgtcattttgttttctcagggatcacccactttctttgaaatctggtgcagaattgtcatctaaagtgcatgacaaatttgccmatgtctaaattacagtgtatgccttttgccatggttgaaagtgatagtaaaattttgtgaattttaagcagattctgatttaaatattgttttaaagatttgaaaggtgcattatttattgtttcttgtcagca

SEQ ID NO: 338474 - DNA, 554 bp, Homo sapiens
aaaaaatctgccaggagtaacacatactcattctctctctctctctctcctgcacamacgtatacaacacaaaacccccagcgtgaagtagcaaaagttggcaagttgcactctagagtccactgctacacaagggtagggtcttttcaatggcgaatagtcccttctttgcctctggcatatcctctctctctgtatttcgggacaccacttcccatagttgtgccagagttgccaacaggcatcataattgttctagctccctcgccattcttgcttgtggagccggctaccagtttccatgctttctttggccaccagtctacatactgttcattatcttcctgacagactgaggtactccaaaaagggcaacaaggatcaactgcaaagggtaagtcacaaagaggagattaaagtaaatttgctattgaaattctttcaaacatggggggaaaatgcattttggaaaacatcctttgatcatgtcaggattttagatttaatagtcttacaaaccccaaaaatatatgtctacccagtacaaagttatg

SEQ ID NO: 338475 - DNA, 554 bp, Homo sapiens
aaaaaatctgccaggagtaacacatactcattctctctctctctctctcctgcacaaacgtatacaacacaaaacccccagcrtgaagtagcaaaagttggcaagttgcactctagagtccactgctacacaagggtagggtcttttcaatggcgaatagtcccttctttgcctctggcatatcctctctctctgtatttcgggacaccacttcccatagttgtgccagagttgccaacaggcatcataattgttctagctccctcgccattcttgcttgtggagccggctaccagtttccatgctttctttggccaccagtctacatactgttcattatcttcctgacagactgaggtactccaaaaagggcaacaaggatcaactgcaaagggtaagtcacaaagaggagattaaagtaaatttgctattgaaattctttcaaacatggggggaaaatgcattttggaaaacatcctttgatcatgtcaggattttagatttaatagtcttacaaaccccaaaaatatatgtctacccagtacaaagttatg

SEQ ID NO: 338476 - DNA, 523 bp, Homo sapiens
aacacatactcattctctctctctctctctcctgcacaaacgtatacaacacaaaacccccagcgtgaagtagcaaaagttggcaagttgcactctagagtccactgctacacaagggtagggtcttttcaatggcgaatagtcccttctttgcctctggcatatcctctctctctgtatttcgggacaccacttcccatagttgtgccagagttgccaacaggcatcataattgttctagctccctcgccattcttgcttgtggagccggctaccagtttccatgctttctttggccaccagtctacatactgttcattatcttcctgacagactgaggkactccaaaaagggcaacaaggatcaactgcaaagggtaagtcacaaagaggagattaaagtaaatttgctattgaaattctttcaaacatggggggaaaatgcattttggaaaacatcctttgatcatgtcaggattttagatttaatagtcttacaaaccccaaaaatatatgtctaccca

SEQ ID NO: 338477 - DNA, 593 bp, Homo sapiens
tttcctattcactttttaaaagttgatataattaattagcggataccaaaattttgttttggtttctttgaagaaaactattatcttggaaaataaaaatgcagccctaatctcaatatatacygaaattaattttggagattaaaatttacattttaacatatgcattccaatggcttgattcatttagtctctactatgatatattcagaattagtttgtgctctaaagtagataagataaggtagactctacaatatgatagactctttctacatatgtaatatcttattctatacctttaggaaacataacaccagggatatgtttagataataatggcttcaaaggggcattgtcaatgtgtgaagacttaaatataaggatatttttctatagatctaaacaaaaatcccactgtgaattcattttaaaacataaatcttcacatcccttgtaagttggattcctaggtattttattctcttagaagcaattgtgaatgggagttcactcatgatttggctctctgtttgtctgttattggtgtataagaatgcttgtgatttttgcacattgattttgaatcctga

SEQ ID NO: 338478 - DNA, 593 bp, Homo sapiens
tttcctattcactttttaaaagttgatataattaattagcggataccaaaattttgttttggtttctttgaagaaaactattatcttggaaaataaaaatgcagccctaatctcaatatatactraaattaattttggagattaaaatttacattttaacatatgcattccaatggcttgattcatttagtctctactatgatatattcagaattagtttgtgctctaaagtagataagataaggtagactctacaatatgatagactctttctacatatgtaatatcttattctatacctttaggaaacataacaccagggatatgtttagataataatggcttcaaaggggcattgtcaatgtgtgaagacttaaatataaggatatttttctatagatctaaacaaaaatcccactgtgaattcattttaaaacataaatcttcacatcccttgtaagttggattcctaggtattttattctcttagaagcaattgtgaatgggagttcactcatgatttggctctctgtttgtctgttattggtgtataagaatgcttgtgatttttgcacattgattttgaatcctga

SEQ ID NO: 338479 - DNA, 593 bp, Homo sapiens
tttcctattcactttttaaaagttgatataattaattagcggataccaaaattttgttttggtttctttgaagaaaactattatcttggaaaataaaaatgcagccctaatctcaatatatactgaaattaattttggagattaaaatttacattttaacatatgcattccaatggcttgattcatttagtctctactatgatatattcagaattagtttgtgctctaaagtagataagataaggtagactctacaatatgrtagactctttctacatatgtaatatcttattctatacctttaggaaacataacaccagggatatgtttagataataatggcttcaaaggggcattgtcaatgtgtgaagacttaaatataaggatatttttctatagatctaaacaaaaatcccactgtgaattcattttaaaacataaatcttcacatcccttgtaagttggattcctaggtattttattctcttagaagcaattgtgaatgggagttcactcatgatttggctctctgtttgtctgttattggtgtataagaatgcttgtgatttttgcacattgattttgaatcctga

SEQ ID NO: 338480 - DNA, 593 bp, Homo sapiens
tttcctattcactttttaaaagttgatataattaattagcggataccaaaattttgttttggtttctttgaagaaaactattatcttggaaaataaaaatgcagccctaatctcaatatatactgaaattaattttggagattaaaatttacattttaacatatgcattccaatggcttgattcatttagtctctactatgatatattcagaattagtttgtgctctaaagtagataagataaggtagactctacaatatgatagactctttctacatatgtaatatcttwttctatacctttaggaaacataacaccagggatatgtttagataataatggcttcaaaggggcattgtcaatgtgtgaagacttaaatataaggatatttttctatagatctaaacaaaaatcccactgtgaattcattttaaaacataaatcttcacatcccttgtaagttggattcctaggtattttattctcttagaagcaattgtgaatgggagttcactcatgatttggctctctgtttgtctgttattggtgtataagaatgcttgtgatttttgcacattgattttgaatcctga

SEQ ID NO: 338481 - DNA, 474 bp, Homo sapiens
tgattttccttctctcatatgttgatacaaattaaaaattatgagtatctaaaactacgtgcataagcaggctggaactaagaatgtcacagttgaactccagagactaaattttaaaagcaatgacaaaattcttgatttagggagcagaaaatcgaacttcaggctataaagtaatatttagggtacattaggagatacataamgtatctccagtatactggagaagcgttgtgtcagtaattcaatcaaaaaaatttaaaataagtaaaagcagcactgaaatgtatctgagtatttatcaaagctgaatttttattggcagtgacaatacactacatgtctttgtttctgccagatgaacaactataaaattttcctttccaggcatgatttgactatgacatgaataaatagctaaacatatttttgtttggttttaattatctcaggttggatctattataagcagca

SEQ ID NO: 338482 - DNA, 474 bp, Homo sapiens
tgattttccttctctcatatgttgatacaaattaaaaattatgagtatctaaaactacgtgcataagcaggctggaactaagaatgtcacagttgaactccagagactaaattttaaaagcaatgacaaaattcttgatttagggagcagaaaatcgaacttcaggctataaagtaatatttagggtacattaggagatacataacgtatctccagtatactggagaagcgttgtgtcagtaattcaatcaaaaaaatttaaaataagtaaaagcagcactgaaatgtatctgagtatttatcaaagctgaatttttattggcagtgacaatacrctacatgtctttgtttctgccagatgaacaactataaaattttcctttccaggcatgatttgactatgacatgaataaatagctaaacatatttttgtttggttttaattatctcaggttggatctattataagcagca

SEQ ID NO: 338483 - DNA, 474 bp, Homo sapiens
tgattttccttctctcatatgttgatacaaattaaaaattatgagtatctaaaactacgtgcataagcaggctggaactaagaatgtcacagttgaactccagagactaaattttaaaagcaatgacaaaattcttgatttagggagcagaaaatcgaacttcaggctataaagtaatatttagggtacattaggagatacataacgtatctccagtatactggagaagcgttgtgtcagtaattcaatcaaaaaaatttaaaataagtaaaagcagcactgaaatgtatctgagtatttatcaaagctgaatttttattggcagtgacaatacactacatgtctttgtttctgccagatgarcaactataaaattttcctttccaggcatgatttgactatgacatgaataaatagctaaacatatttttgtttggttttaattatctcaggttggatctattataagcagca

SEQ ID NO: 338484 - DNA, 503 bp, Homo sapiens
gcaagaagctgaacttctattcatttatcaacaaaagcagaacaaccataagttatgcatgcctatcaggattttgcaaagatcaaatggaaaaggatgtaaaaaaagtactttgtaaactgaaaagctctatgcatattcaaagtgtacttcagatggcattcataacagtgattttattattctttttcttacytttcctaccaacctaatataggttttcattactctcctaatgacctccataatcttgaactagtgcttgcacttctgtatctgattccaattcattctacagatattttcccacacctttggccatgccaaaatgtgcctgattctgagtcagaaagtttctcggagattccaaaatttcaatgggattcaatacatactatccagtctgtcattacaggccttccaccatataatcttgatctacctttctatgtctgcatttctcatgaattccctctaatacattataacgtactcagaaccac

SEQ ID NO: 338485 - DNA, 503 bp, Homo sapiens
gcaagaagctgaacttctattcatttatcaacaaaagcagaacaaccataagttatgcatgcctatcaggattttgcaaagatcaaatggaaaaggatgtaaaaaaagtactttgtaaactgaaaagctctatgcatattcaaagtgtacttcagatggcattcataacagtgattttattattctttttcttacctttcctaccaacctaatataggttttcattactctcctaatgacctccataatcttgaactagtgcttgcacttctgtatctgattccaattcattctacagatattttcccacacctttggccatgccaaaatgtgcctgattctgagtcagaaagtttctcgragattccaaaatttcaatgggattcaatacatactatccagtctgtcattacaggccttccaccatataatcttgatctacctttctatgtctgcatttctcatgaattccctctaatacattataacgtactcagaaccac

SEQ ID NO: 338486 - DNA, 596 bp, Homo sapiens
tctctcaggaaacatccatgctttgcctggtattttgttcctggaattttattgcattcttggcaggaacatacccttcttcaatccatgggctggatagcaatcatctttaaattcccctgcagtaactagtgtagtgacccatacctaatagatgttcagaaaacatttgttaaaacataaccaagtgaggttactaagtttgtttgagacagggtctccctctgtctcccaggctgkagtgcagtggtgtgatcacagctcattgcagcctggacctaatgggctcaagcgatcctcccacctcagcctatcaagtagctaggaccacaggggtgcaccaccatgctgggctaatttaaaaaaattatttgtagagacaaggtctcactatgttacccaggctggtctcaaactcctgggctcaagcaattctgcctcagcctctcaaagtgctgggattacctacgtgagccacggcaccccatagggtttttattatgctattccagaatgagtttctagcaatggtccttaacccaaatctgagtcaggccgacctggagagttttttcaaatactcacagatggaccac

SEQ ID NO: 338487 - DNA, 560 bp, Homo sapiens
atagctctcattcgcttaatctaagccacctctttttcacatttcactggtcctttcaacgtctgttaggattctttcagagtctgtaatactcatttctttctacctaacttctagttacataaaaactgttaccaagaaatgctttacccatttttccagacaatatayaatttcagataataaaaaaattatgttagattgtttcttaaattttccttatagtcttcataactatcacattaaagtatcacagaataagtccaatgtccaggttgaagcctttcacttaatgccaggaattacgattacaatgctataaaaaagacagtgcaatagttatgaatatactattggaagtgaactgccagggttcaagccctggttccaccattgattagttttgcgactttaggcaagttacttctttgcctcagtttctttatctgtgaaaggtaactaatgtagtacctatcatttattgtgaaaattaaataaggaataacattaaaaatgcttagagaatacctggtatgttagaaactttcaataaatcatat

SEQ ID NO: 338488 - DNA, 444 bp, Homo sapiens
cagggtcagcaatacaacttgcctgtggtgctttacctgagactgacagctctttattattctcatgcaggagggactggtggttaaataagaatcacctcagtgayaattacaatctagttagccacctatgtgcttaagttaaccagtaacttacaaagattgtgtcaaacattctaaaaccattctcatttccaaagcctcaagctaaataagctgccattgttaatataaaacacctgaaccaggtgaatattatgtggctgtgtacttgctgtctagcacaaagttctcttaaaggaatttatcagatgactacgaacatttacccagatcactcgttacacaaacatttgtctcttaatgggcatttgaacaagccttgagcctgaatgaaaaactacccagtatgccaatttagcataattatataaagtctcatta

SEQ ID NO: 338489 - DNA, 601 bp, Homo sapiens
gttaatacagaataatatacttgattccattcttatcctttccaaactctctgcacacattaatccagtgggacattcttcggaaatgaccagccctgggtaagatcaaatagaaggtaaggagcatctacttccactttctactctcagacaaaacctttctaagctgactttgggtatctttttcctcttttcatgttctttctcctccaaaaatatttcagttgctaaagggggaaagtggtaacagattcataaaatagtagtagtaccataatctacctcatttatacccaaggttagaaaaagcaattttaacagtaaatgagtgaatacaaatgatcattacagaaagttagtactgttatgcactaaatatccttgagattttgagggagattaaatatttcatgttataacatgttgtttccatataatatatcacatatgcatcacttaaataatttaatrgtaagaatgtgagattgatccagcaatagatagatggaacactagagcaatcacatctttcgctatgaagatcactgaaatatgactgattattcctcagggcatcatgtcttcttagttaaacctaaat

SEQ ID NO: 338490 - DNA, 576 bp, Homo sapiens
cagaaagatagggttttatatttcatgagaataatgaaagactctaaatagtagtgaaaaccttcttaagtacaacagtatagcttttatgcttttcttaccaaatggtactctcaaaatgtaaaatatctaccagattaaaaaacaatacagacagctgactactatgcagtcatataaaatactgcttccagtggcktaactgattttctttggatataccagaatgtatacctaagaaaaggagaagaatatattcacactataagagagttatagatacagcctaaagcagatcatagtaaacttggaatttcgctgaagtttgttttatcttaaaaattcatagaaattttatactttatgataaatacatgcttgtattaatattttatatctcttcactttgaaaaccattaaagctgtagaaagttgcatgagtttattgtgtgactgtcactactgctaggcatatgtaatttgaaaatcaattacattttacttttaagttctgtccaatccattttagtctttatcaccttcggcaccacaaataatcttttaaaaccagttgtt

SEQ ID NO: 338491 - DNA, 610 bp, Homo sapiens
gtttgttttatcttaaaaattcatagaaattttatactttatgataaatacatgcttgtattaatattttatatctcttcactttgaaaaccattaaagctgtagaaagttgcatgagtttattgtgtgactgtcactactgctaggcatatgtaatttgaaaatcaattacattttacttttaagttctgtccaatccattttagtctttatcaccttcggcaccacaaataatcttttaaaaccagttgttgcttctttggcacttgttctacacgttggcacattgttgcactttgaaagtaaatctaaatttcaaacaaaatcaatgttgtattaccatttattctacttagccttttattttaaagtattatcatttcttctcatttagttattttaaaaatattatatatttaagataaaataattaacatgctacagaaatggatgaagtaaaaattatragctggccacacctcaatactttttctaggaggtgacactgatatatagactcacagattcaaattatattttaaaggtattagagaagcttgcttcttaaaagaacttgatggggaatccttttataaattgcataattaag

SEQ ID NO: 338492 - DNA, 546 bp, Homo sapiens
aattacacacacacacacacacacacacactgttagaactaatatacaaattcaaatttgcattatataaaatcagtattaaaaattagttctgtttttatatactaacaataatgaaaaggaaattaagataatttcatttacaatagcattaaaatgaacaaaatacttagaaataaacctaaccaagaagtgaaaaacatttacaattaaaaccacaaaacactgctgaaagaaattaaaggcacagataaatgttaagacatcycatgttcatagattggaagctttaatgttgttaagatatccatattacccaaagtggctacagattttatgtaattcctaccaaaatgccaatggcatttttttgcagaaataaatagaaaaaaaatcaatctataattcatatagaacctcgagggactccaaatagccaaagcaactgtgaaacagtagaatgaaattagaaaactcacacttcaagatttcaaagcatattacaagctacagtaatcaaaatgttatgttactagtataaagaca

SEQ ID NO: 338493 - DNA, 578 bp, Homo sapiens
aaaatttagccaggcgtgatcatgagtgcctgctgtcccagctactcaggaggctgaggcatgagaatcgcccgaaccaggaagtggaggctgctgtgagctgagatcrtgccagggtacactccaccctgggcagtagagcgagacactttctcaaaataaaataaactaaaataaaataaaataaaaatactatcacttcatcctcccacttaaaaccttctcatggttcttaggtaaagcccaacagtgcgtgcatcatcaggctcctgtctaactttctagactcatctcactttagtctttccctcttcaggctttaagttttttctattcttactgtttctttaattgccatctgaagctttcgcacatgacctccccggacacgggacgtgtcgtgctaaaaccaggaaagccgtggacaaaccagaatgaactgatgactctactttctgcccaccacctccacctggcaaacacctacttcaagtactagcttaaatgtcattctctcaggaaacctctgatacctcttcactgccacaagtattggtttatttccttttatctcaaca

SEQ ID NO: 338494 - DNA, 583 bp, Homo sapiens
ttcctgcccttacacagccccgctggaaccttacctgcacacgggcgcagacacacacttcctggtttgctttctggaatttgcgcctggtaatctccctgaatgtatgttgagagatcacagaagataaggaactgtggctgccacaaaaactgcctctgtgtagcaaggagtggctgaccaattcttgattctgcyttgattcttcaaagccgactctgagtctccaaataaagcgatggctagtagggagagacaagatatcttcatagttcttttaggcagatgattgaactttgttttatgaggcagagcatggctgggtcacgagtctttttgcagtacagttgaccttaaagctaattgaaatccttcaaagatctcatataaattgtattggtggagatttgggacagactacgttggagatttctgatttgatagcattatttactagagtaaacctgttccaattttttgaaacttaggtaatcacttaagtagtaacatcagtcttgaccttcatcttttaataaaagattttacctcagattgatagattttcactttggtagtaggagaa

SEQ ID NO: 338495 - DNA, 620 bp, Homo sapiens
tcattcaattaataggtcagttaatctatcagtcaacaaatatttattaagtgcctattaaatgccaaaagttatgacagaccctgggaactgaaatggaaaagccatagtcaggattaaaggtatttttggtaagtcaaagagacagataagaaataataaatcccaacaacaacaacaaaaagatgctgstacaggtacagcaaaaactcataagaataggactgggtacgtaatttcagggcacagagtaaaataaaatgcctggtcccttgttgaaaagttgttaagaattttaagatgtctacagaagatcattaaaccaagtgcaaggcctatattattgccaaggttgcgtgcccatgaagctaatccggcaaagaattatctgattctctccatctgcatagaatatttttggaagggctttttgaataagtggcatatgagctccgttttaagagatactttaagtttcctaggcaaggttggaataggatgtaaataagtggaggtgggcattgaaagttttcttttctatggttaaaaagcaaatattgtagccaggaaatgataaccggttcaaaagctctcctttaaggatgaatggagcggcccaa

SEQ ID NO: 338496 - DNA, 577 bp, Homo sapiens
gggtacgtaatttcagggcacagagtaaaataaaatgcctggtcccttgttgaaaagttgttaagaattttaagatgtctacagaagatcattaaaccaagtgcaaggcctatattattgccaaggttgcgtgcccatgaagctaatccggcaaagaattatctgattctctccatctgcatagaatatttttggaagggctttttgaataagtggcatatgagctccgttttaagagatactttaagtttcctaggcaaggttggaataggatgtaaataagtggaggtgggcattgaaagttttcttttctatggttaaaaagcaaatattgtagccaggaaatgataaccggttcaaaagctctcctttaaggatgaatggagcggcccaagatgagaatagaaaaatagataaggaaagttawgactgcccttttgtgcatgctaagtaatatgggtaaatatcacagcagtactatctttcttgtttattttattgcagtttaatttccaaaatgtacaaaccttaaatatgcatctgaattactttttatatttgtatatgcccttttaat

SEQ ID NO: 338497 - DNA, 568 bp, Homo sapiens
cttgatcaccatcatgctataaatattaaagtggattgacttactgaacatattatttctgatctaatagatattaccacttttcttcctaaaaaatgttttaaaaccacgatacaggaaaatatttataaaagaagacagacttttccagaccttttactgtccttttatggaaagtrattataggcactcttgccaacaataagaaaatctttattctcttaagtaggtaagaatatataacaccaatcacacttgattttaatgtatatttgctgtttttttaaaccctactctaaatgtatctttttgctatatgtttagtttgatcacacactcttttcaatttctttgaagtcagttttttgaaatggaaatgtatggagaactttaattggcttttactacatgcaaaggaaatctcaaaaataggtccagagggatgttttattagtgtggagggaacaagtggaagaaattgaaactgatttctagacttggatgtttaacatattttcctcacgggattattctgtatttcatgatgacttaaccaggggctttagag

SEQ ID NO: 338498 - DNA, 568 bp, Homo sapiens
cttgatcaccatcatgctataaatattaaagtggattgacttactgaacatattatttctgatctaatagatattaccacttttcttcctaaaaaatgttttaaaaccacgatacaggaaaatatttataaaagaagacagacttttccagaccttttactgtccttttatggaaagtgattataggcactcttgccaacaataagaaaatctttattctcttaagtaggtaagaatatataacaccaatcacacttgattttaatgtatatttgctgtttttttaaaccctactctaaatgtatctttttgctatatgtttagtttgatcacacactcttttcaatttctttgaagtcagttttttgaaatggaaatgtatggagaactttaattggcttttactacatgcaaaggaaatctcaaaaataggtccagagggatgttttattagtgtggagggaacaagtggaagaaattgaaactgatttctagacttggatrtttaacatattttcctcacgggattattctgtatttcatgatgacttaaccaggggctttagag

SEQ ID NO: 338499 - DNA, 493 bp, Homo sapiens
aaatcccttcttttgtatcttttgcctcacaaattccaggctacttcatgtcaatctctgatttttgtgtctacagctcaaagagactactgcacttcacttggccttccttcactatcccatcttctgtaaatactgacaagcacaaagctgtcgtgattgtagggcttactttgttttctttgtctcagggatcataatcccatatttctttytgtgcaatgttggaaaataattgtttaaagaattatccactttcctagttctttgtggcagaagggctaatgtggaacaagtttttccatcatgtgcaaatgtttgataaagtgagtatacatttttatatctattatccattaagcctttgaaagagagatataacagcttaattttacatgtccatattgataataaattataagttgccataatttgcaactatttaaactcaataaacaattttaggctgagtgtggtggctcacgcctgtgat

SEQ ID NO: 338500 - DNA, 493 bp, Homo sapiens
aaatcccttcttttgtatcttttgcctcacaaattccaggctacttcatgtcaatctctgatttttgtgtctacagctcaaagagactactgcacttcacttggccttccttcactatcccatcttctgtaaatactgacaagcacaaagctgtcgtgattgtagggcttactttgttttctttgtctcagggatcataatcccatatttctttctgtgcaatgttggaaaataattgtttaaagaattatccactttcctagttctttgtggcagaagggctaatgtggaacaagtttttccatcatgtgcaaatgtttgataaagtgagtatacatttttatatctattatccattaagcctttgaaagagagatataacagcttaattttacatgtccatattgataataaattataagttgccataatttgcarctatttaaactcaataaacaattttaggctgagtgtggtggctcacgcctgtgat

SEQ ID NO: 338501 - DNA, 570 bp, Homo sapiens
attcatattgatagggaatttgtaatgttttctatgtaaatgagagttacaaaactcattaagaagtactcaactgtactgctctataaaatgaagatgaaggtmttgacctagtaagtactttacatatatatctacatttctataattttattcatcaatgaatttgctcatttattctggaaaaaattaaatgtgtcataaaataatataaaataataatcttaatttgattttcaaatttttttctcctctctcatcccataacactaatgagcattttcttgtcaaagttgggagttaagaaatttaacgtttctaaatgattctgtaaacctagttattctcccacccttcagctgaactgctttgaaaatacaatgtgcaaagctgcagattaacagtgcttaaatgtacagggttgacgtaatttcaggctgcttgaattaactctcttcgacaagcctttccttgcgaaccaccagcagaaaagttcctctttgtctacagttacaagccaggctccagtcactgggagttttcgcattgtttctaatatattggtgctcg

SEQ ID NO: 338502 - DNA, 553 bp, Homo sapiens
gctatgtaataacttgtataaatatttaaattagcaattcacaaactctttaagtattagctcaytcttttgaatcaatttagaattctctttcttaccatataagaagtggcactattacactgaatatgtaagatgcatgaagtagagttacatatgaagaaaaaaatttactttgatgttagtgttttcaagacttataatatgtagcaatagtaaaatgcgttgaattagaaaggggatgtgacagttacatgcatgtgtataacccaagtaccaatattataggcaacaacagatatgatgtttgagtgtgttatgtaattcagacatagtgagagtgaccacgtagaagtagtgcttacactgttgataaaactttaagaaagaagtctcaaataggtttaagtaatgaaaatttaatagaagataatgttcatgtttatggaatgatggctatgttctaagatagaagactatgatctctaattatctattcacaacaaatacatgtgatgtctgccagcacgtttagagtctatgtaagacgaga

SEQ ID NO: 338503 - DNA, 553 bp, Homo sapiens
gctatgtaataacttgtataaatatttaaattagcaattcacaaactctttaagtattagctcattcttttgaatcaatttagmattctctttcttaccatataagaagtggcactattacactgaatatgtaagatgcatgaagtagagttacatatgaagaaaaaaatttactttgatgttagtgttttcaagacttataatatgtagcaatagtaaaatgcgttgaattagaaaggggatgtgacagttacatgcatgtgtataacccaagtaccaatattataggcaacaacagatatgatgtttgagtgtgttatgtaattcagacatagtgagagtgaccacgtagaagtagtgcttacactgttgataaaactttaagaaagaagtctcaaataggtttaagtaatgaaaatttaatagaagataatgttcatgtttatggaatgatggctatgttctaagatagaagactatgatctctaattatctattcacaacaaatacatgtgatgtctgccagcacgtttagagtctatgtaagacgaga

SEQ ID NO: 338504 - DNA, 546 bp, Homo sapiens
agttaatatatattaatgaatcatgttgccactgagttgttaggatataactattaaggatataaaaattaagttgtttacacctaactaattaacaaacagaactcacatatttcttttggcctaggggtcccgtgtaaatattactaagacactaaaattgctgcaaaatgagaaagtttagaaacctccaggttgaggagttattctaagtgttactaaggctccttagatccttgtgagcctataaaataattaaaaactcccatcatgagaatgtgtcaaaaactstaattttgagaatattgatccctatgtgtttacttgaaacaaaagacatattggggcaagttacttagagacaaatttcatctgctgtgggtcaaacatcacctaatatgtaagtgttaaaatggaatattcaggcattgaagttgtcattgttataagacccttgttacagcaaagaaactgaggtacagagagaattattaacacagcaaagcaatcagaagacgtgactcaatattgtgctttagaggacat

SEQ ID NO: 338505 - DNA, 559 bp, Homo sapiens
ttttgcttttactttacctctgactagttacatgacctttttatgccatagcttcataggattaaggaaatcaggcaaaccactaataggttatcagttctctttattaagctttgtcaaggacagatactrtattttggtcagcaaggttccaagtgtctgcagctttgggctgtgatttacaccagattctagcttcttagaggtgcttctcctgggcgcaccattaagccgctagaaagccacttctttgagcctttcccatcctctctctctaaagctagggcttgtgctggggatagttaattcctaggaatcagactctggaaaacctcagtcattttccattctcttagatcgcccctccaccgcagtagtactctgctgcttccttcttttcagcaacatgtcatagacttctcaatcaatttctgatttctcatatgcctggaggaaaagactgcttcacctctcagctatggcaaaaagccctaaagcaataattgcaaactctgggtacctgcttgaactccaagaccatagaaaagatcaggagcac

SEQ ID NO: 338506 - DNA, 623 bp, Homo sapiens
tgacagctggtaggggattagaatttagaaataacttcaactgaaaaagttcaggttgaagccctgtaacacaaaagtacctggttggggcttgagaaggcctgggttttgcttttactttacctctgactagttacatgacctttttatgccatagcttcataggattaaggaaatcaggcaaaccactaataggttatcagttctctttattaagctttgtcaaggacagatactatattttggtcagcaaggttccaagtgtctgcagctttgggctgtgatttacaccagattctagcttcttagaggtgcttctcctgggcgcaccattaagccgctagaaagccacttctttgagcctttcccatcctctctctctaaagctagggcttgtgctggggatagttaattcctaggaatcagactcyggaaaacctcagtcattttccattctcttagatcgcccctccaccgcagtagtactctgctgcttccttcttttcagcaacatgtcatagacttctcaatcaatttctgatttctcatatgcctggaggaaaagactgcttcacctctcagctatggcaaaaagccctaaagcaataattgcaaactctggg

SEQ ID NO: 338507 - DNA, 509 bp, Homo sapiens
caatttctgatttctcatatgcctggaggaaaagactgcttcacctctcagctatggcaaaaagccctaaagcaataattgcaaactctgggtacctgcttgaactccaagaccatagaaaagatcaggagcacacaatttaataattcagtaatttccctactgtattagtttatgagaaagtgctttttaaaagcactattcctaccccaaacttaaggaacttttgagtaattaaggtatggcctgtaccactgaaagactgggcagatgtgcaagkctaaaaatgtgaaaagctatagtatatttttattagaactgagcaactagagaaattccaaacagaatcacctttcaaatgctttttcaaattcctcactctaccatgttggcctgtttccctagctgtacagttatatctaagacatctttccacagcaaagactaatatgtaattgcaattatttttccaactcctgtgaccccgatggacacagcctaagtgttca

SEQ ID NO: 338508 - DNA, 509 bp, Homo sapiens
caatttctgatttctcatatgcctggaggaaaagactgcttcacctctcagctatggcaaaaagccctaaagcaataattgcaaactctgggtacctgcttgaactccaagaccatagaaaagatcaggagcacacaatttaataattcagtaatttccctactgtattagtttatgagaaagtgctttttaaaagcactattcctaccccaaacttaaggaacttttgagtaattaaggtatggcctgtaccactgaaagactgggcagatgtgcaagtmtaaaaatgtgaaaagctatagtatatttttattagaactgagcaactagagaaattccaaacagaatcacctttcaaatgctttttcaaattcctcactctaccatgttggcctgtttccctagctgtacagttatatctaagacatctttccacagcaaagactaatatgtaattgcaattatttttccaactcctgtgaccccgatggacacagcctaagtgttca

SEQ ID NO: 338509 - DNA, 509 bp, Homo sapiens
caatttctgatttctcatatgcctggaggaaaagactgcttcacctctcagctatggcaaaaagccctaaagcaataattgcaaactctgggtacctgcttgaactccaagaccatagaaaagatcaggagcacacaatttaataattcagtaatttccctactgtattagtttatgagaaagtgctttttaaaagcactattcctaccccaaacttaaggaacttttgagtaattaaggtatggcctgtaccactgaaagactgggcagatgtgcaagtctaaaaatgtgaaaagctatagtatatttttrttagaactgagcaactagagaaattccaaacagaatcacctttcaaatgctttttcaaattcctcactctaccatgttggcctgtttccctagctgtacagttatatctaagacatctttccacagcaaagactaatatgtaattgcaattatttttccaactcctgtgaccccgatggacacagcctaagtgttca

SEQ ID NO: 338510 - DNA, 497 bp, Homo sapiens
cttgtatttgtgaggttgaacaaggcaactctgaaaaatttcagtaaaattgatcatttytttgccttccaaaactaaatgaaaatactagcatcaggtagaatgtgaacaatttagtgacagtgcaattttgctgattgtaacaaattcccataggcctcaatatttcagattttaagcatcttgcaccaggtgaactttaaaaatgatgtcatgcactgaatttggattgaatgtttaccatgcaaaacttaacatctttccttttggtttggtgatttatcatttttaaaaggctttcctatttgatttttgtaatcagagaatgttttctaatcagagaatgttatcctccacttgacacatagggaaagtgagcttcggacaactttagcatccaggttgcctatcaaaatccccaagaaagcaccatctataatgtctaatcatcaaaatccccaagaaagcaccatctataatgtctaatcagctggtaa

SEQ ID NO: 338511 - DNA, 497 bp, Homo sapiens
cttgtatttgtgaggttgaacaaggcaactctgaaaaatttcagtaaaattgatcatttttttgccttccaaaactaaatgaaaatactagcatcaggtagaatgtgaacaatttagtgacagtgcaattttgctgattgtaacaaattcccataggcctcaatatttcagattttaagcatcttgcaccaggtgaactttaaaaatgatgtcatgcactgaatttggattgaatgtttaccatgcaaaacttaacatctttccttttggtttggtgatttatcatttttaaaaggctttcctatttgatttttgtaatcagagaatgttttctaatcrgagaatgttatcctccacttgacacatagggaaagtgagcttcggacaactttagcatccaggttgcctatcaaaatccccaagaaagcaccatctataatgtctaatcatcaaaatccccaagaaagcaccatctataatgtctaatcagctggtaa

SEQ ID NO: 338512 - DNA, 546 bp, Homo sapiens
agttaatatatattaatgaatcatgttgccactgagttgttaggatataactattaaggatataaaaattaagttgtttacacctaactaattaacaaacagaactcacatatttcttttggcctaggggtcccgtgtaaatattactaagacactaaaattgctgcaaaatgagaaagtttagaaacctccaggttgaggagttattctaagtgttactaaggctccttagatccttgtgagcctataaaataattaaaaactcccatcatgagaatgtgtcaaaaactctaattttgagaatattgatccctatgtgtttacttgaaacaaaaracatattggggcaagttacttagagacaaatttcatctgctgtgggtcaaacatcacctaatatgtaagtgttaaaatggaatattcaggcattgaagttgtcattgttataagacccttgttacagcaaagaaactgaggtacagagagaattattaacacagcaaagcaatcagaagacgtgactcaatattgtgctttagaggacat

SEQ ID NO: 338513 - DNA, 613 bp, Homo sapiens
aaaccttggaagtaatctgaacacccatcagtgcaggaataattgaataaataatgtgcatctatttttggtattactatgaagctattaaagagaatgagttacgtctgttatcactggtctgtagggatgcccacgatatgcagtttagtraaaaacacaagctgcagagtaatatacatagtaggtgccatcattgctctgaatgtccttgcttcattgcctttgacgattcttttctcatgaaacttgctaacagtctcttaccatctgtatgtctaattcttctttcacattcatattcaccaggagcctcagtttgtcagggaagctaaattgaccaacccagattggatacatgtccactacctgtgccttcagtttatcctgagcaggtctcagtcatagacatttattcaactcttggtttcttttagacagcaaactctttgaagccagggatgattgatctcctctcagcattttcaatataataagtatatgtagtgattgacataagggggtaatttatcaaacttttttgaatgaatgaaaaaaagtgcggtccaaccacattccaaaagcaaatgtataaataaataatggtagagta

SEQ ID NO: 338514 - DNA, 613 bp, Homo sapiens
aaaccttggaagtaatctgaacacccatcagtgcaggaataattgaataaataatgtgcatctatttttggtattactatgaagctattaaagagaatgagttacgtctgttatcactggtctgtagggatgcccacgatatgcagtttagtaaaaaacacaagctgcagagtaatatacatagtaggtgccatcattgctctgaatgtccttgcttcattgcctttgacgattcttttctcatgaaacttgctaacagtctcttaccatctrtatgtctaattcttctttcacattcatattcaccaggagcctcagtttgtcagggaagctaaattgaccaacccagattggatacatgtccactacctgtgccttcagtttatcctgagcaggtctcagtcatagacatttattcaactcttggtttcttttagacagcaaactctttgaagccagggatgattgatctcctctcagcattttcaatataataagtatatgtagtgattgacataagggggtaatttatcaaacttttttgaatgaatgaaaaaaagtgcggtccaaccacattccaaaagcaaatgtataaataaataatggtagagta

SEQ ID NO: 338515 - DNA, 613 bp, Homo sapiens
aaaccttggaagtaatctgaacacccatcagtgcaggaataattgaataaataatgtgcatctatttttggtattactatgaagctattaaagagaatgagttacgtctgttatcactggtctgtagggatgcccacgatatgcagtttagtaaaaaacacaagctgcagagtaatatacatagtaggtgccatcattgctctgaatgtccttgcttcattgcctttgacgattcttttctcatgaaacttgctaacagtctcttaccatctgtatgtctaattcttctttcacattcatattcaccaggagcctcagtttrtcagggaagctaaattgaccaacccagattggatacatgtccactacctgtgccttcagtttatcctgagcaggtctcagtcatagacatttattcaactcttggtttcttttagacagcaaactctttgaagccagggatgattgatctcctctcagcattttcaatataataagtatatgtagtgattgacataagggggtaatttatcaaacttttttgaatgaatgaaaaaaagtgcggtccaaccacattccaaaagcaaatgtataaataaataatggtagagta

SEQ ID NO: 338516 - DNA, 613 bp, Homo sapiens
aaaccttggaagtaatctgaacacccatcagtgcaggaataattgaataaataatgtgcatctatttttggtattactatgaagctattaaagagaatgagttacgtctgttatcactggtctgtagggatgcccacgatatgcagtttagtaaaaaacacaagctgcagagtaatatacatagtaggtgccatcattgctctgaatgtccttgcttcattgcctttgacgattcttttctcatgaaacttgctaacagtctcttaccatctgtatgtctaattcttctttcacattcatattcaccaggagcctcagtttgtcagggaagctaaattgaccaacccagattggatacatgtccactacctgtgccttcagtttatcctgagcaggtctcagtcatagacatttattcaactcttggtttcttttagacagcaaactctttgaagccagggatgattgatctcctctcagcattttcaatataatamgtatatgtagtgattgacataagggggtaatttatcaaacttttttgaatgaatgaaaaaaagtgcggtccaaccacattccaaaagcaaatgtataaataaataatggtagagta

SEQ ID NO: 338517 - DNA, 596 bp, Homo sapiens
gttattcttgtgtttgctaaaggttgagcactattcaactagacaaaaggaaggagtgcaatgtcgatatgaagatatcagggaataggaagcatgctatctttaaaagaacggttatatcccttacaaagccctctgaggggtagaaaagtaaaagtgataccacttgcctscagctcttctctattctgttttaattttaggtctttgaagtctgaatttgtcttaattgtttgtttctgtgagggttaagtgagccacatcttaccccatgtcttgcatgtgtaatacttacatactacttttgaatgcatgtataccctctgttgtcactgaaatacaaattcagtttaaaacatcattgaatttatttaggcttttgattatctgtaccttctcaaaaatatgcgtataaaaagcaaattattatcaaaagaggttatcacattcttcttttttccacttataacagggtcctcacacccaaaaacgttgaaaaataattacctaaatataaagcagtataggcacaagcatcaaacaacatgtttatctgaacataattgagagagatttgcagtccggtgtaaggctgt

SEQ ID NO: 338518 - DNA, 596 bp, Homo sapiens
gttattcttgtgtttgctaaaggttgagcactattcaactagacaaaaggaaggagtgcaatgtcgatatgaagatatcagggaataggaagcatgctatctttaaaagaacggttatatcccttacaaagccctctgaggggtagaaaagtaaaagtgataccacttgcctccagctcttctctattctgttttaattttaggtctttgaagtctgaatttgtcttaattgtttgtttctgtgagggttaagtgagccacatcttaccccatgtcttgcatgtgtaatacttacrtactacttttgaatgcatgtataccctctgttgtcactgaaatacaaattcagtttaaaacatcattgaatttatttaggcttttgattatctgtaccttctcaaaaatatgcgtataaaaagcaaattattatcaaaagaggttatcacattcttcttttttccacttataacagggtcctcacacccaaaaacgttgaaaaataattacctaaatataaagcagtataggcacaagcatcaaacaacatgtttatctgaacataattgagagagatttgcagtccggtgtaaggctgt

SEQ ID NO: 338519 - DNA, 569 bp, Homo sapiens
attctaggcaaaaaggtcttatagctgaattaaaaacactcaaacaggaaggctggcctcttcattgttgattcgcatctaaattcattatgagaagtkctggaagctgttcacaaacaagattctgactgaccatcacctttgtttttagcatatataccatacataactatacttatctcccagatcctccaagtacctgtcttgaaaactttcccttacatatttgagcttctcaatagcattttactcatgcttatcacctgcattgtctccccaggcaatcttcttgaattttccatattaccaaaatgatgagagccaacacaaaccaattttgtaacaatacctgttcttccaaacactgttcttctgtgttactctgggaattcattgttaatctttataatcatgccattaagattgctactgttaatgtgcagttatgaagatctaaatgctttgaaataaaagggataatgtaggcccataggctccacaaaccctgagagaagtatgaaatggtagactgcatggtggccacaaatttttcccttcctctactcacc

SEQ ID NO: 338520 - DNA, 569 bp, Homo sapiens
attctaggcaaaaaggtcttatagctgaattaaaaacactcaaacaggaaggctggcctcttcattgttgattcgcatctaaattcattatgagaagtgctggaagctgttcacaaacaagattctgactgaccatcacctttgtttttagcatatataccatacataactatacttatctcccagatcctccaagtacctgtcttgaaaactttcccttacatatttgagcttctcaatagcattttactcatgcttatcacctgcattgtctccccaggcaatcttcttgaattttccatattaccaaaatgatgagagccaacacaaaccaattttgtaacaatacctgttcttccaaacactgttcttctgtgttactctgggaattcattgttaatcttyataatcatgccattaagattgctactgttaatgtgcagttatgaagatctaaatgctttgaaataaaagggataatgtaggcccataggctccacaaaccctgagagaagtatgaaatggtagactgcatggtggccacaaatttttcccttcctctactcacc

SEQ ID NO: 338521 - DNA, 569 bp, Homo sapiens
attctaggcaaaaaggtcttatagctgaattaaaaacactcaaacaggaaggctggcctcttcattgttgattcgcatctaaattcattatgagaagtgctggaagctgttcacaaacaagattctgactgaccatcacctttgtttttagcatatataccatacataactatacttatctcccagatcctccaagtacctgtcttgaaaactttcccttacatatttgagcttctcaatagcattttactcatgcttatcacctgcattgtctccccaggcaatcttcttgaattttccatattaccaaaatgatgagagccaacacaaaccaattttgtaacaatacctgttcttccaaacactgttcttctgtgttactctgggaattcattgttaatctttataatcatgccattaagattgctactsttaatgtgcagttatgaagatctaaatgctttgaaataaaagggataatgtaggcccataggctccacaaaccctgagagaagtatgaaatggtagactgcatggtggccacaaatttttcccttcctctactcacc

SEQ ID NO: 338522 - DNA, 586 bp, Homo sapiens
aatttcacttagctttgtttctgtcactccaatgctagcatcatatgaaaaaatttatactttaaagagctttaaggatacataccttgaattttttacagcccttttatgaagccatcagaaagtgcatttcaaacaagtttcatgtttctccttaaaaatttctcatattgtgacatatggaggtgacaggatcagctcaaggagggaagagaagaagagtggaataagccaaatgattattcccggttctcaccattctaagatatttaagytggggtgggtctacggcagcgtctgcaaactaccttatatttttgtacattgtgagccgagaatgttttttacatttgtttaatggccaaaatagaaaataaaaataatattttatatatgtaaaatgtatataaaattcaaatcttagtgtctataagtaaagttttatgagaacacagctgtgctccttcgtttacatactatggtttctttttggctacaatagtagagttgagtggctgtgatagaggctgtgtgcaagtctaacgtgcttactatctatctggctccttacagaaaaagtttggca

SEQ ID NO: 338523 - DNA, 586 bp, Homo sapiens
aatttcacttagctttgtttctgtcactccaatgctagcatcatatgaaaaaatttatactttaaagagctttaaggatacataccttgaattttttacagcccttttatgaagccatcagaaagtgcatttcaaacaagtttcatgtttctccttaaaaatttctcatattgtgacatatggaggtgacaggatcagctcaaggagggaagagaagaagagtggaataagccaaatgattattcccggttctcaccattctaagatatttaagctggggtgggtctacggcagygtctgcaaactaccttatatttttgtacattgtgagccgagaatgttttttacatttgtttaatggccaaaatagaaaataaaaataatattttatatatgtaaaatgtatataaaattcaaatcttagtgtctataagtaaagttttatgagaacacagctgtgctccttcgtttacatactatggtttctttttggctacaatagtagagttgagtggctgtgatagaggctgtgtgcaagtctaacgtgcttactatctatctggctccttacagaaaaagtttggca

SEQ ID NO: 338524 - DNA, 586 bp, Homo sapiens
aatttcacttagctttgtttctgtcactccaatgctagcatcatatgaaaaaatttatactttaaagagctttaaggatacataccttgaattttttacagcccttttatgaagccatcagaaagtgcatttcaaacaagtttcatgtttctccttaaaaatttctcatattgtgacatatggaggtgacaggatcagctcaaggagggaagagaagaagagtggaataagccaaatgattattcccggttctcaccattctaagatatttaagctggggtgggtctacggcagcgtctgcaaactaccttatatttttgtacattgtgagccgagaatgttttttacatttgtttaatggccaaaatagaaaataaaaataatattttatatakgtaaaatgtatataaaattcaaatcttagtgtctataagtaaagttttatgagaacacagctgtgctccttcgtttacatactatggtttctttttggctacaatagtagagttgagtggctgtgatagaggctgtgtgcaagtctaacgtgcttactatctatctggctccttacagaaaaagtttggca

SEQ ID NO: 338525 - DNA, 586 bp, Homo sapiens
aatttcacttagctttgtttctgtcactccaatgctagcatcatatgaaaaaatttatactttaaagagctttaaggatacataccttgaattttttacagcccttttatgaagccatcagaaagtgcatttcaaacaagtttcatgtttctccttaaaaatttctcatattgtgacatatggaggtgacaggatcagctcaaggagggaagagaagaagagtggaataagccaaatgattattcccggttctcaccattctaagatatttaagctggggtgggtctacggcagcgtctgcaaactaccttatatttttgtacattgtgagccgagaatgttttttacatttgtttaatggccaaaatagaaaataaaaataatattttatatatgtaaaatgtatataaaattcaaatcttagtgtctataagtaaagttttatgagaacacagctgtgctccttcgtttacatactatggtttctttttggctacaatagtagagttgagtrgctgtgatagaggctgtgtgcaagtctaacgtgcttactatctatctggctccttacagaaaaagtttggca

SEQ ID NO: 338526 - DNA, 575 bp, Homo sapiens
tgtacctaacagtagataaactgtgaaagtgctgggcataattttctttacctgtctgatcttcataggcacccagacatctatagactattyactcctcacctcaactcaaaatggtgttcttattaaggcacttcatgatttttaaaaatcatatttggaatatattaatatactttgcctctacaacaaatgagggattatggaatataatctcaggatcccaaattgacagagacatttagttggagggacaattattggtaggcctagaataatattttttgtttttctggaaatgacacaccattagttatgaaatggaggaatgtaaaaggtatcatctttccccataacaatacagttccaagtataatttctggtttaccaagaaccttttcaagtaaatataaaatcttccctcttttaggctacatgcctctttctccatttttaaagctattttctattagaacatatgctaagatttattatttgtgcctttatccttagtgaacatacgtatttggtttagtttttttttttttaagtagtatcactttgatccaccctgt

SEQ ID NO: 338527 - DNA, 575 bp, Homo sapiens
tgtacctaacagtagataaactgtgaaagtgctgggcataattttctttacctgtctgatcttcataggcacccagacatctatagactattcactcctcacctcaactcaaaatggtgttcttattaaggcacttcatgatttttaaaaatcatatttggaatatattaatatactttgcctctacaacaaatgagggrttatggaatataatctcaggatcccaaattgacagagacatttagttggagggacaattattggtaggcctagaataatattttttgtttttctggaaatgacacaccattagttatgaaatggaggaatgtaaaaggtatcatctttccccataacaatacagttccaagtataatttctggtttaccaagaaccttttcaagtaaatataaaatcttccctcttttaggctacatgcctctttctccatttttaaagctattttctattagaacatatgctaagatttattatttgtgcctttatccttagtgaacatacgtatttggtttagtttttttttttttaagtagtatcactttgatccaccctgt

SEQ ID NO: 338528 - DNA, 387 bp, Homo sapiens
ctagtttttaacagaatatcttattcaccaacttttaaagccaacttatggtatgacacccttcagtgaacttgggtgaataaattggatcaatggcataaatgttttcctctggatacactccagagtttctgtctaccccaaggcaatggcaaacatggacatgcttattttctgtttttctcaagactacaaggtttctttgtacactgcaagcaaaatttccagrcacaaacatttgccaaggaaatcacaacaaggaacacttatttaacatttgacaggcacattccgcaactctactaataaagatactgtgaggaagatgtggtctagaggtcaatctcatcttcgacagacaagggaagggaagggaagaaggaaaga

SEQ ID NO: 338529 - DNA, 532 bp, Homo sapiens
attctatgcagcccaagttatcggataattcacaatcaggttggggattgcggtaaacgttgttctctcctacgtaccagccattcccctctcccatattctaatttgtagtcagccttcaacagtttagtctatagtggccagctatttattttcccagcttcgtttgctcctggaaatgcacaggtgactacttctggtcaaagmaacttaagagaaagttggctagagcagccgtccccaacgtttttggcactagggaccagttttgtggaagacattttacccacggactggtggggggttgaggggaagaaggggatgaaactgttccacctcaaatcatcaggcattagattctctagccccaacctagatccctcgcatgcacagttcacaacagggttttgcgctcctaaaacaatctaatgcccccgctggtgggaaaggagcggagctcaggccgtaacctttggctttcccggcgctcacctcctgctgtacagcctagcctggttcctaacaagcgagg

SEQ ID NO: 338530 - DNA, 532 bp, Homo sapiens
attctatgcagcccaagttatcggataattcacaatcaggttggggattgcggtaaacgttgttctctcctacgtaccagccattcccctctcccatattctaatttgtagtcagccttcaacagtttagtctatagtggccagctatttattttcccagcttcgtttgctcctggaaatgcacaggtgactacttctggtcaaagcaacttaagagaaagttggctagagcagccgtccccaacgtttttggcactagggaccagttttgtggaagacattttacccacggactggtggggggttgaggggaagaaggggatgaaactgttccacctcaaatcatcaggcattagattctctagcmccaacctagatccctcgcatgcacagttcacaacagggttttgcgctcctaaaacaatctaatgcccccgctggtgggaaaggagcggagctcaggccgtaacctttggctttcccggcgctcacctcctgctgtacagcctagcctggttcctaacaagcgagg

SEQ ID NO: 338531 - DNA, 532 bp, Homo sapiens
attctatgcagcccaagttatcggataattcacaatcaggttggggattgcggtaaacgttgttctctcctacgtaccagccattcccctctcccatattctaatttgtagtcagccttcaacagtttagtctatagtggccagctatttattttcccagcttcgtttgctcctggaaatgcacaggtgactacttctggtcaaagcaacttaagagaaagttggctagagcagccgtccccaacgtttttggcactagggaccagttttgtggaagacattttacccacggactggtggggggttgaggggaagaaggggatgaaactgttccacctcaaatcatcaggcattagattctctagccscaacctagatccctcgcatgcacagttcacaacagggttttgcgctcctaaaacaatctaatgcccccgctggtgggaaaggagcggagctcaggccgtaacctttggctttcccggcgctcacctcctgctgtacagcctagcctggttcctaacaagcgagg

SEQ ID NO: 338532 - DNA, 646 bp, Homo sapiens
ttttttttataatttaatctatactgtatcatatgaactaatttcccagttaaaatattgatgaaatatactgaatatattataattagtagatatatcatttttttccatgatgttgtcactgcagaagtcattaatactatcaaagatcagtatttgataaattggaacatagaaaaagagataagacaggataagtcaaataaataattacttattctttctcactcgctatatatatgtatatrtatacatatatatacacacacacacatctatacacacacacacacacattcaaatatagagtcagtgaatatatccatttagtatttactagtcgcttttataaattaggtattttctttcaagatgccttttttcactataagctagacagtacccaaatgtgaactgggtggaataaattaatacttccctcatttttaggccttccagtatgaaatagctggatttagcctaaagttaagaacttttttggcttttctgatacagtttttatttttagaagtatgagttcttatgtgaagtaatattacatttataaggtcttaaccaatgtcatgaagaatcccggggtggacctagaaggggtaaggttataacaattttaccaagcaaaaaa

SEQ ID NO: 338533 - DNA, 524 bp, Homo sapiens
tttttcatatgttgaaaaaaggaatagagaaatatcagtagacaccgtcatagttcgtggtttgtcagaaacttataaaataacgcaaacaagacaaaagtttccaaagacctctaaaacaaaaagacccagggaagaaataaaaaaggaaataaaagaactggaaagaagtgaggcatgttcagagaaaattcatttagctctaacttttccttcctcactggttagtctaaaaatgctttcattcttctttccctgggacaacttaatactcttccattcatcactccctatgtgaattttttccttttgccaaatgagtttactcagtgccatctgaacaaggaactgtgctttacttatatagatctctcacatctgaggccttcccttccaatgatagaaaagctttccattccttttccaaagtctttctcctatcgaatctagtgcttaaaaccttcagcctacaatcacagtaagccttgatataatctcatkgcatcagttattgaactcatcac

SEQ ID NO: 338534 - DNA, 604 bp, Homo sapiens
ttactctaatttttctctaatttccaaacactacagtggtatctttgtgcaagcctaagtaaattactctctcaggcatcatatttattttagttacatgaatattaaaaaaatggatggctggttatagtatttgctgaagttaaatggaagggcaaaaatgctctctattccttgaatgtttagaaaacacaggggtttagttgaggtaaaaaatatgagttaatgtcattttcctggaagctaccctatttaaaagtagccactaagaaccaaagctattgaataaactgtattttagccatttgataaaacttttcttagaagtattacttggatgtaaatatttaatcttgctgaaattatatttgttcaggaagtttcaaatatagcataaggaatatagtcataaaagatgaatcaaaggagaatgatataatgaaaaatcagaatggaattcaaagatccagtcaattttacgttttttccagatattttactgtcatccaaaaactaaataattacctaytgagcttgatgtaactttttagaggaaaaaaaaaaaagttttattctgagcctctagtttgtaagttctgctgct

SEQ ID NO: 338535 - DNA, 590 bp, Homo sapiens
ttagtttatgtatgatataaaaggcaatggaaatgtttagttttggaacttttttgaaagaatcataaaatatattaagtagcagktacatttttatactattgtataaaaagattttgataccagtcaccaaaaattaatccataattatatgaaataaatatatttaagtgactgttttaggccaagctcggagttagtagttaaatttgaagtatttaattatcacaaccactttctgagttaggttttattattatctatattttaaaggtgagaaaactgaggtttagggggattccaaaatcatcaagtaagtaatgacatcaggacttaaacccaggccatttgaccttaaaagtatagtccattttttttcacattttaataattctgatatcaggttgtggcttaaaattaaggcaaacaattttgtatcatgttgatgttgattgatgcctctcctaatgaggccttttattaaattcaaaatgtgttttaaaattttatggtgtcttaggatcaagaaaatgtcacgttagagagtaaaacaaagaccactagatcttgggaatggaaataaaagtagt

SEQ ID NO: 338536 - DNA, 590 bp, Homo sapiens
ttagtttatgtatgatataaaaggcaatggaaatgtttagttttggaacttttttgaaagaatcataaaatatattaagtagcagttacatttttatactattgtataaaaagattttgataccagtcaycaaaaattaatccataattatatgaaataaatatatttaagtgactgttttaggccaagctcggagttagtagttaaatttgaagtatttaattatcacaaccactttctgagttaggttttattattatctatattttaaaggtgagaaaactgaggtttagggggattccaaaatcatcaagtaagtaatgacatcaggacttaaacccaggccatttgaccttaaaagtatagtccattttttttcacattttaataattctgatatcaggttgtggcttaaaattaaggcaaacaattttgtatcatgttgatgttgattgatgcctctcctaatgaggccttttattaaattcaaaatgtgttttaaaattttatggtgtcttaggatcaagaaaatgtcacgttagagagtaaaacaaagaccactagatcttgggaatggaaataaaagtagt

SEQ ID NO: 338537 - DNA, 558 bp, Homo sapiens
ttccacgattttgtttctccaaaatatcttgtgtcttctccattttagggataataattctttaatggactctatttaatggattctctttcttcccttcaaactaattagcaaaatagacaaattttaaaatatgtgatttttcrtctactaaatcagcagagaacatgataacaaccagcagcagtgggagtgtgggggagctaacgctaatcgacatacagaatgggattggaaattggtatatctttccatagggtaattcgtcaatgttaattgagatctaaagctaagtttccttttacacacaaaagtctcttctaggaatatttggcaaataaagttacctattacagtgctttcgtttattgtactgattgtttaaaaatagcccaaatatcaaacaataaggaatgggtaaattgtggcagaccttttccaaaatttagtatgaattaattcaagtgtcttttgtagagaatgtttacttgaacagactgacagtacagtgttaaaaatacagttacaaagcacttcgcttataggctatactagaaa

SEQ ID NO: 338538 - DNA, 509 bp, Homo sapiens
ttgttgttctttttgcttatactctctctaaagtattaattgggtgcagattatattttagacataagtgtaaaagttaaaatatgcattagaatcagtaaagcagatgatcaacccaacagaaaatcaaatcagtaatgtggagggttagtttgaagaacaaawttaaatagtaaaataagattcaaataccagaaaaaagtatacatgatatttgttatttaaattgacaaaatctatctagaaaagctttattacttttgaatattccaattttctctttattttaattatatatttccagttttgttgcattgtgattaacaaaatatgacctatagagtttttaccttgtgatatacattatgcttttaatgtaccctaatataccttcaatattcatgaacatttaagaaggagtcctttttcattttggagtacaagatttgacatatatcttttaaaacaaaacctagtgcatacctggctgttattagtcaccttttctg

SEQ ID NO: 338539 - DNA, 566 bp, Homo sapiens
acctattacagtgctttcgtttattgtactgattgtttaaaaatagcccaaatatcaaacaataaggaatgggtaaattgtggcagaccttttccaaaatttagtatgaattaattcaagtgtcttttgtagagaatgtttacttgaacagactgacagtacagtgttaaaaatacagttacaaagcacttcgcttataggctatactagaaaaatttatgccaaagcatatgtaatcgactatatacaagtatattatttgtggttaaaatagtgactttggggtatagaaatatgtggatttttgttgttctttttgcttatactctctctaaagtattaattgggtgcagattatattttagacataagtgtaaaagttaaaatatgcattagaatcagtaaagcagatgatcaacccaacagaaaatcaaatcagtaatgtggagggttagtttgaagaacaaaattaaatagtaaaataagattcaaataccagaaaaaagtatacatgatatttgttatttaaattgacaaaatctrtctagaaaagctttattactttt

SEQ ID NO: 338540 - DNA, 579 bp, Homo sapiens
ttttaataaaaataaaccgaggggtatttagaatatttcaagtaaaactctttcttaagatgctgcacattcataattttatatttcacttccttttcagcagcaatgtacagtgtttgtttttattgtaacttccagtacaatgaagtgatgcaatgtaaatagatgcctttcatcataatctcctgtttctagaaatgttcataatttaaataattatgtatctcgacttcatgccaattaaatttgctcatctagggactgaattttaatgaggtatgtgaatgagttttcattgatatgatcttttggtaggaacacaatcaaatgagaaaggtttaatctcacatattttcatttcttcaatatttgaaaaaragagataagaccaaaaaaaaaaaaaaaaaagtcaaacaaaagcactgaacagaagatgggttagagactgaatagtttaagtacatttgaagataatttacttactaacacttgaagtcaatgtgatttagctaaaaaatataagtgttaactcacccccttcaagaaaattaaaataaacacagtgaccacattatgtca

SEQ ID NO: 338541 - DNA, 519 bp, Homo sapiens
caatttggtaaatcactcttcagaataattttccagaacccttgcccagagtgatcataccctgatcccaaaagtgagaatcccatccagaaagtaaaaatttgcttttaaaaaaattattatcacaattctgtttccagttttcttaaaccacagtaagattgtcagtaccgtttcaatttcttagatgtggaagccaagatagtttaagawtgttctgtatgctcttgggagacagccaaatgctgttcagagaagaactgttcaagaaataaagggaccaataatgacccaggaatgccaatctatcttatcaacagcttttctaagaaggtccaaatgtagcttgaattgttgtcagtgtattttagcatataatatcattaattgaattttgctctttttccaatttcaaaaggatggggaaagttctaatgatcgccactggatatatacaatcccctaacgtggcattgtatttcctactgatgcacaatctgtatctgtctcctgacttgc

SEQ ID NO: 338542 - DNA, 552 bp, Homo sapiens
ggaatgccaatctatcttatcaacagcttttctaagaaggtccaaatgtagcttgaattgttgtcagtgtattttagcatataatatcattaattgaattttgctctttttccaatttcaaaaggatggggaaagttctaatgatcgccactggatatatacaatcccctaacgtggcattgtatttcctactgatgcacaatctgtatctgtctcctgacttgcatgcactatagcaatccactggagtgcttcgaatggcacacaatgcctggttcaaagcatgtcagtttatttagcttcctctgtacacattcrgatttatctgtgtatccgtggaaagaacactttacctttaccatcaagcaggtatctggtactccttcctattttgtctctctaaatattgtaagagattaccctcttaaaacttgatgttaactgtcatctccccagaagtccactagaaaaatttattgatgaagtaaagctaaatttattagaactactgcaacaaatgggtaaactacttggggttattattgtcttaaa

SEQ ID NO: 338543 - DNA, 552 bp, Homo sapiens
ggaatgccaatctatcttatcaacagcttttctaagaaggtccaaatgtagcttgaattgttgtcagtgtattttagcatataatatcattaattgaattttgctctttttccaatttcaaaaggatggggaaagttctaatgatcgccactggatatatacaatcccctaacgtggcattgtatttcctactgatgcacaatctgtatctgtctcctgacttgcatgcactatagcaatccactggagtgcttcgaatggcacacaatgcctggttcaaagcatgtcagtttatttagcttcctctgtacacattcggatttatctgtgtatccrtggaaagaacactttacctttaccatcaagcaggtatctggtactccttcctattttgtctctctaaatattgtaagagattaccctcttaaaacttgatgttaactgtcatctccccagaagtccactagaaaaatttattgatgaagtaaagctaaatttattagaactactgcaacaaatgggtaaactacttggggttattattgtcttaaa

SEQ ID NO: 338544 - DNA, 535 bp, Homo sapiens
atattgtgccttagtttcccattttaacgagtttagggtctgggctgaataattttaagacaagtcttgtaagaagagaaatggttgagactgagcagagttcacaacacgatagctttgtattggtgtggatggcaaaataagaattttgaagtgagcctaagtaagcaagctgtttagattccaggagcaaagatttcctggaacaagaaattaggttaattttgtttagttcaaatataattttaacagatttagggccttactttcaattctcattaatttcatttttaaggtactagatcactcttaagcttatttttagtttgatatattaatatatgcttacattattatcttctatgacttctaggaaatttaacaaaagtgattatactatattttktaaatatttgtcttataaagcaccacttgtctaaaaatcttgggacgatttttcaagtgtgataaattcctgtttataggtacatagtaaaatccctaatatctctctcactttaataaaataagtttt

SEQ ID NO: 338545 - DNA, 585 bp, Homo sapiens
caggtttagggtttttttttttttttttttttttggattttttgttactggaccaccatgatactctgggaaactgatactgatgaacattaatttatcttgtaaatatccaagattctataatgtcataatctctaatacatatcattatttccctgaaagtcaaagatgtgttcaacttcttacagtgaaaggtattttaatctattatagattttttgttatagtattaatgagatgaatcgtagtttatttttcactcatcaaaaatattcttttttctttcttgtactttcagataaacccatattctagaatattccatctatcaatatcattctgcttagaagaaaccagtatttgagagtctgttgtgtgtctcaacaacataatgcaaacattttcttattttctcataagtactgttctttctgcaatccaatgacataatgcaaacattttctcattttcttataagtgctattctttctccctaaatctagcatcacaaaagaaaacaaagcagtagacaataacagaagagagaatttccagtyagtaataatatgcttctgctccgtgatt

SEQ ID NO: 338546 - DNA, 441 bp, Homo sapiens
tcagggtgacagagtgagactctgtcttaaaaaaaaaaaaaaaaaaaaaaaaaagccacacatttcagtgattcaaccatagcaaaaaggcatcttccagctacttgtaggaatctcatgtccgccatgttctgactcctatctttttgaatatacttagctcttaccagttaccctggtgaactctaatcagtcaaatagaaatacctcattttccatatataccaacctatttttaatctgggttttggaacatgcatgtctttgcttggaatgtcttcttttccacaccacagattcttattttaccatctgttgcgtagctctccctggyctatctgctatttactctgtggtattcctacttcactttatgcatgccatcattattgtgctcacctctctgtgttttgctgggtggtgatttttgctgtttataaa

SEQ ID NO: 338547 - DNA, 564 bp, Homo sapiens
aattttccgtttgcaagataaaatttaaaaactaaatacaatttcaagtgatattattaaaagtctgcagagatggttgccttattagggaactagaatttacaaccatggctttgataaaatgtggaatatctcttttttaattctctgagttctaaaatagctagacttgacragagggaaattctccttgttgccaattctcaatttccatgcaactttcaaccttcagaatactgttggtactctgtcttggcatggctagaatttcaaatgaacttctaacgataactgatttgaatgagttcagggggaaaacattcaatgagctaaattatttaaggacacaataaagtgcttagaggtttatatttcacataaaggctagttaagtagccttttaaaatattatttatggagatcatgactcatctttgcatatctcatgtgctaattcccagaccacagaccagtgcagtaaaacagctcgatgacatgagtgccatttaagaataagctgtctgtgcaaggcacttttttgtttgttattattttttaccatgt

SEQ ID NO: 338548 - DNA, 591 bp, Homo sapiens
ttttaaaatattatttatggagatcatgactcatctttgcatatctcatgtgctaaytcccagaccacagaccagtgcagtaaaacagctcgatgacatgagtgccatttaagaataagctgtctgtgcaaggcacttttttgtttgttattattttttaccatgttttacattttgtgtcatacctccttcccttccataaatgtgcaattcatatttggaatgatgtgtatctgtgctaaaagcagatgtggatgaggtacgatgacaatccagtttgttctgccttatgtctacaatgcttctaatctaccaatactcttccacatcaacaatacctggaattctcaccattttagatgagaaacttaaagctctgagaggttacgtgacttacttgatatcatgcagggagtgttacagccaccattcaggctagtcctatttacctctaaattctattttcttctcttctcctatgtttttcaagcttttctgattggagtttattgtaaaaatcacactttacataggaccaaatacatacacgcaatagaaattgtccaaaaaatgcttatttttacaatatgt

SEQ ID NO: 338549 - DNA, 582 bp, Homo sapiens
gactttacaatccacaatgcatggtttaaaaaatcactaatctgcatcttatttcttggcgttatcttgcaygtgagtaaatagtttttggaaattaacttcagagggctatagaccaattgaggtaaaagaagtagaaaaactggtggagagagtgaatgtctcttaaatgtaattaaatttaatttaaatttaaagtctgttaaagacctatgtttagctcctttgcaaataaataggacttgttttggtaggaaaccagtaagtcttaatcctgatatttcttcaagtgtattttgagaaaagtcatgcttacattaatgagttttaccaaatcagtaatgataataatagttttaaatctaatcagagcaaagcacaaacaagtctatttggaggagcaaaattgagttaagggtaagagcacactttgaaaatgatttctctggattgttgtattcttagagatatctggaggaatttatttgggcaaacctgaggcagtcatttgctattatttctccttctaggtttctgtgctgagccagcatattcctggcactgtagcgctttcaaagctgt

SEQ ID NO: 338550 - DNA, 582 bp, Homo sapiens
gactttacaatccacaatgcatggtttaaaaaatcactaatctgcatcttatttcttggcgttatcttgcacgtgagtaaatagtttttggaaattaacttcagagggctatagaccaattgaggtaaaagaagtagaaaaactggtggagagagtgaatgtctcttaaatgtaattaaatttaatttaaatttaaartctgttaaagacctatgtttagctcctttgcaaataaataggacttgttttggtaggaaaccagtaagtcttaatcctgatatttcttcaagtgtattttgagaaaagtcatgcttacattaatgagttttaccaaatcagtaatgataataatagttttaaatctaatcagagcaaagcacaaacaagtctatttggaggagcaaaattgagttaagggtaagagcacactttgaaaatgatttctctggattgttgtattcttagagatatctggaggaatttatttgggcaaacctgaggcagtcatttgctattatttctccttctaggtttctgtgctgagccagcatattcctggcactgtagcgctttcaaagctgt

SEQ ID NO: 338551 - DNA, 559 bp, Homo sapiens
caataataacaataacgaaatatctgtttattgattaccttctgcgtgtcaagcaataattagataaacactttccctctatccttttattttcataaaaatcttatagagtattactttaaccattttgcaaatgatgaaattataacttcctagaaaacctataaatttgctgtacaactattgtcaaaggtaaaatccaaacctgtattagtccagttccaagtgggtttgcttttctgccatgctgctttaaaaattcactttctcttctcccaccttgaaattcttaaatactgttggagaccaaaaacaaaattataaaaacaaaaatcgtacaaccartgtggtttgaaaccactgaaagttcatggtgtctgttttcctttggcttctccataatgcaagtcaatccttatttatctttttgactctttattaccccttcccatcagcaattcttctgctgcttctcttgaatacttgagctgcccattttgccatttctctacttccttaagaaaatagcatcttttctcatacctgtctgtgtcaccgt

SEQ ID NO: 338552 - DNA, 559 bp, Homo sapiens
caataataacaataacgaaatatctgtttattgattaccttctgcgtgtcaagcaataattagataaacactttccctctatccttttattttcataaaaatcttatagagtattactttaaccattttgcaaatgatgaaattataacttcctagaaaacctataaatttgctgtacaactattgtcaaaggtaaaatccaaacctgtattagtccagttccaagtgggtttgcttttctgccatgctgctttaaaaattcactttctcttctcccaccttgaaattcttaaatactgttggagaccaaaaacaaaattataaaaacaaaaatcgtacaaccaatgtggtttgaaaccactgaaagttcatggtgtctgttttcctttggcttctccataatgcaagtcartccttatttatctttttgactctttattaccccttcccatcagcaattcttctgctgcttctcttgaatacttgagctgcccattttgccatttctctacttccttaagaaaatagcatcttttctcatacctgtctgtgtcaccgt

SEQ ID NO: 338553 - DNA, 560 bp, Homo sapiens
cactgaattggataataattttagaatattgaaagaaattttcatttgttttttctgctattctcaatgtaacagctgcatatatgatatgcttttatgtaaattattaacattttttccaccactttctttaatctagagaagaagttggtaagtttttctttaaacagccagatagtaactaatttaggattcatggaccatatagtctgcaagttatatctactgcattctgccattgttgctcaaaagtagccacagataaaatgaaaataagtgagcatggctgtattctccctgaaaaactttatttacaaaaaaaagtgcagataaattttggattgagggtcatactttcatgatcctcgtgtataaatcaacaagcaaataaatcaacctttatttaaaatgtttgccaatttccaccgtgtaaatattsccatatggtcaatttcaatctccctgtataatgtcactggatctggagctggaaaaagctatgcgttagcacacaattatatagtatttccactgtacagatgaaatacacacaaataaac

SEQ ID NO: 338554 - DNA, 560 bp, Homo sapiens
cactgaattggataataattttagaatattgaaagaaattttcatttgttttttctgctattctcaatgtaacagctgcatatatgatatgcttttatgtaaattattaacattttttccaccactttctttaatctagagaagaagttggtaagtttttctttaaacagccagatagtaactaatttaggattcatggaccatatagtctgcaagttatatctactgcattctgccattgttgctcaaaagtagccacagataaaatgaaaataagtgagcatggctgtattctccctgaaaaactttatttacaaaaaaaagtgcagataaattttggattgagggtcatactttcatgatcctcgtgtataaatcaacaagcaaataaatcaacctttatttaaaatgtttgccaatttccaccgtgtaaatattgccatatggtcaatttcaatctccctgtataatgtcactggatctggagctggaaaaagctatgcgttagcacacaattrtatagtatttccactgtacagatgaaatacacacaaataaac

SEQ ID NO: 338555 - DNA, 458 bp, Homo sapiens
cttaaaatggaagaatatatttaaggtacttacaaatagcacttaatataagttgtttatcattttatcatgaaatcttcattgctgttgtaattaaaattaatagtatatcaacacataaaatagagataacagatgtattgaagaagttcatctgtaacttcccaaataaatttattgtggaaaaccataaaatagrttctgattactttgattagatatctctacaagcaggtacgctgatgcctcagctctaaaagtgagtccgcattggtggagttaattttcttaggttcgtccattacaaatcccaattctatcagcatctgacatagcagctcacacatttcactgcaggccccttaagaaaattagctttattaactaagtactaaaaatagtttataatccagagcaaacaagaactgctatacagcacagctgtgttttccttgaac

SEQ ID NO: 338556 - DNA, 546 bp, Homo sapiens
agttaatatatattaatgaatcatgttgccactgagttgttaggatataactattaaggatataaaaattaagttgtttacacctaactaattaacaaacagaactcacatatttcttttggcctaggggtmccgtgtaaatattactaagacactaaaattgctgcaaaatgagaaagtttagaaacctccaggttgaggagttattctaagtgttactaaggctccttagatccttgtgagcctataaaataattaaaaactcccatcatgagaatgtgtcaaaaactctaattttgagaatattgatccctatgtgtttacttgaaacaaaagacatattggggcaagttacttagagacaaatttcatctgctgtgggtcaaacatcacctaatatgtaagtgttaaaatggaatattcaggcattgaagttgtcattgttataagacccttgttacagcaaagaaactgaggtacagagagaattattaacacagcaaagcaatcagaagacgtgactcaatattgtgctttagaggacat

SEQ ID NO: 338557 - DNA, 575 bp, Homo sapiens
aatcccaattttcaacaacagaaaagaattcaagggactgtcgtttcccaggtcactgtaagaaagagttttaaaactataaagctaatcctcaccccaaaaaaatctcaaatcaggtgatttttaaaatttcaaatccatcctaaacatgtgtcaactctttactatcagtccactcytaaatgatgacaaagtaaagctttcaacttttaatggctttttgtttttgatattccttttctttctccttaacccaaatcacatcttgcttggcaaagactttttattattttttattttcttgattcataggtccttaatgaaagcaaaattcaaccttatattggtcttgtatgaattagggaccatgtaaacagtacttaacagttctaattgaaggtcagtaaatccccaagagattaaatgaatcctgcagggagccgtgtaaatctccctctcttttatggcagaacagccaagcccccagactgccttgtgcaaggcttaataaatatggtatgcatctaatcaaaaccattttgcacccaaagaggttaggggtgtaaatcacaatt

SEQ ID NO: 338558 - DNA, 580 bp, Homo sapiens
gggctccgaggggctttgtagctgctgccacttaatgtgctaacggagatggcaccacatgagacaccagccacagatggggcccctccagcaaaggaaggcatggcgaggtggcaggggtgagctgaggcttctctccagaggcagaggagggrcactcattgctggagtttctgtctgtctttttcgtcttttgatgcataaatgttcagctgaggtcatgaggttgggaaagcgtggggatgcagatgagtgctgtccaatagaaatataacaccagacacatttgtaatttaaaattttctaaggccaagcatggtggctcatacctgtaatcccagcactttgggaagccaaggcaggaaaatcaattgaggccaggagttcaagaccagcctgagaaacatagcaagacctcatctctacaaataatttaaaaaacaaattagctgggcatggcgatgtgtgcctgcggtcctacctactcgaagggctgaggcaggaggatcacttgagccctagtagttgaggctgcagtgagggaggatgcactccagcctggctgacagagcaagagccc

SEQ ID NO: 338559 - DNA, 580 bp, Homo sapiens
gggctccgaggggctttgtagctgctgccacttaatgtgctaacggagatggcaccacatgagacaccagccacagatggggcccctccagcaaaggaaggcatggcgaggtggcaggggtgagctgaggcttctctccagaggcagaggaggggcactcattgctggagtttctgtctgtctttttcgtcttttgatgcataaatgttcagctgaggtcatgaggttgggaaagcgtggggatgcagatgagtgctgtccaatagaaatataacaccagacacatttgtaatttaaaattttctaaggccaagcatggtggctcatacctgtaatcccagcactttgggaagccaaggcaggaaaatcaattgaggccaggagttcaagaccagcctgagaaacatagcaagacctcatctctacaaataatttaaaaaacaaattagctgggcatggygatgtgtgcctgcggtcctacctactcgaagggctgaggcaggaggatcacttgagccctagtagttgaggctgcagtgagggaggatgcactccagcctggctgacagagcaagagccc

SEQ ID NO: 338560 - DNA, 623 bp, Homo sapiens
aatggtacagccctttggaaacacagtttggcagtttcttttgtagcaaacatactcttactaggttacccagtaatgctattccaaggtattaacccaaaagaaatgagacatacatctacaagaagacttatatgtcaatgttcacaacagcatccttcataatcaccaaaaaccgaaaatagcctaaatgtctctcaataggtgaataaatagaccaaatatggaacaaccatactgatatgatttggatctgtgtccccacccaaatctcatgttcaaatgtaatccccagtgttggaggtggagcctgatgggagatgattggattgcgggggtggatttcctccttggtactgtcatcaagatagtgagtaagttcttgagaratctggttgtttaaaggcatatagcacctctccccttgctctcttcctcctgttccggccatgtaaagtgctggcttactctttgccttctgccatgattgtaagtttcctgaggcctccccagaagccaagcagataccaccatgcttcatgtacagcctgtggaactgtgaaccaattatacttattttctttataaattatccagtctcaagtatttctctatggcaatgc

SEQ ID NO: 338561 - DNA, 424 bp, Homo sapiens
acatcttgtcggcactcagaatgcccacgacagcttctcctgaaatattttccaggtgagctctctgactgccccagactctcagacttgcctctgattactcctgttccctcacggctggaatcgcctgttgacaagacctctcactccttccaagcccagatctgaccttccccaatttcttagatcaaatgcagaagcaggtgcttaaggagggtgactggatggtgttaaaarctgatttctcctcctcttaacatgcgagttggaaggtggtgaccagaggggaaacatttagaggcaatgttcctccaggtgccatttccacacagtgggcctggagcaaaggctgctccaacagcaggaagaaaacccactggggctgcccgctggggctctgggcctgacacaggggcacattgga

SEQ ID NO: 338562 - DNA, 536 bp, Homo sapiens
agagtggggcttacctcagaagctgtagggacccaaaggggtggcccatgttctccctatctccttattcctgggtttggctttcttctgtgtttttccttttctctctaccagaagatgggccttctatccatttgtggaccatkcagccaggtggagaagtgactggctacaggaatcccaggctccacatattccagcctacttggccacacagcatacaaaatcctagggaaggattctaattgtctggcttgagtcatccaatcagaggtcagggtgatggtcccatcagaaccacttggagtgagtgagcaggagtagcctcaaagaaggggggggcacttttaccagaataacaggggaagtgaggctggaatgacaaaaacaaccgctgtctactctacagaaaccaccaagtttaatactcactctagttatagtacttgatcaattaacatgattacttctttgaccctctcctaaacatcaaaactcctaacaatttggtcaagttagaatgccattggccgagc

SEQ ID NO: 338563 - DNA, 555 bp, Homo sapiens
aatatcaacattacaggaattattaattacctgctttgataaactattaaaaatttgttcataaacactgggtgtggtggctcacgcttgtaatcccagcactttgggagaacgaggcaggcagatcacgaggtcaggggtttgagaccagcctggccaacatggtgaaaccctatctctactaaagatacaaaaaattagtcggatrcgcctgtaatctcagctactcgggaggctgaggcaggagaatcacttgaacccaggaggtggatgttgcagtgagccgagatggcaccactgcactccagcctgggcaacagggcaagactccgtcttaaaaaaaaaaaaacaataagacagaaatgctcatgttaaaatattacatgagatatgcagtataaaatattaccttaatggtattattaaacttaggtgtgtgttttcaaccattagagaaaaaacactgaaacaaaaacactccaagacattaagtgtggttatgtttggacaaaagagctatgagtaatgttttcttatgtcttttatttttctgaa

SEQ ID NO: 338564 - DNA, 555 bp, Homo sapiens
aatatcaacattacaggaattattaattacctgctttgataaactattaaaaatttgttcataaacactgggtgtggtggctcacgcttgtaatcccagcactttgggagaacgaggcaggcagatcacgaggtcaggggtttgagaccagcctggccaacatggtgaaaccctatctctactaaagatacaaaaaattagtcggatgmgcctgtaatctcagctactcgggaggctgaggcaggagaatcacttgaacccaggaggtggatgttgcagtgagccgagatggcaccactgcactccagcctgggcaacagggcaagactccgtcttaaaaaaaaaaaaacaataagacagaaatgctcatgttaaaatattacatgagatatgcagtataaaatattaccttaatggtattattaaacttaggtgtgtgttttcaaccattagagaaaaaacactgaaacaaaaacactccaagacattaagtgtggttatgtttggacaaaagagctatgagtaatgttttcttatgtcttttatttttctgaa

SEQ ID NO: 338565 - DNA, 566 bp, Homo sapiens
gccaacactactgactagagacccaagagttattcctcctcccttctccctggctaccatccgctgtagaggctagaaagcgaaacacggtcagcctcccttgcagctatgggactagtcctgttcaggaaacagaaatgaaagccsgcaagggagaattttggaaacattatatataatttgataaaaagagacagccttaacctggaccttcccattttcccttttcttctttcccctctggcaatgcaggaagtaaccatcttgtggccatgagggagagcccaagagaatcccaggagctctcaaaagaatactattggcttactgagccaatgccaacaatctactgcatactcacaaggacttctgatatgtgggtgatttaagcctctgtcattaggttttccatgatttgcagtcatttgcatttttagctaacacaaacacaagagggaaaagtccttcctttccttaggcccagttcccccgaatctcaacttcaagcagcctagatgtcatcaggaatacctccagcttgttggaaaacgttggcttctgcttca

SEQ ID NO: 338566 - DNA, 599 bp, Homo sapiens
gtatctgtgttgactgattatacataggacaaatagccttgtcttaggttaggccagatgccctagaagcagagcctgggacaaggattaggtgccagtgatttattgagtgcccttaagagaaacctatattggtatggaagaaacaagatagaaaagtggaagaagtcaggcaatgatgtggtttcaggtaaaatctagcctcatcctgatctgaccaggagccctggggtgttaatggcactgcacaccttgagatgaggagacttgacttttgtaccccagcatatgccagtcactgactatgggctgccatggaagggaatgtaaaactctcagtttcctgcaggcaaagtggctccagtcrctccaaagcaattctctgaagaagggttggaggtatgagcagttagcagcaccctacacaacagctgggtgatgcagactcagttgccaaagaggatcccaggggatcaggtaaggcaccaacagcatccctacagatccccaaatctgcaaaagggagacacaacgagatgactgtcagtgtagcctaatttctccaggaaacagcctatccacaccaccaggaagaaagg

SEQ ID NO: 338567 - DNA, 599 bp, Homo sapiens
gtatctgtgttgactgattatacataggacaaatagccttgtcttaggttaggccagatgccctagaagcagagcctgggacaaggattaggtgccagtgatttattgagtgcccttaagagaaacctatattggtatggaagaaacaagatagaaaagtggaagaagtcaggcaatgatgtggtttcaggtaaaatctagcctcatcctgatctgaccaggagccctggggtgttaatggcactgcacaccttgagatgaggagacttgacttttgtaccccagcatatgccagtcactgactatgggctgccatggaagggaatgtaaaactctcagtttcctgcaggcaaagtggctccagtcactccaaagcaattctctgaagaagggttggaggtatgagcagttagcagcaccctacacaacagctgggtgatgcagactcagttgccaaagaggatcccaggggatcaggtaaggcaccaacagcatccctacagatccccaaatctgcaaaagggagacacaaygagatgactgtcagtgtagcctaatttctccaggaaacagcctatccacaccaccaggaagaaagg

SEQ ID NO: 338568 - DNA, 560 bp, Homo sapiens
tattctaatatcaataattatgataatgattaatgatgatcagaacaactagtattatataccctggagtcactatttagcagtaatcaaactaagtagcattttcaactagcatttcaaccctaacaatgacttctgacaaatcacccagtctttcccattcttcattttcccacctagtctctaggactagatgacctatraaggctcttttaactctaaaactgggattctgtaaagtaaggtcttgaggatacttcatctgtgtgcccaaatttggagctgtggctttgcagagcgggcttctggagtctcatttctatgaggactctatagattgggagaggggagttggtaaagagaattccttccgtgactgataaagaagccctgggactctggaaaaatcttttcaccaaagttttccccctaacacttatggtaattacacaagtgggcaatgtgctctcagaagttgaggccactcattcattcattccatatgcatttgaggtgtctctcaagccagtgaggctgtacatgtccattttcagttataa

SEQ ID NO: 338569 - DNA, 611 bp, Homo sapiens
atgaaggaaaaccttataccctcttactatggaactcaagtcttgctcctcaaggaagacaagtacttttctctccagatccatctttttctttgctccaggttcagggacttggaggtttggcattcaccgcaccacaatgcaaagccagggtggcttctggagaagtcagatgttaagggactttaagacaaaccccartggagtttgagaaggaagacccaaatgtgtagttttcttggttcagtctacagcttccacaacccatctgctggttccaggtttgagaaaaactctcaagagtcagagtcagggtcagcatcaagggaaagagaccttgtaaaggtaccaacagcaccttgtcccagacatcatgcacttactctatgcataatgtcaggaactctacatggtttacttctggctctctcagcaatcctgcaagggaggccgtatcatacctattttatacatgagaaagctgagcctcagaaacgactagttccatggcttcacgatgggtaccaccaagggtttggtgagggaattgggggatgggggcagtgccaggccaacaggtcccccatccactcttcagtctgagcaatgcc

SEQ ID NO: 338570 - DNA, 553 bp, Homo sapiens
tcaaagggtacaaacttttggctataacatgaatatgctctgaagatccaatgtacggcatgatgaccatagttagtaataatgtattgtgtacttaaaatttgctaagaaaatagatcttaagtgttttcgccacacacacaaaattggtgactatgaggtgrtggacatgttaataagcttggttgtaattatttcacaatgcacacatatattaaaatgccacattggacaccataaatatatacaatttttatctgtcaagaataaaattttttcttataaaaaaagaaaatataatgattttatgccatataaacatggctgtactgtggagcagaatgcaatgtttacctgagtttttaatataaagcccaagatactgaaaacacagaaacaagcacacccccaagcccagtttcctgtaatctggctgacacttgctcctaaaagattacaaacagctgcagccctttgaatcgctttgtgcctcagtttcctcatttgccagattaatatgacttcggagtcaagagaccttgatgaaaacctg

SEQ ID NO: 338571 - DNA, 580 bp, Homo sapiens
agaagggaaggagttggtcgttaattcatctggattttgaaattgggctttttcatgtgaaagaggcaagggctgtgaggattttgttcattctgtctctggtgtcacatctactgtattcagttaatatttactaagtgaaacaaattggtttacaaagagcattgatataatatcaaccgatatttacagaacattttccaaatgccaaagccccattataaatagcttccgtgtactgtgaagtggattcccatttttatctctactttaaagatgaggggactgaagctcaaagaggtgaataacttacctaaggttacacagctagaaagtcagagcaggtattcaaatctgggcagccaaccacaatactatattatggatggatamgtggaaggctagatattggcatgacagatgaaagactttcagagaaagttaaccccatcccatttatttttagtggataagagaagcacatggctggattccaggtttaagcagtgaatttgtagcagagccagagtttttgacactttggccagcgcttctgcctctctctctgttgcctcatttt

SEQ ID NO: 338572 - DNA, 558 bp, Homo sapiens
atgtatgtcagatactcagcacagggcacctctaagaaaatgtgaaatcaagcctccgtctcatgctctcgccacataactatagttcagtgtcaatggcagagtctgaagtcatcatgctcagctggcttccggctcctctcagtagaaatggctgttttctgttattttctggggttgcaaacccaaatgcaygtagaggccaggaatgaactgaacctactatgtgccagattcacccatgtgatgtttagagtctcccaacaaccctgtgagagagccagggcttccatattcatttctcagatgagtaaactgagacttagaaaggtaaagagacttgtccagtcattcatgtacttagtggttgacgtgagacttgaacccaggcagcagtctgtctccagagcttgggctcttggccacagaactgctcattttttcacaactgcattttttctttttcgtgtgtgatgcacattatttaatgcattccttcttattttgcactaaggtattttggttcaatttttgtaattttattttacatctctggaa

SEQ ID NO: 338573 - DNA, 435 bp, Homo sapiens
tcattcaggatatctgcttcctgtctgtaaaatggggtcatagtagctgcttcctgtctaccccactgttgtgaaagtcctttgcaaatccatagcacaggtcaatcccattcaataaacatttactgagtgccactgtgtgcaggcattgtgttgggcattaggagaataacgagtaagaaaaaaagacctcctctgtgtccagtaggggaagagaattaaacgggatgctctgtcatacagtgtgatgagccctgatgyaagataagtatgtaatgacaatgtaaataatgatacatgataaatggttaaaatcacacctactatttactaagggattccaatgtaccactgcctctgttaaacaagggaatttgtctagtactacagtgaagagcacagactctccctgtgcttgaattttgtttccaccat

SEQ ID NO: 338574 - DNA, 567 bp, Homo sapiens
tatttcaaagcatagggttgttctgatttttttaaacctgataaatgaaaatcaagacttatgaaagagcagagaaaaagaaagcaaaagttcacaaaaagatttgtccttgaccaaaagatgctcctagtgcatttttgatgacttggcctacaagaagtgagtaacaatagagtgagaaaagtaattgagaggccagagaagcgggttttattctgggatatattactctctaccagtgtagcatgttggtaaagtgacctctctgtccctttgtttccctcttatagaataagggagggttggaaggggttaccactgaggtctctttcagctctgatcttctagagctcataagtctattgttaacattgctcaaatcaaaaagttaacttgaatcccttcatcagtggctaagggagcattagaattgagttcagtaagttttctgcactcaaaatatataayggcatttgttgacttggaaacttccaggtcttttgatctaagaacagggcgttctggagtgaatgagcaagacaggaaatcaaccacctcacacatgaa

SEQ ID NO: 338575 - DNA, 579 bp, Homo sapiens
tgcttctagaggagagttttccatgcaggaatttgctaagcaccctgtctcgtgcaaatgacagtggaagatttagtaacctgaggttgtcctgcctccctaaatcccccaactagccttccttcttcctacttccactgccaggtgccttcttgttcttctattcttttttttcttctgaagacagtatcttgctccatcacccaggctggagtgcagtggtgtgatcatagctcactgcagctttgaactcctggtctcaagcaatctyccacctcagcctccagagtagctggcactacaggagtgtgctgccatgcttggctatttttttttaattttccacaaagatggggtctcactatgttgcctaggctggtcttgaactcctggcctccagctggcctgctgctttggcctctcaaactgctgggattacaggtgtgagccacactgcctggccattttcttgtatcctgatttacttcttgcctctcctcccattgcttttttaaaaaattgtggtaacagatataaagtctatcattttaactatttttaagcatacaattcagttca

SEQ ID NO: 338576 - DNA, 626 bp, Homo sapiens
aaacatcaattgaagagagtgccacagcatcacaaatactaggaggtaggatggaaagttaacatagttatttatacaggaagttatattaagagttcattatatatcacgttttctttttactttctaaaaaatgtctttttattaggctggatttctgactgtttagatagtatttttgaagtcacttcataaatttggccccttcaagttacgtctttttarcagtctatttaaggcttaatataaatcatttccgttaaccataaagtactctggctgacttgcaggccacacacgaaagatttgaacttattatgaatcatgaaatgttctagagaaacttcaggttgtttgtgtcataggtcatgataggaagataggtgaaggggctgtgccaggcaacttaacacatcagagggcctggaaaaataaagtagattgtggggaaggagggtcagtacaggacttgcccagcacattaaacaggaagtgaaatttagtcactagtggggcagaaatggtcaaaccacacagttcccaagtattcccaacttcccccattttgaagagcatattcatcttaacagagggtacataaggaatgaagcagatacactcatttt

SEQ ID NO: 338577 - DNA, 596 bp, Homo sapiens
gcagctctctgccaagtgctactacagagattgtcggcwgtctgccagctcccaaatgtttctaattcaaagcattttcccatcaccctctacagctaggatttctcaacaggggcacaattgacattttgggtgagataattctttgttgtagggacctgtcttgtgaattgtaggatgtttagcagaatccctatcctctactcactagatgccaataacaaccactcccctacacccggtgtgacaagaaaacctcaccagacattgtctaatgtcaaaactgtccccagttgaaaatgattgttctacagagataattcagagaaagccctgcccctagggctgagctaataattcagcattcagccaggtgcagtggctcatgcctgtaatcctagcactttgggaagctgaggtgggtggactgcttgagcccagaagttcaagaccagcatggggcacatagcaagaccctcccccgcccatctctgcaaaagatcataaaaaattaggctggggacagtggctcatggctgtaatcccagcacttcgggaggctgaggcgggcggatcacctgaggtcaggagttcga

SEQ ID NO: 338578 - DNA, 635 bp, Homo sapiens
tagttacttttcatactgctatgaagaaatactcgaaactgggtaatttataaagraaaagaggtttaatgtactcacagttccacaaggctggagaggcctcagaatcatggtggaaggcaaagaaggagcaaaaaggtatgtcttccatggcagcaggcaagagagcacgtgcagggaaactgccctttataaaaccatcagatttagtgagatgtattcactatcacgagaacagtatgggaaaaacctgctcccatgatttgattacctcctaccaggtccctcccacgacacatggggattatgggaactacaattcaagatgaaatttgggtggggacgcagccaaaccatatcgggtagcaacaacctagggtcagttttgcaggtggtaaagccatttaccaagatagttgtaggtaaagaagggcagatttattagagaaattatgaaaatatgttgcagtgggcagctcagcagagaaggggctacctgcaaagaggcaggggctggaggaaagttttatagggtcctgctgaagggtgctacgtgtggaatgaggtcattgtgcccgcaggttgtttgtgattagctgtctctaacaattgttcatacagtaattgttcattat

SEQ ID NO: 338579 - DNA, 635 bp, Homo sapiens
tagttacttttcatactgctatgaagaaatactcgaaactgggtaatttataaagaaaaagaggtttaatgtactcacagttccacaaggctggrgaggcctcagaatcatggtggaaggcaaagaaggagcaaaaaggtatgtcttccatggcagcaggcaagagagcacgtgcagggaaactgccctttataaaaccatcagatttagtgagatgtattcactatcacgagaacagtatgggaaaaacctgctcccatgatttgattacctcctaccaggtccctcccacgacacatggggattatgggaactacaattcaagatgaaatttgggtggggacgcagccaaaccatatcgggtagcaacaacctagggtcagttttgcaggtggtaaagccatttaccaagatagttgtaggtaaagaagggcagatttattagagaaattatgaaaatatgttgcagtgggcagctcagcagagaaggggctacctgcaaagaggcaggggctggaggaaagttttatagggtcctgctgaagggtgctacgtgtggaatgaggtcattgtgcccgcaggttgtttgtgattagctgtctctaacaattgttcatacagtaattgttcattat

SEQ ID NO: 338580 - DNA, 635 bp, Homo sapiens
tagttacttttcatactgctatgaagaaatactcgaaactgggtaatttataaagaaaaagaggtttaatgtactcacagttccacaaggctggagaggcctcagaatcatggtggaaggcaaagaaggagcaaaaaggtatgtcttccatggcagcaggcaagagagcacgtgcagggaaactgccctttataaaaccatcagatttagtgagatgtattcactatcacragaacagtatgggaaaaacctgctcccatgatttgattacctcctaccaggtccctcccacgacacatggggattatgggaactacaattcaagatgaaatttgggtggggacgcagccaaaccatatcgggtagcaacaacctagggtcagttttgcaggtggtaaagccatttaccaagatagttgtaggtaaagaagggcagatttattagagaaattatgaaaatatgttgcagtgggcagctcagcagagaaggggctacctgcaaagaggcaggggctggaggaaagttttatagggtcctgctgaagggtgctacgtgtggaatgaggtcattgtgcccgcaggttgtttgtgattagctgtctctaacaattgttcatacagtaattgttcattat

SEQ ID NO: 338581 - DNA, 635 bp, Homo sapiens
tagttacttttcatactgctatgaagaaatactcgaaactgggtaatttataaagaaaaagaggtttaatgtactcacagttccacaaggctggagaggcctcagaatcatggtggaaggcaaagaaggagcaaaaaggtatgtcttccatggcagcaggcaagagagcacgtgcagggaaactgccctttataaaaccatcagatttagtgagatgtattcactatcacgagaacagtatgggaaaaacctgcycccatgatttgattacctcctaccaggtccctcccacgacacatggggattatgggaactacaattcaagatgaaatttgggtggggacgcagccaaaccatatcgggtagcaacaacctagggtcagttttgcaggtggtaaagccatttaccaagatagttgtaggtaaagaagggcagatttattagagaaattatgaaaatatgttgcagtgggcagctcagcagagaaggggctacctgcaaagaggcaggggctggaggaaagttttatagggtcctgctgaagggtgctacgtgtggaatgaggtcattgtgcccgcaggttgtttgtgattagctgtctctaacaattgttcatacagtaattgttcattat

SEQ ID NO: 338582 - DNA, 503 bp, Homo sapiens
gagggcccaggaagcctgagggcaggtggccctgagaaaagctaaatccctgcaaagctcctcacccagcctgtaacactaaatcactcatacacagggactcaaggaggcgtccgggagatgggaagctgcagagacataatccaggacacaggaggtggccaaagccattggcagtgatttctatgaggactgaagtagtccctgatgctggcttttctcagactggatccctccgtccctggctgttgaaggagcacagaagcrtggcagaaaattcaacagggacaggaatcgttttttttttttttttttttttttttttggggagacggagtctcgctctgtcacccaggctggagtgcagtggcatgatctcggctcactgcaacctccgccttccgggttcaagcaattctaaatgtgagtcaccgtgcccggctccaacagatctttttttttaaaaaaattattaaaattattttattgatacataatatttg

SEQ ID NO: 338583 - DNA, 601 bp, Homo sapiens
cccagggtcttgggcagccccgcccctgtggctttgcagggtacagccccccttctggctgcattgagtgtctgcagcttttccaggcacacagtgcaagctgtcagtggatctaccattctggggtctggaggatggtggcccttttctcacagctctgcttggcagtaccccagtggggactctgtgtgggagctccaaccccatatttccctttgacactgccctagcagaggttatccatgagggcccccccctcccctcccccccacagcaaacttttgcctggatttccaggcattttcatacatcttctgaaatgtaggcggaggttcatgaacgttaattcttgactttggtgcatctgcaggcttaacaccacctagaacctgaaaggcttggaacttgcaccctctgaagccatggcctgaggtgtaccttggccccttttacctatggcaggagcagctgggatgcagggccccaagttcctaggctgcacacagcagggggttctggacccacaaaaccatttttccttctaagcctcctggcctgygatgggagggtctgctgtgagggtctctaacatgccctggag

SEQ ID NO: 338584 - DNA, 609 bp, Homo sapiens
cactgaactttcaagccatgattattgtattagtttgttccggcmttgctatagagaaatacagaagattcgacaatttatgaagaaaagaggtttaattgccccactgttctgcaggctatacaggaaggatgatgctggcatctacttagcttctgggaagactcaggaaacgcacaatcatggcagaaagcaaagggggacaggcacgtcacatggccagaacagcaagagagtgaaaggggaagctgctacacacttttaaatgaccagatctcatgagaactcactcactcactattatgagaacagtatcaagagggatgatgctgaaccactcatgagaaatccaccccatgatccaatcacctcccatcaggcctcacctctaacattggagattacatcataccagatttgggcagggacacacatcaaaaccatcaattattgtatgcgactccatttatttagaactttcctacatctcccaacacttttgctagtttcctatttagagagatcttgcatgtaatttgttaaaatcatatatacatattttatttttattagtattttacatggattagatttttatcattaattgct

SEQ ID NO: 338585 - DNA, 414 bp, Homo sapiens
caatttccagctatactataagtgtacactaaccatgatactgttacaaaagcagacacttaagccaatggaacagaatagaacactcaaaaataaagctgcacacttaccaccatctggatcgtggacaaggccaacaaaaacaaacaatggggaaaaggcaccctattcaataaatggtgctgggataattcgctagccataagcagaagagtgaaactggatgcttaccttccaccatacacacaaattaattcaagatggattaaaggttaaaatgtaagacttcagattatgaaaactctaaaacaaaacctaggaaatatttttctcgacattggccttggcaaataatttttggctaagtttctaaaaacaattgcaacaaaaacgaaaytgacaagtgaaagtcaa

SEQ ID NO: 338586 - DNA, 419 bp, Homo sapiens
  misc_feature (1)...(419): n = A,T,C or G
atttgctcaatcaccttgtaatggttatgttggttaattccagtctttcatgggtaagcaacaaaatgagacttaatttgaaatatccagtatttttctattcttacaaataattttcaggatcaatgcaytgaggattaggaatggcaatgtgtattactactctgataccaactatatccaatctaatgtggaatttgtttgacaaagtgttgtgtatttgaaacaggcagcactgaataaaagaatatggcaaaagannaatggaagtgttttgaatagaagtctaaaatatttattgatcaatgctgaactgagtaagcaggagatgcctgtacataaatgacattatcntgatctagtaacagggagaagcagaatatctgaaagctgtttattaatttgataataataagatt

SEQ ID NO: 338587 - DNA, 541 bp, Homo sapiens
tgttagcactgtaaaattatgtgtgttacacaagtacaacatgcagactaaggtcgtgtattacctagcctcataccagcgtcacctagaacagcaaaaatgtatgcagattaatcacaatatatttggatgtacaaaayatattgagagcaaaatatgatggaaatttaggtgatgctctttgagcattgcttccattttccaataatgtaaccaggaatcactgttcatgtaattaaagaacaataagtctatgtgaatcaaaatatacatatacatgcaaatgttaaacctcagtaggaagaggcccattctcttgcgtgctgatatatatatatatatatatatatacacacacacacacacacacacacacacacatatgtatgttgtgtgtatatgtatatacacacaacaatctataggcttgccttttaaaatagtataagcaacaaattttaagagaaacaataatgagtgtgtaaaacattagatatgtgtatgtacctttgctattatttgtggaaatggggctataaaa

SEQ ID NO: 338588 - DNA, 541 bp, Homo sapiens
tgttagcactgtaaaattatgtgtgttacacaagtacaacatgcagactaaggtcgtgtattacctagcctcataccagcgtcacctagaacagcaaaaatgtatgcagattaatcacaatatatttggatgtacaaaacatattgagagcaaaatatgatggaaatttaggtgatgctctttgagcattgcttccattttccaataatgtaaccaggaatcactgttcatgtaattaaagaacaataagtctatgtgaatcaaaatatacatatacatgcaaatgttaaacctcagtaggaagaggcccattctcttgcgtgctgatatatatatatatatatatatatacacacacacacacacacacacacacacacatatgtatgttgtgtgtatatgtatatacacacaacaatctataggcttgcyttttaaaatagtataagcaacaaattttaagagaaacaataatgagtgtgtaaaacattagatatgtgtatgtacctttgctattatttgtggaaatggggctataaaa

SEQ ID NO: 338589 - DNA, 608 bp, Homo sapiens
ttactccaaatacaccagatatattcaaagttgaaaaaatatatactttggaatgtattatcatcttatktcacatgaagaaatcaaaatctctggcatccaagtgcattccagcctgaaaaaaattatgcaattgtgaatttaacagaaagcaaattgctcacatatggagtcaacgtgaagctatatcaatatttattaaaagtttatatattacttttgatcccctggagagaaatacaaaattcaaataattattctatttttatatcccaatttgtaattatgaaactctagcattttaatttttctctttcaagtttacctgaagcttcacaaaattctgtgaggaatctattataacaggtattttgcttatttccacacaaacagaaggaaatgtgtattttctatgccctgaagaatttactcttttctgtaaatgacatatggtagttaattctttttggtaataaaatattcctgtttttaggccgaacagccttttcatttaaattcagggcaacatatcaaagctttgccgtaataatacagagtaatcgactaaagtaatatagaatttaaataacaaagagtttaaacaattt

SEQ ID NO: 338590 - DNA, 608 bp, Homo sapiens
ttactccaaatacaccagatatattcaaagttgaaaaaatatatactttggaatgtattatcatcttatgtcacatkaagaaatcaaaatctctggcatccaagtgcattccagcctgaaaaaaattatgcaattgtgaatttaacagaaagcaaattgctcacatatggagtcaacgtgaagctatatcaatatttattaaaagtttatatattacttttgatcccctggagagaaatacaaaattcaaataattattctatttttatatcccaatttgtaattatgaaactctagcattttaatttttctctttcaagtttacctgaagcttcacaaaattctgtgaggaatctattataacaggtattttgcttatttccacacaaacagaaggaaatgtgtattttctatgccctgaagaatttactcttttctgtaaatgacatatggtagttaattctttttggtaataaaatattcctgtttttaggccgaacagccttttcatttaaattcagggcaacatatcaaagctttgccgtaataatacagagtaatcgactaaagtaatatagaatttaaataacaaagagtttaaacaattt

SEQ ID NO: 338591 - DNA, 608 bp, Homo sapiens
ttactccaaatacaccagatatattcaaagttgaaaaaatatatactttggaatgtattatcatcttatgtcacatgaagaaatcaaaatctctggcatccaagtgcattccagcctgaaaaaaattatgcaattgtgaatttaacagaaagcaaattgctcacatatggagtcaacgtgaagctatatcaatatttattaaaagtttatatattacttttgatcccctggagagaaatacaaaattcaaataattattctatttttatatcccaatttgtaattatgaaactctagmattttaatttttctctttcaagtttacctgaagcttcacaaaattctgtgaggaatctattataacaggtattttgcttatttccacacaaacagaaggaaatgtgtattttctatgccctgaagaatttactcttttctgtaaatgacatatggtagttaattctttttggtaataaaatattcctgtttttaggccgaacagccttttcatttaaattcagggcaacatatcaaagctttgccgtaataatacagagtaatcgactaaagtaatatagaatttaaataacaaagagtttaaacaattt

SEQ ID NO: 338592 - DNA, 510 bp, Homo sapiens
ttatgtcagtaagcaactctcctctgggccaacagattgctcacctgggcaggtagcagcttgtgtcaattaacagtttacttatgaagacttctgtcatggcccttaactcacagtgtcccccaatcctaaactctatgtcctgaacattacctattcttrtcagtcattggtcttgaaaggccccgggcaaccatttgagcccagacttcaatactctatcaataccaccttatcatctacttttctaacatgacccctcaaggtggtgaccccacttacagtcgtcttttattgaatttagctttccctaatcaacatgctagtctattggatgcagtgtcagaggcaaaaatcacagaggttctgaaagcatcagcccatggttttctaaacatcatggttcaagacccttaacacgaaacagaaagtttccccgaggcgccgtaaacaacccatttgggcgcttccctgataattatagtgaaatctggcatctaattttttttg

SEQ ID NO: 338593 - DNA, 510 bp, Homo sapiens
ttatgtcagtaagcaactctcctctgggccaacagattgctcacctgggcaggtagcagcttgtgtcaattaacagtttacttatgaagacttctgtcatggcccttaactcacagtgtcccccaatcctaaactctatgtcctgaacattacctattcttatcagtcattggtcttgaaaggccccgggcaaccatttgagcccagacttcaatactctatcaataccaccttatcatctacttttctaacatracccctcaaggtggtgaccccacttacagtcgtcttttattgaatttagctttccctaatcaacatgctagtctattggatgcagtgtcagaggcaaaaatcacagaggttctgaaagcatcagcccatggttttctaaacatcatggttcaagacccttaacacgaaacagaaagtttccccgaggcgccgtaaacaacccatttgggcgcttccctgataattatagtgaaatctggcatctaattttttttg

SEQ ID NO: 338594 - DNA, 510 bp, Homo sapiens
ttatgtcagtaagcaactctcctctgggccaacagattgctcacctgggcaggtagcagcttgtgtcaattaacagtttacttatgaagacttctgtcatggcccttaactcacagtgtcccccaatcctaaactctatgtcctgaacattacctattcttatcagtcattggtcttgaaaggccccgggcaaccatttgagcccagacttcaatactctatcaataccaccttatcatctacttttctaacatgacccctcaaggtggtgaccccacttacagtcgtmttttattgaatttagctttccctaatcaacatgctagtctattggatgcagtgtcagaggcaaaaatcacagaggttctgaaagcatcagcccatggttttctaaacatcatggttcaagacccttaacacgaaacagaaagtttccccgaggcgccgtaaacaacccatttgggcgcttccctgataattatagtgaaatctggcatctaattttttttg

SEQ ID NO: 338595 - DNA, 550 bp, Homo sapiens
ctgattgctcacttgctcaagccagaagcttagaatacatgcttgattcttcactttcctgtgggtttatgccaaatcaattkcaaatctatagatcttatcctctaaataacatacagcatgcctacttttttctctctctcgactactgtcacattaattcaaaagaaaaagactgatgattcctaacttcctggcttcagtaattggcaacgatgacatcactactaaggcttcacttctcacctctgcttccatatgagtgtaatgttattttctcctatgacagataagtttatttttcaccattaaaaggtaagaaactcacgcataaccaaagttggaggagacagttattttttttccccagcttgcctgttaaaaccataaggaatgattaatctgccatggtgcttgatgtggcccagggatgtgctcagactcagtcatgtaggggcaggtggtattaacattagttcaaacatggaaccatggcatgtgttagaaataatggcttatattagaaaccggacataaaattgtcgtgagc

SEQ ID NO: 338596 - DNA, 634 bp, Homo sapiens
caaaaaagatacttgcacatgcacgtttataacagcacaattagcaattgcaaaaatgtggaaccagcctaaatgcccgtgaatcaatgagtgaataaactgtggtatatatttatgtgtgtgtgtgtgtgtgtgtgtgtgtgtgtgtgtgtgtgtgtgtatgtatatgtatatatatatgcatatgtatatatatatatatatgcataaatacatatatgtgatggaatactactcagccataaaaaggaatgaattaatggcattcataataacctggatggrattggagactattattctaagtgaagtatctcaggaatggaaaaccaaacattgcatgttctcactcttaagtgggagctaagctatgaagatgcaaaggcataagaatgatacagtggactttggggactcaagggaaagagtgggaaaggcatgaggggtaaaagactacaaattgagttcagtgtatactgctcgggtgatgtgtgcaccaaaatctcacaaatcaccactaaagaacttactcatgtaaccaaatacctcatgttctccaaaaacctatggaaataaaaaatttaaaaaattacagaaagggaatgtattatgagacaagccacgtttatagacc

SEQ ID NO: 338597 - DNA, 509 bp, Homo sapiens
tgcctgcttcctctttgccttctgctatgactgtacgttttctgaggcttccccatccttgcttcctgtacagcctgtgcaactgtgaggcaattaaagctcttttctttataaattacctaggatcaggtagttctttataacaatgggataatggactaatatagatgtttacatatagaaatatttaaagatatgtgtctacatatgtgtaagaatatacacattgtttctttgctctctcatcttagagagctatgaaaaaattgataytcccttagctacaggcacagctagcacttaaatattgatttcatatatagaaagcagggcgtctttgaaagtggctgattctaagaatggggaagaaaatacacaagatgagcctgggacatcctctagtgccagaatttatgaaaatactaacaaaaatctatttgtgagatatgtcaaacaagcacaggggccaagtgaaaggtctttcaatttctagaataattttagcaaca

SEQ ID NO: 338598 - DNA, 291 bp, Homo sapiens
caagcacctttcactataaaattacagctgragatcatgaagagaaaagtgtggtgtttatcttaatgggctgaaagacctatttcaacagttacagtaattcagaaaaatagtctgaagtctagtatttcaataatgttattttcatagattttaatctctaaagacaatgcttcacttttgtagaaaatgacttttctaatcatcctggatttcaaaattctttccattacttaatatttaaatcactggcagaacttggcatgaggactagagagctgtcaccaagca

SEQ ID NO: 338599 - DNA, 291 bp, Homo sapiens
caagcacctttcactataaaattacagctggagatcatgaagagaaaagtgtggtgtttatcttaatgggctgaaagacctatttcaacagttacagtaattcagaaaaatagtctsaagtctagtatttcaataatgttattttcatagattttaatctctaaagacaatgcttcacttttgtagaaaatgacttttctaatcatcctggatttcaaaattctttccattacttaatatttaaatcactggcagaacttggcatgaggactagagagctgtcaccaagca

SEQ ID NO: 338600 - DNA, 291 bp, Homo sapiens
caagcacctttcactataaaattacagctggagatcatgaagagaaaagtgtggtgtttatcttaatgggctgaaagacctatttcaacagttacagtaattcagaaaaatagtctgaagtctagtatttcaataatgttattttcatagattttartctctaaagacaatgcttcacttttgtagaaaatgacttttctaatcatcctggatttcaaaattctttccattacttaatatttaaatcactggcagaacttggcatgaggactagagagctgtcaccaagca

SEQ ID NO: 338601 - DNA, 291 bp, Homo sapiens
caagcacctttcactataaaattacagctggagatcatgaagagaaaagtgtggtgtttatcttaatgggctgaaagacctatttcaacagttacagtaattcagaaaaatagtctgaagtctagtatttcaataatgttattttcatagattttaatctctaaagacaatgcttcasttttgtagaaaatgacttttctaatcatcctggatttcaaaattctttccattacttaatatttaaatcactggcagaacttggcatgaggactagagagctgtcaccaagca

SEQ ID NO: 338602 - DNA, 370 bp, Homo sapiens
cttgggtcttccttcaatcttatttgtctttccacctgatcttaattatttacatcacattataccctatctttatggtgacaaatctcaaaattatctctctgacctaaacttatcattaaagatttggttgcaacttattaagaagtcaggttcaatgtaatacatgcattgttgatttaatatgctcatcaaaatayttaaaattttatttgaatgcaaaaaaataaagcttttaattttatctcctatttaataattttgacaaaaacattataccaatcattactaattattgctggcttttaaaatattatctgattaaatatttttgacttggaaaaatggtaacaaatgcttctctctttct

SEQ ID NO: 338603 - DNA, 370 bp, Homo sapiens
cttgggtcttccttcaatcttatttgtctttccacctgatcttaattatttacatcacattataccctatctttatggtgacaaatctcaaaattatctctctgacctaaacttatcattaaagatttggttgcaacttattaagaagtcaggttcaatgtaatacatgcattgttgatttaatatgctcatcaaaatacttaaaattttatttgaatgcaaaaaaataaagctyttaattttatctcctatttaataattttgacaaaaacattataccaatcattactaattattgctggcttttaaaatattatctgattaaatatttttgacttggaaaaatggtaacaaatgcttctctctttct

SEQ ID NO: 338604 - DNA, 370 bp, Homo sapiens
cttgggtcttccttcaatcttatttgtctttccacctgatcttaattatttacatcacattataccctatctttatggtgacaaatctcaaaattatctctctgacctaaacttatcattaaagatttggttgcaacttattaagaagtcaggttcaatgtaatacatgcattgttgatttaatatgctcatcaaaatacttaaaattttatttgaatgcaaaaaaataaagcttttaattttatctcctatwtaataattttgacaaaaacattataccaatcattactaattattgctggcttttaaaatattatctgattaaatatttttgacttggaaaaatggtaacaaatgcttctctctttct

SEQ ID NO: 338605 - DNA, 370 bp, Homo sapiens
cttgggtcttccttcaatcttatttgtctttccacctgatcttaattatttacatcacattataccctatctttatggtgacaaatctcaaaattatctctctgacctaaacttatcattaaagatttggttgcaacttattaagaagtcaggttcaatgtaatacatgcattgttgatttaatatgctcatcaaaatacttaaaattttatttgaatgcaaaaaaataaagcttttaattttatctcctatttaataattttgacaaaaacattataccaatcattactaattattgctggsttttaaaatattatctgattaaatatttttgacttggaaaaatggtaacaaatgcttctctctttct

SEQ ID NO: 338606 - DNA, 549 bp, Homo sapiens
tggactccccaaaactaaactaacagcctactgttgactggacaatccttaacacatatttcatacgctgtatgtattttacaccgtagttttacaatgaagctagttacagaaaagaaagtgttattaagaaaattatagggaagaaaaaatacgtttacagtactacagtatatttatttctctcataagtttacaatcctgtgtttacaagatggatccttcttctgaaatggcagcacacacagctgcaggcctcaatctagggtacctatcaagcaattsattgttttcctgtaatgtcaggacccttctctgtttcctggaagaactttcagcatcactagcagcactttttataggtctgaaggtgttattcaaggtttatggtattgcactagacatcatgaataatacaggagaaacatgagagaacactttttactgtgttaatttactggagagacaagctactcacaagaagatgattagcattatgtggcattttaagtgaatactcacaacacttgagttcactgcaagaacaac

SEQ ID NO: 338607 - DNA, 592 bp, Homo sapiens
ttttgctaaaattggtaagtatatctttatataactatatccttacaacttgtctcaaccttcgtcagattaatcctarcaaaactgtaaaatgtctcagtaaaaatctaaatgaatttttcataacaagtgctggcaatagattttaaatatgttctgatcattatttgtctcttgttggcatggagaaaatcctttttttttttttcagcctggggaatcccaaactatatctctagtaacaaggaaaccattttaccggaatttttattaacatggaaaagttctgtcaattaatcagacttcactgtccatatcactttcaaccttttgggaaggtagaaagatggaattctgaaactaaagttggtaaagttcacagacatcgtcaaacttgcatggtctaaggtatttcttctttctgtggttcatgagttagtaacagctaaaccaagtgtctaggaatattagctctgattctagaaatctacacttatttaactaaatgctgtaaggactcaggaaatccattctttcaacaaaagttactgaagactttccccattagtatcctaaacaatgtctgcaaaat

SEQ ID NO: 338608 - DNA, 592 bp, Homo sapiens
ttttgctaaaattggtaagtatatctttatataactatatccttacaacttgtctcaaccttcgtcagattaatcctaacaaaactgtaaaatgtctcagtaaaaatctaaatgaatttttcataacaagtgctggcaatagattttaaatatgttctgatcattatttgtctcttgttggcatggagaaaatcctttttttttttttcagcctggggaatcccaaactatatctctagtaacaaggaaaccattttacyggaatttttattaacatggaaaagttctgtcaattaatcagacttcactgtccatatcactttcaaccttttgggaaggtagaaagatggaattctgaaactaaagttggtaaagttcacagacatcgtcaaacttgcatggtctaaggtatttcttctttctgtggttcatgagttagtaacagctaaaccaagtgtctaggaatattagctctgattctagaaatctacacttatttaactaaatgctgtaaggactcaggaaatccattctttcaacaaaagttactgaagactttccccattagtatcctaaacaatgtctgcaaaat

SEQ ID NO: 338609 - DNA, 574 bp, Homo sapiens
tatcggtatctgcaaaccaagatccacaaaaaaagatccattgtttgtcatatttaatctgtatatcttgagttttcattttcctagttaactttatctttttatgcttaaggttacatttaattactttacctataaagctactattcctaattcctctatgcygtccttagtcactctctagaagagtccggaagctggccgtaatttgttcacaatttggctaaacatgcagttgaatcagtgctaagctgcacacattttccttaggatgccaattagagtttttttttttaacatcgattcctaaatatgaaacatctgggtttatcaataattggactcactatttattgttattttatctgacaaacagcagagtattagataaatagaaatcttaaatcctaacatgctgcacccaggaaagaaagcttatgcctacagcagaacagcacttagggatctttaatagaatgcaacttctgtcactaaacctttagaaagaaatgtcttaaaaagaagagaacaaatggcacatacttaattcatttctcacatttacatatcataa

SEQ ID NO: 338610 - DNA, 574 bp, Homo sapiens
tatcggtatctgcaaaccaagatccacaaaaaaagatccattgtttgtcatatttaatctgtatatcttgagttttcattttcctagttaactttatctttttatgcttaaggttacatttaattactttacctataaagctactattcctaattcctctatgccgtccttagtcactctctagaagagtccggaagctggcygtaatttgttcacaatttggctaaacatgcagttgaatcagtgctaagctgcacacattttccttaggatgccaattagagtttttttttttaacatcgattcctaaatatgaaacatctgggtttatcaataattggactcactatttattgttattttatctgacaaacagcagagtattagataaatagaaatcttaaatcctaacatgctgcacccaggaaagaaagcttatgcctacagcagaacagcacttagggatctttaatagaatgcaacttctgtcactaaacctttagaaagaaatgtcttaaaaagaagagaacaaatggcacatacttaattcatttctcacatttacatatcataa

SEQ ID NO: 338611 - DNA, 579 bp, Homo sapiens
caatttggctaaacatgcagttgaatcagtgctaagctgcacacattttccttaggatgccaattagagtttttttttttaacatcgattcctaaatatgaaacwtctgggtttatcaataattggactcactatttattgttattttatctgacaaacagcagagtattagataaatagaaatcttaaatcctaacatgctgcacccaggaaagaaagcttatgcctacagcagaacagcacttagggatctttaatagaatgcaacttctgtcactaaacctttagaaagaaatgtcttaaaaagaagagaacaaatggcacatacttaattcatttctcacatttacatatcataaaaaattcttattacatattcaagctcctatcacatctacctcttcctctatgtgataaggtcttcattttatatccccaaaagtgattaatagcagaatggagctgaaagcaatcaataaactcaatcaaccttaatgactgctactggatttgtggtaccagaacctattgattattacagcaatcttgacataaactaacatactgatgtggtagtca

SEQ ID NO: 338612 - DNA, 579 bp, Homo sapiens
caatttggctaaacatgcagttgaatcagtgctaagctgcacacattttccttaggatgccaattagagtttttttttttaacatcgattcctaaatatgaaacatctgggtttatcaataattggactcactatttattgttattttatctgacaaacagcagagtattagataaatagaaatcttaaatcctaacatgctgcacscaggaaagaaagcttatgcctacagcagaacagcacttagggatctttaatagaatgcaacttctgtcactaaacctttagaaagaaatgtcttaaaaagaagagaacaaatggcacatacttaattcatttctcacatttacatatcataaaaaattcttattacatattcaagctcctatcacatctacctcttcctctatgtgataaggtcttcattttatatccccaaaagtgattaatagcagaatggagctgaaagcaatcaataaactcaatcaaccttaatgactgctactggatttgtggtaccagaacctattgattattacagcaatcttgacataaactaacatactgatgtggtagtca

SEQ ID NO: 338613 - DNA, 579 bp, Homo sapiens
caatttggctaaacatgcagttgaatcagtgctaagctgcacacattttccttaggatgccaattagagtttttttttttaacatcgattcctaaatatgaaacatctgggtttatcaataattggactcactatttattgttattttatctgacaaacagcagagtattagataaatagaaatcttaaatcctaacatgctgcacccaggaaagaaagcttatgcctacagcagaacagcacttasggatctttaatagaatgcaacttctgtcactaaacctttagaaagaaatgtcttaaaaagaagagaacaaatggcacatacttaattcatttctcacatttacatatcataaaaaattcttattacatattcaagctcctatcacatctacctcttcctctatgtgataaggtcttcattttatatccccaaaagtgattaatagcagaatggagctgaaagcaatcaataaactcaatcaaccttaatgactgctactggatttgtggtaccagaacctattgattattacagcaatcttgacataaactaacatactgatgtggtagtca

SEQ ID NO: 338614 - DNA, 587 bp, Homo sapiens
atgccgtccttagtcactctctagaagagtccggaagctggccgtaatttgttcacaatttggctaaacatgcagttgaatcagtgctaagctgcacacattttccttaggatgccaattagagtttttttttttaacatcgattcctaaatatgaaacatctgggtttatcaataattggactcactatttattgttattttatctgacaaacagcagagtattagataaatagaaatcttaaatcctaacatgctgcacccaggaaagaaagcttatgcctacagcagaacagcacttaggratctttaatagaatgcaacttctgtcactaaacctttagaaagaaatgtcttaaaaagaagagaacaaatggcacatacttaattcatttctcacatttacatatcataaaaaattcttattacatattcaagctcctatcacatctacctcttcctctatgtgataaggtcttcattttatatccccaaaagtgattaatagcagaatggagctgaaagcaatcaataaactcaatcaaccttaatgactgctactggatttgtggtaccagaacctattga

SEQ ID NO: 338615 - DNA, 579 bp, Homo sapiens
caatttggctaaacatgcagttgaatcagtgctaagctgcacacattttccttaggatgccaattagagtttttttttttaacatcgattcctaaatatgaaacatctgggtttatcaataattggactcactatttattgttattttatctgacaaacagcagagtattagataaatagaaatcttaaatcctaacatgctgcacccaggaaagaaagcttatgcctacagcagaacagcacttagggatctttaatagaatgcaacttctgtcactaaacytttagaaagaaatgtcttaaaaagaagagaacaaatggcacatacttaattcatttctcacatttacatatcataaaaaattcttattacatattcaagctcctatcacatctacctcttcctctatgtgataaggtcttcattttatatccccaaaagtgattaatagcagaatggagctgaaagcaatcaataaactcaatcaaccttaatgactgctactggatttgtggtaccagaacctattgattattacagcaatcttgacataaactaacatactgatgtggtagtca

SEQ ID NO: 338616 - DNA, 587 bp, Homo sapiens
atgccgtccttagtcactctctagaagagtccggaagctggccgtaatttgttcacaatttggctaaacatgcagttgaatcagtgctaagctgcacacattttccttaggatgccaattagagtttttttttttaacatcgattcctaaatatgaaacatctgggtttatcaataattggactcactatttattgttattttatctgacaaacagcagagtattagataaatagaaatcttaaatcctaacatgctgcacccaggaaagaaagcttatgcctacagcagaacagcacttagggatctttaatagaatgcaacttctgtcactaaacctttagaaagaaatgtcttaaaaagaagagaacaaatggcacatacttaattcatttctcacatttacatatcataaaaaattcttattacawattcaagctcctatcacatctacctcttcctctatgtgataaggtcttcattttatatccccaaaagtgattaatagcagaatggagctgaaagcaatcaataaactcaatcaaccttaatgactgctactggatttgtggtaccagaacctattga

SEQ ID NO: 338617 - DNA, 587 bp, Homo sapiens
atgccgtccttagtcactctctagaagagtccggaagctggccgtaatttgttcacaatttggctaaacatgcagttgaatcagtgctaagctgcacacattttccttaggatgccaattagagtttttttttttaacatcgattcctaaatatgaaacatctgggtttatcaataattggactcactatttattgttattttatctgacaaacagcagagtattagataaatagaaatcttaaatcctaacatgctgcacccaggaaagaaagcttatgcctacagcagaacagcacttagggatctttaatagaatgcaacttctgtcactaaacctttagaaagaaatgtcttaaaaagaagagaacaaatggcacatacttaattcatttctcacatttacatatcataaaaaattcttattacatattcaagctcctatcacatctacctcttcctctatgtgataaggtcttcattttatatccccaaaagtgattaatagcaraatggagctgaaagcaatcaataaactcaatcaaccttaatgactgctactggatttgtggtaccagaacctattga

SEQ ID NO: 338618 - DNA, 542 bp, Homo sapiens
acagttctttcctaggtataattctaaagtctgcctcatttccttcttttttctcctccccaacacacatatgcttctctgactgtaaagatgaccactttaaggtcatttgaaatcatagacttgaaagagaaaacaacttccctgatgagttctttgcttcagggctgggttccttgttttttatgaacacagtaggatttaatttctgagcagctttttcaacctaatcagaaaaacctgagcttttctgtcactgkataattccaccattactagactttttgtttacaagtggtttccaacaaggaatgactttgtttccatagaacacttgtcagtgtctggagacattttgaattataatgattaggtggtgatgctactggtatgtggtggtatagcctaaagatactattaatatcctacaatgcaaagaataacctcccacagaatgcaggaatatcaggcataaaatgtcaataatgctaaggtttagcaactcaactctatccactttctttccactctaaagacaggat

SEQ ID NO: 338619 - DNA, 542 bp, Homo sapiens
acagttctttcctaggtataattctaaagtctgcctcatttccttcttttttctcctccccaacacacatatgcttctctgactgtaaagatgaccactttaaggtcatttgaaatcatagacttgaaagagaaaacaacttccctgatgagttctttgcttcagggctgggttccttgttttttatgaacacagtaggatttaatttctgagcagctttttcaacctaatcagaaaaacctgagcttttctgtcactgtataattccaccattactagactttttgtttacaagtggtttccaacaaggaatgaytttgtttccatagaacacttgtcagtgtctggagacattttgaattataatgattaggtggtgatgctactggtatgtggtggtatagcctaaagatactattaatatcctacaatgcaaagaataacctcccacagaatgcaggaatatcaggcataaaatgtcaataatgctaaggtttagcaactcaactctatccactttctttccactctaaagacaggat

SEQ ID NO: 338620 - DNA, 542 bp, Homo sapiens
acagttctttcctaggtataattctaaagtctgcctcatttccttcttttttctcctccccaacacacatatgcttctctgactgtaaagatgaccactttaaggtcatttgaaatcatagacttgaaagagaaaacaacttccctgatgagttctttgcttcagggctgggttccttgttttttatgaacacagtaggatttaatttctgagcagctttttcaacctaatcagaaaaacctgagcttttctgtcactgtataattccaccattactagactttttgtttacaagtggtttccaacaaggaatgactttgtttccayagaacacttgtcagtgtctggagacattttgaattataatgattaggtggtgatgctactggtatgtggtggtatagcctaaagatactattaatatcctacaatgcaaagaataacctcccacagaatgcaggaatatcaggcataaaatgtcaataatgctaaggtttagcaactcaactctatccactttctttccactctaaagacaggat

SEQ ID NO: 338621 - DNA, 542 bp, Homo sapiens
acagttctttcctaggtataattctaaagtctgcctcatttccttcttttttctcctccccaacacacatatgcttctctgactgtaaagatgaccactttaaggtcatttgaaatcatagacttgaaagagaaaacaacttccctgatgagttctttgcttcagggctgggttccttgttttttatgaacacagtaggatttaatttctgagcagctttttcaacctaatcagaaaaacctgagcttttctgtcactgtataattccaccattactagactttttgtttacaagtggtttccaacaaggaatgactttgtttccatagaacacttgtcagtgtctggagacattttgaattataatgattaggtggtgatgctactggtatgtggtggtatagcctaragatactattaatatcctacaatgcaaagaataacctcccacagaatgcaggaatatcaggcataaaatgtcaataatgctaaggtttagcaactcaactctatccactttctttccactctaaagacaggat

SEQ ID NO: 338622 - DNA, 521 bp, Homo sapiens
ggcctggtggctaggagtgagtgacagaagaaggttgggtatggaggggaaggtgttgggtagtccttggagcagtggcacacatgactccactgttaaatgcatccagtaagtaataccttaatgtttcaacatatttcatccagaggattgtcttttacaaatagcacagttttaactggaataataatatgaatgctttgaggatataggaactgtattagggttcactagagggacaagactaataggatagatgtgtatatgaagaagagtttaaggagtattaactcacacaatcacatggtgaagtcmcacaataggccatctgcaggccgaggagcaaggaagccagtccaagttccaaaatctcaaaagtagggaagccgacagtacagccttcagtctgtggccgaagccccaagagcccccagcaaaccactggcgtacgttcaagagtccaaaagttgaagaacttcgagtccaatattcgagggcaagaagcatccagcacgggagaa

SEQ ID NO: 338623 - DNA, 524 bp, Homo sapiens
acagacatgtctttataaacttggctatccattttccagtctgtaggaaaagagaagctgtaagttggagaaaaggctagtggttgggtggtgagtcataagcaataagatttgatgtcagtgatgacaggcctgtcctcttatgatagattccttgagccccctgctgaccacaaagctttggctggctagaccacaagtctgtctccctcaatgacaatttttgtagctcaatatggatcctattttgtgtgagttgcatttggagatttrttgtttatctgctgtatttgccttaggtgggacagtgaaatcaacctaatgtagtggaaggaagtaggtattacatccttaattccttgatatacatccttttattatgtggtactcccgggatgtggtttttcagatttggagaagaatagttaaaaaaaaaaaatgcagaaaggatcaaaagcacttgattctctcgcagggacagcttcctgttttggttgaggaaggagctgcacttaaaattacta

SEQ ID NO: 338624 - DNA, 612 bp, Homo sapiens
agaggtaaggtcttgagactatatagggtggtaaagaggtatccacctgtcctcatatccaagttaaacctgcagttagattctagccccagactagtatctgtctggcagcaattgcatgagagaccccaagtgagaccagcagaagagccacccagctgagcacagtcaacccatagaaataggagagataataaatagttgatgttgttttaagtcactaaggtctggtttgattgattatgtaacaacaagtagtcaaaacaccacatttcactcccttcttttacttggaggatttgggggaaaaaaaagcagttctcacagggtagacaaaggtgtcttccagtcatgcagattataatgatgatgataataataatgatagctgtcatttatttagcacttagaatgcaccagacactatttctaagtgtttgattttatatgtcacctgagttaggttctactgttgtctccactttacagataagaaaactgaagctcggaatctgagtccacagtcytggctaactctacagtccaactcttgcagccaggcctgaaaccctgtgacactgctgtcaacacaagtttccgcacacgggaagt

SEQ ID NO: 338625 - DNA, 590 bp, Homo sapiens
tttgtatccttcaattcgctgattactcttccaggaatttatcctgaaaaaacaatccagaatgttggcacggatgttccttgaagtgttatttttccaaccaaagaggaaaaactgaaactaactccaatgcccataaggggcgaacaatttagtgaattatagtagatgagactttgtgcaatcgttaaagatgcttacaaatttttcttctataaagaaatctttatgtcataattaatttaaaaataaagattttaagttgcaaatatagtctactcatatctatgtaataatataacatataaatatacaatgtatacaatggaaagacatagcccaacaagaggctcatttattttaaagttaatgtttaattatataaaatgtatgaatacatttttatataaaaaaattaaaatattacactaacactcaatccccttcaacarccatgcccagttctaactacctgtcttcctattctaagataatacctggagttttttttgttattggatttttaaaacaatcttctttatacttttctattttccccaatttttctgtatttctgtaatagcgtatgt

SEQ ID NO: 338626 - DNA, 497 bp, Homo sapiens
ggacgaatactattacatgatgagggttctcatccaaagctctttgttaaaaggggagattagcaaatgttgtggttgttaaagacatgttactcccaagctgagacttccttcttgatttaatcggacacactgaagcagaagcagaagcagaagggagtgactttctcactttgtgatttaatgttatttaagactgagtcagctcacccttaaatcatctcaaatgtcaatggggtgcatttcctgccatctctaggcagggtgcagcgatatggggcagagcatggaaattgccaaagggaggcaccaaaacatttatgctattggagtttcagggaaggttttacggaagtgggacttgaattctgaaatacacacaggagagcagaggccatttcagtcatgggaaacataaaaatamggaggtgaaagtaaacagcggggatataggatggtatagaccagctaggctagagggcagaggttggacacaa

SEQ ID NO: 338627 - DNA, 548 bp, Homo sapiens
agcatgcttcccttttgccagctctcccctcaaagcctggggtcctgcctcccatgcaggagcgctccatcagggcggccccagtgttgcaagacccgtctaggcaaggccaggctgctgggtgtttactgggacccaggtctgggtggaggggcaagattaatcccattcaacaaattcagaagcgctggggctcagggatgctatgtttcttttcaagcagaggcagaattgagcctgactgcagagctgggtcttggccactccatcccaccccgtgacaggtcagatgcctcctctgygaagtcctccctcacctcccagcatctgtgctctgactgtgacaactctcacttgaggcctgtcacaaagtatgtgagtggccagggtggagacctcatctgtccggctctatgctccattgctcctgcctggccccatcagtccgacgctcatgtaaccatacatgtactgaagcttaactccatcttatctctgtgatgtgactgccagcgactcaagtgcagggaggttgtccacgtctcctc

SEQ ID NO: 338628 - DNA, 575 bp, Homo sapiens
cctactcatttgtttttaaaccttgttccaagggagtgatggggccagctatgatggctcacgcctgtaatcccagcactttgggaggctgaggcgggtggatcacttgaggtccggaattggagaccagcctggccaacatgacaaraccctgtctctactgaaaatacaaaattagccgggtgtagtggaaaaatacaaaaaaaaacacttgtaatcccagctactcgggaggctgaggcaggagaattgaacctgggaggtggaggttatagtgagccaagatcgtaccactgcaccccagcctgggcaatagagcgagactctctctcaaaaaaaatcccaaaaaacaaaacaaaatgacaacaacaacaaaaaccaagggagtgatgggaatagttaatttgtaaatgtgagagattgtaagaattttttcccgtttttcatctccctcccccacaccattgtgttctcatgttgggccatatgaaagaaactaaaattctgcttagatgcctatttttttaagcattatcatcttggaaagttggatttgaattggaagagtgacatgg

SEQ ID NO: 338629 - DNA, 575 bp, Homo sapiens
cctactcatttgtttttaaaccttgttccaagggagtgatggggccagctatgatggctcacgcctgtaatcccagcactttgggaggctgaggcgggtggatcacttgaggtccggaattggagaccagcctggccaacatgacaaaaccctgtctctactgaaaatacaaaattagccgggtgtagtggaaaaatacaaaaaaaaacacttgtaatcccagctactcgggaggctgaggcaggagaattgaacctgggaggtggaggttatagtgagccaagatcgtaccactgcaccccagcctgggcaatagagcragactctctctcaaaaaaaatcccaaaaaacaaaacaaaatgacaacaacaacaaaaaccaagggagtgatgggaatagttaatttgtaaatgtgagagattgtaagaattttttcccgtttttcatctccctcccccacaccattgtgttctcatgttgggccatatgaaagaaactaaaattctgcttagatgcctatttttttaagcattatcatcttggaaagttggatttgaattggaagagtgacatgg

SEQ ID NO: 338630 - DNA, 575 bp, Homo sapiens
cctactcatttgtttttaaaccttgttccaagggagtgatggggccagctatgatggctcacgcctgtaatcccagcactttgggaggctgaggcgggtggatcacttgaggtccggaattggagaccagcctggccaacatgacaaaaccctgtctctactgaaaatacaaaattagccgggtgtagtggaaaaatacaaaaaaaaacacttgtaatcccagctactcgggaggctgaggcaggagaattgaacctgggaggtggaggttatagtgagccaagatcgtaccactgcaccccagcctgggcaatagagcgagactctstctcaaaaaaaatcccaaaaaacaaaacaaaatgacaacaacaacaaaaaccaagggagtgatgggaatagttaatttgtaaatgtgagagattgtaagaattttttcccgtttttcatctccctcccccacaccattgtgttctcatgttgggccatatgaaagaaactaaaattctgcttagatgcctatttttttaagcattatcatcttggaaagttggatttgaattggaagagtgacatgg

SEQ ID NO: 338631 - DNA, 575 bp, Homo sapiens
cctactcatttgtttttaaaccttgttccaagggagtgatggggccagctatgatggctcacgcctgtaatcccagcactttgggaggctgaggcgggtggatcacttgaggtccggaattggagaccagcctggccaacatgacaaaaccctgtctctactgaaaatacaaaattagccgggtgtagtggaaaaatacaaaaaaaaacacttgtaatcccagctactcgggaggctgaggcaggagaattgaacctgggaggtggaggttatagtgagccaagatcgtaccactgcaccccagcctgggcaatagagcgagactctctctcaaaaaaaatcccaaaaaacaaaacaaaatgacaacaacaacaaaaaccaagggagtgatgggaatagttaatttgtaaatgtgagagattgtaagaatttyttcccgtttttcatctccctcccccacaccattgtgttctcatgttgggccatatgaaagaaactaaaattctgcttagatgcctatttttttaagcattatcatcttggaaagttggatttgaattggaagagtgacatgg

SEQ ID NO: 338632 - DNA, 606 bp, Homo sapiens
ttagatgcctatttttttaagcattatcatcttggaaagttggatttgaattggaagagtgacatggaatctttaaaatgactttattttggtcacaartgaagtaggaatttaacatttaagaggtaaacaagtattttatggatgtttcaaggagggttttggctttgacagggtaaaattatttttgattggaaaaagtacattttagcatttaaccaagatttttgcattctttttcttctgttctgatttctgccaatcttctgggagggaagacaattatttttctaaaggtaagagacagttaagaatgaagatattaaatagcaagggtgctgaacagaaaaacaaaggaagccgaagccttttgcaaaatcaaaaggatctggggtcttagacaccatgtggcactgctgaaacatcattttgtttatacctttgagcatagaattctccaagttattggctgtagcttgcagggtcttaataggtatactttaaagaagagaggtagaagattacatgttcatatatgtttggaaaaaattggcatagacagattatgtatactatgaaatatgaagagtgggataaagtagccag

SEQ ID NO: 338633 - DNA, 606 bp, Homo sapiens
ttagatgcctatttttttaagcattatcatcttggaaagttggatttgaattggaagagtgacatggaatctttaaaatgactttattttggtcacaaatgaagtaggaatttaacatttaagaggtaaacaagtattttatggatgtttcaaggagggttttggctttgacagggtaaaattatttttgattggaaaaagtacattttagcatttaaccaagatttttgcattctttttcttctgttctgatttctgccaatcttctgggagggaagacaattatttttctaaakgtaagagacagttaagaatgaagatattaaatagcaagggtgctgaacagaaaaacaaaggaagccgaagccttttgcaaaatcaaaaggatctggggtcttagacaccatgtggcactgctgaaacatcattttgtttatacctttgagcatagaattctccaagttattggctgtagcttgcagggtcttaataggtatactttaaagaagagaggtagaagattacatgttcatatatgtttggaaaaaattggcatagacagattatgtatactatgaaatatgaagagtgggataaagtagccag

SEQ ID NO: 338634 - DNA, 496 bp, Homo sapiens
atcggtttaattgtaaaacatggaggctccctggagagcactcacagtgacttctacctttatgagaaattgtattagtgtgaattgcctgtcaggatgtttaaacagcccctcagagcacctaatagctcactcctagtcattatacatcactaatgggtgctcaacattcaaacacctatttactgcatggatttagtcgtcctggaggacctatttctgattaaataattcatgatttcagagtgtctraatactgtctatatgcccagggctgcacttctgggtcctaaggttctgctcgagacattcccgtgagcttccttgacgatgatccacagaggcattcctttgtgcccagtgctgaagctacggtgcctatcagttttccgtgggggagtgtaggacctgcagatttctggcccccaccctagagagcgtgactcagtagatctgggtttagaatgcccatttttaaaggcacatcattcatctt

SEQ ID NO: 338635 - DNA, 548 bp, Homo sapiens
ccttgcaaaatatgaaaatatatgtggcaataacgtttcagtgaaatattgcttctaagagcaaatcagtggaaacaacccaactgtcaaaatcaaacaagtcatggtacatccacttggtgacatattatgcatgcactgagaagaaaggcacagaactgtttctgctgatctggaaggggctccaagatacaagacaaagggaaacaaagcaagtcacaaaagagtgtgttatgaatgaccactctggtataaatattcaaggctacatgtgcacactcacatacacactagcatagccatgggtgaattttctacaaagaattaagaaagccattgggaactaaaataggctgggctggtggactgggcgaacagggcattgtgcatctttctataccatttgaattgtctaatcccgtgcattttcagcggcagcagggtttattatggtagtgagttcatggaacattttttrttttcttcttaatacttggctgtatttttgagaaaggaagctgtaaattgtgttgttggggttttttttt

SEQ ID NO: 338636 - DNA, 518 bp, Homo sapiens
catcagtggcaccactctcccctcccagacccatggcagacattactaatcaatggcaccactctgccctcctataccaaaggcagacattaatcattaatcatcagtggcaccactgtcccctcctattactcatcaatggcaccactcttccctactgagtacagatatagccttggcatccttgacctgggactgggtctaacctccactcccatctgactgccgtctataaatgaggkgttacctactctccatacatggttacaggcatcataacctgggatcagggacgtgagagcagaaagagcctgagaaaccctcatttcacagacacggaagccaaagtccttggagagttggtggtggaatcagagatgaaatccagtccaatctgccccatctctttcttcaacattctgctgcaccttggagggtaaaacagggaacaagcctgtcaccactcacagcaactagaagccagagcagaaaggacaagcaaacctgcctcaaactgg

SEQ ID NO: 338637 - DNA, 545 bp, Homo sapiens
ttttcaactactttcccttcaaaagcttctgtgccaccaatatcaaggctctttagtaagtcactttcctgctccacgcctcatttccccatctgcaaaatgtgtttagtatctttgttttctttccatagactcagtgtgacattacaagcatcctgggtggaactgcaagacatagttatttcaagattatgaagagtgtggtrgccaaactccaagatggccgcatgatccctcctccaggtactcgtgcccttgtatggtatgctcccacagtcttccgaggattccgttgtatgactgatcgaatacagcagaggcgatggcataggacatctgaggctacatcatctaagggatacacaggaattcactcccatcctcccatgtggcttctactttgctcttaatctctcagatctctcaccctggcagacaccatccaccatgtcctgaggacactcaagcagctctgtggcctcctgacaatagctgttaggtgaaacaccttgggtgcagaccctctagccccactccagccttca

SEQ ID NO: 338638 - DNA, 594 bp, Homo sapiens
ctccgctgacactcctgaggcagtgctggtccggatgtttctcagtgtggactcctcgtcccagaccgaggatgctgggggtccctaaccttccaccttccactccagcaacactttgcatctagggagcatctgcaatgctatgcactactttttttatttatttttttttttttgagacagagtctccctctgtcactcaacctcccaagttgctggractataggcacccgccaccacacctggataagtttttgtatttttagtagatacagggaatcgccatgttggccaggctggtctcgaactcctgacctcaggtgatccacctgcctcggcctcccaaagtactaacattaccggcctgagccaccacacccagccactgtgtatttcttgtgcattttcaccctgaatccttactagggtattaagaagtaggtcttaacctcagccccgtctcacaggtgaagaagcaaaagagaggctgacggatttgtccaaggtaacacagcactcagcagggttgcagtggagcctcagcttgaactgagcatgcctactgcaaacactgggatgtgaatcaccgtcgt

SEQ ID NO: 338639 - DNA, 501 bp, Homo sapiens
tcaccggcggctctccagcgcctggacagggctgacccccagcaggcgctctgtgaaggtgtgcagagtgggcgaaggtgcatgcgcgggccgtggggcggggacaggtggaggagccagtcagacccaagtgcagcgggacgagggcgaggttaatctgagcaagaaaagcgtaaattctgcttatctacaaatgtaaacagtactgtcggccagacgcaaggtccggggcgggtcggcccggactcaggggctgcttggaggcagagctagattagggcggggtcgtcctgtggcctaccattccccgaggctgagggccttggaggggcggtgccagtgaaaggggaggggacttcctgaagggtgaccaatctagagaaaggactgggctgagggcgtggtcaaacaagckacatctaaaaataaggggcggggctagaaccagggggagttcgcctggggcggggccagagtggggcgggaccagttagggggcag

SEQ ID NO: 338640 - DNA, 544 bp, Homo sapiens
gtaaagaactctcaaaactcgataataagacaatacccaataaaacaatgataaaatatttgaacagacattttaccaaattagatatacatggcaaataatcacatgaaaacwtgttcaacatcattaatcattagggaaatacaagttaagaccacaatgagataccattatacatcttctaggatgactgaaagtagaaagactgaccacaccaagtcttggcaaggatgaagagaagctggaactctcatacattgcttatgagaatgtaaaatggtataaccactttgaaaaacagtttgacagttttctaactggttcaacatgcacctgtcatgtcatctagccatttcatgtctagaggtatttatccatgagaaaaggcagcatgtcctcaaacaacacacatgtgcatgaacattgatggtgattttatttatcagagccaaaaactagaaaccacccaaatgtctattatcaggtgaatgtagaaaacaatttgtggcacatgcatataatggaatagtatgcagcagtaaaa

SEQ ID NO: 338641 - DNA, 639 bp, Homo sapiens
acaatgagataccattatacatcttctaggatgactgaaagtagaaagactgaccacaccaagtcttggcaaggatgaagagaagctggaactctcatacattgcttatgagaatgtaaaatggtataaccactttgaaaaacagtttgacagttttctaactggttcaacatgcacctgtcatgtcatctagccatttcatgtctagaggtatttatccatgagaaaaggcagcatgtcctcaaacaacacacatgtgcatgaacattgatggtgattttatttatcagagccaaaaactagaaacsacccaaatgtctattatcaggtgaatgtagaaaacaatttgtggcacatgcatataatggaatagtatgcagcagtaaaaaggaatgagctatctatacatgcaagaacatgggtaagtctcaaaatctttatgctcagtgaaagatgccagataaaaaagattacatactatataagcctatttatatgaattctaaaaaatgcaaatctatagtgacagaaagcagatcatttgttgcctgttgacaaggatgggaagtgggaaaggatgagagggagagattacagagaggcacaaattcattaacggtgccttgagtgaagaatatg

SEQ ID NO: 338642 - DNA, 639 bp, Homo sapiens
acaatgagataccattatacatcttctaggatgactgaaagtagaaagactgaccacaccaagtcttggcaaggatgaagagaagctggaactctcatacattgcttatgagaatgtaaaatggtataaccactttgaaaaacagtttgacagttttctaactggttcaacatgcacctgtcatgtcatctagccatttcatgtctagaggtatttatccatgagaaaaggcagcatgtcctcaaacaacacacatgtgcatgaacattgatggtgattttatttatcagagccaaaaactagaaaccacccaaatgtctattatcaggtgaatgtagaaaacaatttgtggcacatgcatataatggaatastatgcagcagtaaaaaggaatgagctatctatacatgcaagaacatgggtaagtctcaaaatctttatgctcagtgaaagatgccagataaaaaagattacatactatataagcctatttatatgaattctaaaaaatgcaaatctatagtgacagaaagcagatcatttgttgcctgttgacaaggatgggaagtgggaaaggatgagagggagagattacagagaggcacaaattcattaacggtgccttgagtgaagaatatg

SEQ ID NO: 338643 - DNA, 639 bp, Homo sapiens
acaatgagataccattatacatcttctaggatgactgaaagtagaaagactgaccacaccaagtcttggcaaggatgaagagaagctggaactctcatacattgcttatgagaatgtaaaatggtataaccactttgaaaaacagtttgacagttttctaactggttcaacatgcacctgtcatgtcatctagccatttcatgtctagaggtatttatccatgagaaaaggcagcatgtcctcaaacaacacacatgtgcatgaacattgatggtgattttatttatcagagccaaaaactagaaaccacccaaatgtctattatcaggtgaatgtagaaaacaatttgtggcacatgcatataatggaatagtatgcagcagtaaaaaggaatgagctatctatacatgcaagaacatgggtaagtctcaraatctttatgctcagtgaaagatgccagataaaaaagattacatactatataagcctatttatatgaattctaaaaaatgcaaatctatagtgacagaaagcagatcatttgttgcctgttgacaaggatgggaagtgggaaaggatgagagggagagattacagagaggcacaaattcattaacggtgccttgagtgaagaatatg

SEQ ID NO: 338644 - DNA, 639 bp, Homo sapiens
acaatgagataccattatacatcttctaggatgactgaaagtagaaagactgaccacaccaagtcttggcaaggatgaagagaagctggaactctcatacattgcttatgagaatgtaaaatggtataaccactttgaaaaacagtttgacagttttctaactggttcaacatgcacctgtcatgtcatctagccatttcatgtctagaggtatttatccatgagaaaaggcagcatgtcctcaaacaacacacatgtgcatgaacattgatggtgattttatttatcagagccaaaaactagaaaccacccaaatgtctattatcaggtgaatgtagaaaacaatttgtggcacatgcatataatggaatagtatgcagcagtaaaaaggaatgagctatctatacatgcaagaacatgggtaagtctcaaaatctttatgctcagtgaaagatgccagataaaaaagattacatactatataagcctatttatatgaattctaaaaaatgcaaatctrtagtgacagaaagcagatcatttgttgcctgttgacaaggatgggaagtgggaaaggatgagagggagagattacagagaggcacaaattcattaacggtgccttgagtgaagaatatg

SEQ ID NO: 338645 - DNA, 629 bp, Homo sapiens
aaaaagtttccaagcaagtcagatgacattgcatctgcaataaagggagctgccttgtggccgtctgtaatgacaacattttaaaaagcagtctaacatttttaaaaatgcaaaaagcaatttaaatgatcacaaaaatttcttgaaaagctagagggaactgcattgtgtgacatccacycagcaaatcaccataaaatccctattttctctccatctcaccaaatcccacttagcctgtcagaacctctggtctcttttctgtttcttcctagtgagtctaattctctctgtgcctcttgcttatctcttcccacctctctttggctccagtttcgactatgtagatcaatttgcctctctgagatcctttaaattattctctgccctctttgtccaggcccagatgcacacaccaaagtactagaacctaacaggttgacctcaacacctcctgaaggctggagaacagggaagtcaggaggtcaggggatatgctgagtgataggatggctcagagggtccagttggggctttaattctctctccaagctacaatgtgaggggctggtagaacaatcataagcattgcaagggtgtcaatgctttgagcatttccattttagatg

SEQ ID NO: 338646 - DNA, 629 bp, Homo sapiens
aaaaagtttccaagcaagtcagatgacattgcatctgcaataaagggagctgccttgtggccgtctgtaatgacaacattttaaaaagcagtctaacatttttaaaaatgcaaaaagcaatttaaatgatcacaaaaatttcttgaaaagctagagggaactgcattgtgtgacatccactcagcaaatcaccataaaatccctattttctctccatctcaccaaatcccacttagcctgtcagaacctctggtctcttttctgtttcttcctagtgagtctaattctctctgtgcctcttgcttatctcttcccacctctctttggctccagtttcgactatgtagatcaatttgcctctctgagatcctttaaattattctctgccctctttgtccaggcccagatgcacacaccaaagtactagaacctaacaggttgacctcaacacctcctgaaggctggagaacagggaagtcaggaggtcaggggatatgctgagtgataggatggctcagagggtccakttggggctttaattctctctccaagctacaatgtgaggggctggtagaacaatcataagcattgcaagggtgtcaatgctttgagcatttccattttagatg

SEQ ID NO: 338647 - DNA, 629 bp, Homo sapiens
aaaaagtttccaagcaagtcagatgacattgcatctgcaataaagggagctgccttgtggccgtctgtaatgacaacattttaaaaagcagtctaacatttttaaaaatgcaaaaagcaatttaaatgatcacaaaaatttcttgaaaagctagagggaactgcattgtgtgacatccactcagcaaatcaccataaaatccctattttctctccatctcaccaaatcccacttagcctgtcagaacctctggtctcttttctgtttcttcctagtgagtctaattctctctgtgcctcttgcttatctcttcccacctctctttggctccagtttcgactatgtagatcaatttgcctctctgagatcctttaaattattctctgccctctttgtccaggcccagatgcacacaccaaagtactagaacctaacaggttgacctcaacacctcctgaaggctggagaacagggaagtcaggaggtcaggggatatgctgagtgataggatggctcagagggtccagttggggctttaatyctctctccaagctacaatgtgaggggctggtagaacaatcataagcattgcaagggtgtcaatgctttgagcatttccattttagatg

SEQ ID NO: 338648 - DNA, 441 bp, Homo sapiens
caaaaaaaaaaaaaaaaaagacaaaagtaaaagaaacctccttgttggtgcattggatatagcggacaaggcactgtcaagagccctggtatgtggcatgagatctggtatgacccatgaggtcaactattttctctctcttaggcttccttcaactcatccagtaacrcagatttttatctggacattctgtagccctacaagtctgtaaaaaccccagaaatccagccagtggtcagctactaaaacaatcctctctccatttcgggcgattgaaatatcagagacccatctgtccttccaaaaagaaaatacacacagagcctgggccagcagcaagtggtgtctggtttataattcttttttgagatgttctgcccacaacttagttccaacaatgaccaagaaaaggatagtagctctcctattgaggagaaaggc

SEQ ID NO: 338649 - DNA, 537 bp, Homo sapiens
ctattaggagctccagagcaaggatggtcctttccagttgtcccagttggaggcaagggagctgtgtcttcataccctcaaatctatgctgggtatagcattgtccctgaggagagggtttaagcttgggaaggaaaatctcttccacagggtaatgtcatagctgtaagctgtcattagtcaacactccctatagtgagggaaatgagtgtctcagttcctaagtaggaggcagtactcactacacaaattgcagggcactctgttaaaaagtatggagaatttcaagatgatgacagcaatgcaaaattgcagggcacacaaattgcagggcactctgttaaaaagtatggagaatttcaagatgatgacagcaatgcagtaaaccaagcatggaaccttctaagcaccgggccctgtgcatcactcattaagctggtgctgattgtggaccggagtggtatcttgmagcgtccacttgggtgttgtaaaaaagaaataagagagaaaccacaaacaggctaactggcttacaaa

SEQ ID NO: 338650 - DNA, 528 bp, Homo sapiens
cttaatggaattttggcaggtaggtgagaaggtatttctatcacaacaaaccatactttgtattgaatattagacattttcattcttgaaatttctaactggctcatatcccatatttttcactgatgacttcacaacatcygccagctcccaagcctctgtgctcccttctcagaagcctaagcagaaccctcttcttaagtacaaaccagctgccctggaaacacatatatttactttttctactttattttagttactaaggttttcattgttgttgttgttgtttatacaaggtctctgtcacccaggctggagtgcagtggcacaatcatggcttactgcagcctcaacctcctgggctcaagcagtcctcccaccttaacctcctgagtagctgggactacaggcacataccaatatgcccgactaatttattctttgtagagacactatgttaccaggctgctctcaaactcctggcctcaagtagtcctcctgcctcagcctcccaaagtgttgggatta

SEQ ID NO: 338651 - DNA, 657 bp, Homo sapiens
cacctccatagatagctattattatagcatctgtttcctaggtatagtgaagtgccaactccatgtaccaagggatgctagtgtgggtgcccactgattgatgaaaccgaaatccagccttctacttcgacacacacccacaacataagaggaaagaccagctgaagtccaggctcgggctatcaggattatagtcccagctgtgttgctgtgtctttcctttctagagtccctttgtttccacctctgtaaaatgagattagaatactttaaaaagtgtgtactaagaatcaccagggcctttttaaataggcagattacaaattggcacacccagagtttctgatccccgagctcggggtggggtcaaggaatctattttttaacagacctcccaggtcatatagggccatggctgatttctgacaacacactttaatatcatcaaaatggagaatctttaagttgaaagtctgatggccaatatttccatcaaattaaccgcataaatatctcattctctcccagaaggtatttttaggtgttggataaatgagtcaatccctgttaatatgagattacttttgagtaatggaacattgtrgcccatataattaatgcgtcctccttcctcttgtcaactctgcatgaaggccc

SEQ ID NO: 338652 - DNA, 575 bp, Homo sapiens
tttgagcttattctgtcattgtgtctaagtcgataattttacacgccctgcacgttgctgtaaggattaaataagatagtatatatgaaagaaaaacatctcctaaaatggtgtctagagcatgtagagacactataactattaactatcattcaattaaactcagaaaatatattgataagcaaaggagttttgtgattaaaattggtattctatcttttcttaatttagatgttataaaatacatacatattctccctcccttcrgaaaaaatgatctcttcaagttattttacagctctagaaaggacttcatctgtcttgatatttggaaatttgcttcttaataataataaataaactgagcacacactgtctgtggtaggcagaaataccaaaactatctacttcctaaaccctgtgaatatgttaccttaacaccaaaaggaactttgcagatgtgatcaagttaaggaccttgaaatggaataaactaaattatcccagtgggcccaatctaatcttatatatgctctttataatcagatatccctttccacgtgtggccccgagaa

SEQ ID NO: 338653 - DNA, 575 bp, Homo sapiens
tttgagcttattctgtcattgtgtctaagtcgataattttacacgccctgcacgttgctgtaaggattaaataagatagtatatatgaaagaaaaacatctcctaaaatggtgtctagagcatgtagagacactataactattaactatcattcaattaaactcagaaaatatattgataagcaaaggagttttgtgattaaaattggtattctatcttttcttaatttagatgttataaaatacatacatattctccctcccttcagaaaaaatgatctcttcaagttattttacagctctagaawggacttcatctgtcttgatatttggaaatttgcttcttaataataataaataaactgagcacacactgtctgtggtaggcagaaataccaaaactatctacttcctaaaccctgtgaatatgttaccttaacaccaaaaggaactttgcagatgtgatcaagttaaggaccttgaaatggaataaactaaattatcccagtgggcccaatctaatcttatatatgctctttataatcagatatccctttccacgtgtggccccgagaa

SEQ ID NO: 338654 - DNA, 575 bp, Homo sapiens
tttgagcttattctgtcattgtgtctaagtcgataattttacacgccctgcacgttgctgtaaggattaaataagatagtatatatgaaagaaaaacatctcctaaaatggtgtctagagcatgtagagacactataactattaactatcattcaattaaactcagaaaatatattgataagcaaaggagttttgtgattaaaattggtattctatcttttcttaatttagatgttataaaatacatacatattctccctcccttcagaaaaaatgatctcttcaagttattttacagctctagaaaggacttcatctgtcttgatatttggaaatttgcttcttaataataataaataaactgagcacacactgtctgtggtrggcagaaataccaaaactatctacttcctaaaccctgtgaatatgttaccttaacaccaaaaggaactttgcagatgtgatcaagttaaggaccttgaaatggaataaactaaattatcccagtgggcccaatctaatcttatatatgctctttataatcagatatccctttccacgtgtggccccgagaa

SEQ ID NO: 338655 - DNA, 571 bp, Homo sapiens
ccatttagagagctcaccctatctctgtagcttggagagtcttgaggtgaaatgaaaatcccaaatgattttccaaattgtagtttgcaaattaaataggaccaagtcaccctttctgctaattttataacaacagctgtgtttaaaattaaacacctgtctttccttattattatggctcagcaaaagaaagaagatccattattttgagaagaatttatttattcattaaataatttttttttaaatttactttgatttggtctctcattgaagcactcaaccaatagggtgtggacagcatagaataattttttttctcccacattctcctttctttttcataaatgtagaattctaggcagaaagtgaatccctgtaaaattttaggcacacagtcagartgacagagagatattaataaatgccattgcaggccgggtgcggcggctcacgcctgtaatcctagcactttgggaggctgaggcgggtggattgcctgagctaaagagttcgaaaccaggctgggcaacatgatgaaactctgactctacaaaaatacaaaaaaaaa

SEQ ID NO: 338656 - DNA, 571 bp, Homo sapiens
ccatttagagagctcaccctatctctgtagcttggagagtcttgaggtgaaatgaaaatcccaaatgattttccaaattgtagtttgcaaattaaataggaccaagtcaccctttctgctaattttataacaacagctgtgtttaaaattaaacacctgtctttccttattattatggctcagcaaaagaaagaagatccattattttgagaagaatttatttattcattaaataatttttttttaaatttactttgatttggtctctcattgaagcactcaaccaatagggtgtggacagcatagaataattttttttctcccacattctcctttctttttcataaatgtagaattctaggcagaaagtgaatccctgtaaaattttaggcacacagtcagagtgacaragagatattaataaatgccattgcaggccgggtgcggcggctcacgcctgtaatcctagcactttgggaggctgaggcgggtggattgcctgagctaaagagttcgaaaccaggctgggcaacatgatgaaactctgactctacaaaaatacaaaaaaaaa

SEQ ID NO: 338657 - DNA, 635 bp, Homo sapiens
tagatctttaaatgccaaattttaacacgttttcaccatatcatagataaaaatttaataggagaacaagacctagaatgttctggtgctcaatggaaaaattttcaggtattttaattttagaatcatttatgtggtgtcagtgagttttaaaaaaattatcaataaaggcaaaaatgctaaaaggtttctcggagccagtattatgaggaaaccgaaacctgttaggaaattggttataatatggaatgtgcatattaaaatgycataaactttattgaaaactctaaatatgtaactagagtttttactaagttcataaaacataatattggatacagcatcttttgtcaatccttgtggttcatgtgtcaattacctggttacttagtaaccaagtaatccagtaaccaagaagtcaagccatagattaaatagtccccaaccgggcaataaaaaggtccctgagtacaaatttgcagaattatggtttattgtgttaataatctccccatgtctgtggctagccttccacggatgggctggcgagtgtgtgctactctggagcccagccgtagtgcttgctattttgttatagtacctgcttttcagagaggaaattaaaccacaaagca

SEQ ID NO: 338658 - DNA, 635 bp, Homo sapiens
tagatctttaaatgccaaattttaacacgttttcaccatatcatagataaaaatttaataggagaacaagacctagaatgttctggtgctcaatggaaaaattttcaggtattttaattttagaatcatttatgtggtgtcagtgagttttaaaaaaattatcaataaaggcaaaaatgctaaaaggtttctcggagccagtattatgaggaaaccgaaacctgttaggaaattggttataatatggaatgtgcatattaaaatgtcataaactttattgaaaactctaaatatgtaactagagtttttactaagttcataaaacataatattggatacagcatcttttgtcaatccttgtggttcatgtgtcaattacctggttacttagtaaccaagtaatccagtaaccaagaagtcaagccrtagattaaatagtccccaaccgggcaataaaaaggtccctgagtacaaatttgcagaattatggtttattgtgttaataatctccccatgtctgtggctagccttccacggatgggctggcgagtgtgtgctactctggagcccagccgtagtgcttgctattttgttatagtacctgcttttcagagaggaaattaaaccacaaagca

SEQ ID NO: 338659 - DNA, 604 bp, Homo sapiens
aatcaagatcgttttatattaccaaatatatagatatagaaatcaatggaacagaataaagatttcagaaggagacacacacataaatgaacaattgattttcatcaaaggtttcaaatgaaagtcttttcaacaagttatgttggatcagttagatacctattggggaaaaaaagtaaaaaacctcaaaccttacttcacaccacacataaaaactaattcaaagtgtaccatacatgtaaaacctcaagtttctaggaagaaatcttagaacacatgaatgttcacagcaatttattwgtaatagaaactgaaatcaacctatgaacaggtgaataggcaaacaataccgttcaacaattaaaataaccaaactattgattaatgaaatactatgtataaatctcagaaattctagaaaatgcaaactaatctgttgtagcagaaagaagatcagtgattgcctggaagcaggagtggagggagggatagattagaaagttgaggggtaatagaaatgcttactatcctgattatggcaatcgtttcttgaaggtatacatatgtcaacactcagaaagttgtacatcttatagagtgtgtt

SEQ ID NO: 338660 - DNA, 604 bp, Homo sapiens
aatcaagatcgttttatattaccaaatatatagatatagaaatcaatggaacagaataaagatttcagaaggagacacacacataaatgaacaattgattttcatcaaaggtttcaaatgaaagtcttttcaacaagttatgttggatcagttagatacctattggggaaaaaaagtaaaaaacctcaaaccttacttcacaccacacataaaaactaattcaaagtgtaccatacatgtaaaacctcaagtttctaggaagaaatcttagaacacatgaatgttcacagcaatttattagtaatagaaactgaaatcaacctatgaacaggtgaataggcaaacaataccgttcaacaattaaaataaccaaactattgattmatgaaatactatgtataaatctcagaaattctagaaaatgcaaactaatctgttgtagcagaaagaagatcagtgattgcctggaagcaggagtggagggagggatagattagaaagttgaggggtaatagaaatgcttactatcctgattatggcaatcgtttcttgaaggtatacatatgtcaacactcagaaagttgtacatcttatagagtgtgtt

SEQ ID NO: 338661 - DNA, 635 bp, Homo sapiens
ccccaaattattttcctcttttctctagagtaatatatttcaaatgtgtcctgcaaattgccttcctgaaataatagttgttgcaatgttaaacagtattgtggttatgacaaagaaattttcaaattaagattttatgagactgacgcactgcctcctgcactaaggaggcaactccgattcagattttaatacctgaatacctaacattgtgagggacaggatggctttaacacagtgcagtgactattgagagtttggagctactgaaaagttgttgcatgatatacttggcctttagtttcagagcatggaaamttattttggaagtttgttttgattttagaaaagattttaatgactttccctaaaacaagtttctttagatctaagacaaactgactttacttagaaacatacggttataacaaatgctatggaaaaatggtgtaaaaaatggctgatcatttacagaagttacatggttcatgtctgtgcacccaagacataatgtgaccagtatgcatcatatttaaaatctatctttatgtggcacccttcttagaacatgagatttctatttgttgcctcatgttgttaccatgtgtgactcaatcagcagtttctgttgcctg

SEQ ID NO: 338662 - DNA, 545 bp, Homo sapiens
aaataatcacactgacattgttctgcaaccatcatccacattcatagggaattttattcattttgcaaaactgaaactctgttcctgttaaacaacagcccccctttaccttccctttggcccctggaagctactcttccactttgtgttcctgttaatggaactaccataagtacctcatatgtgtggaatcatacaatgtagtaaaaaatatcatgaggaagaataatacacattgtataacatatttattaatttaaaaaacttgttttttaatttaaataaacacagagatcagtagcatatagagaaagatagataaaaaagaaaaagcagttagaaggctgtsttcaatttatgactatggtgtctcaaattccggagcagtgaggcccctgccccagacacaaggctggtcacggtgcagctgggagcccagtgcagctgtctgactcccaaagcccatgctcagcccaaatatcactgagccctgaggcactctgcccctgccagcccaggcactcagtgccagtgagattcaccat

SEQ ID NO: 338663 - DNA, 599 bp, Homo sapiens
tccacaccatgtgttgttttttgacttctgataattgccattcttacaggaggtgcaaggtggcatctcattgtgattttaatttgcatttccctgatgattagtggtgttgagcattttttcatatgtatattggtcatttgtatatctttggtaaagtctcgggttacaaaatcaatgtaccctgctggtacattgtaccaacaccaagctgagaatcaaatcaagaactcaatcccttttacaatagctgcartaacataaaataactaggattatacttaacccaaggaggcaaaatatctctacaaggagaactacaaaacactgctgaaagaaaccatatgtgggacagacaaatggaaatacatctcatgctcatggattggaagaatcaatattgtgaaagtgactattctgcccaaagcaatctgtggattcagtgcaattcccaaaaaaataccaatatcacttttcgcagaattagaaaccaaaattttaaaattcatatcgaggcagaaaagagcctgaatagccaaagtaattctaagcaaaaagaacaaatctggagggcatcacatcactgcaattcaaattat

SEQ ID NO: 338664 - DNA, 573 bp, Homo sapiens
  misc_feature (1)...(573): n = A,T,C or G
ctacaagtctgtagttaccaaaacagcatggcactagtataaaactaggcacaaaggccaatgaaacagaatcaagaaaccagaaataagccaaatacttacaattaactaatatttgatgaagcatacatgaatatgaattggagaaagaagactctttttaataaatggtgccaggaaactagctagccacatgtagaagaatgaagctggattattatctctcaccttatactcaaatcaactcaagatagatcaaggactgaaatctaagacctgaaatcataaacattctagaagatgactgargtggggggtggggggctcttctgaacattagactagacaaagaattcttgactaagagcctgaaagcaaatgcagataaataaataaaaccttatttaaaagcttctgcatagcaaaaaaaaaatcagagtaaacagaaaacccatagaatggaagaaaatatttgcaaactatgcatccgacanagcactagtacccagaatctatgaggaagtaaagcaaattagcagaaaaaaataactccatcaaaaagtgggcgaatga

SEQ ID NO: 338665 - DNA, 592 bp, Homo sapiens
cctctcccattgagggcatgtggctccctctcaccaccacccaggcccacaggccacaccatctgtttcactgaccagcmaccaagttgcccattgatgggtgagcctcccatgtagcaggtacaggctgttacctttgtcttcagggcactgacaggggcagctctgtcactgtaaggcagtgaagagagctgaagatctgcaccaggccaggggccatccccctccctgagcaggccccaggaaaggactagccccatccacatccaccccaggtctcagcctccctgctggctgatacccaggagaggctgggaaatgggaacagaggaagcacagggctgggcaggtgctgcttgggattcatgggggtttgggttacccaatggggttgcccctcctgaattggagttagcgtcctctttgggaacaaagaaactctagtcttgaggtgggccagtgctgcccaggtttgtgtgtctggaccttgagagaagaccccaggaagtgaccacatcctcaggttgtggtgcagggaacctggcctgagaactgcccagtgtgttaaggcccctggagcctgtctgcccga

SEQ ID NO: 338666 - DNA, 592 bp, Homo sapiens
cctctcccattgagggcatgtggctccctctcaccaccacccaggcccacaggccacaccatctgtttcactgaccagccaccaagttgcccattgatgggtgagcctcccatgtagcaggtacaggctgttacctttgtcttcagggcactgacaggggcagctctgtcactgtaaggcagtgaagagagctgaagatctgcaccaggccaggggccatccccctccctgagcaggccccaggaaaggactagccccatccacatccaccccargtctcagcctccctgctggctgatacccaggagaggctgggaaatgggaacagaggaagcacagggctgggcaggtgctgcttgggattcatgggggtttgggttacccaatggggttgcccctcctgaattggagttagcgtcctctttgggaacaaagaaactctagtcttgaggtgggccagtgctgcccaggtttgtgtgtctggaccttgagagaagaccccaggaagtgaccacatcctcaggttgtggtgcagggaacctggcctgagaactgcccagtgtgttaaggcccctggagcctgtctgcccga

SEQ ID NO: 338667 - DNA, 592 bp, Homo sapiens
cctctcccattgagggcatgtggctccctctcaccaccacccaggcccacaggccacaccatctgtttcactgaccagccaccaagttgcccattgatgggtgagcctcccatgtagcaggtacaggctgttacctttgtcttcagggcactgacaggggcagctctgtcactgtaaggcagtgaagagagctgaagatctgcaccaggccaggggccatccccctccctgagcaggccccaggaaaggactagccccatccacatccaccccaggtctcagcctccctgctggctgatacccaggagaggctgggaaatgggaacagaggaagcacagggctgggcaggtgctgcttgggattcatgggggtttgggttacccaatggggttgcccctcctgaattggagttagcgtcctctttgggaacaaagaaactctagtcttgaggtgggccagtgctgcccaggtttgtgtgtctggaccttgagagaagaccccakgaagtgaccacatcctcaggttgtggtgcagggaacctggcctgagaactgcccagtgtgttaaggcccctggagcctgtctgcccga

SEQ ID NO: 338668 - DNA, 461 bp, Homo sapiens
attttgtcttctgaccaatgacatgattctgtctttcgtaggctactcgaaaacttctataatgatggtagagttcagtgaagtggagcctcaggcctgccatccccatgcttctggcaagcagcagcatctcccctgagcatggtggcatagggcatgccattaaaaacaccttgctgctgttcatctccacatactaagttgctgtacactttgcagtggaattccatcttgctgcgtctggttggccagaagccctacaggtagaatgggatggtcaggagagcacattgagagaataaatgggagcttagaggttgcccaccttgctgcccctgcccatgggtsacagccctcacctggctgtccagcttgtatgtctactgaaggctgctgaacttgttctccatcacagaggtggtgtgacagcagtctgagggcaccacactccatgaccgggc

SEQ ID NO: 338669 - DNA, 581 bp, Homo sapiens
atgtcttcagggcaatcttctcccaaatcctttccaccatagaatgaatcgattgtccctaaaaactaaaatgtgtaagcttggagttaggaacacattagcttggagttagagcatgtggatttccatcaaggctctgttgttcmgcatctgtgtgaccctgaactaatctctcccactttctgagcctcagtttccccatttgaaaaataaggaggttggactagattagtgtcttttaaactccttctcttccttctctgttcctttcttatttgttcccttctttctcctcttcttcttatgactatggtagccaaaaacatttttcaaataaataaatattcaaagaacgttttgtttaaagcgagactggggatcgtggagcctctgactattgagctttctctcctcccactacttcctatagtggcccaagaagcacttctaaagacccctgggattccagcaaaccccatctgaagaacccctaacctcttagttttagggctcttatgctacagtattctatgactcagggcaacagaattcaaatggctttgattaaaaccatttcaact

SEQ ID NO: 338670 - DNA, 511 bp, Homo sapiens
aaatggctggtcttcctcatccatggaaagcacattttgggaggatctcctcctctgacacagatgagtccttgggacaaagctcaggtcaaaactggaaatctatttcacagtaggtttatcatgcacatttggggtcttttcaatggcaaaactgggacaagtcatgtcgaggaccactaactttaaaagtaaattagaaaccctccacagaacacagattacctaaaaaagcggcatgatttctcttttgcgaaagccagcaggggcgggcagaagaggaagaatatgacttctcaaacaatatacaggcagggcacaggggctccagtctgtaatctcagaactttgggaggcggaggagggagaattrcttgagcctaggagtttgagatcagcctgggcaacacagtgagacccccatctttacaaaaaaaaaaatgagtggggcatgctggaatgcacctgtggtcccagctatttaggaggctgaggagaaaggatcgcttga

SEQ ID NO: 338671 - DNA, 538 bp, Homo sapiens
tgccaccacacccggctaatttttgtatttttagtagagatggggtttcactatgttggccaggctggtctcaaacccctgatctcaactgatccacctgcctcggcttcctaaagtgctgggatgacaagcgtgagccactgcgcccagccttctcctgggacatcttgttgcttactcacatacgatgggccatctccttatgcagagtgggaagaagggkgctttagagtcaggcacaaccaaaacgccaagcttgcagcctccatcaagtattgcaaagaagccagacacaaaaggctacccagtgtatgattccatttatacgaaatgtccagaataggtaaatccatggagacagaaagcagtggttgccaggggcttggaggaggagagaatggggagtaattgctttgtggatatagggtttccttttggggtgatgaaaatgttttggaactagatggaggtggtagttatacaacctcactgatgtactaaatgacactgaattgttcacttaaaaatggctaattgt

SEQ ID NO: 338672 - DNA, 611 bp, Homo sapiens
ctttgcttttgagaatgtatgggctatatatatttatatattttatttccgcttgtcatggggagttgagtatctgctattaacacaaagtttataaagcactttgagcttctaagaagagagatgattacaaagaagggtaagaacattaaagaagagtaagatggaagtattgaccctatttttccattcatttgattttttttttgcattataataatgtgacttttagaaactctacgtgcaaaggggacacacaccatgaggagatggtagtggacttataaggaaaagtagtaagcaatttaataaaatgaattcataacgcatgagagcatggctttttgagtcatagagacttgagtttgaatccttgctctgccacctgcaatatgtcargcactattctgcaagctttacaacaatcaatctttataataattgtatgaggtggatgagtaaacagaggtacagagaattttatagatgagtaaacagaggtacagagaatttgataccatgcccaaggtcacatagtccatgagtagagccaaaattagctgagataggtattcagaatctctgataatgtcttacatacacagtacata

SEQ ID NO: 338673 - DNA, 521 bp, Homo sapiens
cttctgggtccatcctcaacttctactttgtagtcttcaaaactgagagccttccaactgcaccctctgaacctcatggcccatcatcaatcttttccctaaagttttgttcaacttactgttaaccaaaaatgaagttttctttgagaacacatcttcctctgcacaattttcatgtcatggctgttttctttagtcctatatgccatatacactaggctgggagaggtatttcccacatcctatcttaaaacacactactttgaacctcaaggcaccagatttccagtcaccaccctctctgtaatagtcacctatcaatactccaagtcaccacccctcatttcttgaagactttgtttctgactacagtccctcccttcaggaactgaatacagttcctccctccaggaatacagtccctaagagtaaataacctcaggtattttgggttttgccttcmtcttgtcctgaatgtgaacattaatacgaattaatgtccccttaattcatattgacat

SEQ ID NO: 338674 - DNA, 606 bp, Homo sapiens
ttgacctcattctctcctactgctaagttcttcgctgtctgcttctttacattccagggctcagtattccagctttgcaaccccagcaaaacgagaccttctttctgtgcaaattcgtacacaaatcccagaggagattctggctggctttgttaggaccttgcccmacactaaacaaaaaccatgccagggaaatggacactatgattgacccagctaggtttatatgccagtctgtgcacttagaggtggtcagagcattgtaactggcagtttccccataattacctctagtgagggaggaattccccaaagcaatgcagttgtgctatcagaaggtgtatattacttttttggtatatatcgttttcaagagcaactttatttactgcagtatcaaataacagcaaaatattaacattgtgcatcactgtattctaatgaggcagcagatgttattgaaaagaccagtcgggctttagaacaagatctctcaaccttagcactattgacatttggggccaaaaaattctttgcagataaatatgttacatgctttgcagcacatttagcagcatactcagccactaagaagcagatgccagt

SEQ ID NO: 338675 - DNA, 606 bp, Homo sapiens
ttgacctcattctctcctactgctaagttcttcgctgtctgcttctttacattccagggctcagtattccagctttgcaaccccagcaaaacgagaccttctttctgtgcaaattcgtacacaaatcccagaggagattctggctggctttgttaggaccttgccccacactaaacaaaaaccatgccagggaaatggacactatgattgacccagctaggtttatatgccagtctgtgcacttagaggtggtcagagcattgtaactggcagtttccccataattacctckagtgagggaggaattccccaaagcaatgcagttgtgctatcagaaggtgtatattacttttttggtatatatcgttttcaagagcaactttatttactgcagtatcaaataacagcaaaatattaacattgtgcatcactgtattctaatgaggcagcagatgttattgaaaagaccagtcgggctttagaacaagatctctcaaccttagcactattgacatttggggccaaaaaattctttgcagataaatatgttacatgctttgcagcacatttagcagcatactcagccactaagaagcagatgccagt

SEQ ID NO: 338676 - DNA, 607 bp, Homo sapiens
gtagggaaaaaagtagcgacacttaaatgagaggtgacttagctcaagctaatgatctaaatgtaagattgcagtcttgggttttgtttygttttgtttctttcccctgacatgatgctgttaaaaaataaaaatcaccttgaagcactttgaagcccaaatgcctcctgggtatggtatcatttaggcatatgctagctagctaactagttcagtttcccaaaaagagaactgctatcagggagcatttcatttgaggtttactagaaaacaggatgcttccttggtgtttttgttttcatttatttttccctccttgcttttcaaatgcttttaaataataatgagttttgctttagattgctttctgaaactcacctgagggggaaaatatggagtttatcattagaattttatttttataggtgatgtggtcagaaataaacttttgatcttagctgaattgatttgttttttccaaatttaagaaggaagaaaataaccttttactgtacttcctgtttgtcctcataattctataacctttctcagttatgggtcagtctttcagccaagaatagtggatatgtagaatccacttacctga

SEQ ID NO: 338677 - DNA, 607 bp, Homo sapiens
gtagggaaaaaagtagcgacacttaaatgagaggtgacttagctcaagctaatgatctaaatgtaagattgcagtcttgggttttgtttcgttttgtttctttcccctgacatgatgctgttaaaaaataaaaatcaccttgaagcactttgaagcccaaatgcctcctgggtatggtatcatttaggcatatgctagctagctaactagttcagtttcccaaaaagagaactgctatcagggagcatttcatttgaggtttactagaaaacaggatgcttccttggtgtttttgttttcatttatttttccctccttgcttttcaaatgcttttaaataataatgagttttgctttagattgytttctgaaactcacctgagggggaaaatatggagtttatcattagaattttatttttataggtgatgtggtcagaaataaacttttgatcttagctgaattgatttgttttttccaaatttaagaaggaagaaaataaccttttactgtacttcctgtttgtcctcataattctataacctttctcagttatgggtcagtctttcagccaagaatagtggatatgtagaatccacttacctga

SEQ ID NO: 338678 - DNA, 607 bp, Homo sapiens
gtagggaaaaaagtagcgacacttaaatgagaggtgacttagctcaagctaatgatctaaatgtaagattgcagtcttgggttttgtttcgttttgtttctttcccctgacatgatgctgttaaaaaataaaaatcaccttgaagcactttgaagcccaaatgcctcctgggtatggtatcatttaggcatatgctagctagctaactagttcagtttcccaaaaagagaactgctatcagggagcatttcatttgaggtttactagaaaacaggatgcttccttggtgtttttgttttcatttatttttccctccttgcttttcaaatgcttttaaataataatgagttttgctttagattgctttctgaaactcacctgagggggaaaatatggagtttatcattagaattttatttttataggtgatgtggtcagaaayaaacttttgatcttagctgaattgatttgttttttccaaatttaagaaggaagaaaataaccttttactgtacttcctgtttgtcctcataattctataacctttctcagttatgggtcagtctttcagccaagaatagtggatatgtagaatccacttacctga

SEQ ID NO: 338679 - DNA, 565 bp, Homo sapiens
atgtacatctgctacagaggcaagaataatagggaatattacaagatgtaatcaatcataattcaaataagtttcaaggagaagaaaccagtaaacaatgcrgtactaccacagtataacttttaagggaaaatttttttaactgaatgaccacaaaactggaaaatgtgtacatgccagcaatattttcataaaaaattaattatacctttaatttctatttggaagaaatatatttactagctttagaacttatgatttttattcattttcatgctctttggagcctttacaaagagagcattttcaaattccctttttctttgtagtcataatctatttttccatagcttttagatatttttagtggagccaggaaatgtattatttagagttgtctactatctttctaaaatcaaaatgatccaccagtgaagaaatttcattttttcccagagagtgcttgggaaatggcactaagtcttaagaacatcagcttcttaaagaaaaaaaaatagtctcagaaaagtagatttggaatgtgtccttgtattttcaaaaatgt

SEQ ID NO: 338680 - DNA, 427 bp, Homo sapiens
gtactaaacgataagcatagaaaatttagaagtataattcctgctttcaggtatgtacagccttagaggaaaggcagatgaaaaaatacagtacaatgttatggatgcaatcatacatacatgcacaagactcagaggcattaagaaatgactctgttcagtttgagaktatattgtgcaaactatgaaataaataatttttatttacccagaatattaaacttaggatccaagtaaaaacattgaagtccaaatagcagatgccatgacaaaagatagcatggtaatcactactaaaattgtattgggtgataagaaattggagaggaagatgttttatcatgagaactaaaaagcatttctggggagtggtcagaggagaatgttgtaagttaaaaggaatttagttcaaatttcaaccctgcca

SEQ ID NO: 338681 - DNA, 427 bp, Homo sapiens
gtactaaacgataagcatagaaaatttagaagtataattcctgctttcaggtatgtacagccttagaggaaaggcagatgaaaaaatacagtacaatgttatggatgcaatcatacatacatgcacaagactcagaggcattaagaaatgactctgttcagtttgagagtatattgtgcaaactatgaaataaataatttttatttacccagaatattaaacttaggatccaagtaaaaacattgaagtccaaatagcagatgccatgacaaaagatagcatggtaatcactactaaaattgtaytgggtgataagaaattggagaggaagatgttttatcatgagaactaaaaagcatttctggggagtggtcagaggagaatgttgtaagttaaaaggaatttagttcaaatttcaaccctgcca

SEQ ID NO: 338682 - DNA, 583 bp, Homo sapiens
tctttttgaagaaaagcagataaaacaatttcctctctgctttttcaagattatgaatgatcatcatatttggaaaatattgatgaagaatgtaagatgagaaagtgtcaaaaagtaacagggatccagaggtcaagtcaagatgagagggtgtatctgagggccagagatctgtgatttagtgggctgttcagcaatccagcagaagagccccatgagtggcaagctctgagacagcactgcagcacgcaggccaaaagttgggtgctttatataaacttggcatcttgattcaattctaaagtctgatctctgggaaaccaaatygaagtttttgtgactgatttgctatcctcatttctgacaaagacatatgtgatactgcttttgccattaatatacttttgtttgagaaacaaaaagaatcagtgttctaaggttcacatgcctgaacctttatcagcgttctcattttcacagcagcctggatgggttctcctgctccaccctcttacttgcaataccacccacccactctgttcctgattccagagaactgagactgtttagggagaagagacac

SEQ ID NO: 338683 - DNA, 538 bp, Homo sapiens
gctttcttctaatccctgctccaggtccccagcatgtcactgacaaagaacttgacacattaggggcttcttgactatcagctcaaatgtggcatcccaggaygggcagcagttgtccagatgttggctacctcagaaataatgctttgcctaggccaagacaccttatgtactgtatattgttactacccactgggccataattagggatcttataagactttagcaactgcaactaccagcttctgtagtacatattagtctatcttgtaactttaaagcacttagtttccagtaatatgtgaatcatgaaggtagggaaaagcccataccaataccattatttagaacctcttctttaaaaaactgtgaataatgctgtaagactgaatagtactatctctctccatttagcgaattatgcaccaatactgctatcttctgaatacaataacttccaacattttgatataaaattttctacttattttgagaagattttgttcaatgccacataggcaatacataatcagcattt

SEQ ID NO: 338684 - DNA, 538 bp, Homo sapiens
gctttcttctaatccctgctccaggtccccagcatgtcactgacaaagaacttgacacattaggggcttcttgactatcagctcaaatgtggcatcccaggacgggcagcagttgtccagatgttggctacctcagaaataatgctttgcctaggccaagacaccttatgtactgtatattgttactacccactgggccataattagggatcttataagactttagcaactgcaactaccagcttctgtagtacatattagtctatcttgtaactttaaagcacttagtttccagtaatatgtgaatcatgaaggtagggaaaagcccataccaataccattatttagaacctcttctttaaaaaactgtgaataatgctgtaagactgaatagtactatctctctccatttagckaattatgcaccaatactgctatcttctgaatacaataacttccaacattttgatataaaattttctacttattttgagaagattttgttcaatgccacataggcaatacataatcagcattt

SEQ ID NO: 338685 - DNA, 553 bp, Homo sapiens
tggcttgtgttccttcactattaaaagaaaatttcatcttcaatagtgaataaatttttactgtagaaaacatttctctctgtttttctctcaatatctttagatttgtttactttggataagtcttatgcaaattttcttttcttcctttgcaattttattttccagttccagaacttccaactctacgtttacaatttcactttcaatcaaattttaagagttttaaaagaaaaaagcaggctggatgcagtggctttcagctgtagtcccagcattttgggaggctgaggcaggaggattgcttgagcccagagtctgcagtaggccatgattgtaccactgcactccagcctgggagacacagtgagatcttgtctctaaataaataaatggaaaagaaaaacaaaasagtcccctcaatcttgtcatccttctaccaatgtgggtgcctttgagatgtgcttccacattagcccacacttttgctatcacaacctcaccattattataatttccacaaaggcaaatgtcatgttatcttgttcattgt

SEQ ID NO: 338686 - DNA, 522 bp, Homo sapiens
tttctgactcattaaaattgcaaaaaaaaacacatataataacagtaataacaaggactaactattattaaattaagtgaggagctgtgctgtctgctttatatgtgattctccctgcaattccaagttagatgactctattctcatcgtgtagataaggaaacagacactcgagttttcaggtgccccattaacattcactactactttaaaattctgcttgacaagaattatgataggaggcaactccatttttgaataggtaaaaaagccaacttttaaacttcagtgtacttcattttaggtcgaaagaacttatactttcaattccactcaaaggtttcaagattcctaatagaagagtggtaggtagtgtacatgatagaagaggcagatttcatctaatagtgtactgtctaagaagatggatttgaaacagaaagagctaataacatcaaagattttctttgytaggtcatcctttatacattaattatacagaagtgccggcttaaatggata

SEQ ID NO: 338687 - DNA, 512 bp, Homo sapiens
atcatgtgcccacagtgacttacaggaggtaagtcgtgatttcttttagtaaattgagcctacaaatgaaggcatttttcatttatttcacgccaatacacttgccacaagcattatcagttgagtctcctaaagtgtcatttttgaaacgttaataarttcatttacattttccccagaccactgggggtcaattttcacttgtctatgcatattatttgactgctctttgaaatgcaataaacttttcaaagaattgatagttttttgttttactttgttttttaaacataagatagtattacatttcagcattgctgaagcatgcaatctgatagtctgaaaaaataattagaacatccatttccataacatatataatgacatagccatcttaattttttattgaaaccattgagccagatacatttcaaagttcagaatttttcagggtctagagaggtaacacctagcatatgtcatgtaattatataatacccacagcagggtct

SEQ ID NO: 338688 - DNA, 621 bp, Homo sapiens
attttttgtggttgctctgaagtccaaggataattttttcattttatttttaaatacttaaggattgaatacgtaaaggattgcaatgaaactatcatgaataattaaaatgcttgccttctgtaagcctacaagggtattttactatgccacatatggtatcatttcagcttggatattttgcctaaaacaagggaaaattttaataataagtcctacataaaattatagtaatgatgtttgtyccaaatagaaattctgtgtcctattgctatttcatctttttcatagtaagactcaaataaaatgattgtgatctttagtgaaaggactatggagccctgggaggcccagatgctcaacataaaaaaactagagatagaggagagatgaaaagattgagataaagggatctgtagatgctaaaatcaacacagatcctgaagacagatgtaggagagtaagagagaggcagaggcccggcagtgctaggattcaagtctatttctttcttagaattattgaaaatgtattgtaggctgtgtttgtttgaaaaataactgtcagaagaaaaaatatatatacattttaattttggaaaatttcacggctgcactcatt

SEQ ID NO: 338689 - DNA, 578 bp, Homo sapiens
atttcttttttttctttttcctttttaatttaaatcagagacatatgtttttcttggttaaacagtataatatgaatcacatgcatttttaagggtcagtgccaagaaaaagattttgtaacttaagaaaccaaaacaacaggttgacctcaatttaaatcccacaaaatctcattgtcttaatacaaggaaaacagcatgattttagtgcatatttctgaggaaataaagaagattatataacttgtttttttcttcctattagaggcaatctggaagcttcttaaattaacttaggagcaatttttctttcaggagcaaaagtatttagcttttggagctatatgtgtgttcatttaaccaatcaattaatttaatccatcaataaatttttgagtatgattttaattgtcaggtcctatgctaggttcagagtaaacacggtaagccaaaaacaaaacaaaaaaacctaaaaaaacaaaaaaccagacactgcccttctctctctttacagacaacaaataaacaacaacraaaacattgcacagttactcactgattatgataaattgccagca

SEQ ID NO: 338690 - DNA, 572 bp, Homo sapiens
tcatgccaatcaagttctgcccctcccacgcacaagggggaatttgtgctgggtgtgaattgacatatttcacttgctaacactgaagcatttggctttgattagaatccaacttaaatatttactttatattcacaaaataatgagaaatgaaatgacactctggagattaaaatgcatattcttgaacagagagggggaggattataacacatgwctgaatacaatcactggatttaaaaaacacagaacaattcctgttgaattaaagccccacataccagttccctaactaaagctatagggggaaaatcatagccaaagctttttccataaatacaggatagggacctaactagttccattatagaaaaaaggcatatttttaaaatatttttttcagtagaggagtaagtggagatatgctatcatactttagaacttgaagtactttcaaggaaaaacagaggataacacaatattccttaatgacaataggcaggcaacatagcaaataaagaagaaccacttagtgtttttatcttaaaagcccttataacagtttgctttgt

SEQ ID NO: 338691 - DNA, 581 bp, Homo sapiens
  misc_feature (1)...(581): n = A,T,C or G
taataacctaacaattatgggtwtggtttagcccagtaaatcttatatcacattacaaacttcaaaaacaccagctatgactaatcctattatgaaaacaaggatcctttccccagatgaacttangataggcttagggaggcttggagatctagagcatattagggtagagtccctttatttcaagatcatggggggtccttatagacgtcaagtcttttagatgttagctgatgaagctactgccttccctattcaccatctctctgtgtgctttccaggcacaactgctaggattctgaccatgctgattttaggctcaccaccccagttcttcatactacactcttcactgcttctgtctcaaacttacttggtataaggaaagtgttccattactattgtcttatctgttgtttgttaaaataatcaattggaaaacgcaagataaatagactttgacaaataaaaacaaatgaagggtatgttacctggaccgctgacattaaactgagggctgtttggggagaagctgttgtgtctctggactcggcggcttgatcgttttccaggccattgaa

SEQ ID NO: 338692 - DNA, 496 bp, Homo sapiens
agctgacatgacatatcagtgccaaaaaaaatactggactgttcaataaatggtgctagaaaaatgacttatctatatgaaaacaaaagagttaaattctgaatccatacacaaaaatcaatyccagtttaagacttacatgtgtaaaaatttaagttttagtatagaagaaaatagtttaatgactagagtaagaaggatttcttaaacaagatgcaaaatataaactatacctttagaacatagtatggcataactttcactttattaagttgtatatcaaaagacagcacttacaaattgaaaaaacaaacaaaccaagagaatttgcaaaacttaactaccaagggctggtgttaaaaacatttaaacaaatgctataaatcaataaggaaaaattagaatacataatagcaaatgatttggcaaaatacaggaacaggaacttcagaaagaagccagggaaagtccaatatagctatgaagaattactgaa

SEQ ID NO: 338693 - DNA, 616 bp, Homo sapiens
tctgaaaaaaaaaaaagaaaaaaaaaaaaagaagttacatgtagaattcttaactcagtacttggcttattstgtgtgtgtgtgtgtgtgtgtgtgtgtgtgtgtgtgtgtgtgtgtgtatgtgttgttagcccaatagctaaaaggaaagtatcacttttattgggcgagtagctatgaaagctaagccttaatggtgtctaagctaagaagcaaagctaacagaaacaaaaggaatggggtgggaggaaaaccagaaaagaaatggagggaaaatgcacatatctattaaagcaatgagaagcagcaagctaataatataagtattaatggtggtggtggtgatgatttctacatgtattgctctgttccagggtctaatttaagcattttccatagataagccattttaccttcacaggtactttgggggtcatgtggctacactgtccattgcctccccaaatagtactctcctcttactaacatgactctgccactgttcagtttgcaatacacccaatgtaccactcagtgttggactgagaataccctgataaccttactcctctctgctggacacttgtttcctagccttcccagtggccagcaatga

SEQ ID NO: 338694 - DNA, 563 bp, Homo sapiens
atagatgcaatttagtttttcaatattttcaatcyacaaatgagtaacctagcgatacaaagggcccactgtatattaccctatcttgaaatgaaatactgactggaagaatattttattcatgaaattgggataaattagttggcatatggtcttttcttgaccagcaagatgaaatcagtagcaatatcctggaaagatttgaaaccatgaaaataattaaaaacaatgtcaggagagaatgaagataaaatttttagtctctgtttttcctggagttgagctatgttttaattaatctgaaatttctactccctgtaagaaaaataataatgacaattataagattttggagaagtaggaagtagaaaaaattcaattgcttttcacacaccaaaactaaatatttacaactttagacatattaatattttaaaaagacatatgtaaactaagcatgccaagtataaccattgaaacaaaagctgttgcataaacaaatttgaatgaaatacagcatacttaacaagcaacacctctcttacataaaaagttcttttgta

SEQ ID NO: 338695 - DNA, 575 bp, Homo sapiens
gtgttacaatggcaattaaatttcaacatgagttttttcagagacatttaagccatagcacatgtaacatattgcaatgagagagatgtttacagtttgtgattttagatgttatagcacaatagtttactctcatctaagtcatgaaataaaccaaggacctgcaaatgacttatctgaggtcatatagattttggtcatctaaattttagtcaaaaaattagttttacagtctacttttttttattttattttttttgagatggagtctcactctgtcaccaggctggagtgcagtggtgtgacctaggctcactgcaacctccgccttcaggattcaagcaattctctgcctcagcttccccagtagctgggactacaggtgcccacyaccatgccaggctaatctttgtgtttttttttagagatggggtttcaccatgttggccaggaaggccttgatctcttgacctcgtgatcttcctgcctcggcttcccaaggagctgggattacaggcgtgagccactgcgcctggccagttttacagtttacttaaatattttctagcatacac

SEQ ID NO: 338696 - DNA, 604 bp, Homo sapiens
aaatggagagacctgaaacaaccatatggcctacaattgtatttcgactaatcttatcttcttaatggcttaaaggtaaatctaaagttaaattaggttcagaatgcaattgaaagttaaatggtgtgtaaattaatagttcaatttttaaagtaatggtattagtttggattttgaaataaactggtaaaaaaaaagccacatatgtaggaaataagaatgttttcaagtttgtaaaagttcattggaattgcttgcacagaaaagtaacaaacaaatgaaagagagacagcagcaatactaaatgcaaaatcacatagacctttgatgtctttcataagagaaggcacatttaagacaaatgtaagatgactgttggtgacagcagaatggctttwtatgtctttcaaaaaaaaagaaaagaaaagaactgacgaaagaataagtgatggttaatgatattcatggtgtgcatttattgctataatcaaattcatcgtccttcttttttccagtggagttttccacataagactacaatattttctttactgttttttatttccatttgaggatttttcaataaatcatttagtaggtgtta

SEQ ID NO: 338697 - DNA, 550 bp, Homo sapiens
attagaatttaatgtttttgataggttataaccaaagaaatgcctagcaactcagtatcactaaattggatttgaaattaaaatgcgattttatttattctatttatttatgcatctttttatttgttcatttgcttgcctcaggatatttgttatgtaaaattaaaattgtttttattctgcaaacagctaaacaaaaataagataaaaaacatgatgctttacgttatctttttccaggcattagtgaaagacatttcctaattacagtaaattcaatgtatcacattttattaactatgcaacataatccaattcattcatttgaaaatcacctgccaataagtaaattgattattttattgactcatgatatttgaataactattttaagctggtgaygtaaaacctaaatcttatggaattctctcaatcatatttaattactcactttatggctttatatttcttaaattttttcttctacatttactgaggaatcactgtatgccaatcacggtcctaagcacttaacattacaagggaatcc

SEQ ID NO: 338698 - DNA, 626 bp, Homo sapiens
aacaagtgaaaggcctaatagtgagaaaccctaagatcagaggcagggagagatgtctgctgtcaccgctttgattcaacatagtgcaagaagttccaagttaagcctctggataagaaaaaaaaagggaagaaatccccataaatcacaccatctaaaaaacctcagaattagttaagacctaaatgtaagaggtaatgtaataaaaatactagaagaaaacataggtacaagtgtttgtgatttggaataaagcttagatgtgactcaagaagcataagcaacaaatgacaaaaaagctggacttcatcaaaagttaaaaacttttgctcttcaaaacacaccatcaagggagtgaaagacaagccatagaatgagaaaaaaatgcaaatctgatawggtgctttatctgataaggcacttgtatctagaatatataaagaatagttaattactacttggtgataagcagacaaacgacccaattttttaaaatggtcaaatgatctgaatagatatgtctccaaagaatctatacaaatgaccaaaaaagcacatacaaagatgcttcccatcattagccatcaggaaaatgccaatcaaaaccacctttactgtaagttacc

SEQ ID NO: 338699 - DNA, 677 bp, Homo sapiens
ccatgccacacctcctgaagtaaggacacaaaatatcatgttcaaagtaatggtgaccctcatatgccccagtagagaatgatcaaatgaaaagccatttttaagctaatttcaccattagaagacattaatatcacaactatgttattttaatgtgcttttgaaatcyggtttaattttggcccaaaagaaagaaatttaaaagacactcaggattcttacaagcaggtcttgtgattccctctaaaatgtaaatttctctcctgctcttaggtaaaaaggttggtcgtccccttacttatctgataattcttggttaaaaaatgtgatggcaacttagaaacacattcttaacttactggtaaaatatgtctgacttatgttacattcaaagcatttaacttgcttaaaattgtatcttctttcttccataactagggacttctgtgagtttaacccctggcgaaaaagagggggatatggcccttctcttctttgcaacttgtagtttttcagaaattttttttagtattacataaaggtgactattcagagagatgtcagaatgataataaagttttatgtgattagtgttatcatagatgatttatttttccctaaaccagagagatgtttaaagcttcttgattttctgttggttcttaaatgtcctcact

SEQ ID NO: 338700 - DNA, 554 bp, Homo sapiens
agactggtttatagcatacctaaagagtttagtaacaaactcatagaacataactgcaacaaattgcaagtgaaaaaaaaggaatatttaaaatagtcaaaaaycttctaaaagtcaataaagaaaaaagtcaaataatccaatataaacatggagccaagacaggaacaagcattttagaagagaaaaaacccaaacggccggtcatcaaaaagcactcaacgcccactagttatcaggcaaaggcacattccgttcacaacacgttattcaaccatcaaattagaagcaaacacagacaataaatgcttgagactaagaggagcaactggtttgtaaactctagtaagaacataaatttgtaaaataattgtggaaaatagtctagtattatttattaaagttaaaggtgtccatatccaaggtctcagcgattctatcaccagatatatacccttaaaaaacaaaaatcctcttacacatgtgcatcaaggcctaccagaatgtctgttcaccaaagcatctttatcatagcaaaaaattgaatcaattaa

SEQ ID NO: 338701 - DNA, 567 bp, Homo sapiens
ttcttttacaattctaactagagatgtatttgttttattcatcatttcaaacaacttttgtctttattatttctatcttatgtktgttttctgttacctttattatttgttttcttcaacttaccttgaattacattaaatctttcttcagatggccctatagagtgaaaggtgatgtttttatcataaaccttttattctttctaatataaaaaattaaggctatacatttccctctaagcttcatcttacaaatgtttattatctttaaattatctataatttctcatttattttgtggtttcctgtgcatagcttaatttacaaatatttgggaatttctaaacattatagaatattttatctcttatttaattctgtagtgtcataacttaaaattttttgcctagccaaaggtcacaaatattttcttccatttttttttctataactgttgtggttttaacttttacattagttctctaatacacttttagctaatttttgaattgttgattgagattatttttgtttactgtggatatcaaattgttctactaccagttg

SEQ ID NO: 338702 - DNA, 573 bp, Homo sapiens
tgacaataccaaaatgagaggaaaacaatgcaagaaaactacatcccaatatctctcatgtatattacataaaaattcttaaaattttagaaatgcctrcgttcactttcaacattttttgctgctcatattttttataattttccccaaatgtcaaattaaagtgtcttacattcaataatatctctagttcaaagataaagtagcaaagagatagcagggaaaataataagatatattaattcaactaaaaatcaaacatgtagctctaaatatcaaatatagtaaatcagctagtgtcatttgaacaaataacaggtaatattagatttaattgcattaatagagcagaaaaaatcagggaatactacataacaagctatttgtgctaggtagtctgcaaagatggctgccacaaattcccatttctccctgtatgcacattccactcttcccatgaaggggtggagtcaactttctctctccccgggctaaccctgtatcttgctttgaacacagaatatgatcaaactgatactatgccagtaacagacaaagcctttaagcctggca

SEQ ID NO: 338703 - DNA, 573 bp, Homo sapiens
tgacaataccaaaatgagaggaaaacaatgcaagaaaactacatcccaatatctctcatgtatattacataaaaattcttaaaattttagaaatgcctgcgttcactttcaacattttttgctgctcatattttttataattttccccaaatgtcaaattaaagtgtcttacattcaataatatctctagttcaaagataaagtagcaaagagatagcagggaaaataataagatatattaattcaactaaaaatcaaacatgtagctctaaatatcaaatatagtaaatcagctagtgtcatttgaacaaataacaggtaatattagatttaattgcattaatagagcagaaaaaatcagggaatactacataacaagctatttgtgctaggtagtctgcaaagatggctgccacaaattcccatttctccctgtatgcacattccactcttcccatgaaggggtggagtcaactttctctctccccrggctaaccctgtatcttgctttgaacacagaatatgatcaaactgatactatgccagtaacagacaaagcctttaagcctggca

SEQ ID NO: 338704 - DNA, 590 bp, Homo sapiens
agataactgagtttggataaaataaaaaattttaatttggtggggcatggtggctcatgcctgtaatcccagaactttgagaggctgaggtgggtggattgcttgaacccagsaggtcaagaccaacttgggcagcaaagtgagaccttgtcactataaaaaaattaagaaattagccaggcatggtggcacgtgcccgtgttcccagccattcaggaggctgaggtggcttgagctgctgaggcagaggttgtggtgagctgtgattgcaccactgcactccagtttgggtggcagagtgagactctgtctcaaaacagaaatttttttttaaaggttcagcagtatattttatgtgttcattcagctttctgtagaaaaaaattgaagccagacttacctctgtgagacatgctatacatgaaatgtatatcaagcatttggtttagttagatggcacattgaagtactataaaaaaggacttttgtctgttctgaactttgcttcagtgaacacaacttgcctaactgtatttagtgtctggtttataagacatttgacaatatggcagagagtataataacatatt

SEQ ID NO: 338705 - DNA, 571 bp, Homo sapiens
tttcagtaaataaagatctacatcattatatttaatagtggcataaaactccattgtactcatacaccagaataagcagtttatttatagtcataatgcatgaaacagaagtaaattactcagatgtacacaggatatttaaccattcattacataacatggtaaaatctgaaaaataattatgagattttttttttttttttttttttttagacagagtcttgctctttcaccaggctggagtgcagtggcgcgatctcggctcactgcaacctccgcctcccgggtttcaagcaattctcctgcctcagcctccggagtagctaggactacaggcgtgcgccactaggcccagctaagttttgtatttttagtagggatggggtttcatcatgttggtcaggatggtctcggtctcttgacctygtgatccacccacctcagcctaccaaagtgctgggattacaggcgtgagccactgtgcccggtctatttttaagaaaagctatttatatttgaaacatgatgaaactgggatttgataacaaaatttttaaacaattcaacaaga

SEQ ID NO: 338706 - DNA, 474 bp, Homo sapiens
acaggattgtaataattactgatttagtgggggaaattaacacaaacataaaacacctctcatcaccatattgtgatgatagatagtgtactctcagtggacactgagcactcttagacagcagctggcttatcttttccaggtttccaaggggaaactgcgagctgttaaatcagcgttttaatcaatataccaatcttgtttaaggcattctgcttgctacccatttaaccttcagttaccagaggaaaaaggtatgcatcatcagattgcagtttccccctcactatactgttgcttcactcttcaaggattaggtattgagatattactaaaataaatgaacacaagcacagatatattttcacttaattatttgatttcaaagacaagactgtcaatttgctgaaactgatttacgcraacttgttatattctacaatttttgattaatcatgatatctctaaaaatat

SEQ ID NO: 338707 - DNA, 605 bp, Homo sapiens
catgaaacaaataccagaatacttaagggtagatgataattatgcagttttctggaaaacaaaagaaaattgtaaagcagataaaagtactaacaaaccaaccatactgagatcttagagaagttgccattctaacatcttgtggttggtattcaatgcataggtatttttctcatcatctcatcagcttcaaagcaaaacatggaccccagctttctttaggaagccgatatgaaaactatacttcataatattgcttctcggacttttggctaagatgaagtgaaaactgtacttaatgtaaaaatgacaagttcatgcattatgcattagaatgagagtttcttgactataatatrcttttcaaaataatcatgagggaacatatgtggcaaagcagaggaatgtgggtacatctggaaagcctttaagacatctcagaagcacaacacaaaatcacgaaaattgtaaacaccttccgtgtggccagctgcagtggcaacattgaccagtccaagagcagacaaacatctcagtgacccagagtttaccgggtgaaataaccataaagagaaattcaggtgtttaaaaatctgaccttatta

SEQ ID NO: 338708 - DNA, 605 bp, Homo sapiens
catgaaacaaataccagaatacttaagggtagatgataattatgcagttttctggaaaacaaaagaaaattgtaaagcagataaaagtactaacaaaccaaccatactgagatcttagagaagttgccattctaacatcttgtggttggtattcaatgcataggtatttttctcatcatctcatcagcttcaaagcaaaacatggaccccagctttctttaggaagccgatatgaaaactatacttcataatattgcttctcggacttttggctaagatgaagtgaaaactgtacttaatgtaaaaatgacaagttcatgcattatgcattagaatgagagtttcttgactataatatacttttcaaaataatcatgagggaacatatgtggcaaagcagaggaatgtgggtacatctggaaagcctttaagacatctcrgaagcacaacacaaaatcacgaaaattgtaaacaccttccgtgtggccagctgcagtggcaacattgaccagtccaagagcagacaaacatctcagtgacccagagtttaccgggtgaaataaccataaagagaaattcaggtgtttaaaaatctgaccttatta

SEQ ID NO: 338709 - DNA, 639 bp, Homo sapiens
ttcattccacaaacatctattaaatgctggccaatagggatacacagattaatgaggacatggctagggccttgaggagctaataggatatatgagaagcagacacataaagagaaaatgatagtatgtgatacagatgatgacaatgacagaatgagcctatggcatcgaggcatcacagtctaagaggcatatgtcaccaatgcatggagcasagtgcacgagcacgacaaagctgatgaaaacttcatatgtaggagaggtgtccgatgcctggatcctaagacataaccagaaccgttctctatagaggactctgccaagaaaccacaccttcctacctttggaacagttacccactctcacgactgcagatattgcacatgacgcctccattatttgttcaagtgttcaaaaatttttcattgagcacttactatatgcccgatctgcaatgtccaactcagtagccactagctacatgcaattactgtgtatttgaaaagtggctggtctaaactgagatgtgctgtaattataaaaacatgctggatttcaaggacctaccatgagcaaaaaaaagatttaaaacatctcattaatttttaaaataacatggtcaaatgatagtattttaga

SEQ ID NO: 338710 - DNA, 639 bp, Homo sapiens
ttcattccacaaacatctattaaatgctggccaatagggatacacagattaatgaggacatggctagggccttgaggagctaataggatatatgagaagcagacacataaagagaaaatgatagtatgtgatacagatgatgacaatgacagaatgagcctatggcatcgaggcatcacagtctaagaggcatatgtcaccaatgcatggagcacagtgcacgagcacgacaaagctgatgaaracttcatatgtaggagaggtgtccgatgcctggatcctaagacataaccagaaccgttctctatagaggactctgccaagaaaccacaccttcctacctttggaacagttacccactctcacgactgcagatattgcacatgacgcctccattatttgttcaagtgttcaaaaatttttcattgagcacttactatatgcccgatctgcaatgtccaactcagtagccactagctacatgcaattactgtgtatttgaaaagtggctggtctaaactgagatgtgctgtaattataaaaacatgctggatttcaaggacctaccatgagcaaaaaaaagatttaaaacatctcattaatttttaaaataacatggtcaaatgatagtattttaga

SEQ ID NO: 338711 - DNA, 639 bp, Homo sapiens
ttcattccacaaacatctattaaatgctggccaatagggatacacagattaatgaggacatggctagggccttgaggagctaataggatatatgagaagcagacacataaagagaaaatgatagtatgtgatacagatgatgacaatgacagaatgagcctatggcatcgaggcatcacagtctaagaggcatatgtcaccaatgcatggagcacagtgcacgagcacgacaaagctgatgaaaacttcatakgtaggagaggtgtccgatgcctggatcctaagacataaccagaaccgttctctatagaggactctgccaagaaaccacaccttcctacctttggaacagttacccactctcacgactgcagatattgcacatgacgcctccattatttgttcaagtgttcaaaaatttttcattgagcacttactatatgcccgatctgcaatgtccaactcagtagccactagctacatgcaattactgtgtatttgaaaagtggctggtctaaactgagatgtgctgtaattataaaaacatgctggatttcaaggacctaccatgagcaaaaaaaagatttaaaacatctcattaatttttaaaataacatggtcaaatgatagtattttaga

SEQ ID NO: 338712 - DNA, 639 bp, Homo sapiens
ttcattccacaaacatctattaaatgctggccaatagggatacacagattaatgaggacatggctagggccttgaggagctaataggatatatgagaagcagacacataaagagaaaatgatagtatgtgatacagatgatgacaatgacagaatgagcctatggcatcgaggcatcacagtctaagaggcatatgtcaccaatgcatggagcacagtgcacgagcacgacaaagctgatgaaaacttcatatgtaggagaggtgtccgatgcctggatcctaagacataaccagaaccgttctctakagaggactctgccaagaaaccacaccttcctacctttggaacagttacccactctcacgactgcagatattgcacatgacgcctccattatttgttcaagtgttcaaaaatttttcattgagcacttactatatgcccgatctgcaatgtccaactcagtagccactagctacatgcaattactgtgtatttgaaaagtggctggtctaaactgagatgtgctgtaattataaaaacatgctggatttcaaggacctaccatgagcaaaaaaaagatttaaaacatctcattaatttttaaaataacatggtcaaatgatagtattttaga

SEQ ID NO: 338713 - DNA, 620 bp, Homo sapiens
cacctaagttttcttctaagagttttattgtttcaatgcttacatttaggtcttagatccattttgagttaatttttgtatatggtatgtggtaggggttccaagttcacaatgagcacgtgaatagctcattgtcccaggactatttgtttaaaagactattatatcctttttgaattgttttggcaacattgttgaaaaatcagttgaccgcaaaagtacaagtctatttctggactctcaattctactccattgatctatgtctatcctcatggcagtaccatatcgtctctattactgtagctttgtaataagttttgggattgaggagttagaacctccaaatttgttcttctttttcaggtttgttaggctattttgaatcttctggattttcctataggttttaggatcagcatgtcaatttctgcaaaawagaggcctgaattttgacagactgtggttaaatctgcaggtcaatttaaggagtactggtatattaataatattaattcttccaatcaatatacatacatacatgccagttgttgaatgaaaatgatatttgatttaaaaatagagtaaaaatgagtatagatatctatgcattgatataat

SEQ ID NO: 338714 - DNA, 579 bp, Homo sapiens
agcaacatgcaagatactaaacccctttcttattaattattttaatataaagtgactaattatgtgaaatgggaagtcctagtgcatgaatgcacagaaaagcagagctgtgccccatgcacgactcagctttgtgcactcagagttcagatggcatagcacattactctccctccaatcatttaggtcatcagaacccactcgctgtgagtacatagccttttaatttagcagtgcagcttctctacctaaaacagcatgagccaagcaaagtatgactataagaaaaacacaatgtgctgattgctatagtcccttcagcatgtttgctragccataatataaaagaggaagggaaaatgactaccagatgccattgggcaagtatagagatggatttcaaaagtgaagtaatgatgattcccaacttattgaagatggaatggatagatgtatattttataatttctgttcgctaattccaggagaaattatgtatttcattttgattttaaattacttgctgccaatggcacattttgttcatctttatataaccactttttattcttagcagtg

SEQ ID NO: 338715 - DNA, 531 bp, Homo sapiens
ggtaatacagagaaaatcctaaaagttttcagtaataaaagtaaaaaaaaaatcacaggaaatatctggtatcagaatggcatagaacatctcaaccgcagcactagagatagaggaaaatggattagtatctccaaaattattgaaatgggagagttccctgaaccccacccctcacccctccctcagggtgtgtgacaagggtgtggcttatcttttctgccacagtgtgctcaaaccccttacaggaggggacacacgcaaatgggcaggtgcaggagctgtggtgagctcttttgggctctggccacaaggtagyatctagggtggatgcctgcaactcctgaagccccagtgggagtgttacagtgctcttttacctctgccatctgcagatggcttaagcgttaaccagctcagtgtcctcttggtacccaggtccttgtctgacattcaggaagaatcaggtcccatggagaaattgaaggatagtaaatatgtgggattttattgctggatggaggtagctct

SEQ ID NO: 338716 - DNA, 610 bp, Homo sapiens
ctctgggttaatttccaccaatgagaggcactcaaggatttgaaagtaagaagcaaagcaggatggtcttcaacaaaagtaagattttgcggaagcttcctgtgaatcacccacctcagttctagagctgtggccatcaccacatagtttactgcacatttttaaacttccataacaattcaaaagcaatgggacaatttccttttttattttgatccattgattaggaaagatttattgagtgctttctatgactctgatactggcaaggctctgtttgtagaaaatcaaataaacatttccctgccccaaaggaacttattacaatttttataaatatatgatgacaacaaaaaacacaaaartactcaaacctacagagattggtgagagatttctctcatttacagataaagagaagaggcagtactggtttttctttcactgaatattgcactcagcaatttgatcctgtaaagttgccaaggcaatgccaacggactatgacagcatatgggagaagacagacattcacatacacagacacagtgattttgtaagcctcctttattagatgccacactaaaaataaaagtttccatcaagatta

SEQ ID NO: 338717 - DNA, 605 bp, Homo sapiens
atttgcaggaaatagtgcagggaataaacatccaaagaaaacttttgataaaaacctgatgcttgaaacaaaaataaatattttatattcggtgtctcctgctgagttttaccattcgcactttaccctaatattaaatccttactggaatttttttacatatgaacatgatattcctagcaatttctagagaacagtatgcaagtcatagtcattatgcaaaaactaatgatatgaataaatatttatctcagaacatattagttagtgtcagaaatatacatacaggatgtatcagaattataaaaaaatcattttatgaaggattcagagttaaaacyacattgagctctatttaaatgttattagcataataactaaaacaacaaaataactttctagtcaggggagtaacaggacatcatggatgtgtaacaatatctcattcaacctacagtatctatgaatattttacatagtttttaattcctaaatttggctattttttcaatactgtttttacttacacaaacattatagtaagaaatattctatatattcacaataagattctggactgcaagttagtgaaatagccagactgg

SEQ ID NO: 338718 - DNA, 605 bp, Homo sapiens
atttgcaggaaatagtgcagggaataaacatccaaagaaaacttttgataaaaacctgatgcttgaaacaaaaataaatattttatattcggtgtctcctgctgagttttaccattcgcactttaccctaatattaaatccttactggaatttttttacatatgaacatgatattcctagcaatttctagagaacagtatgcaagtcatagtcattatgcaaaaactaatgatatgaataaatatttatctcagaacatattagttagtgtcagaaatatacatacaggatgtatcagaattataaaaaaatcattttatgaaggattcagagttaaaaccacattgagctctatttaaatgttattagcataataactaaaacaacaaaataactttctagycaggggagtaacaggacatcatggatgtgtaacaatatctcattcaacctacagtatctatgaatattttacatagtttttaattcctaaatttggctattttttcaatactgtttttacttacacaaacattatagtaagaaatattctatatattcacaataagattctggactgcaagttagtgaaatagccagactgg

SEQ ID NO: 338719 - DNA, 617 bp, Homo sapiens
gtggtggtctaggtttcttcttctacctacagatatccagtttcctcagcaccatttattaaggaaaatgtcctttccccagtgtatgttcttggcacttgtttcaagagcaagttygccttagatgtttggatttatttctgaattttctattctgttccattgatctgtgtatctgtctttatgccagtaccatgttattttgggttactatagatctgtagtataatttgaagtcagtttatatgattcctccagttttattctttttgttccagatggctttggctactctgggtcttttgttgttccatataggttactgattcagtaataacacatagaccaattcactttgtgagaaatccagaagccagttaagatactgttgtacccccaagcaagtgtgaaaccagtcacactgaatccagtaggaaactgtggcactcacttaccatagcccctcatcttgactcaccctggcacaatcagaaaaacttaagctcccagcttaaattttccctccctccaaatttcacagggaggggaaaaatgaagattgaaacatcatccaacattcagacttttgggggaggctgcccaaagaactattttat

SEQ ID NO: 338720 - DNA, 548 bp, Homo sapiens
cttgatatatctttatatatgcctttttgttctattcagctcctcaatggattggatgatggatacctactttggtaagggtagatcttctttacacagtctactaattcaaatgatcrttgcttctagaaataccctcataatacagaaaatatagagaggaatatatgtagatatgtctcctattggttctgtttctctggagactcctcactaacagaagtatcatggtggttcctttttctggacctgttaagagagggcttaataataagagactgttatactctgtgattgatcaagtccttaaagaaattaactgatttgacaatgtttatttacttgccaagaagaatccaaaatattttgatatgtgaaaaaaaaagtaggatttagtatgatagcatgaaagttttttcccaggtgactcgtataaatggttcatgaaaagtgcatgaaaccctgtcaggggatttcagttccagttcctgattcccttacctgtgccaccttggtccaggctcttacattcttggaaatgagtttta

SEQ ID NO: 338721 - DNA, 537 bp, Homo sapiens
ataacattttatacatataaacttaggcagatagaatataaaaaartgctaatgaataaataactttccactagctatctatcatggtagtaaaatacacatatatagatatttttattctctctatatatattttgacaaagtaacaaagcttatatatctatcagcaaatccaaaatgaaagatatgatcaaagtatgattaagctgcctcagaaacatgagccagtaatgctgtcacggaaaaaactattatatcatggaattgtttactgtgatctagggttgaagcatttcaatacttttcaacttgcaactgaggatgccaactgaagcatatagcatgacagcagcagaaacattagactcaatgtcaggcagaacatcgtatgtttcatttgcttgcttatgtttaagttttaaaattcgcatgaaacttgttattggtaccaacagaggacttacatcatgcccccctaacagctccctggtagtttgtgttatactttcatccttacacagaccaaataaatacagg

SEQ ID NO: 338722 - DNA, 537 bp, Homo sapiens
ataacattttatacatataaacttaggcagatagaatataaaaaaatgctaatgaataaataactttccactagctatctatcatggtagtaaaatacacatatatagatatttttattctctctatatatattttgacaaagtaacaaagcttatatatctatcagcaaatccaaaatgaaagatatgatcaaagtatgattaagctgcctcagaaacatgagccagtaatgctgtcacggaaaaaactattayatcatggaattgtttactgtgatctagggttgaagcatttcaatacttttcaacttgcaactgaggatgccaactgaagcatatagcatgacagcagcagaaacattagactcaatgtcaggcagaacatcgtatgtttcatttgcttgcttatgtttaagttttaaaattcgcatgaaacttgttattggtaccaacagaggacttacatcatgcccccctaacagctccctggtagtttgtgttatactttcatccttacacagaccaaataaatacagg

SEQ ID NO: 338723 - DNA, 621 bp, Homo sapiens
gacatattctgaaatcagaaggaataggttgtgtatgggaatggccaatttatcttagctgaaggagaagttctatcaaatttagtaatttaaaaaaaawtagtttgggattttttgtccttattttctctttccctttgcttacccagactctccatccagtcagccagaaaattcagtattctttgcttcagggaataactataatttcacagagcagagaataagtacttttgtttcccctcttttaagtttccattgtgtaggttttaaggaactagaaagaacacttgactgaaaaaagaaaaatgatcatttagaaaaatatcatgaataaaatgttaaacaaatgtgtagaggtcagacactcaattgtttttaaataaaaaatttgattagaaaagtgcagtacataattgagaagaagcccaggaacctattattgtcgttttcaattgttggtttgagttcctaaagttctaatcacattgaattttaaatgaaaatgacacgaattttctatttgctaaaatgactacctggttcagtcatatgcttatacacacacacacgcacacacacacactttttacccaacagttagagaatacatactattct

SEQ ID NO: 338724 - DNA, 621 bp, Homo sapiens
gacatattctgaaatcagaaggaataggttgtgtatgggaatggccaatttatcttagctgaaggagaagttctatcaaatttagtaatttaaaaaaaattagtttgggattttttgtccttattttctctttccctttgcttacccagactctccatccagtcagccagaaaattcagtattctttgcttcagggaataactataatttcacagagcagagaataagtacttttktttcccctcttttaagtttccattgtgtaggttttaaggaactagaaagaacacttgactgaaaaaagaaaaatgatcatttagaaaaatatcatgaataaaatgttaaacaaatgtgtagaggtcagacactcaattgtttttaaataaaaaatttgattagaaaagtgcagtacataattgagaagaagcccaggaacctattattgtcgttttcaattgttggtttgagttcctaaagttctaatcacattgaattttaaatgaaaatgacacgaattttctatttgctaaaatgactacctggttcagtcatatgcttatacacacacacacgcacacacacacactttttacccaacagttagagaatacatactattct

SEQ ID NO: 338725 - DNA, 621 bp, Homo sapiens
gacatattctgaaatcagaaggaataggttgtgtatgggaatggccaatttatcttagctgaaggagaagttctatcaaatttagtaatttaaaaaaaattagtttgggattttttgtccttattttctctttccctttgcttacccagactctccatccagtcagccagaaaattcagtattctttgcttcagggaataactataatttcacagagcagagaataagtacttttgtttcccctcttttaagtttccattgtgtaggttttaaggaactagaaagaacacttgactgaaaaaagaaaaatgatcatttagaaaaatatcatgaataaaatgttaaacaaatgtktagaggtcagacactcaattgtttttaaataaaaaatttgattagaaaagtgcagtacataattgagaagaagcccaggaacctattattgtcgttttcaattgttggtttgagttcctaaagttctaatcacattgaattttaaatgaaaatgacacgaattttctatttgctaaaatgactacctggttcagtcatatgcttatacacacacacacgcacacacacacactttttacccaacagttagagaatacatactattct

SEQ ID NO: 338726 - DNA, 533 bp, Homo sapiens
caatatggttttcattgtaatgatgacatttgagccactaaaaatatctcctcaataattgaatgcttgtttccaatttctactgctttctttggaaargacattatttttgaactatgcgctcatgcaaacttttacctcctgtgttgcagcacctatcccatcagactgtaaattatccgctttatgtgttcatcactcactgtggaatataaagttgatggacttgacaattagtgttatgagttattcaacttctttatcagagtacatagtaggaactaaaaaaactttttaactattttgaaaatctaaatataaaactttttttaaagtttctaaatggttatatttcaaaataaaaagatgaaaaattaagtatccacattaagatgttagcaacagaacaacagaataaattcaaagaaaatagaaaatagaaaaaatatagaaaagatgaaagtcaattctattaaactttcaaggataacatcccattcttataaaaagtatcctagaaaataaaatgcaac

SEQ ID NO: 338727 - DNA, 533 bp, Homo sapiens
caatatggttttcattgtaatgatgacatttgagccactaaaaatatctcctcaataattgaatgcttgtttccaatttctactgctttctttggaaaagacattatttttgaactatgcgctcatgcaaacttttacctcctgtgttgcagcacctatcccatcagactgtaaattatccgctttatgtgttcatcactcactgtggaatataaagttgatggacttgacaattagtgttatgagttattcaacttctttatcagagtacatagtaggaactaaaaaaaytttttaactattttgaaaatctaaatataaaactttttttaaagtttctaaatggttatatttcaaaataaaaagatgaaaaattaagtatccacattaagatgttagcaacagaacaacagaataaattcaaagaaaatagaaaatagaaaaaatatagaaaagatgaaagtcaattctattaaactttcaaggataacatcccattcttataaaaagtatcctagaaaataaaatgcaac

SEQ ID NO: 338728 - DNA, 639 bp, Homo sapiens
ggcattaacatgcctttgtgtttgaaaaatagcaaagaagtcagtgtggccaatgcagtattcttgattgggtttccctggaaataatctcattatcaaggaattgaatgaatgtagtttgcttaacaggtgatcctgagaagcaggcaaggcaacaaggcagagaaagaagaatggcttataaaaggtgagtggatgagagtttatcagaatgggcaaatgctgccccatcttgtagaggacttgctgaggactagctgaggatgcatttacacagcatctcagaattttccaccacaacagaggaaagcagtatttatccacagattcccatgtcttacagattaacagttgtccttggatcattatatcccaaacmcttctgggctgtcctgcagtgggctcagcaaatttccatgctgccagagtcagcccttgggcagagaagcaagaggccagatacacaagcttttgcagtgcaatcatgctagtcagcatagaaaatacccatcaccatagctgtaagtgaattcagaggtaggtcaatatgatatgagatggggcatcaacagtgtctgctgcaagcagtgagaacaagaggaatggagaaaaacaggaggaggcttcaggaaagggaag

SEQ ID NO: 338729 - DNA, 610 bp, Homo sapiens
gaggactagctgaggatgcatttacacagcatctcagaattttccaccacaacagaggaaagcagtatttatccacagattcccatgtcttacagattaacagttgtccttggatcattatatcccaaacacttctgggctgtcctgcagtgggctcagcaaatttccatgctgccagagtcagcccttgggcagagaagcaagaggccagatacacaagcttttgcagtgcaatcatgctagtcagcatagaaaayacccatcaccatagctgtaagtgaattcagaggtaggtcaatatgatatgagatggggcatcaacagtgtctgctgcaagcagtgagaacaagaggaatggagaaaaacaggaggaggcttcaggaaagggaagccttataaaagcattgtacatcttgtaatgattttaagttaaatgtggaaccattagagggttatggaatcatatatatggctgtggtattgaagatagactgtggttgatggagtagaagcaaacttagggacaggaagaactgtagaaagctgttaaagtaattctggcaagagataaagatgacttagatcagggtggtgctgggcaagtggtgat

SEQ ID NO: 338730 - DNA, 686 bp, Homo sapiens
atggtatctggaatagagcaaatggaaaatcttactattatcattagtaagattagaatttatatgatggagccagtggtgcaatggacagcacgtctgactatggaacagaagattataaaatttatatatctacccatatcatattattagtaatattgttatatattgaggtatgtaaaaggtacagtttcctcatgaatgttagtttaataaaagaaagagacaaagcttctcttgacttccttctcaatctggcagaamctcacctatacagaaattatcgctgacatctataggcccaatggtactaaagggcaaggagaaggctacactaaattgtgtcatctatgtctactgtatcttgctcctgttcattcttagaacgctggctaaatagatcaaacagtaatagctgatcagtgggttgccccttctcaccattccatactccaccagatacataaactttcaaccatatcattttaaagatatgtggtttatttccttagtttgtaaaagaaaaacatttaagacatagcatgatagcataactaaccaaatatgtctgtattacctaaaatccaggtttcactaggtatagatcatttctaagattttatttgcaagtaggggtatacataaaattagacagagaaaaaactcacctcttgtgatctttcaag

SEQ ID NO: 338731 - DNA, 686 bp, Homo sapiens
atggtatctggaatagagcaaatggaaaatcttactattatcattagtaagattagaatttatatgatggagccagtggtgcaatggacagcacgtctgactatggaacagaagattataaaatttatatatctacccatatcatattattagtaatattgttatatattgaggtatgtaaaaggtacagtttcctcatgaatgttagtttaataaaagaaagagacaaagcttctcttgacttccttctcaatctggcagaacctcacctatacagaaattatcgctgacatctataggmccaatggtactaaagggcaaggagaaggctacactaaattgtgtcatctatgtctactgtatcttgctcctgttcattcttagaacgctggctaaatagatcaaacagtaatagctgatcagtgggttgccccttctcaccattccatactccaccagatacataaactttcaaccatatcattttaaagatatgtggtttatttccttagtttgtaaaagaaaaacatttaagacatagcatgatagcataactaaccaaatatgtctgtattacctaaaatccaggtttcactaggtatagatcatttctaagattttatttgcaagtaggggtatacataaaattagacagagaaaaaactcacctcttgtgatctttcaag

SEQ ID NO: 338732 - DNA, 619 bp, Homo sapiens
actggtagcagaagagaaaatcagaaagattcaaagaatgaaaaatacttgacttgccattgttggtttgaaggtggagaggaccacgtgagaaagaatgcaggtggcttccagtaacagagcatagggcccagatgacacccagcaagaaagaagcagggacttcagatctacaatgcacagcaaggaactggactgcccatgatctgaatgaggatggaagtggactcttcccgagagcatccagataaaagcccaaaactcctgacaacttcatttcagccttgtgagactaagtaaagaatctagctgagccttcccaggcttctaatttacagaactatgaactaataactttgagaaaatgtataartcctctatgtttatgtgacattgctatcttcatttgggtcttataaccacagcacaatattacccttagtataggacaaacttattaataattgggacctccatgttaaaataaggaaagtttattagtgtatcgggtttctatttcttgaaacaaatttagtagcttaaaagaacacaaagctacacatagaaaaaaaatagctcttttattctctaaacctggtctaattttctgctggagcct

SEQ ID NO: 338733 - DNA, 619 bp, Homo sapiens
actggtagcagaagagaaaatcagaaagattcaaagaatgaaaaatacttgacttgccattgttggtttgaaggtggagaggaccacgtgagaaagaatgcaggtggcttccagtaacagagcatagggcccagatgacacccagcaagaaagaagcagggacttcagatctacaatgcacagcaaggaactggactgcccatgatctgaatgaggatggaagtggactcttcccgagagcatccagataaaagcccaaaactcctgacaacttcatttcagccttgtgagactaagtaaagaatctagctgagccttcccaggcttctaatttacagaactatgaactaataactttgagaaaatgtataaatcctctatgtttatgtgacattgctatcttcatttgggtcttataaccacagcacaatattacccttagtataggacaaacttattaataattgggacctccatgytaaaataaggaaagtttattagtgtatcgggtttctatttcttgaaacaaatttagtagcttaaaagaacacaaagctacacatagaaaaaaaatagctcttttattctctaaacctggtctaattttctgctggagcct

SEQ ID NO: 338734 - DNA, 527 bp, Homo sapiens
aatacagcattgtcctaatttatttttaatcttttcctatgatttattatgtaggacacttggacaatccctagagagctagaattctgcrctacagcatattcaacattgccatttattcatttaagtctatatttcttttttttaaagtctatatttccgaagttgcagtatctaatatttccaggaagttctcatagttttagtgtttgttgagtggaaactccactgtgtggtctttcagttgcaaaaatttccagttttatggagaaatatcagtaacaatttaatttccttctgttttgtgagcatcttttctgtgaatatctttcattaacaaaatgtttccaataatcacatcacatttttgaatgctgcttttgatttatgaagactgaaggcagatgacgagttaattgaaagaaagagcaaagggtatgggggaaaaattatatgatagagagctcagtgactactagctgtgtaagaaaatgaaaaatgtgcagattaactcatctatttctatt

SEQ ID NO: 338735 - DNA, 520 bp, Homo sapiens
caacatactttaggacaaatacgctaaagaatgggaaattaacttcttatgattctcatttttaaaaatccttttgcttgaagtatacctttcaaaaaccaaaagcattatgtcacatagagtatgtactttactcacaggatatcttcatccataatttttgatgaaatccacctaagttctgtcttattttayggaaaagacttttgatcattgcctactgtcaggttcttagatgggaatatctcaaagttttagaaataaaagtgagtctgaaatggaagttattcttaatccgactgaagaaaaattatagtaatattattaagaaattgagctttcatgtacgtaccactttctataaggcagtcattgttctgagtgcattacaaatacaatcaatttaattttatcataactatgtgaggcaaactattattattcacaatttacagatgaagaaattcacagacagcatagaactagtaagtgattacagatctgacctagggagtttggc

SEQ ID NO: 338736 - DNA, 520 bp, Homo sapiens
caacatactttaggacaaatacgctaaagaatgggaaattaacttcttatgattctcatttttaaaaatccttttgcttgaagtatacctttcaaaaaccaaaagcattatgtcacatagagtatgtactttactcacaggatatcttcatccataatttttgatgaaatccacctaagttctgtcttattttacggaaaagacttttgatcattgcctaytgtcaggttcttagatgggaatatctcaaagttttagaaataaaagtgagtctgaaatggaagttattcttaatccgactgaagaaaaattatagtaatattattaagaaattgagctttcatgtacgtaccactttctataaggcagtcattgttctgagtgcattacaaatacaatcaatttaattttatcataactatgtgaggcaaactattattattcacaatttacagatgaagaaattcacagacagcatagaactagtaagtgattacagatctgacctagggagtttggc

SEQ ID NO: 338737 - DNA, 520 bp, Homo sapiens
caacatactttaggacaaatacgctaaagaatgggaaattaacttcttatgattctcatttttaaaaatccttttgcttgaagtatacctttcaaaaaccaaaagcattatgtcacatagagtatgtactttactcacaggatatcttcatccataatttttgatgaaatccacctaagttctgtcttattttacggaaaagacttttgatcattgcctactgtcaggttcttagatgggaatatctcaaagttttagaaataaaagtgagtctgaaatggaagttattcttaatccgactgaagaaaaattatagtaatattattaagaaattgagctttcatgtacgtaccactttctataaggcagtcattgttctgagtgcattacaaatacamtcaatttaattttatcataactatgtgaggcaaactattattattcacaatttacagatgaagaaattcacagacagcatagaactagtaagtgattacagatctgacctagggagtttggc

SEQ ID NO: 338738 - DNA, 434 bp, Homo sapiens
attcacaatttacagatgaagaaattcacagacagcatagaactagtaagtgattacagatctgacctagggagtttggctctagaggccatgagcctgctcactacacagctcagtttctcattatgaaaaactacagatagctaggaaaaataaaaatcgctgcctgcatgtgagtaaaacaccaagccacatacmttttattacatatcataaactccacaaagcactttatctctttctctcttaagacacttatttcactctacctagtattataaatattttttacataaattctctcacataagtttatatcaagactctatattccctgacataaaaactgtgcctggtttttttaatctttcaaaatcctagtacagtcttccatattctttaaacattcattaagcatatttgcataatagaac

SEQ ID NO: 338739 - DNA, 554 bp, Homo sapiens
agacatgttcatgttacatttgccctatctaagggagtaataggaaataataatggagaaatggtagaaatcagggatagatatagatttgtaatttaccctcatttgaatgattgttgaagccatagaaaagaatttaatgaaaagaagaatggaaaataaagaaaagtgaaaaaagatgaggayagaatattgagtagtgactatgcatcctggcttaggataggggtgtgaaatgcaaaggaaagggagaaataggaaaagaactcgttgacataactagcacagataattttaaagaaagcaaaagaacaagaatttcaggaaatagggaataatcaaacttcaagtactgtggatggttcaataagaattaaaaaatgaaagaagtcttcaattttggtgacgaaaacagttcttagtgacaacagaacttttttttttttaattatactttaagttctagggtacaagtgcacaacgtgcaggtttgttgcatatgtatacatgtgccatgttggtgtgctgcacccattgactcatcatttacatta

SEQ ID NO: 338740 - DNA, 579 bp, Homo sapiens
cacttaactggagccctgagagtaccagatatcagaattggcatgctggtaaagctatgtgacatttttcttatggttggttatttctactgaaatatataaaaaaaactgtgagaaaaaagcaacatactaccagagaacaagggtcagaaaactcrtagttaggcacttataacttgtgtgtgcatatacgtgtgtgtatgtatttttctagttagtaagccacaattatgtgggagaaaggcatgacttcttgttttgtttttttttaatgggcttatattggaccaaaacttcttgttttgaaagtgtgaaattgtggacatagagcaaaaatagtattccatttagaaaagtctataaatgccttcttaatttactgaaggacaagccactgtatacctgagttgataaaaataatatgatagctatttgggcccatgatgattgagaagtaattttggtaagtttgtaaattcaactataatgcctagaaatgtcaaacgtcttgaaaagatctttgaaacttgtattacacctactgttgtttttttagcaaggttggccagcaagggtaaa

SEQ ID NO: 338741 - DNA, 577 bp, Homo sapiens
tgcagttaactacatgtacagtactgtacaacagatctctagagctttttcatctagcatgactgaaattctttactgatgaaacaacagcttcccatttccacccctttcaccagtgcctggtaaccaccattctactttctgctttgatgttytactttgatgatatacttcatatgaatggaatcatgcagtatttaccttgcaattggcttatttaactcagcataatgtcctctaggttcattcatgtttttgcagatggcaggattttctttttgaaaaaggctgaaaaatattccacatatatatatattctatattccatcccattgtatattatatatgtggaatattatatataatatattccatcccattatatattatatatggaatattgtatataattatatataatatataatattccatattccattccattatatatttcatcatttattccatatatatgtatatacacacaccattttcttcatttattgatagacacttgattgttttcacctcttgactattgtgaataatgttacaatgaatatgagaatgtaaa

SEQ ID NO: 338742 - DNA, 582 bp, Homo sapiens
  misc_feature (1)...(582): n = A,T,C or G
atattgatagcaaagaaactcctatatgccagtttctttacttttacgttatattgccactcagaccatcaataaaacaaagaaaataatcaatttagggtgagaccaaaacctcttgtttacgaccattattttttaggtgatatgaagcattgtgagagcccagaaggagaagaaaatgatgcactttacattatgcatatggattattaaaataggcacaactattgttacaaatagaaccaagtttagctcaaatataagagaagttcatcacttattcacatagtagtctaatgggaaaaatttaggtcagcaggatggttctccctcaatgctattattcaggaacccagactaacaaggcttggccgttcataatatatggcttccaatgtctctctggtcatcttrtactatcaccattccagcccaaagaaaagtgagaaacagcatggaggggcatgtctagaagtttgtacagccagccttggaagtggcacacattacttgtactcacataccataaaaagagcactgtctcatgactacacctnnnnnnnnnnnnnnnnnnnnnnnnnn

SEQ ID NO: 338743 - DNA, 375 bp, Homo sapiens
atcagatacaataggttgaatgtggcataactcaggaaaatttttgagggytgatttttccacttcgtctaaagaccatagcagtgtaaatgtagtttaagctagcacaagcttggggtagtcaggtcatatggttgactctaatggaggagaagatcaatgcaaagactcaagactcgttcacaagaactattgtcaattagatctccttaaatctccactttgtagttacactattgaatgacacaaagctataaatttatattcagtaaattttatcccatacaatttaacttgtcaaaagtctttgaactctgtactttcatccagaatattagctatctttttagcattgtagggtttatcttattatag

SEQ ID NO: 338744 - DNA, 375 bp, Homo sapiens
atcagatacaataggttgaatgtggcataactcaggaaaatttttgagggttgatttttccacttcgtctaaagaccatagcagtgtaaatgtagtttaagctagcacaagcttggggtagtcaggtcatatggttgactctaatggaggagaagatcartgcaaagactcaagactcgttcacaagaactattgtcaattagatctccttaaatctccactttgtagttacactattgaatgacacaaagctataaatttatattcagtaaattttatcccatacaatttaacttgtcaaaagtctttgaactctgtactttcatccagaatattagctatctttttagcattgtagggtttatcttattatag

SEQ ID NO: 338745 - DNA, 375 bp, Homo sapiens
atcagatacaataggttgaatgtggcataactcaggaaaatttttgagggttgatttttccacttcgtctaaagaccatagcagtgtaaatgtagtttaagctagcacaagcttggggtagtcaggtcatatggttgactctaatggaggagaagatcaatgcaaagactcaagactcgttcacaagaactattgycaattagatctccttaaatctccactttgtagttacactattgaatgacacaaagctataaatttatattcagtaaattttatcccatacaatttaacttgtcaaaagtctttgaactctgtactttcatccagaatattagctatctttttagcattgtagggtttatcttattatag

SEQ ID NO: 338746 - DNA, 550 bp, Homo sapiens
acaaactgattttttgatttttttcccctctcttgtgaatgccagtatcaatgtctgggtgctcataaagaagtcttttctttaatttttaagccagtttggccactgtgaattgattttctcagaaatagcatgccctttttcagtgcatattttttgtttacttttatttcaggaaagcttgattgaattatagtttttaatattaattcttttccatatctttgttttcttctttgaaaactcctaytatgcatgcattggatcttccctgtctagcttctgtatcactgtctaatctgtttcatctcttttgaattcctttctgatttaaagttgtgtcactctcttcaatctcctatttatctaaggaattttgtgtgttgcttattcatgcttgtgttccttctcatttagactttatttctgaaataatgttttaattttcattattttctaagcttagacaggtcctttttcaaagcttttctttttcttatcttttcttcagtcataccatttctgagtttctctaagcttatttgtgttc

SEQ ID NO: 338747 - DNA, 555 bp, Homo sapiens
gacatttgttccttttatgcagaataagctttgttttgagcaatttggggaagagcaactgataaatcaccatgtattcagtcaggtctttgagccaaaaatttacatttttgtttcagctatgatcaaatgtagccaatgcatttaaaagaaaaaaatctcattttggatacctgatgaatagtttacttatcatttctgagattctggaatgacaatttatctatattttgaaacacaaagtattgaaacattattcagtataataatttcaaaatattaccttaccattttctagaaaccctccattttcttgggtttgttgaaaatgcacttcaccattactggatctgtgctagcaaggacctrtcctcattcttgatgtccttcctattttacactgactctctcttagctcacttatttttcggatccttgttttatgttgtcataaatgagagagcatttaggtaggtacaaacaaacaacacttcatcagaaattgcctttcaggtaaacgacagagaaaattcaaaggtgttaaatttagcaaaa

SEQ ID NO: 338748 - DNA, 555 bp, Homo sapiens
gacatttgttccttttatgcagaataagctttgttttgagcaatttggggaagagcaactgataaatcaccatgtattcagtcaggtctttgagccaaaaatttacatttttgtttcagctatgatcaaatgtagccaatgcatttaaaagaaaaaaatctcattttggatacctgatgaatagtttacttatcatttctgagattctggaatgacaatttatctatattttgaaacacaaagtattgaaacattattcagtataataatttcaaaatattaccttaccattttctagaaaccctccattttcttgggtttgttgaaaatgcacttcaccattactggatctgtgctagcaaggacctatcctcattcttgatgtccttcctattttacactgactctctcttagctcacttatttttcggatccttgttttatgttgtcataaatgagagagcatttaggtaggtacaaacaaacaacacktcatcagaaattgcctttcaggtaaacgacagagaaaattcaaaggtgttaaatttagcaaaa

SEQ ID NO: 338749 - DNA, 571 bp, Homo sapiens
gcatgtgcacattcctatgcacacacagaactgccgccacatttcaccatcgtcaatttgcttctaccaccatcattttgaaagacattttaaaggaatattactttaataaaatttcaacaggaaaactataggcagaatatatccatattgtctgtcactagtcaaggatactgcagacaaaagccaacagtagaattacataaattttagaaaagtttagcaaaataatagcaaaaacgttttaaaggataaaataatactaactttagcatgtctcacaaggaagtaactttgttttattaactgaatagtcatggtaatattatcatcattcaagaactacatgaatcataagatatattggttataataaaaagaaatcaactcctkacttataatttagcttgtttggaataagtatttgctatgaaaactgtatctttcaaatatttaggaagctaaaatactttttacctgaaaattttctatcttctgctgtagactattgttgcaataatattaataaaattaaaacagttccagttaaaatcactggctggttgtgaga

SEQ ID NO: 338750 - DNA, 513 bp, Homo sapiens
agattattccttatttggatgtcttcaagttctactgtttatgtctctcttgttaacaaactagtttttattcagaaatacttattatcaataattgggactttcagtaataaattcaagacatttgcattaaactaagtaatacagttctatctttaaaatgaaaatgaattaaattaaatatttatatttcataatttagaaagggaaatcatggaaaaacatgatttaacagacttgggatcatctctgacccttgaagacttcaacaccaaaattttaaatgagatggattcctttgcagtatgtaattgttagcccctaaagggaagtatccattgctcattgtggtcatctttctggattcttcttactytaatctcatttttcccagttttttatacctgctctattctacatctattacatcatttctaccacttaaacttggctttggcatttggtatctacattttgattcttggctaactatcaacaattttgactaagttt

SEQ ID NO: 338751 - DNA, 543 bp, Homo sapiens
cttcagacattcttgtccttaatctgtcttgctccttccaagctactgactgcaagctacacaagttgacactggccctgtgtctgtatatactcttgcctcaagccacttcttcacaatcactggataaggtattacccttcaagactcagtacatacctttaatcatgggcagttttaaagtggtatgtccccagtatttaraatacatgggtctggaaaccaacagctagaaatcgaagtgactcaattgaggaatttgcttccagaaaggaaagaaatgagtacccatactagcaggaccctgatcatggattactgctcatcttctgttgcatattgagagcaaggagaggacaattctacagctaaggggtcatatatgagttagaatcagagaacatttacagcaactgaggcatgagtataataccagtcaacaggatctgagagaggcaccaacagcatctaccctaattattgcctctagcatctagatataagtaaactgatttctactggtttacccacttcttcctggta

SEQ ID NO: 338752 - DNA, 586 bp, Homo sapiens
gcacaaagtactttgcaataggatttgaaagaagaacaayatgactagatctgaatctagaaaaaaaaagataacgactttttttttgaaaaactttttattttacgtggtttatgtttctatggcataaattttctgtctttagtaaaatattttgcataagatattttgcaccaaaaaattgatggaaatataggaagacaactaaggtctacttggtgtatgttgtataaacggaaactttttgaaagaaatgatgaaacggtttctgtgctgaattatttaaataatcagggagatgaagatgaccatgagatccactcctagctttacagtcaattcaaattttggggaagtgttgactttctcaatcaatggactgggaatgtacatgtcttgtattgattttaagaggcaggaggatcccagttgttacccggttatagtttgtgaaaaaatcgttctcaatgaatgcattaaggattttattcctatggcctaacaaattaccacatatgtactggcttaaaacaacacatttgtattatcttatagttctataggtcagaagtctgacactggtctc

SEQ ID NO: 338753 - DNA, 586 bp, Homo sapiens
gcacaaagtactttgcaataggatttgaaagaagaacaatatgactagatctgaatctagaaaaaaaaagataacgactttttttttgaaaaactttttattttacgtggtttatgtttctatggcataaattttctgtctttagtaaaatattttgcataagatattttgcaccaaaaaattgatggaaatataggaaracaactaaggtctacttggtgtatgttgtataaacggaaactttttgaaagaaatgatgaaacggtttctgtgctgaattatttaaataatcagggagatgaagatgaccatgagatccactcctagctttacagtcaattcaaattttggggaagtgttgactttctcaatcaatggactgggaatgtacatgtcttgtattgattttaagaggcaggaggatcccagttgttacccggttatagtttgtgaaaaaatcgttctcaatgaatgcattaaggattttattcctatggcctaacaaattaccacatatgtactggcttaaaacaacacatttgtattatcttatagttctataggtcagaagtctgacactggtctc

SEQ ID NO: 338754 - DNA, 570 bp, Homo sapiens
aggaggatcccagttgttacccggttatagtttgtgaaaaaatcgttctcaatgaatgcattaaggattttattcctatggcctaacaaattaccacatatgtactggcttaaaacaacacatttgtattatcttatagttctataggtcagaagtctgacactggtctcactggaccaaaagcaatgaattggcagggatatgtctcttgctggcagctcctggggaaaatgtttctttgacatttycaggttctagaggttgcccatatccattgacctgtggcccctttctagcatcttcaaagccaactatagtgggtagtgactttttcacctctcaaccctctgaacctcaactctctcacccttttccatagttgtgtctccctctctaactatagctgggaaaaattcttagcttttaaggattcatgatcttctttttcaaaatttttaaccttactcacattttcaaagtctcttttgccatctaaggtaatacattcacagcttccagattaagatgaagacataatgaagggagcctaccatatatacaaaagctgaa

SEQ ID NO: 338755 - DNA, 442 bp, Homo sapiens
agggttccagtctctgcggtgaggcagtggcaagagctccgtgggygggaagaatattaggccagagcttagaacaggactgcagaagcaagcatggaatggaagcacatctggtgatctgtgacatacaacgagcctgcagatcacaggcaatgatttttggaaactcatcacacagtagtttgaagcagcaggaacgatttgatccaaagtgccacgtgaacacttccgagtctacaaatgctttcataggtcaatctaagctgttcctcccaaccaacctgtctggcaattagaaattaggaaattaaaactcagagtgtttaaatagcatgcacaaagccacacagctcactggttcagtagcctagacctgggtcccagtctgtctgacaccaaaccccacacttttcaaataattctcccttccactgggggaagg

SEQ ID NO: 338756 - DNA, 558 bp, Homo sapiens
agcttctcccttcttcttcacttaaaattgtgtgtcccacctcacttttcagtgtctcttcacactgacaagacggttrgctaatacttcagagcttgcagagcatctttatacacttttaatcctcctaacaaccgtgagagatggagcttactattatcatccgtgtttgcaaatgaggccctgagaagttgagtgatttctgtaaggtctcagagccaatagacactggtaatgaaataaaatgcaaggccccttatctttggagcccagtgttccttccacataggtggttctccacccaggctgcccaggagaatgtggaatctccagcagttctgacttaactggcctggtgtggatgtctgtgatgggtgaacattcccagacccttttaagaacctgatagaagtggtggacccacttcccagaaaaagggatgcacaagaaaataattgtcctgagtgggtctgacagaatcaagtgaacccgttaaatctggatctagaggtcagagactgagaatgtcagagatgcaaaagagattcagtgcaagag

SEQ ID NO: 338757 - DNA, 558 bp, Homo sapiens
agtgatttctgtaaggtctcagagccaatagacactggtaatgaaataaaatgcaaggccccttatctttggagcccagtgttccttccacataggtggttctccacccaggctgcccaggagaatgtggaatctccagcagttctgacttaactggcctggtgtggatgtctgtgatgggtgaacattcccagacccttttaagaacctgatagaagtggtggacccacttcccagaaaaagggaygcacaagaaaataattgtcctgagtgggtctgacagaatcaagtgaacccgttaaatctggatctagaggtcagagactgagaatgtcagagatgcaaaagagattcagtgcaagagaaatcctcctactggttttgaagatagatgttggcaccctgtgtcaacaacctgagagtggccttgagttgctgggagcaccccagactgacaaacagcaagaagaatatggggacctcagtcctacaaccacaggaactgaattctactgacaaccagtgagcttgcaaagaggacttggagccccagatgag

SEQ ID NO: 338758 - DNA, 558 bp, Homo sapiens
agtgatttctgtaaggtctcagagccaatagacactggtaatgaaataaaatgcaaggccccttatctttggagcccagtgttccttccacataggtggttctccacccaggctgcccaggagaatgtggaatctccagcagttctgacttaactggcctggtgtggatgtctgtgatgggtgaacattcccagacccttttaagaacctgatagaagtggtggacccacttcccagaaaaagggatgcacaasaaaataattgtcctgagtgggtctgacagaatcaagtgaacccgttaaatctggatctagaggtcagagactgagaatgtcagagatgcaaaagagattcagtgcaagagaaatcctcctactggttttgaagatagatgttggcaccctgtgtcaacaacctgagagtggccttgagttgctgggagcaccccagactgacaaacagcaagaagaatatggggacctcagtcctacaaccacaggaactgaattctactgacaaccagtgagcttgcaaagaggacttggagccccagatgag

SEQ ID NO: 338759 - DNA, 558 bp, Homo sapiens
agtgatttctgtaaggtctcagagccaatagacactggtaatgaaataaaatgcaaggccccttatctttggagcccagtgttccttccacataggtggttctccacccaggctgcccaggagaatgtggaatctccagcagttctgacttaactggcctggtgtggatgtctgtgatgggtgaacattcccagacccttttaagaacctgatagaagtggtggacccacttcccagaaaaagggatgcacaagaaaataattgtcctgagtgggtctgacagaatcaagtgaaccckttaaatctggatctagaggtcagagactgagaatgtcagagatgcaaaagagattcagtgcaagagaaatcctcctactggttttgaagatagatgttggcaccctgtgtcaacaacctgagagtggccttgagttgctgggagcaccccagactgacaaacagcaagaagaatatggggacctcagtcctacaaccacaggaactgaattctactgacaaccagtgagcttgcaaagaggacttggagccccagatgag

SEQ ID NO: 338760 - DNA, 586 bp, Homo sapiens
ggtgaaatgtctatggtctaacagttttagatccacaaacactatactcagtagccatcctctggaaaaattcactgaatttttagcactgtgtggctaaacagagtctttctctattgtataagtccattacagttctaagytggtccatgaaatagtcattatttccttattttccatcagtcctaatgctgcaaggactcttttacaagaacataataatttagaaaagatggctggcaagggtgttcatttttttgagtttagaaaatttaataagtaggccataagaatattcttataccagattctagacccgttgccaccttaagcaaatgttccagacttgatgtgatgttaatgagtttcatgtttttaaataaggtaagtctggcatgttgatctttgaagaaataccagcacaaatattaacttagtttactacttaaatgctgatcagcttgcagtagtaatacatttacatgaggttatatagtgttgtttaaactagatttccagacttactgaaaaaattttaaaagaaaccaaaaaagtagctagtatttacatctttctaagactgctg

SEQ ID NO: 338761 - DNA, 586 bp, Homo sapiens
ggtgaaatgtctatggtctaacagttttagatccacaaacactatactcagtagccatcctctggaaaaattcactgaatttttagcactgtgtggctaaacagagtctttctctattgtataagtccattacagttctaagttggtccatgaaatagtcattatttccttattttccatcagtcctaatgctgcaaggactcttttacaagaacataataatttagaaaagatggctggcaagggtgttcatttttttgagtttagaaaatttaataagtaggccataagaatattcttataccagattctagacccgttgccaccttaagcaaatgttccagacttgatgtgatgttaatgagtttcatgtttttaaataaggtaagtctggcatgttgatctttgaagaaataccagcacaaatattaacttagtttactacttaaatgctgatcagcttgcagtagtaatacatttacatgaggttatatagtgttgtttaaactagatttccagrcttactgaaaaaattttaaaagaaaccaaaaaagtagctagtatttacatctttctaagactgctg

SEQ ID NO: 338762 - DNA, 586 bp, Homo sapiens
ggtgaaatgtctatggtctaacagttttagatccacaaacactatactcagtagccatcctctggaaaaattcactgaatttttagcactgtgtggctaaacagagtctttctctattgtataagtccattacagttctaagttggtccatgaaatagtcattatttccttattttccatcagtcctaatgctgcaaggactcttttacaagaacataataatttagaaaagatggctggcaagggtgttcatttttttgagtttagaaaatttaataagtaggccataagaatattcttataccagattctagacccgttgccaccttaagcaaatgttccagacttgatgtgatgttaatgagtttcatgtttttaaataaggtaagtctggcatgttgatctttgaagaaataccagcacaaatattaacttagtttactacttaaatgctgatcagcttgcagtagtaatacatttacatgaggttatatagtgttgtttaaactagatttccagacttactgaaaaaawtttaaaagaaaccaaaaaagtagctagtatttacatctttctaagactgctg

SEQ ID NO: 338763 - DNA, 499 bp, Homo sapiens
catgagttgatagagccatgattttctaatactgttccaaaggggctaaagtacctctgaggagcagtgcaggctaggatcaaactctccctaccttccactccactccctaccttgcccctccacctctgcccactttctatttcctcaggcacagcagcttctaccttatggattacaaattctggtcatccatctatggttgcattaggaaaagagtaytgctactttcattttcttttctaaccactgccctagaagaataacacctcacattctctggtagactgaagcctgcagctgcaaggatgctcagaaaaccagacttctattcattggccacttgctgcactttctgtccctcgatccttgcaacgtacctttgaggtaggcataaaaatccccatttacaagtgagaaaaccaaggcaaaagaggttcagtttatttcaggctcaaatgtgcttccagtagcttatagcctctacagctagtgtttg

SEQ ID NO: 338764 - DNA, 499 bp, Homo sapiens
catgagttgatagagccatgattttctaatactgttccaaaggggctaaagtacctctgaggagcagtgcaggctaggatcaaactctccctaccttccactccactccctaccttgcccctccacctctgcccactttctatttcctcaggcacagcagcttctaccttatggattacaaattctggtcatccatctatggttgcattaggaaaagagtattgctactttcattttcttttctaaccactgccctagaagaataacacctcacattctctggtagactgaagcctgcagctgcaaggatgctcagaaaaccagacttctattcattggccacttgctgcactttctgtccctcgatccttgcaacgtacctttgaggtaggcataaaaatccccatttacaagtgagaaaaccaaggcaaaagaggttcagtttatttcaggctcaaatgtgcttccartagcttatagcctctacagctagtgtttg

SEQ ID NO: 338765 - DNA, 618 bp, Homo sapiens
tatttcccctgatacagggctcaatctttttctttttaaagcaatatttctcaaagtacttttcacagaacttaagtttcattaagcacttcactaaaagaaaagtctgtgatctmataaatttggaaaatattgagaattagagccccctcttagatatgtactgtagctactcagcttgttacagatgaagtaaacattgtaatattcacccagcttttgagtgatgtctattaacgtcacccaaatgagtattccatggaatgcactttgcaaaaacctattattcaagaaaattctggagcatgaaagctattaacgataaacccattcacaaaatcacaccaaatatctaaaatcatgtttaaaatctcctagaaatgggttgaattgcccacttcagagacaaagtgattcttttgtaataacgagttttgtttagtgagtacttattatctcattgaatcctgaggactacctcacaaggtaagtatagctcttttcattacacatgacaaacaaggctcagagaggttaagtaacttgctcaagatcacaaaactgcagagtgacaaaactagaattttgaatctaagctcaaagggtcaccaaaccaaa

SEQ ID NO: 338766 - DNA, 618 bp, Homo sapiens
tatttcccctgatacagggctcaatctttttctttttaaagcaatatttctcaaagtacttttcacagaacttaagtttcattaagcacttcactaaaagaaaagtctgtgatctcataaatttggaaaatattgagaattagagccccctcttagatatgtactgtagctactcagcttgttacagatgaagtaaacattgtaatattcacccagcttttgagtgatgtctattaacrtcacccaaatgagtattccatggaatgcactttgcaaaaacctattattcaagaaaattctggagcatgaaagctattaacgataaacccattcacaaaatcacaccaaatatctaaaatcatgtttaaaatctcctagaaatgggttgaattgcccacttcagagacaaagtgattcttttgtaataacgagttttgtttagtgagtacttattatctcattgaatcctgaggactacctcacaaggtaagtatagctcttttcattacacatgacaaacaaggctcagagaggttaagtaacttgctcaagatcacaaaactgcagagtgacaaaactagaattttgaatctaagctcaaagggtcaccaaaccaaa

SEQ ID NO: 338767 - DNA, 618 bp, Homo sapiens
tatttcccctgatacagggctcaatctttttctttttaaagcaatatttctcaaagtacttttcacagaacttaagtttcattaagcacttcactaaaagaaaagtctgtgatctcataaatttggaaaatattgagaattagagccccctcttagatatgtactgtagctactcagcttgttacagatgaagtaaacattgtaatattcacccagcttttgagtgatgtctattaacgtcacccaaatgagtattccatggaatgcactttgcaaaaacctattattcaagaaaattctggagcatgaaagctattaaygataaacccattcacaaaatcacaccaaatatctaaaatcatgtttaaaatctcctagaaatgggttgaattgcccacttcagagacaaagtgattcttttgtaataacgagttttgtttagtgagtacttattatctcattgaatcctgaggactacctcacaaggtaagtatagctcttttcattacacatgacaaacaaggctcagagaggttaagtaacttgctcaagatcacaaaactgcagagtgacaaaactagaattttgaatctaagctcaaagggtcaccaaaccaaa

SEQ ID NO: 338768 - DNA, 580 bp, Homo sapiens
tgtgcgtgatctgttattcttatggtacagcaaatattggaatttagttattttcagcttttataaactggattccttttcaatagagccaatacaacaatgaaataggttgtaaaatctagtgtttttaatgaagtctatatttgaactagtgagtttgtttgggcttgcctttcatctgctatctgttattcctagcttaattacctgaggcagggatttcattaattaatcccattttttcttttcagattgcattttgagtagtcaacaatttgaagaaagatcttcagatttgttgtcatatatgatttttatagtattaatcactattactttgatagacgtgatctccaaatcaccttcattttgatcttactccctttgtttcccttgcctattacttttccaagacatgacccttttctgtgtgttctgcagttctctcttctgtgtcttctcattccttttatgcaccacatttttataactagtgtttctgtgttaaatcattgggaccagttagtaatctctaaattcattaggaacaacctayaaacattaacactcaacttcccta

SEQ ID NO: 338769 - DNA, 614 bp, Homo sapiens
caacttctttgggaaaatatataagtcacaattttaaaatagaaggtactgggttcttacttatgatgacttacatgattaaaatgattagggggtggatcttgggattcaagatatttaagtaatgtgtaaataatttcccacaaaatgtggaaaccatactacactctgcttttcctcctagcacattagtggtttctccttagtctcttttactggttcctaatctcacccatctcttaatattggaatataccaggtgtcagtccttgaacctcttatcaatctatattcattcccttaatgatctcattcagtcttatggttttaaatattatttacataataaaaatccccacattcatatctttagcttctacttcacccctggattcaactttacattcaacatgccccaaatcaacttttcaatcttctggataagatggagtaaaaagaattggatttattctcctacattaaacaactaaaagatgggtaaaacacatgatacaatgttttacaagacaattggcatcaggcaacaaaagacaatgatctcccasagaagggctacaaagcaagagtccaatcactgccccaactcactgccc

SEQ ID NO: 338770 - DNA, 418 bp, Homo sapiens
aattcaacattaactatgtgccaggctttgtgtctacgagaaggtgattcacaatgaaaagactgagctctttctctcaagaaatggctgtgtactggaatagatatacacagacgaaaaccaagactttaaaaataaagctgttggaggaaagctaccaatagcttccaagaggagatctcaggtcttcagaggacattccttcctcagagaagtctttagtcrttcagttaaaaaaaaaaaaaagtagtcactgtcatcaacttgtttcattttaatcataagctttattactgcttcaccagttcactgtttattcatttgcctccccactcccattggaaagagacacaaacaaatgtaaactccatgactgtaggaacctagtgccagcatataaaatgtcctcaataaatat

SEQ ID NO: 338771 - DNA, 559 bp, Homo sapiens
tcttgctgtttggatctgacctagcccaacaaaataacagggcctagacttgagatattatcaatccacaaatgatgtcttcaaactgacttggcagatatgccttattccttgattagggtagtttttatatccataatattttctccaaaacaaaaaacattttggtattatcaaagctcacctccaatcacaacccaaaatgtagtatatccttcaattatgttgtaattgaagacttgttagctaaattgcaatacacagaaaagcattatattaccttacagaaaataagaaaacccacaccattgaattctgacaactaaattaaattggytcctaccaacaaaacaataaaagcacaaagcttttaataatgtagtaaaattacaagtaatttggttttttactgttaagattatcactcattcataactttaactgtacatattttaggctttgaaaaacataaaccacagttctattttaaaatgttttcaaatatatttgatcagtattctttttacttgaatttcactaataaaattatgtgtaaaag

SEQ ID NO: 338772 - DNA, 469 bp, Homo sapiens
tattgctattgaattatcattttgctctacactgtattactatagttttatgcctacatcttaccccacagcgcttctcttctttcacaatggtctctattttctgtcacaatcagcaagcttcccgtatgtgatgttactaaatgtaaattttgacctctctgcaaatattcaataggtaggatatttatcyccatgaaagttgaccctgcatcccccatcctcaccattctgatttcagaattggacactgtgcatctttgcacagactgagcttttaaataataatgactatgatcataatatgctagtgaaaaaaatcagtcaaacttttcataggtttggtttgtattgtacgagtttgttatctggagaatgtctagtctctttaaacttaaaactaaaatctaaaaattatagtttggttcttatggatatttggttttaattacagaatattcctgcatgg

SEQ ID NO: 338773 - DNA, 469 bp, Homo sapiens
tattgctattgaattatcattttgctctacactgtattactatagttttatgcctacatcttaccccacagcgcttctcttctttcacaatggtctctattttctgtcacaatcagcaagcttcccgtatgtgatgttactaaatgtaaattttgacctctctgcaaatattcaataggtaggatatttatccscatgaaagttgaccctgcatcccccatcctcaccattctgatttcagaattggacactgtgcatctttgcacagactgagcttttaaataataatgactatgatcataatatgctagtgaaaaaaatcagtcaaacttttcataggtttggtttgtattgtacgagtttgttatctggagaatgtctagtctctttaaacttaaaactaaaatctaaaaattatagtttggttcttatggatatttggttttaattacagaatattcctgcatgg

SEQ ID NO: 338774 - DNA, 469 bp, Homo sapiens
tattgctattgaattatcattttgctctacactgtattactatagttttatgcctacatcttaccccacagcgcttctcttctttcacaatggtctctattttctgtcacaatcagcaagcttcccgtatgtgatgttactaaatgtaaattttgacctctctgcaaatattcaataggtaggatatttatccccatgaaagttgaccctgyatcccccatcctcaccattctgatttcagaattggacactgtgcatctttgcacagactgagcttttaaataataatgactatgatcataatatgctagtgaaaaaaatcagtcaaacttttcataggtttggtttgtattgtacgagtttgttatctggagaatgtctagtctctttaaacttaaaactaaaatctaaaaattatagtttggttcttatggatatttggttttaattacagaatattcctgcatgg

SEQ ID NO: 338775 - DNA, 469 bp, Homo sapiens
tattgctattgaattatcattttgctctacactgtattactatagttttatgcctacatcttaccccacagcgcttctcttctttcacaatggtctctattttctgtcacaatcagcaagcttcccgtatgtgatgttactaaatgtaaattttgacctctctgcaaatattcaataggtaggatatttatccccatgaaagttgaccctgcatcccccatcctcaccattctgatttcagaattggacactgtgcatctttgcacagactgagcttttmaataataatgactatgatcataatatgctagtgaaaaaaatcagtcaaacttttcataggtttggtttgtattgtacgagtttgttatctggagaatgtctagtctctttaaacttaaaactaaaatctaaaaattatagtttggttcttatggatatttggttttaattacagaatattcctgcatgg

SEQ ID NO: 338776 - DNA, 593 bp, Homo sapiens
ggacaagaaacccatgtacacagagggccaactttttctgtacacagggctgagtataggacttgagtatggtcaatgtggaatatgtggggattctagaaccaatcttctgtgcaacagagggaagaatctactccttttgayaaatggataaatggataaatggaagtaaccttgggtaaccttggatgctctgagatgtaccaactctgacgtcagagaagtaatgccttagacttctaggagccaactctacataacctagcagccctgagcaggatgcaggagctgaaatacccactgaagactcttagaatcacacgtcagaggtcagaggcagaaagatcattgaacatgtgctagtccaacctctccatttcacactgtagagacaggctcagagaagacaggggactcactctacatcactcagtggtaggtggcagatgtgagattgcaacccaaatatcctggtttcaatcctgacttatttccctaaaacccactttgcctcttgcagtagcagtgcccaaggggtgcttactgagcaggggcaatgccatgtttccagagggaaaggcagctggctgtca

SEQ ID NO: 338777 - DNA, 593 bp, Homo sapiens
ggacaagaaacccatgtacacagagggccaactttttctgtacacagggctgagtataggacttgagtatggtcaatgtggaatatgtggggattctagaaccaatcttctgtgcaacagagggaagaatctactccttttgacaaatggataaatggataaatggaagtaaccttgggtaaccttggatgctctgagatgtaccaactctgacgtcagagaagtaatgccttagacttctaggagccaactctacataacctagcagccctgagcaggatgcaggagctgaaatacccactgaagactcttagaatcacacgtcagaggtcagaggcagaaagrtcattgaacatgtgctagtccaacctctccatttcacactgtagagacaggctcagagaagacaggggactcactctacatcactcagtggtaggtggcagatgtgagattgcaacccaaatatcctggtttcaatcctgacttatttccctaaaacccactttgcctcttgcagtagcagtgcccaaggggtgcttactgagcaggggcaatgccatgtttccagagggaaaggcagctggctgtca

SEQ ID NO: 338778 - DNA, 593 bp, Homo sapiens
ggacaagaaacccatgtacacagagggccaactttttctgtacacagggctgagtataggacttgagtatggtcaatgtggaatatgtggggattctagaaccaatcttctgtgcaacagagggaagaatctactccttttgacaaatggataaatggataaatggaagtaaccttgggtaaccttggatgctctgagatgtaccaactctgacgtcagagaagtaatgccttagacttctaggagccaactctacataacctagcagccctgagcaggatgcaggagctgaaatacccactgaagactcttagaatcacacgtcagaggtcagaggcagaaagatcattgaacatgtrctagtccaacctctccatttcacactgtagagacaggctcagagaagacaggggactcactctacatcactcagtggtaggtggcagatgtgagattgcaacccaaatatcctggtttcaatcctgacttatttccctaaaacccactttgcctcttgcagtagcagtgcccaaggggtgcttactgagcaggggcaatgccatgtttccagagggaaaggcagctggctgtca

SEQ ID NO: 338779 - DNA, 593 bp, Homo sapiens
ggacaagaaacccatgtacacagagggccaactttttctgtacacagggctgagtataggacttgagtatggtcaatgtggaatatgtggggattctagaaccaatcttctgtgcaacagagggaagaatctactccttttgacaaatggataaatggataaatggaagtaaccttgggtaaccttggatgctctgagatgtaccaactctgacgtcagagaagtaatgccttagacttctaggagccaactctacataacctagcagccctgagcaggatgcaggagctgaaatacccactgaagactcttagaatcacacgtcagaggtcagaggcagaaagatcattgaacatgtgctagtccaacctctccatttcacactgtagagacaggctcagagaagacaggggactcactctacatcactcagtggtaggtggcagatgtgagattgcaacccaratatcctggtttcaatcctgacttatttccctaaaacccactttgcctcttgcagtagcagtgcccaaggggtgcttactgagcaggggcaatgccatgtttccagagggaaaggcagctggctgtca

SEQ ID NO: 338780 - DNA, 539 bp, Homo sapiens
tcattgaacatgtgctagtccaacctctccatttcacactgtagagacaggctcagagaagacaggggactcactctacatcactcagtggtaggtggcagatgtgagattgcaacccaaatatcctggtttcaatcctgacttatttccctaaaacccactttgcctcttgcagtagcagtgcccaaggggtgcttactgagcaggggcaatgccatgtttccagagggaaasgcagctggctgtcattaacttctatagcactcctattctttgcaaattgccatccaaacattttgtgcaatgtaaaggtaaccaatacttttgataacttactgttgctaggaactgttctcaaactcatttaattatcataaaaaccccatgaggttggtattactatgatccccttttcataagcaaggaatcaaggcactggagaggttatggtagaaagtggcagagctggtgctcaaatcctgacaatttggctcaagggctcatgccctttagtgctaggttataaataattctaactc

SEQ ID NO: 338781 - DNA, 539 bp, Homo sapiens
tcattgaacatgtgctagtccaacctctccatttcacactgtagagacaggctcagagaagacaggggactcactctacatcactcagtggtaggtggcagatgtgagattgcaacccaaatatcctggtttcaatcctgacttatttccctaaaacccactttgcctcttgcagtagcagtgcccaaggggtgcttactgagcaggggcaatgccatgtttccagagggaaaggcagctggctgtcattaacttctatagcactcctattctttgcaaattgccatccaaacattttgtgcaatgtaaaggtaaccaatayttttgataacttactgttgctaggaactgttctcaaactcatttaattatcataaaaaccccatgaggttggtattactatgatccccttttcataagcaaggaatcaaggcactggagaggttatggtagaaagtggcagagctggtgctcaaatcctgacaatttggctcaagggctcatgccctttagtgctaggttataaataattctaactc

SEQ ID NO: 338782 - DNA, 593 bp, Homo sapiens
aattaactattatgtttgcactaagatttgctgggagtggtaggtggacatatctatatatcaataaggactaaccgtctttttkgtacataggagattgataatactgtatttgttttaaccccacagtgttttactccactttcaaaaagatcaatttggcactttttttcattttttttaatggaaataagatttggtctctcattttaggttaaatgataactagaaagattaaactagacagatagtttaggtggagtatatttttaaaactcagaacatgtatattggtcctgtgttaccaagtttatatgtgacagttgaaaaaaaaattcccttgaaatgatcatgaggttaaaattttcttcattaggggacttggagaaccagtagtcataagattagttgatagtttcactcccaagcaatgaattgcttctgtgtgtttccctgtaggactcaatagtaaatcctgtctgtcttacacatttataaggaccctgcaagacgacgacaaaggcctttgtcctgtgctactaaacaagaaggctatgaaaaatttcttctttaaacttgttttttctctttcc

SEQ ID NO: 338783 - DNA, 593 bp, Homo sapiens
aattaactattatgtttgcactaagatttgctgggagtggtaggtggacatatctatatatcaataaggactaaccgtcttttttgtacataggagattgataatactgtatttgttttaaccccacagtgttttactccactttcaaaaagatcaatttggcactttttttcattttttttaatggaaataagatttggtctctcattttaggttaaatgataactagaaagattaaactagacagatagtttaggtggagtatatttttaaaactcagaacatgtatattggtcctgtgttaccaagtttatatgtgacagttgaaaaaaaaattcccttgaaatgatcatgaggttaaaattttcttcattaggggacttggagaaccagtagtcataagattagttgatagtttcactcccaagcaatgaattgcttctgtgtgtttccctgtaggactcaatagtaaatcctgtctgtcttacacatttataaggaccctgcaagacgacgacaaaggcctttgkcctgtgctactaaacaagaaggctatgaaaaatttcttctttaaacttgttttttctctttcc

SEQ ID NO: 338784 - DNA, 588 bp, Homo sapiens
tctgtggctcaacagggagctctgcctgtcatggtcacttgggacccaggctttgggtataaggctacagcacatggaaaacgtatgactgtctctcagattcttaaagtttctgctggaagtgacatgtcattctgctcacagttcattggctaaatgagtcacgtggctgtctctaacttcaaggatggtatgaaattccaatcctaccatgtttctagaaggagaaccagccctaatcacaatgctacatgtttatagcttgcctcatagagtttactgtattctcctggtataattttcttacatgctcaactggagaggaagctcttaaatagaaaaaaatcacagtaaatttcctttaaaagatctattttacaactctggcatgatggagcacaatggagtccttagtaatggactccatctcttccatcagataaaatsttgataactgaagttaaaatttgaataatgaaaccaaaggaaaaaaattaaatgaattttaagacaattgagataagaacaactgtggcgtcagcataattcaatttaataatgtattaaatattttgcagaaaagtgaaa

SEQ ID NO: 338785 - DNA, 588 bp, Homo sapiens
tctgtggctcaacagggagctctgcctgtcatggtcacttgggacccaggctttgggtataaggctacagcacatggaaaacgtatgactgtctctcagattcttaaagtttctgctggaagtgacatgtcattctgctcacagttcattggctaaatgagtcacgtggctgtctctaacttcaaggatggtatgaaattccaatcctaccatgtttctagaaggagaaccagccctaatcacaatgctacatgtttatagcttgcctcatagagtttactgtattctcctggtataattttcttacatgctcaactggagaggaagctcttaaatagaaaaaaatcacagtaaatttcctttaaaagatctattttacaactctggcatgatggagcacaatggagtccttagtaatggactccatctcttccatcagataaaatcttgakaactgaagttaaaatttgaataatgaaaccaaaggaaaaaaattaaatgaattttaagacaattgagataagaacaactgtggcgtcagcataattcaatttaataatgtattaaatattttgcagaaaagtgaaa

SEQ ID NO: 338786 - DNA, 585 bp, Homo sapiens
tatcatgaaaatatcacctttggctggagtaaagttttggctaaatgtggcactagtatttattacagctcacctttttataatgaaaggctatggactgaacattcttattatttcccattttcttaccactctatcccaacacacatgcacatgcatgcacacgcgcacacacactggcacccacacccatgcatgtgggacacacagagcagcccaggcaatttcaattgttgggagctttgcttttattargtattagtctacggacttgctttctctttagagagactaagtgaaaccaaactcatttccacccagttagcctgctggaacctgtaacagttactgtaatgttaaaagcagtaaaacaaaataaaaaccagtcagttcacttactcctgaagtccgcagtttggtgttcagctttaaaacatatgctctgggtgtcctgtggtggctaccacaggctttggtgagtcattgtcaacccagtggctagagaagggctggaatgcccctcttaaatacagagccacgtttgtccttcagaatggctgctcgaacgaatttattgctcaactc

SEQ ID NO: 338787 - DNA, 390 bp, Homo sapiens
atgggtttctccacctatcctgtaaagtgtattgkgaaattaattttgtagatttcctcacactgcagtgactagggaaatcacccattcgttattatctaatgaggaaaaagtggaaacatctagaagcactgctcccatcctcctccccagcccacacagacacctacctcaggccctccctgtcccaggtgagcagagggccccaccttcggaggttgcctcccttccaccttcaccaatcctatgaccagattatccccaaggaaatgtcaatttccaggcagcaagggaatcatataaagataagatcattgagagatttttttcctccgtgattggcagtttatattttcttgggtctacaaatctgacagcatttattaaatt

SEQ ID NO: 338788 - DNA, 390 bp, Homo sapiens
atgggtttctccacctatcctgtaaagtgtattgggaaattaattttgtagatttcctcacactgcagtgactagggaaatcacccattcrttattatctaatgaggaaaaagtggaaacatctagaagcactgctcccatcctcctccccagcccacacagacacctacctcaggccctccctgtcccaggtgagcagagggccccaccttcggaggttgcctcccttccaccttcaccaatcctatgaccagattatccccaaggaaatgtcaatttccaggcagcaagggaatcatataaagataagatcattgagagatttttttcctccgtgattggcagtttatattttcttgggtctacaaatctgacagcatttattaaatt

SEQ ID NO: 338789 - DNA, 390 bp, Homo sapiens
atgggtttctccacctatcctgtaaagtgtattgggaaattaattttgtagatttcctcacactgcagtgactagggaaatcacccattcgttattatctaatgaggaraaagtggaaacatctagaagcactgctcccatcctcctccccagcccacacagacacctacctcaggccctccctgtcccaggtgagcagagggccccaccttcggaggttgcctcccttccaccttcaccaatcctatgaccagattatccccaaggaaatgtcaatttccaggcagcaagggaatcatataaagataagatcattgagagatttttttcctccgtgattggcagtttatattttcttgggtctacaaatctgacagcatttattaaatt

SEQ ID NO: 338790 - DNA, 525 bp, Homo sapiens
catcatcatgttgctgttgttgttattgatattgttgtttctgatggatagagatctaggcctgacactccaagcagtgtgaacagcatttaccttgataagcattcttacatcttaaccctcgggaattttaaatagaagtgttcygtgtgattaaattaacaggtttagagatgggtgtcctggttatttcctttgttctcctcctggtagctgcctgcactcacagcatgttgggaatggtgattataaatgtaaccatgctctcttcttgtaactggagagcccaggtacctcttatccagcatgtgaccctctttctacctcaggatagtcatactcttaggcttcctggatttattcagggccaaaggagtggtcaaggtcctttttgttttgccctattccctttggaaaacatttagtttatgcccatgttacagattgcaaaatacaggcacatattctctctaatgtggtctgcatgtccctttgcaaggacatgcaatgtgacttcactactcc

SEQ ID NO: 338791 - DNA, 525 bp, Homo sapiens
catcatcatgttgctgttgttgttattgatattgttgtttctgatggatagagatctaggcctgacactccaagcagtgtgaacagcatttaccttgataagcattcttacatcttaaccctcgggaattttaaatagaagtgttctgtgtgattaaattaacaggtttagagatgggtgtcctggttatttcctttgttctcctcctggtagctgcctgcactcacagcrtgttgggaatggtgattataaatgtaaccatgctctcttcttgtaactggagagcccaggtacctcttatccagcatgtgaccctctttctacctcaggatagtcatactcttaggcttcctggatttattcagggccaaaggagtggtcaaggtcctttttgttttgccctattccctttggaaaacatttagtttatgcccatgttacagattgcaaaatacaggcacatattctctctaatgtggtctgcatgtccctttgcaaggacatgcaatgtgacttcactactcc

SEQ ID NO: 338792 - DNA, 525 bp, Homo sapiens
catcatcatgttgctgttgttgttattgatattgttgtttctgatggatagagatctaggcctgacactccaagcagtgtgaacagcatttaccttgataagcattcttacatcttaaccctcgggaattttaaatagaagtgttctgtgtgattaaattaacaggtttagagatgggtgtcctggttatttcctttgttctcctcctggtagctgcctgcactcacagcatgttgggaatggtgattataaatgtaaccatgctctcttcttgtaastggagagcccaggtacctcttatccagcatgtgaccctctttctacctcaggatagtcatactcttaggcttcctggatttattcagggccaaaggagtggtcaaggtcctttttgttttgccctattccctttggaaaacatttagtttatgcccatgttacagattgcaaaatacaggcacatattctctctaatgtggtctgcatgtccctttgcaaggacatgcaatgtgacttcactactcc

SEQ ID NO: 338793 - DNA, 525 bp, Homo sapiens
catcatcatgttgctgttgttgttattgatattgttgtttctgatggatagagatctaggcctgacactccaagcagtgtgaacagcatttaccttgataagcattcttacatcttaaccctcgggaattttaaatagaagtgttctgtgtgattaaattaacaggtttagagatgggtgtcctggttatttcctttgttctcctcctggtagctgcctgcactcacagcatgttgggaatggtgattataaatgtaaccatgctctcttcttgtaactggagagcccaggtacctcttatccagcatgtgaccctctttctacctcaggatagtcatactcttaggcttcctggatttattcagggccaaaggagtggtcaaggtcctttttgttttgccctattccctttggaaaacatttagtttatgcccatgttacagattgcaaaatacaggcacatattctcwctaatgtggtctgcatgtccctttgcaaggacatgcaatgtgacttcactactcc

SEQ ID NO: 338794 - DNA, 493 bp, Homo sapiens
tgccacttttagctcaaagcttttgaatcagtcacttctcccttatcttctgttttctcatctacacaaatggcatttttgataaaatctatttacagagaatttaacgaagtatataaagcatccagcatagtacttgcctgagatttatgcacttaacaaatgttttttacctttatcagaaatgatattagaatttcataccacattgatgtgtcaaaaagaaatgtaaaaaagtatctaaggcataagtattaattattatttattcagataataagagctaaccttcaatggaagcttttgttctctgactcatgctatattgtctctcaggaaatgagytaatttgtaatatacaaatataaattaatagaaaatagaaaataaaagaagaaaacaaaatataaaagaaaatcaaggtataaataaagaaaatataaataaaatgttacatttgtaggaagtataaataagatttgtttcttacata

SEQ ID NO: 338795 - DNA, 563 bp, Homo sapiens
gaccctgtggctgggtcagctcctgtgtctacgacaggatgccctgagtccccatggattcctcaaccccacaccctgtcctactcttagccaagtcagccatgcccctctgagggctacgctgcttcaataggcctggcttcctaagtacctttcattatcacccgggctcataccccgaagcaaagcagaaatttcttttgagatccagggtgggaaatggtyagttgaattgagttgcaaccgaagatgaggaaacatcttttatgaaaacccatttccctctgtcggaggtgatttcagtcactttttccaagctcaggataatttaccccctgcagggtgcactgcagaaagtctggctggaaggccctgagcacaggagttgattgctagctgctaagaggctgcgctttgttcccgaaggagaaagctgcaggttaagagaacattccccaccttgccaggggtgacaaagcaggggactgcttgagggctgacactggagttagagataatgaaaggagaggagcaagaagaagccagggcctggctcggcatct

SEQ ID NO: 338796 - DNA, 581 bp, Homo sapiens
agtaaaaaaagagaaatggccattaaacagtcaagcagacatgtttgcctaaaatactgagtggtttccactgctctctcaagtttctgtgccttcataagcttatcttatattagtttagccatgattctttaccagtgatctttttgtaacatcataatttttcaacatctgctcccacagattatggcatcttctctcagaattttcccagtcaaacaaaagagaaagaatctagctggccctctagatcttttttgtaccagcctagatgctgtaggtccaaaataaaaccaatgaatagatgggttaccttttttttttttttttttttttcagataaytaatcatagtttgaatagctgtgatgagaattggcacaatcttgcatcttctgtaggggacagattttcttagaaaagttacagatgtgtttaatagcaaataacttatctggtacttgtgaagaatgattgatatggcttggctatgtccccaccaaaatctcatcttgaattatagttcccataattcccacatgttgttgtgggagggaccccatagagataattgaattacag

SEQ ID NO: 338797 - DNA, 562 bp, Homo sapiens
tctggtgtccctgttcttctactttttggttattttttctctgctattttttgttcctatgaatttagttttactgcatacttggctctctgattatatgttggatattagttaaataacaattgtagaaataatttcagatctgggatgataattccatttaagggattttcatggtgtcctgggcattattaacacatgactgtcttagtccaagttcagggtgtggaaattttcatgatttctcaaatgacttgaaaaggggttctagtcagcgtagtctggtttcattttgcttcacttttattcttacatgtagttcttcaaggtcccagccaaaaaacaaaacaaaacaaagttgtggtgatcttccctttggcagttccttgtttagacttttgcttcaaattcttgagatgttgccaaaagttctgttcatcctctcaacygcttcttccagaactgcaaatgccattagattaaggttgctaaatgttaaaaaaacagaatgcccagttacgtttacacttaagataaaccttaaataagtgtaagtatgaga

SEQ ID NO: 338798 - DNA, 469 bp, Homo sapiens
ggttagagaaaaaagccataatatgcttttcatctttgttaaaagtgtaaactcaacaatgagaattactccttaatatttctactttttattaagctggtcataataaaaactccttgtgttccatcttctaagcaaaacacagcaggaagattttgggttttgtagtcagattrttcaggttttgaatttggagatagaaacgtgagcgaattttataactttttgagtcttggttttcttatctgtaaaacagtaacctacctcatggcactgttgtcataattgaattgcctacaaagcacttgattcataatagttgtacaataaatactttagtagctattattccactgataccaaagctaaacgagtaagaaaatttgtctctgtatcttgcaatgtatggttattgcagaaggtgttgcaacacaggtatcaagagttcacagctacaccattgctattg

SEQ ID NO: 338799 - DNA, 602 bp, Homo sapiens
tgatagtatttggaggtggggcctttgaaagggcatgaggttggagccctcataaataggattcatgcgtctataaaaaaagaaatgagagagcttgcctgctctctctctctctccctctctctctgactctcttttctcrgccatgtgagaaactagcaagagcacagccatttgtaaaccagtaagtggaccctcttgagacattggatctaccaacaccttgatcttaaacttcccagcctgtagaactgtgggaaataaatttttgttgtttaagccagccagcctaaggtaatttgttacaacagcccaaactaagacaaggtgactctttaaaaaaataaaaataaaaactttaaactcaagaaaaagaaaataccagtaacatcactacaagttaaacattaacaagttataaaacagagttttacaggaattttatctttttatctaaaatcaagaggagtagaatcctgaaatttatcaatgtacttcatctttaaaattctttttgttcctttgacatacaatgcacaaatgtactgagagggcaagacaatgggcaaacatactggaaaaactgtatttgtgaatttgtt

SEQ ID NO: 338800 - DNA, 579 bp, Homo sapiens
atgccaaattgatgtaattaaatttgaggaagtatttagagctctggaagactgagcagaaatgaaacaagtcagattcctttggtataaatacaatgttggcttaagagaaaataattgaagccacacctatacaatgatgagatttgaacaggggataacaatagggaggcacctgagcatccctgtagattctccattgaaatcaccaaattgatgcagacaaatgggctaaaatagttgattattattaacaggtttttttctttttgagagaaaaaaactcaaagcaggttatcagattccgcaaatattccatgtagatctgattgctatactttgactttttttaaagtggatatggaaaagacytacgtaaagttaaggaatataatgagttggaagaattcacacatgaagaccatcccttttaaaagataaagcctgagagggaataacatctaatttcatacagtcttgaaagctctgtaaaaggtagatacaggcttatcaattcatggactagaacttggaatgcagcggttcttttgtcagccctcacctagacccaaccctggc

SEQ ID NO: 338801 - DNA, 420 bp, Homo sapiens
taaatgagtttagaatgtagtaaaagttgtctatctgatttaatagaaaaatatgaggaagcttagcctgaagcatgttgaggtcttggccatatataccagtaaaaatggggagaagcctaaagaagatagaatgggaccagctgaagctaactaaactggctttggtctggggtgtcagacaacctaatgcacagggtctaacaggagctaatttggacaggcctctatgaggaaagagaaatgaggatcaaacacagcccttatgagcgagcgtgggcagggaatgtccttggaataacagaagccccatttaaaaggaggctggtgagtgctttcagcagttccttggagttstgtgtactcctcctataacctcaatcaatccaattaattcttttctttttacctgcctgacaa

SEQ ID NO: 338802 - DNA, 590 bp, Homo sapiens
actggcttttttcccattgaaatgtgtgggatggtccttccttttatctgattaacactgtttttaagtgatcttatctaagggaaaaagcaatggaaacaaatgatgagtcaaagcatgttaaatcatatgttttagaacagattaaacagctgccattatttctgttaatatgacaacatctcaacttgtatgccatttcttaagactgtatattccactcttgaaaattgtaaaaaggartaggtgcttttatcactgatgagttaaacccagtcaaatatgtgcactggttttctaacccaagggaggggaagctccttgatgttgatgcacaatgatatgtagaggaacaaccatgggtgtttatagtaaagagaaaatgttaatgtagaaaacactattggtttttctcatgtctatttcactttctcagtttcatggggtaggggcaggtactgattaacccaaaccaactcccttattgggcatggatatatattgccacaatcaaagtgaaatagaagaatttcattatctagctagggaacttcccacccctttcatccctctttcttttttctgcttcc

SEQ ID NO: 338803 - DNA, 590 bp, Homo sapiens
actggcttttttcccattgaaatgtgtgggatggtccttccttttatctgattaacactgtttttaagtgatcttatctaagggaaaaagcaatggaaacaaatgatgagtcaaagcatgttaaatcatatgttttagaacagattaaacagctgccattatttctgttaatatgacaacatctcaacttgtatgccatttcttaagactgtatattccactcttgaaaattgtaaaaaggaataggtgcttttatcactgatgagttaaacccagtcaaatatgtgcactggttttctaacccaagggaggggaagctccttgatgttgatgcacaatgatatgtagaggaacaaccatgggtgtttatagtaaagagaaaatgttaatgtagaaaacactattggtttttctcatgtctatttcactttctcagtttcatggggtaggggcaggtactgattaacccaaaccaactcccttattgggcatggatatatattgccacaatcaaagtgaaatagaagaatttcattakctagctagggaacttcccacccctttcatccctctttcttttttctgcttcc

SEQ ID NO: 338804 - DNA, 633 bp, Homo sapiens
aaatgcaattagccacacagaatgtgattatcaatcatattcaagaccctcagcataaggtgtatgtatagataggtagatgtagagatagacatatagtttgtctaggtatgtatgcctgtttgtgtgtatatgtttgcttagattcatattcagattttttttttttttaagacagagtctcctctgtcaaccaggctggagtgcagtggtgcgatcttggctcactgtaacctccgcctcccgggtttaagcgattctcctgcttcagcctccctagtagatgggattacaggcacgtgcccccacacccagctattttttgtatttktagtagagacggggtttcaccttgttggctaggctggtcttgaactcctgacctcaagtgatccacctgccccaacccctcatagtgctgagattacaggcataagccaccactcccagcctcatatctggatttttttcatactctgctcatgggagactgtgtagcataatgaaaagatgtccgtaagttttggaatctctggaggcaaatatgtatagtggttaagaacatggactctaaaatcaaaattgcctcataaatatgtacaactagtatgaatacacactaattaattgttt

SEQ ID NO: 338805 - DNA, 633 bp, Homo sapiens
aaatgcaattagccacacagaatgtgattatcaatcatattcaagaccctcagcataaggtgtatgtatagataggtagatgtagagatagacatatagtttgtctaggtatgtatgcctgtttgtgtgtatatgtttgcttagattcatattcagattttttttttttttaagacagagtctcctctgtcaaccaggctggagtgcagtggtgcgatcttggctcactgtaacctccgcctcccgggtttaagcgattctcctgcttcagcctccctagtagatgggattacaggcacgtgcccccacacccagctattttttgtatttttagtagagacggggtttcaccttgttggctaggctggtcttgaactcctgacctcaagtgatccacctgccccaacccctcatagtgctgagattacaggcataagccaccactcccrgcctcatatctggatttttttcatactctgctcatgggagactgtgtagcataatgaaaagatgtccgtaagttttggaatctctggaggcaaatatgtatagtggttaagaacatggactctaaaatcaaaattgcctcataaatatgtacaactagtatgaatacacactaattaattgttt

SEQ ID NO: 338806 - DNA, 584 bp, Homo sapiens
caagagattttatttttaacaatgcagatgtacaaaaaagacatatcatcatttattgaggaattttccgtgtttctacattgagaatcagggcagccagctgtgttagtctccaactgaggccaaaagcctcgggacctgggtaaaacctggtgttaagtcctggagtccaaaggctggtgagcctggagttctgatatccaaggcagcagaagtaaaacctctcccagctctcagagagagacaaattcactttgtgcatttgttctttgtgggcccccagatgattaaatggtgctcaccagtattgagggcagatcttccccagatagtccacccagactcacacactaatctgtggaaacaccatcacagacacacccaaaataatgtttcaccaagtttgtaggtattccttattccagtcaagatgacacctcaaattaagtccacaactccaccccttgccagcttggcacgcacacatacctccttttatctccttaaataaagacaataacaaggtaatagttccacctaacatgacrcaaccatcctgtgtacaatcaaaaacacagtaattc

SEQ ID NO: 338807 - DNA, 530 bp, Homo sapiens
atcccaatcacctcccaccaggaaatcacattgggaatcacatttcaacatgagatttggaggggacaaacatccaaaccatatcattctgcccctggctccctgaatctcatgtccttctcacatttcaaaatataatcatgccttcataatagtcctctgaagtcttaactcaaaagtcccaagtcccaagtccaaagactcatctggagatgagtttcttctacctatgaacctgtaagatcaaaaacaagttatttacttcccagacacaatggtggtgcaggcattgggtaaacattcctattttaaaagggaggaatcggccataagaaagaggcaacagaccccaagcaagtccaaaatccagcagagcagccattaaatcttaaagctccaaaataatctcctttgacaccatgttccccatccaaagaacactagtgcagggatgggctcccagggtcttggtagctctgcctctgtggctttgctgaatgcagyccacatggctgctctgatgggctaga

SEQ ID NO: 338808 - DNA, 385 bp, Homo sapiens
acagaacttgggtgtttcacaatcttgcagccatggtttacagacaactgcttggtcactcctgctaatctgaggttagcactgaggttaatccttccctctgtcgctctctctgtctgcctgtgcctctgcctctgcctctctcctcccactcattcccctccattttcagaatagaaatagctttcttactttcttctgattaaaaaagtaataatatatgtttgtaggtttttttgaaaaagaagcasgtgctcagaaggaaaaatgaataaagtgaaaattaactgtagcttattacacaaagataaccattagtagcactttggtagcttatctttcagtattgcaaacatatatttatgaaaacacaatcataccatat

SEQ ID NO: 338809 - DNA, 465 bp, Homo sapiens
ttaggtctgtctgatttcaaatgcatgcgctttgtaatactttgtcctcttaggaacgtcagcaacattttcaaaaagaaggcccggctttgggacacacatctccttctagttctgtgtcagcgcgggttcttcagattctctggggctgtttttctcagtcaacacatcaaatgcatcattgtagtttgtccttggtaggacttcctgcttcccatctacctggagtcaattctcctgttgtggcaattgttctaygaaagtgtccactgtgatgtcctcctcataagatacatattttggcccatcatttgtaagcataacagtatcactgcattagggatgtcttcttgcaaatatttgatgctctgcccatgtttcagtgcaaaataggtccaaagaacattatcttggacaactgtgtaggtcttgataacgtgtaagcttctcatctgtgtgcatttt

SEQ ID NO: 338810 - DNA, 642 bp, Homo sapiens
aatgctgtaggctagagagttagcttgggaggaactgcactcatcactgtgtctagaggaggtgatattataggttctggagcctgcaatgtcagccggtgtggtggtcagtgcttagtattgtcctggaaggggtgtaagtcatgaatcacgagtgaacggctcagaggtcacatgtgtggggacaaggtaagggcaaggctgttatgaggtcacaatgctagattctcaggatgagagttatggctgagtttatagaagatgarggatggaacggaccttatttggctctagtctgggccttgaatttgatggggcttccttatgaatcaaggtatatttctagtccacagggatggactctccctgccaagtgccttcatgggaaccatgtgacagttaaatttgattcatgcaagatgcttctctgggcaaatttcattgtgagttctacatgccaggaattcctacaatctgtcatctgagaaagcccccagaatgctgagacaggagccaagctctgccctgtatgccagaggggtgatgattctgtttgtgaaaatttagttgctcagaaatgactgatggtgctgtgactgattactgaattatacctttggcaattagtcattcactcaacaa

SEQ ID NO: 338811 - DNA, 572 bp, Homo sapiens
tttgcttttattgtctgtactttccaggtcatataaaaaaaatcgttgctcagaagaatatcataaagcattttccttacattttcttctagttttgttttgttttgttttacagtttctggtctaacaattaagtctgtaatccacgttgagttgttttttgtacacggtatgaaataagggcccaacaagggtatatggtatgaaagagggtccccaytcttctccattggaacattcagttttcccagcaccatttattgaagagcctgtcctttcccccttttgtgtttttggcaccttttgtcaaagatcaattgactgtaagtaaatgtatggattgatttctgggctctattctgttccattgacttatatgtctgagatttttttttcttttttctttttttgaaacagggtctcattctgttacccagcctagagtgccgtggtgaaatcatagctcattgcagcctcaacctccccaggctcagatgatcctcccatctcagcctcccaggtatctgggactacaggggtataccatcacatctggctaatttttgggtttg

SEQ ID NO: 338812 - DNA, 579 bp, Homo sapiens
cctcttttggttactatttgcatgctatatcttttctatcccttcactttcagcatatgtgtgtccttaaatcttaagtgaatccattttaagtagcacagagttggatttttttaatccattcaatcactccatatcttttgattggagaatttaggccatttatatttaagtaattattgataagtaaggacttattgacattttgttaattgttttctgttttataattttttctctcttattatcttttgtgatttgattttttagggtagtagtatgctttgattcctttatcttttgtgtcactacttcaggctttttctttacgattattacgaagcttgtataaaacatcttatagcagtctattttaacaacttaattttgattgcatataaaaattctacacttttcccccatacacatattatatgttattgatgtcataaayaacatcctttatattgagtattcactaattattgcagctatagttacttttaatgctttttttgtttaacttttatcctagagttcaaagtgatttatgcgtcaccattaaagtattagagtatt

SEQ ID NO: 338813 - DNA, 606 bp, Homo sapiens
gaaaaaccagcacaaaaagtctcaaaattccaaaaaccagaatgcctcttctcctccaaagatcacaactcctcaccagcaagggaacaaaactggatggagaatgagtttgacgaactaacagaagtagccttcagaaggtgggtaatagcaaactcctctgagctaaaggagcatgttctaatccaatgcaaggaagctaagaaccttgaaaaaagggtagaggaattgctaactagaataaccagtttagaaaagaacacaaaygacctgatggagctgaaaaacacagcacaagaacttcgtgaagcatacacaagtatcagtagccaaatagatccagcagaagaaaggatatcagagattgaagattaacttaatgaaataaagcatgaagacaagattagagaaaaaagaatgaaaaggaataaacaaagcctccaagaaataggcaactatgtgaaaagacaaaacctacatttgactggttctcctgaaagtgatggggagaatggaatcaagttggaaaacacacttcaggatattatccaggagaacttccccaaagcaagacaggcccacattcaaattcaggaaatacagaga

SEQ ID NO: 338814 - DNA, 606 bp, Homo sapiens
gaaaaaccagcacaaaaagtctcaaaattccaaaaaccagaatgcctcttctcctccaaagatcacaactcctcaccagcaagggaacaaaactggatggagaatgagtttgacgaactaacagaagtagccttcagaaggtgggtaatagcaaactcctctgagctaaaggagcatgttctaatccaatgcaaggaagctaagaaccttgaaaaaagggtagaggaattgctaactagaataaccagtttagaaaagaacacaaacgacctgatggarctgaaaaacacagcacaagaacttcgtgaagcatacacaagtatcagtagccaaatagatccagcagaagaaaggatatcagagattgaagattaacttaatgaaataaagcatgaagacaagattagagaaaaaagaatgaaaaggaataaacaaagcctccaagaaataggcaactatgtgaaaagacaaaacctacatttgactggttctcctgaaagtgatggggagaatggaatcaagttggaaaacacacttcaggatattatccaggagaacttccccaaagcaagacaggcccacattcaaattcaggaaatacagaga

SEQ ID NO: 338815 - DNA, 606 bp, Homo sapiens
gaaaaaccagcacaaaaagtctcaaaattccaaaaaccagaatgcctcttctcctccaaagatcacaactcctcaccagcaagggaacaaaactggatggagaatgagtttgacgaactaacagaagtagccttcagaaggtgggtaatagcaaactcctctgagctaaaggagcatgttctaatccaatgcaaggaagctaagaaccttgaaaaaagggtagaggaattgctaactagaataaccagtttagaaaagaacacaaacgacctgatggagctgaaaaacacagcacaagaacttcgtgaagcatacacaagtatcagtagccaaatagatccagcagaagaaaggatatcagagattgaagattaacttaatgaaataaagcatgaagacaagattagagaaaaaagaatgaaaaggaataaacaaagcctccaagaaatakgcaactatgtgaaaagacaaaacctacatttgactggttctcctgaaagtgatggggagaatggaatcaagttggaaaacacacttcaggatattatccaggagaacttccccaaagcaagacaggcccacattcaaattcaggaaatacagaga

SEQ ID NO: 338816 - DNA, 556 bp, Homo sapiens
aaaccatcattttcagcaaactaacacaggaacagaaaaccaaacactgcatgttgtcacttataagtgggagctgaacagtgagaacacgtggacacagggagggsaacatcacacactggggcctcttgggggtggtgggttaggggaggggagagtgttaggagaaatacctaatataggtgacaggttgatgggtgcagcaaaccaccatggcacgtgtatacaaaaaaaaaatccctagcaactgagaaaataagataatcattaactccaagaaaaataaaatgtcataaacaaaaggaaatataatcataggttatttcctggctagctgtaatatacctaagtggtcataagaaggtaaatactgaattttgatctaactaaaacttataactatattaggggagtgacaaaggaaggaagtttgagggaagggtagaaaagaggtaagagaactaaaagatatccttatctgccataataggaagttaatagggaaggtctaaaacagaaagtttaggaaatagcagtataagcatgttacttagaa

SEQ ID NO: 338817 - DNA, 596 bp, Homo sapiens
ggagagtgttaggagaaatacctaatataggtgacaggttgatgggtgcagcaaaccaccatggcacgtgtatacaaaaaaaaaatccctagcaactgagaaaataagataatcattaactccaagaaaaataaaatgtcataaacaaaaggaaatataatcataggttatttcctggctagctgtaatatacctaagtggtcataagaaggtaaatactgaattttgatctaactaaaacttataactatattaggggagtgacaaaggaaggaagtttgagggaagggtagaaaagaggtaagagaactaaaagatatccttatctgccataatagraagttaatagggaaggtctaaaacagaaagtttaggaaatagcagtataagcatgttacttagaaatatggagatcaataccaatagaaatagccaatgaatgcaaagtatctctggggagcagaaaatcaggaatgagaaagtggtgcataaaactgttgcttcttattgtaatacttatagtactctttaattttttaaactatatgtttttggcacttttataaaataattaaatgttttaaaagtaacaggca

SEQ ID NO: 338818 - DNA, 532 bp, Homo sapiens
ctgccaacagcactgagggtgatgtacttccttgttcatatctagccagagaaaggatgaactcctttatcatacaacagaactcccctgtggtcggggagaatcatgtgctaattggcttagacctggtctatctgtgcattggcacagtggcaagggggtagaactatctgactggcttagacttggaccttggggttgctcattccctcccaaatcacagagtttacacaaagagtgagggagaatgtggacattgaggaagaatrcaatgttcaccacaaaaatagctaggcgaacaagctgctgattctaggagaactaacactaatagccacggctcaaccccctgaagttgtggagaaactggacataaccactcccactcatcttccccctcaatcccactcaaggcccagacagcccaccaagtggagatgcagctggaccaacaagcttctcgctggggaggcaaatagtgtgtgaatatatcagtcaccttaggttctatcacttgaatcagctgagatcc

SEQ ID NO: 338819 - DNA, 575 bp, Homo sapiens
aagtcaggatggctccagagttttcatgttggaaggctttagggggtgacaacttggctaaaacaagatcgaagctgttcttgcaatatacatagaactaagaagagtgtaatagttcaaattaaagtcsgggggcagttggcagagtgcaactctgatcatcctatctaaatagcaacccccattactccttccctctagactacttttgtttttcttcctagcccttctgaacaaatgatggaagggataaggcctctcactactcccttccctggtgaggcaggcctggtactgtcactagccggatggtgctgccccaggtgtggcaagatagggtagcacttataatcgtggactctggaggcaggcagatctgagtgctagttctggccctggcatgtattagctgtgtgacactggggattctactcttggcttcttggtttcctcatccatgaaatgtggatgacctcttggggttgtttggaggattaaatgagattctaatgtgtgtaaagcattcagcagggtgcttggtggcatatggtaagctcttgttattactaatgttt

SEQ ID NO: 338820 - DNA, 575 bp, Homo sapiens
aagtcaggatggctccagagttttcatgttggaaggctttagggggtgacaacttggctaaaacaagatcgaagctgttcttgcaatatacatagaactaagaagagtgtaatagttcaaattaaagtcggggggcagttggcagagtgmaactctgatcatcctatctaaatagcaacccccattactccttccctctagactacttttgtttttcttcctagcccttctgaacaaatgatggaagggataaggcctctcactactcccttccctggtgaggcaggcctggtactgtcactagccggatggtgctgccccaggtgtggcaagatagggtagcacttataatcgtggactctggaggcaggcagatctgagtgctagttctggccctggcatgtattagctgtgtgacactggggattctactcttggcttcttggtttcctcatccatgaaatgtggatgacctcttggggttgtttggaggattaaatgagattctaatgtgtgtaaagcattcagcagggtgcttggtggcatatggtaagctcttgttattactaatgttt

SEQ ID NO: 338821 - DNA, 575 bp, Homo sapiens
aagtcaggatggctccagagttttcatgttggaaggctttagggggtgacaacttggctaaaacaagatcgaagctgttcttgcaatatacatagaactaagaagagtgtaatagttcaaattaaagtcggggggcagttggcagagtgcaactctgatcatcctatctaaatagcaacccccattactccttccctctagactacttttgtttttcttcctagcccttctgaacaaatgatggaagggataaggcctctcactactcccttccctggtgaggcaggcctggtactgtcactagccggatggtgctgccccaggtgtggcaagatagggtagcacttataatcgtggactctggaggcaggcagatctgagtgctagttctggccctggcatgtattagctgtgtgacactggggattctactcttggcttcttggtttcctcatccatgraatgtggatgacctcttggggttgtttggaggattaaatgagattctaatgtgtgtaaagcattcagcagggtgcttggtggcatatggtaagctcttgttattactaatgttt

SEQ ID NO: 338822 - DNA, 559 bp, Homo sapiens
ggtaagctcttgttattactaatgttttgttactaaccgaatgaatgttcccttctaaaagggtaccaggaggccatggggagctccaggaagttgaatgggctctgtggggagcggctgcrggagctcagggttgggctcaagtttggagcgaggatgggatacacagcagggaagacagccagttttggggacagggttgaaagaggaaactccagggctgtggatgcagaggtctgtgaactgggctcagaaagagcctcagagctgcatatgccttcccaggtctggggcaaaggaactcactttcaggctgacgatgggagctgaaatccctgagatgctctctggtgggatggggttgggggatcttgcagtgtgggcccactcagcagtatacgcagcaccaggaagcagaccatgatacccttggagcaccttttctccagcctggctgactctgcctgctgagggcctccacctgctcctccaagtgaggggtgtctccaagtgtgtgtagggaggggcagtgatggtgccaggactccaaccatcggga

SEQ ID NO: 338823 - DNA, 559 bp, Homo sapiens
ggtaagctcttgttattactaatgttttgttactaaccgaatgaatgttcccttctaaaagggtaccaggaggccatggggagctccaggaagttgaatgggctctgtggggagcggctgcgggagctcagggttgggctcaagtttggagcgaggatgggatacacagcagggaagacagccagttwtggggacagggttgaaagaggaaactccagggctgtggatgcagaggtctgtgaactgggctcagaaagagcctcagagctgcatatgccttcccaggtctggggcaaaggaactcactttcaggctgacgatgggagctgaaatccctgagatgctctctggtgggatggggttgggggatcttgcagtgtgggcccactcagcagtatacgcagcaccaggaagcagaccatgatacccttggagcaccttttctccagcctggctgactctgcctgctgagggcctccacctgctcctccaagtgaggggtgtctccaagtgtgtgtagggaggggcagtgatggtgccaggactccaaccatcggga

SEQ ID NO: 338824 - DNA, 604 bp, Homo sapiens
ggacgcccacagtcatcatccatttcaaagcccatttctcctgttagaggcayatatggttgtgttagcatatccatcgttttttataataaattttcctctggttttaatacaatacactttctggaaagaacctatcaaccattcatactttagtgtgaatttaggtcacagtgtcatataatcttacagtggcaacagaccttgaattgcatctagttttacattccaccaaatgcagagattctctgatttgtgactctaacatggccacctagactgtcgtttaactcctcccatggcaggaaactcaccatgtgccactcctccacatccaggtagctctaattgctagagtagaatgaactgaaacttgcctctctgcagcttcctaccagcagtcctcactctcctctctagagcaattacaaaacaaattgtttcccccttcccatgacagcctttcaggtccatgcgagctctcatgacccttcttttctctaggccgagtgtcctattttctttacatattcccaataggactagttttgggttctcccaccatcctggccacctaggcatctgtatacgctccaactttaaa

SEQ ID NO: 338825 - DNA, 604 bp, Homo sapiens
ggacgcccacagtcatcatccatttcaaagcccatttctcctgttagaggcacatatggttgtgttagcatatccatcgttttttataataaattttcctctggttttaatacaatacactttctggaaagaacctatcaaccattcatactttagtgtgaatttaggtcacagtgtcatataatcttacagtggcaacagaccttgaattgcatctagttttacattccaccaaatgcagagattctctgatttgtgactctaacatggccacctagactgtcgtttaactcctcccatggcaggaaactcaccatgtgccactcctccacatccaggtagctctaattgctagagtagaatgaactgaaacttgcctctctgcagcttcctaccagcagtcctcactctcctctctagagcaattacaaaacaaattgtttcccccttcccatgacagcctttcaggtccatgcgagctctcatgacccttcttttctctaggccgagtgtcctattttctttacatattcccaataggactagttttrggttctcccaccatcctggccacctaggcatctgtatacgctccaactttaaa

SEQ ID NO: 338826 - DNA, 612 bp, Homo sapiens
tcatttcaaggagaatttctactttttccgttaagaaggaagtcacgcctcagtagctggctctggggttggaacctgtgttatctcgttatatatggccccatctgttggggccgcccagaaagactcgcgtgccctttcccaggttctattttcctctcctcccacgtcacatccatttgccacacaatcaaatacaacagcatctgctgtaacctgtcctgtcaaagcaggyggaactcattgtcatcccaaaccttctcccagctgtgggtttgccaatttcaaaggccctgagaaggtcatgctatcacgattccaaatgtggcagttgtgcctgtgcatggggcttcagctgcatctggtgccctgggtactattgcgtgcaacactgcaaaaggatctcagcaaactggaatgtatcatggggtgcacagaaggtggatggcttggccactgtctcatgatgaattgttaagggactatgaatgctctgagtacagaagaagagactagcatgtggggttgatgcagaactggtgctgggaccctgtcctttgttaacagtgtccaggcagaggaggattggctggtaggtagcaggtgagcagg

SEQ ID NO: 338827 - DNA, 612 bp, Homo sapiens
tcatttcaaggagaatttctactttttccgttaagaaggaagtcacgcctcagtagctggctctggggttggaacctgtgttatctcgttatatatggccccatctgttggggccgcccagaaagactcgcgtgccctttcccaggttctattttcctctcctcccacgtcacatccatttgccacacaatcaaatacaacagcatctgctgtaacctgtcctgtcaaagcaggcggaactcattgtcatcccaaaccttctcccagctgtgggtttgccaatttcaaaggccctgagaaggtcatgctrtcacgattccaaatgtggcagttgtgcctgtgcatggggcttcagctgcatctggtgccctgggtactattgcgtgcaacactgcaaaaggatctcagcaaactggaatgtatcatggggtgcacagaaggtggatggcttggccactgtctcatgatgaattgttaagggactatgaatgctctgagtacagaagaagagactagcatgtggggttgatgcagaactggtgctgggaccctgtcctttgttaacagtgtccaggcagaggaggattggctggtaggtagcaggtgagcagg

SEQ ID NO: 338828 - DNA, 612 bp, Homo sapiens
tcatttcaaggagaatttctactttttccgttaagaaggaagtcacgcctcagtagctggctctggggttggaacctgtgttatctcgttatatatggccccatctgttggggccgcccagaaagactcgcgtgccctttcccaggttctattttcctctcctcccacgtcacatccatttgccacacaatcaaatacaacagcatctgctgtaacctgtcctgtcaaagcaggcggaactcattgtcatcccaaaccttctcccagctgtgggtttgccaatttcaaaggccctgagaaggtcatgctatcacgattccaaatgtggcagttgtgccygtgcatggggcttcagctgcatctggtgccctgggtactattgcgtgcaacactgcaaaaggatctcagcaaactggaatgtatcatggggtgcacagaaggtggatggcttggccactgtctcatgatgaattgttaagggactatgaatgctctgagtacagaagaagagactagcatgtggggttgatgcagaactggtgctgggaccctgtcctttgttaacagtgtccaggcagaggaggattggctggtaggtagcaggtgagcagg

SEQ ID NO: 338829 - DNA, 408 bp, Homo sapiens
aggctaacatttctcctgtttgcattatgaattttcttagcaactcccgtygcctttatgataaataaatacagacacatttttaaaagccgttgttaataattaagggactgccaagcccccagtgagttcactgcttgtcactggttatagcaaatgctctatagtgagtaactctcacctacaatcgtggacaccctttggtgaccatgccctttcaaaggttcatatctggttgtttaatgtttgcaccgttgggaggggatgaaaaggacagctgtcctgcattaggttgttcatcgttctttgttgagcctttaagctacaagcactcatgattcccttttgcttttcctagcatgatattccagttgccatttagaaaacatagttcagttgtcaaatccc

SEQ ID NO: 338830 - DNA, 518 bp, Homo sapiens
caatttgtttttccatggtatttatgaccagcagatgccctacgatgtgtccaaggcagttggcaagtgctaagagagagagagctgcacacaggagggctttacttgttacaacagaacactgaagctggtctcaagaaagagtattaaacttgcaaggatgcctgaccaccagatgtgacctggttgccttgaacttcaccttcttggaggaggcagcttcatctagtggcccggagtctgtgtaggctggaattcgactgtctgtgtttgaattttgcctccaccacttaccagctgtttgaccttgggcaagttgtttaaccactctctgtcctagttctctaatcttcaataacatttatctcatagcataayagtgcagattaaatatgtgtaaagttcttagagcataaataatggtacaatatatgctagttaatatcattgtattagttcgttttcacactgctgtaaagattacccaagactgggtaatttataaaacaaagggaaga

SEQ ID NO: 338831 - DNA, 619 bp, Homo sapiens
ggacaatttacaaaattactgacctgtgctattcaaaaatgtcaaggtcaaaagctcaggaaatattccaaattaaagcagactggagagatatgagaamtaaatgcaatgctggatcaaatcttggaccggggggaaaattgctataaaggcaattggcaaaatttggatttgggctgaagattagatgacagcattttgtcagtgttaaatttcccaattttcatcattgtaccatggttatataacaaaatgtcctgttctaataaaatacacactgatatatttggaggtaaaggaatataatgcctacttactctcaaatggttcaggaaaaaaaacattaatacttagaacaaatgataatgcaaataggccaaaatgcaaacttggtgaatctgagggaagggtaaatgggaattctttgtactattgcaattttctgtacatgtaaaattgtatcaaaattaaaatttaccccccaaaatctttttccaccagtaaaattttttcttaagtgaaattccacctggaagcccaatgtgtccaacaaataaaattggagtcatttgagtgaaatggggatggtagctccagaggtctgcccacagattcccct

SEQ ID NO: 338832 - DNA, 574 bp, Homo sapiens
gggcaatgaggagaaattctgtttactctggtcgcaaattcagttgatttgacatcaaatctgattgttggaccccttctgagtgtcccctgggaagaactcagatctattgtgagctacttgaggatggagatctttgcatcccttgggcctaacccagaggcctgcatatataaatgctcaattaataataataaattaccacttgttgagtgccaattatgtgccagacactgtgctatcccgtttagtcctctcaataacgctatgaaataggtgttattatgatccatstttatgaataagaaaactacatcttagattaagtaatttgtctaagttcatacagctcctatgtggcaagattaagttaaaactcaggcctgtctaattccagaactgatctataaccacttacacatattctgccatatgcatgtacacaataaatcattccttcacatttcactgtattctaaaaaaatgtttgtgattacttttcacaaatacagctagtagaactcaattgggagtattgagtttcaggaaaaataagagtggaaagtcaaattgt

SEQ ID NO: 338833 - DNA, 574 bp, Homo sapiens
gggcaatgaggagaaattctgtttactctggtcgcaaattcagttgatttgacatcaaatctgattgttggaccccttctgagtgtcccctgggaagaactcagatctattgtgagctacttgaggatggagatctttgcatcccttgggcctaacccagaggcctgcatatataaatgctcaattaataataataaattaccacttgttgagtgccaattatgtgccagacactgtgctatcccgtttagtcctctcaataacgctatgaaataggtgttattatgatccatgtttatgaataagaaaactacatcttagattaagtaatttgtctaagttcatacagctcctatgtggcaagattaagktaaaactcaggcctgtctaattccagaactgatctataaccacttacacatattctgccatatgcatgtacacaataaatcattccttcacatttcactgtattctaaaaaaatgtttgtgattacttttcacaaatacagctagtagaactcaattgggagtattgagtttcaggaaaaataagagtggaaagtcaaattgt

SEQ ID NO: 338834 - DNA, 574 bp, Homo sapiens
gggcaatgaggagaaattctgtttactctggtcgcaaattcagttgatttgacatcaaatctgattgttggaccccttctgagtgtcccctgggaagaactcagatctattgtgagctacttgaggatggagatctttgcatcccttgggcctaacccagaggcctgcatatataaatgctcaattaataataataaattaccacttgttgagtgccaattatgtgccagacactgtgctatcccgtttagtcctctcaataacgctatgaaataggtgttattatgatccatgtttatgaataagaaaactacatcttagattaagtaatttgtctaagttcatacagctcctatgtggcaagattaagttaaaactcaggcctgtctaattccagaactgatctataaccacttacacatattctgccatatgcatgtacacaataaatcattccttcacayttcactgtattctaaaaaaatgtttgtgattacttttcacaaatacagctagtagaactcaattgggagtattgagtttcaggaaaaataagagtggaaagtcaaattgt

SEQ ID NO: 338835 - DNA, 644 bp, Homo sapiens
tttttatctgcccctcctgtaaaaggcaaccaagctcatggattccttgtagttgtctgaacgtttccttggtcagtgttccttctttactccaaaagaccctttacaactagaaatataggccattctcttgggacctcctaatggctattatctaaaattctcctgatgatacagatacacactcaaatattagaatagcataaacatttttcagactagagtttccagtctgtgcttctggacaatgagcagccagattagacccctaattcctaagcctaccactgggcaggacggcaagtggtcactatcagagaggcatggcagcaccataccagatacagaataatasttgaagagcagaacgcgaatgagcaattaagttgcctcagtttgccagtaaatctgagaacagaccaactttgctgggatatagattacagcaggtagaaactgattttgtcaccctctggcaatttaagcccctgatctttccctcaattcctgccccatatcagggagctagtcatgccattgggcttttcatgccagtatttctcaaactaagcccactggacattttctctgagttcatgagattctgatattgtttttttaatttgttttcatattgatgaaaa

SEQ ID NO: 338836 - DNA, 538 bp, Homo sapiens
agtggttctcaagcttttctcattagagtctcccggaaggctgcttaaaacacagattgccacaggtcctccctacccttagggtttctggtttgtaggtcttgggtgaggcatgagattttgcatttcttttatgttcccagtgatgctgatgctgctggttygggaaccacactctgataattactcatctgggtaacacgaagccactggaaagggttagataggagaagcagagccaagccacaggtaaaaggggtgttttctaggattaaggtttctgatagcccttgtgaacaagttagggcagctgatatatggagagtaggtacacactatcccccatcttgtcctgtcaggtgaggtttaacagccctattcattcaagtgggacttctatcccagggtcttccagtttaaggagattttgcccacagatgatttcaggaatggctgtatcattacatgaagctcactcttggagcatttaaatagtgagttcccaaatgatttaaatgtttgtttgtgctttattaat

SEQ ID NO: 338837 - DNA, 602 bp, Homo sapiens
cggttgactccatgcagtaggatatttaggattctataaaaactgacaagatgagtgtatgtgtgtgtataggggaagagggtgagatttagaggaaggacaatggatgtggcatgaggatgtgtgtgtacattyggtggggggctatcagaggaggcaccataggagaagtggtacttgagctggggctcaaaggtggcaggcgctttccaggcaaactccgcagggaagggcatttccagcagaagaacagaacatatgagggctcagaggaaggtttggtgattatatgcagtttgataagagcagaaagagtagagaggcaactccaggaatccttcccagaattcccaagttaccccttacccatactcatgtggcctctgggaatactgaagctttgaagtcaggtagagttgaacttgaatttcagccctggtacttagctcctctgtgacataacataagccatttaatctctctgtgctacaattttcatatctgtaaaatggggataatgatctttcttacacaagtaggtagggataaaatgaaatgatgtgtgaaagaaccttttggcattgtgcctagcatgttgtggt

SEQ ID NO: 338838 - DNA, 602 bp, Homo sapiens
cggttgactccatgcagtaggatatttaggattctataaaaactgacaagatgagtgtatgtgtgtgtataggggaagagggtgagatttagaggaaggacaatggatgtggcatgaggatgtgtgtgtacatttggtggggggctatcagaggaggcaccataggagaagtggtacttgagctggggctcaaaggtggcaggcgctttccaggcaaactccgcagggaagggcatttccagcagaagaacagaacatatgagggctcagaggaaggtttggtgattatatgcagtttgataagagcagaaagagtagagaggcarctccaggaatccttcccagaattcccaagttaccccttacccatactcatgtggcctctgggaatactgaagctttgaagtcaggtagagttgaacttgaatttcagccctggtacttagctcctctgtgacataacataagccatttaatctctctgtgctacaattttcatatctgtaaaatggggataatgatctttcttacacaagtaggtagggataaaatgaaatgatgtgtgaaagaaccttttggcattgtgcctagcatgttgtggt

SEQ ID NO: 338839 - DNA, 602 bp, Homo sapiens
cggttgactccatgcagtaggatatttaggattctataaaaactgacaagatgagtgtatgtgtgtgtataggggaagagggtgagatttagaggaaggacaatggatgtggcatgaggatgtgtgtgtacatttggtggggggctatcagaggaggcaccataggagaagtggtacttgagctggggctcaaaggtggcaggcgctttccaggcaaactccgcagggaagggcatttccagcagaagaacagaacatatgagggctcagaggaaggtttggtgattatatgcagtttgataagagcagaaagagtagagaggcaactccaggaatccttcccagaattcccaagttaccccttacccrtactcatgtggcctctgggaatactgaagctttgaagtcaggtagagttgaacttgaatttcagccctggtacttagctcctctgtgacataacataagccatttaatctctctgtgctacaattttcatatctgtaaaatggggataatgatctttcttacacaagtaggtagggataaaatgaaatgatgtgtgaaagaaccttttggcattgtgcctagcatgttgtggt

SEQ ID NO: 338840 - DNA, 602 bp, Homo sapiens
cggttgactccatgcagtaggatatttaggattctataaaaactgacaagatgagtgtatgtgtgtgtataggggaagagggtgagatttagaggaaggacaatggatgtggcatgaggatgtgtgtgtacatttggtggggggctatcagaggaggcaccataggagaagtggtacttgagctggggctcaaaggtggcaggcgctttccaggcaaactccgcagggaagggcatttccagcagaagaacagaacatatgagggctcagaggaaggtttggtgattatatgcagtttgataagagcagaaagagtagagaggcaactccaggaatccttcccagaattcccaagttaccccttacccatactcatgtggcctctggsaatactgaagctttgaagtcaggtagagttgaacttgaatttcagccctggtacttagctcctctgtgacataacataagccatttaatctctctgtgctacaattttcatatctgtaaaatggggataatgatctttcttacacaagtaggtagggataaaatgaaatgatgtgtgaaagaaccttttggcattgtgcctagcatgttgtggt

SEQ ID NO: 338841 - DNA, 554 bp, Homo sapiens
ataagcattatagatcatcctgtaaaaaggaagaagaaaggaaaatgggaggtacactggggcctcagcaattctgaaattctgctgggaatatgggcaatttcttggttagaactcagtcctactgyctgagaatggttctctatggctcttggctccaatctctgggctcagaggcagaaactgagtcatcttctcttttccataaaaaacagccagtgtttgcagctaagtagttttctcagcctactttcttatagtggtttaaaggtccaaagacctattttcttttctttcttttttttttttctgagatggagttttgctcttgtcgtccaggctggagtataatggcgcgatctcggctcactgcaacctccacctcctgcaaagacccattttcattgtatatggtcactgtcccttttaatccatgcagacaatatttcacacaatgtaataaccttataatctatgaataagactctataaatcctgttggcattcactccattagttaaaagtcacaaccacaagtatcagtgtgataggct

SEQ ID NO: 338842 - DNA, 554 bp, Homo sapiens
ataagcattatagatcatcctgtaaaaaggaagaagaaaggaaaatgggaggtacactggggcctcagcaattctgaaattctgctgggaatatgggcaatttcttggttagaactcagtcctactgtctgagaatggttctctatggctcttggctccaatctctgggctcagaggcagaaactgagtcatcttctcttttccataaaaaacagccagtgtttgcagctaagtagttttctcagcctrctttcttatagtggtttaaaggtccaaagacctattttcttttctttcttttttttttttctgagatggagttttgctcttgtcgtccaggctggagtataatggcgcgatctcggctcactgcaacctccacctcctgcaaagacccattttcattgtatatggtcactgtcccttttaatccatgcagacaatatttcacacaatgtaataaccttataatctatgaataagactctataaatcctgttggcattcactccattagttaaaagtcacaaccacaagtatcagtgtgataggct

SEQ ID NO: 338843 - DNA, 584 bp, Homo sapiens
caagagattttatttttaacaatgcagatgtacaaaaaagacatatcatcatttattgaggaattttccgtgtttctacattgagaatcagggcagccagctgtgttagtctccaactgaggccaaaagcctcgggacctgggtaaaacctggtgttaagtcctggagtccaaaggctggtgagcctggagttctgatatccaaggcagcagaagtaaaacctctcccagctctcagagagagacaaattyactttgtgcatttgttctttgtgggcccccagatgattaaatggtgctcaccagtattgagggcagatcttccccagatagtccacccagactcacacactaatctgtggaaacaccatcacagacacacccaaaataatgtttcaccaagtttgtaggtattccttattccagtcaagatgacacctcaaattaagtccacaactccaccccttgccagcttggcacgcacacatacctccttttatctccttaaataaagacaataacaaggtaatagttccacctaacatgacgcaaccatcctgtgtacaatcaaaaacacagtaattc

SEQ ID NO: 338844 - DNA, 584 bp, Homo sapiens
caagagattttatttttaacaatgcagatgtacaaaaaagacatatcatcatttattgaggaattttccgtgtttctacattgagaatcagggcagccagctgtgttagtctccaactgaggccaaaagcctcgggacctgggtaaaacctggtgttaagtcctggagtccaaaggctggtgagcctggagttctgatatccaaggcagcagaagtaaaacctctcccagctctcagagagagacaaattcactttstgcatttgttctttgtgggcccccagatgattaaatggtgctcaccagtattgagggcagatcttccccagatagtccacccagactcacacactaatctgtggaaacaccatcacagacacacccaaaataatgtttcaccaagtttgtaggtattccttattccagtcaagatgacacctcaaattaagtccacaactccaccccttgccagcttggcacgcacacatacctccttttatctccttaaataaagacaataacaaggtaatagttccacctaacatgacgcaaccatcctgtgtacaatcaaaaacacagtaattc

SEQ ID NO: 338845 - DNA, 452 bp, Homo sapiens
ttttctttaacaatatatcctttgtatttacaacttggctacttgtttggcagaagaggcccagctttcagcctatcccagatttcaacatgccttcctcactaagcttaatcatttctagcttttgatttaaagtgagagacatgcaactcttcttttcacttgaacacatagagtccattgtaggattactaattggcctaatatcaatattgttgtgttttagggaataggaaggaccaaggagagggagagagacaagaaaacagttggttagtggagyagtcagaaccgacatgacatttaccaattaagttcgtcatcttatatgggcatggttcatagtgtccccaaacaattacaataacattgaagatcactgatcacagatcaccataacagacataatcataatgaaaatatttgaaatattacaagaattacccaaatgt

SEQ ID NO: 338846 - DNA, 584 bp, Homo sapiens
caagagattttatttttaacaatgcagatgtacaaaaaagacatatcatcatttattgaggaattttccgtgtttctacattgagaatcagggcagccagctgtgttagtctccaactgaggccaaaagcctcgggacctgggtaaaacctggtgttaagtcctggagtccaaaggctggtgagcctggagttctgatatccaaggcagcagaagtaaaacctctcccagctctcagagagagacaaattcactttgtgcatttgttctttgtgggcccccagatgattaaatggtgctcaccagtattgagggcagatcttccccagatagtccacccagactcacacactaatctgtggaaacaccatcacagacacacccaaaataatgyttcaccaagtttgtaggtattccttattccagtcaagatgacacctcaaattaagtccacaactccaccccttgccagcttggcacgcacacatacctccttttatctccttaaataaagacaataacaaggtaatagttccacctaacatgacgcaaccatcctgtgtacaatcaaaaacacagtaattc

SEQ ID NO: 338847 - DNA, 597 bp, Homo sapiens
ctacttgcctgactgggatttttttycccactatctttggaagcactaagctatttctgaaccctggtttcttttctgattgcttactaggcaataattctccaggttctccatttgcactagaaacagaaagaatcactccagaaggtcaagaggcacaagtagcaccaatgagaagcagcacaagaggctttccagagccatagacagcattgcctacattggctgggctcacagctatacattctcacaacttccaatgtgtcctgtgtgtgttgtcttgagccccggggtgatggggcccagaatcagaggcccttggggtctcctggttcaacctcccacctgatcagattgacatctgacctgagagtctgggaccgcatttggtggtagatggaggactcaggtccctcggaagtctccctacagaaggcaaaggtttgcaagtcatgctcctcagagtcctgaaggctagttacagggctgagaggaagcaggaaaatagattctttttgataagtttcatgtaatggatttgggtgacaatttaatatagagaaaaggttccaagcctttaaaaatgaaaagcgggta

SEQ ID NO: 338848 - DNA, 601 bp, Homo sapiens
aatgcactaggctcactgcttgatatatattatctcacttaatcatctcaactcagttaatgcttcgaacactttttaagtaggcacttttattatttccattttatagatgaggaaaattatgcacaatgaattggcataaagttccccaaggtcacctggctggtcatattgtacatgccattgctgctgaaacaagtacatctctctgttgccaccactaattcagccgccgtcatcatggttcctgacaacgctgccatcgctgctgctacagggttgtcaaagccctgcttcatcttctggcctccaaaaggraaaattgttcttctcagttttatgatgtcatccttcaaagaacatggggcaagccctagaggacgtttgaggaaaatacccacggaccctgaattgtgccttgaagttattcaagtgttttgctgttcactgggtggccaggcagtgtggccaagctaaaaaggcagttaatgccatcctggggaacagaccagtgcatgactggaagtcactgagaacagacaacatgatcaccaggctcaaatcatatctcatttacttacagcaagaggagagtgtgtag

SEQ ID NO: 338849 - DNA, 558 bp, Homo sapiens
gggcaagccctagaggacgtttgaggaaaatacccacggaccctgaattgtgccttgaagttattcaagtgttttgctgttcactgggtggccaggcagtgtggccaagctaaaaaggcagttaatgccatcctggggaacagaccagtgcatgactggaagtcactgagaacagacaacatgatcaccaggctcaaatcatatctcatttacttacagcaagaggagagtgtgtagaagatccagcccyttgcaatgcatcagttccctgtggccagcagagccactctgcagctgtctcaggcagcatggctgcatgcacctcactgtatgctacagtagaagggtcccaacccctcccctgtggagtctgaaatacaaatacagaaatctggatgcatgcctgaaggccactgagtctaaaacagaaagatattttcatacagggtgataagttcagcacaggctgtatgacctttacctcttggtaaggaagttgtccagaaccatggcccattcttatgtagccaaacaagattcgaaagattgtgtgcacag

SEQ ID NO: 338850 - DNA, 662 bp, Homo sapiens
actgactttgtgggtttttttgttcatttgttttttgttttgttttgtttgtttgtttgttttaccagcatacaagttattttgcatgaaactttccaatagttggccaagaaactatggataccagaaagcagcctcagttaaaggctttctcaattttttaggaagtatattaccaagctgaattcaaggaatatggtaatattccttatgactatggttatggtgggcacctccattttcacacttatctggcagttgtaaacaatgcatcttgttcaccagaaagaatcctctagttatatacaaggcagttagtgctggtggtcaaatgaacaatgcaaccagtagagcctacaagtgttcagaggaagactgcactgtgaattcaagaaatctaamattcttaatggagaaggtatagattaaaagtcttattttcacaaattagaatagaattataagtctgtcctgtaactcaacagcagagaacctttaaatctcaaggaatatttttctatatggaaccatatctttttttaattgccttccaaaacccagattttattatgtgtttctatctttataaactttttaaaggtcatttagaataatttccactatgcccaatgcttgtacttttatgtctgtttgtttgtttt

SEQ ID NO: 338851 - DNA, 597 bp, Homo sapiens
cctcactcccccaacaggcaaaggacaggaatcaagcytgtatcaaaggcagcagtggcagaggagaaggtctgcttctgaggaggaatgagcaaagctgtggagaatgcttaagtagaattggcagcaggaatctttgatgccctcagcaacaaacacttgagtggcaggactgtagtgttgatttttcttttaatcttctctcaccttcatgataatatagttctctgctggaaaagtcattctttacccttttatggcactgaggccaagaatcacagaactcttgcttcatttctaattttgaaataagtcctcattccctatagttaccaaaaaaaaacaaaaacaaaaaagtcagtgtgtccgtatatgacatcactttttgtggtcatgatgtttccctccatgctttgttaagagctgcttaaaagagctagagccaacccaacaagctgattgatagaggctgcatcagaggtgactgaaaagaaaggacagaggggaagggagaaaaaaggaatttagatcatgaaagaagcccttgagtttatcagttactgggggttggatgactcgctgtttgaaaagccagag

SEQ ID NO: 338852 - DNA, 597 bp, Homo sapiens
cctcactcccccaacaggcaaaggacaggaatcaagcttgtatcaaaggcagcagtggcagaggagaaggtctgcttctgaggaggaatgagcaaagctgtggagaatgcttaagtagaattggcagcaggaatctttgatgccctcagcaacaaacacttgagtggcaggactgtagtgttgatttttcttttaatcttctctcaccttcatgataayatagttctctgctggaaaagtcattctttacccttttatggcactgaggccaagaatcacagaactcttgcttcatttctaattttgaaataagtcctcattccctatagttaccaaaaaaaaacaaaaacaaaaaagtcagtgtgtccgtatatgacatcactttttgtggtcatgatgtttccctccatgctttgttaagagctgcttaaaagagctagagccaacccaacaagctgattgatagaggctgcatcagaggtgactgaaaagaaaggacagaggggaagggagaaaaaaggaatttagatcatgaaagaagcccttgagtttatcagttactgggggttggatgactcgctgtttgaaaagccagag

SEQ ID NO: 338853 - DNA, 449 bp, Homo sapiens
ctaaagctgaaaaatcaatgaaacacatgaaaaagtgattgcataaaattttagggactgtaaactcaggattaaaaacttctatcatcttctcttgtctacgaataagttgttattcttgggagaaatagaatagcaagataaatgcagccatggaatggggggcaagtgtagagactcagggagcctggagatctacattccagtcctacctctgccatttacttccaggcggttcagctggccttggtttctccatttgcaaaatgaggggcttggaccagatgaacaatcaaatcctactggctctaacattctacatttctgtgggagaagagcaatcctataaaagcagagaaggtgtacaacttgagcattccctcaaacacaaaagttcatcctcatgaaacagggaaarcaagtaactgcaaccccagagaggtgacaga

SEQ ID NO: 338854 - DNA, 629 bp, Homo sapiens
ggtgccttatttctaagttcttaggctttgggttcatattttctcagactttaggtgagaaatctggattgatttctataggagatcatgtttctttttagtacaccctgcaaaatgcaggcattctgcttctctagcctgaaagtctctgtccatgcatgttgtctgctgagttctctcaaacatagccagcagtctttcacatagcattacgattgaaaagagcattttaaaatcttttaggctaaaggactttctgcttgagtctatgctgaagatgcactatccaccgtggggcagcatcatgacaattcttacttaatctttaacatgcctgtgagatacacagggaagtattattactcctacattacagatgtgaaagttgaggtgcagaaaagttaaattgtgtatcttgggccattagatttgaagagcttcayattattctgacccttattttgtggttgagacagtatctccagtcaagtcagggcattcccttttccccttcggtttccagccctatactttggccctgcaactatgatggatttgtaaaaaattggatgactgctaaggagagggatttggagagtagatgagatgtatgcaaatctctaagtgca

SEQ ID NO: 338855 - DNA, 525 bp, Homo sapiens
tgtgaaagttgaggtgcagaaaagttaaattgtgtatcttgggccattagatttgaagagcttcatattattctgacccttattttgtggttgagacagtatctccagtcaagtcagggcattcccttttccccttcggtttccagccctatactttggccctgcaactatgatggatttgtaaaaaattggatgactgctaaggagagggatttggagagtagatgakatgtatgcaaatctctaagtgcacaaatgatgattgatagaagttctaatatgtgaattagctgtaaatgtatttttgtgattcaatttgggttggacgctctaaccttagagggtctaagtaatgaggcattaaattcactgctatttcttcaaaccaccacgaaacataactacatgtcaaaaaaataatcagataatgatagctgttttatgggtggtatttttaatatcattattgccattgcaaacccaagcaaaatgaatatgatcatttcagcaaaatccctggtgagt

SEQ ID NO: 338856 - DNA, 393 bp, Homo sapiens
cacaaggacacctcgatttcgaggaggggcagagaaatgcaattatctcatatgccccaaaagcaggagatggaaacatttgttgaatagtgaaagtgacaaccaaagtaggttcactgactgaggaaatttcttgaaktgtttagaaaccagtgcagaaattatggggcttgtgtgggttacggggccgctactacaaagtcctctttaaccagtgctctacactttccagtgtattattcactcctcaaaaatgccctatgaaggaggatttctcagccctcatgatgctgtaccctgttgccagggagccaggccagtttgcctgtatgagtatatttgagaagtgattataaaaaatgtgtttttttacttcctttacatttatataat

SEQ ID NO: 338857 - DNA, 618 bp, Homo sapiens
tgcaaaaccccattgcattagtccatatccctattagaatagtcctcaataaaagctactttaccactttccaactgaattcagctaatgggagactccataagaaatcagagggtgggaggcacaagagatggaggatctcattcttgctgctttcctaattctctgaaactagctgcatcagtccatgactcccccttgccaggcagccctttctccttggccccaggtctctcagtgccccaatcacactcttttctccccttaccccttcagtatttggaagacagaaagaaagtatttgtggcaataacagtttccactacttctagtctctggctgcatcaacatcccttgatggttttcttaactttgccttaaccttgcctcttccttatattcatattttctcattttaactatctgggactaattatttccttctaggaccctgactgacacagaacacaagtcgggcatcagaattctagctagagcaagtgtggttatgtatcayctttacctctgcaataagcatgccacagtcataacatatccatcacaataaccctatcttctcccaattcagggtgtaggcatcatcagggaaacgtagcc

SEQ ID NO: 338858 - DNA, 593 bp, Homo sapiens
tttagtacctgacttctgtttctggcattattgcaacctacattcaaagaatcccctgctaatatggcacaattaaaaacgctgaataaaatatttttaaagtgaagcattggctatgctgatagagaatttcttggcagtcagaaggaaaatagagaaggtgctaatccacaggaggaagttatggaaccagcatttgccctggagaaatatgtccgttttggctgtctataagcagagtttaaatacacctctacagaaacaggagacacagcctagggcccaagtaaagaaagaagttgtattgaagactcacctaaagccaggatattcaagggataatactttcattgggaaaaatagaaaaaaaaatcacccaacaaaggaaaatagttgaaatacatgcttgtcttagccttggctctagataattgaaaataaaaacaaaaaattccttgtaagcttcattcatgcacgccaactacytagaccaaaagaaatgtaacattttagtttaaattagtcctggattggtaatgccagcaaaactaggagatgtacaagttttttatggaggaaaaactttaaaacta

SEQ ID NO: 338859 - DNA, 553 bp, Homo sapiens
tgcaacaaatatgtcacttcaccttgaaaaagactttaagcttgcgggtggacatgagcagcagaagggctgcagcctggggtgattgtgaagtggcaggagaaaggttaggtcaaatcacatggaaaactgcagcacctggtgtgggtgggtgtggctcctcacacccccagggaactggggtagctgtcagatatttgtggtgtgtgcaygtgctggtgttattatccttatgcagctcattccagcaagcagcagttttctgcattcaccacagtgtttcttgtttataagcaaatgctaaattggtgtcatgctcggattattccctaatatatcaatcatgctggaacaaattcatgtctttaaaacaagccttgtagcaaaactgactatgcctatctttcaaaagatggaggaaggacaggaaataagcaaaatgagcttggggcatcttggagtgccagtcggtaaagaagtgctcaaagcaacacaaaacaggaaaagaacagaaaaaaggaaaaggcccacaatgatgagggcctgtcacaga

SEQ ID NO: 338860 - DNA, 553 bp, Homo sapiens
tgcaacaaatatgtcacttcaccttgaaaaagactttaagcttgcgggtggacatgagcagcagaagggctgcagcctggggtgattgtgaagtggcaggagaaaggttaggtcaaatcacatggaaaactgcagcacctggtgtgggtgggtgtggctcctcacacccccagggaactggggtagctgtcagatatttgtggtgtgtgcatgtgctggtgttattatccttatgcagctcattccagcaagcagcagttttctgcattcaccacagtgtttcttgtttataagcaaatgctaaattggtgtcatgctcggattattccctaatatatcaatcatkctggaacaaattcatgtctttaaaacaagccttgtagcaaaactgactatgcctatctttcaaaagatggaggaaggacaggaaataagcaaaatgagcttggggcatcttggagtgccagtcggtaaagaagtgctcaaagcaacacaaaacaggaaaagaacagaaaaaaggaaaaggcccacaatgatgagggcctgtcacaga

SEQ ID NO: 338861 - DNA, 530 bp, Homo sapiens
tggaaacacactgtcaaatagtagtccatgtgtctgctttgtgcaacttcaatttcccttgtccgatattagtatgccaaagagttggatrtatgttaagtatggctgaatcctatttttgactcttcaaagtgctttctttagttgggacctaagagaaaaaagatagtaagtgaatgagtcatgtttccctatcctaaaaccttctgtctgattatttttttcccactgagcagtgcgtttctgattttgacactttcatctcccttttcatctgcattggcttctctctgttctaacagaacgtcaatctaacaaatcaaagtgattctaaataatccatatgtccaacatctaagtacttcttccttgagctgttctgctccatttccactgtcttttacttaggtgagcctacagactgggagctctaggaggtgctgttcaaatgagcactttagtgtctccctgggcacaagactcttctgctagttaatctgtgttgtttatcctcaaatcaaacttccctc

SEQ ID NO: 338862 - DNA, 599 bp, Homo sapiens
gttaattagaatccaaaacaggtactcttagccaatatgctgtacctacttccagtatagtgcaaagtgatcgcatttagagacctggaaaatctgttctgcttccctaagaattttcattactcaatctttgaccctgctcacttccccyctggagctaagcaaatcaggatgctacagttttctaaaatttgaacccttcctaaaataccaagtgtgtcttggcaaagacaagtacctaacaagcaggggctagtgaattaccatatttcatcaaactaaaatgcattgattgcgagatgtatcattagtttatatatgctacgaaaaagaaaagggatgccaaattaaattgacacagtgttttcctatcacatagattttttattttaaacatcttggaaaagctttgactccatgaaacaatttttatagtttatcattcacatatatacattaaaaaatttccttaagtggatatatttctaaaatgtcctcaaatttggagcctcactcttgtgagtttcttcctttctcacagtcagctctgactatgcttttccacacaatattatcccctgacatcaagtgtgtggaag

SEQ ID NO: 338863 - DNA, 599 bp, Homo sapiens
gttaattagaatccaaaacaggtactcttagccaatatgctgtacctacttccagtatagtgcaaagtgatcgcatttagagacctggaaaatctgttctgcttccctaagaattttcattactcaatctttgaccctgctcacttcccctctggagctragcaaatcaggatgctacagttttctaaaatttgaacccttcctaaaataccaagtgtgtcttggcaaagacaagtacctaacaagcaggggctagtgaattaccatatttcatcaaactaaaatgcattgattgcgagatgtatcattagtttatatatgctacgaaaaagaaaagggatgccaaattaaattgacacagtgttttcctatcacatagattttttattttaaacatcttggaaaagctttgactccatgaaacaatttttatagtttatcattcacatatatacattaaaaaatttccttaagtggatatatttctaaaatgtcctcaaatttggagcctcactcttgtgagtttcttcctttctcacagtcagctctgactatgcttttccacacaatattatcccctgacatcaagtgtgtggaag

SEQ ID NO: 338864 - DNA, 471 bp, Homo sapiens
cctccactctcatataacttgattaactgatgaactgatgctgcgagaaaggaaaagatgcagggaatatcctgtgtctcgagcattatgtttctcagccatggtgactgtgcaaatggtggaaccccaaagaataatggatggtagacacacagaaactgcctaataaaattatgtcagttcaagtttaatatacatggagcttataatgtcatataaaaatgttgttactttattttaaaagaaaaatgagttaaattttgtaagggcattaaaatataattttaataaagagatatgaaaattatctgtacttggtgtgtaaatgactgaattttggtcaagcctgtaaaaaccaccratgggtgtgaaaaggggtctgctatttacttataagacatctacttccaaatctttgctgtttttaaccaaatccttctcatgatactaaaatttttcattctaaagaag

SEQ ID NO: 338865 - DNA, 630 bp, Homo sapiens
ttttcttaacaacagaaaaaaaatctcacttttctctgttgtcagaaaatgataattgtcttgttgataaaagaggtgctaaaagtttyttgtggattttccccctatttctaggtaggaaaccacaatggtatacctggtagggcagatcatattaggtaagctagatcagagatccaattagtatgattggttcaaatgtatctatttatccataccaagtgagagttaaataactaggtgatgccattagttcccttcatgcctacatacacacaaaaccaattaaaacatacacaggtcatgtaacttttgctttcatgcatccttgtgcatacttcagcaagattggtatacatgatgctatttcctgaaatggtacacattatgtaaaattccacaaaattccttggggaattgaattacataataacacatattctattaaaggaaaaacattcaacaaaagttataatttttgcaagcatattgttctgtcctgcaattataattctttgaaaaggaactgaagaaatattgtcactgaatacccagaacatttcaataaactacgtcactgaaagatttttcactggcccccaaatgagtaatttatttttcttgcccagc

SEQ ID NO: 338866 - DNA, 630 bp, Homo sapiens
ttttcttaacaacagaaaaaaaatctcacttttctctgttgtcagaaaatgataattgtcttgttgataaaagaggtgctaaaagtttcttgtggattttccccctatttctaggtaggaaaccacaatggtatacctggtagggcagatcatattaggtaagctagatcagagatccaattagtatgattggttcaaatgtatctatttatccataccaagtgagagttaaataactaggtgatgccattagttcccttcatgcctacatacacacaaaaccaattaaaayatacacaggtcatgtaacttttgctttcatgcatccttgtgcatacttcagcaagattggtatacatgatgctatttcctgaaatggtacacattatgtaaaattccacaaaattccttggggaattgaattacataataacacatattctattaaaggaaaaacattcaacaaaagttataatttttgcaagcatattgttctgtcctgcaattataattctttgaaaaggaactgaagaaatattgtcactgaatacccagaacatttcaataaactacgtcactgaaagatttttcactggcccccaaatgagtaatttatttttcttgcccagc

SEQ ID NO: 338867 - DNA, 630 bp, Homo sapiens
ttttcttaacaacagaaaaaaaatctcacttttctctgttgtcagaaaatgataattgtcttgttgataaaagaggtgctaaaagtttcttgtggattttccccctatttctaggtaggaaaccacaatggtatacctggtagggcagatcatattaggtaagctagatcagagatccaattagtatgattggttcaaatgtatctatttatccataccaagtgagagttaaataactaggtgatgccattagttcccttcatgcctacatacacacaaaaccaattaaaacatacacaggtcatgtaacttttgctttcatgcatccttgtgcatacttcagcaagattggtatacatgatgctattkcctgaaatggtacacattatgtaaaattccacaaaattccttggggaattgaattacataataacacatattctattaaaggaaaaacattcaacaaaagttataatttttgcaagcatattgttctgtcctgcaattataattctttgaaaaggaactgaagaaatattgtcactgaatacccagaacatttcaataaactacgtcactgaaagatttttcactggcccccaaatgagtaatttatttttcttgcccagc

SEQ ID NO: 338868 - DNA, 574 bp, Homo sapiens
ataagtaagaacatattgtgaagcactctatamatttaatccgctcatggttcattcacttgtttatgcattcctcctcagtgtgcttaagcaccagttacaagggattatttttattaatattctaactagtctctgcctactttggccaatgaaaaatgtgaactcctgatgtgacttgcaaatcatagaagaataaaaactcagtgccagaagcaccagaattgagaactgagtgaatctcaataagggaagctgtgatttggggcccatagtcttctatgtcaatgtggtttcaaactctcttttgcttcatctcattatgctattttcatgttggcactacagaagtccaaacttcactccagagccaccacaagtcaatcaatctcagccgtgttaccaaggcttcaggggcctaggcccttgtgaactacgtgtttcagtaattaatcttctccatcctgaagcccttatatgtgggcagccgtcactaaagccaagggccatgttgcagattagttgcttaagtgcagcctggaagctgccttccgagtgaagtggtgctaattaa

SEQ ID NO: 338869 - DNA, 574 bp, Homo sapiens
ataagtaagaacatattgtgaagcactctatacatttaatccgctcatggttcattcacttgtttatgcattcctcctcagtgtgcttaagcaccagttacaagggattatttttattaatattctaactagtctctgcctactttggccaatgaaaaatgtgaactcctgatgtgacttgcaaatcatagaagaataaaaactcagtgccagaagcaccagaattgrgaactgagtgaatctcaataagggaagctgtgatttggggcccatagtcttctatgtcaatgtggtttcaaactctcttttgcttcatctcattatgctattttcatgttggcactacagaagtccaaacttcactccagagccaccacaagtcaatcaatctcagccgtgttaccaaggcttcaggggcctaggcccttgtgaactacgtgtttcagtaattaatcttctccatcctgaagcccttatatgtgggcagccgtcactaaagccaagggccatgttgcagattagttgcttaagtgcagcctggaagctgccttccgagtgaagtggtgctaattaa

SEQ ID NO: 338870 - DNA, 619 bp, Homo sapiens
aatacatataaatctttacaaggagctcccaagttaagacacaaaagctgctacagcaaaccgtgtatccctgtgtgtcacattacagaactgataaacacttggaattggtttcttcattgtaagttttgattattggaactatacctacataggtatttgtgagtaagattgtatataacagatagcaatctgaaaattatgtacaagtaaagtataacattgtacaatattgctactatttctaagattccaaaatatttgtgtcaattgtagttcattctatgtagcaaaaacatttcctgcatcatcacaggtactgccaagtacagtagatttaaaactaaaatggctcactagtttctaaataatcccctaggaaacagtttagtctaaaccattatcttgatagttcataattaggttcaataataaagcttgttttgctgacctaggtcagatcrgcatgtccacagcatctgggcacagtgaccttgctttgagagggtattgttagaaaatccattattatcatcacatacacttcagagaagtggctgttttgtgaattgatggtgtgatgttgccactttagataaaagagtccatgaattattga

SEQ ID NO: 338871 - DNA, 611 bp, Homo sapiens
atttctaagattccaaaatatttgtgtcaattgtagttcattctatgtagcaaaaacatttcctgcatcatcacaggtactgccaagtacagtagatttaaaactaaaatggctcactagtttctaaataatcccctaggaaacagtttagtctaaaccattatcttgatagttcataattaggttcaataataaagcttgttttgctgacctaggtcagatcagcatgtccacagcatctgggcacagtgaccttgctttgagagggtattgttagaaaatccattattatcatcacatacacttcagagaagtggctgttttgtgaattgatggtgtgatgttgccactttagataaaagagtccatgaattattgacttaatgagttaatgttgcttgatttcacaacaaagtctttacagtcttgatgmaatttactgaacacataatcacagcatatgaaggaaagcacaggtgataggctctgctgtgcatttatgagccacatcaaatctggaaaagatatgaacctcagaggtgtcaccgtctctctcttgaaagcatgacaccttggtcagtgtgtcttaaggccaattcatgaacagtcac

SEQ ID NO: 338872 - DNA, 504 bp, Homo sapiens
tgtcctcctttctccttctctacaccacaaaaccactcttaaggtttgtctggacttgctcttccacttcctttctcaccccctaccctacatccctttctatcctaagtcgtgtaagttgtgtgtttcttacccccaatgaaactgaacccttaaaggcataccatgacttctaaatctcctacctgccaagaaactcagtgctaaatctagtgctcarctgcagcacttaactcacttctagtgccaccttctagttcattattgagctgtcttcttaaaatgtttatttcagttctcctacttaatgtgtgttataatcttttaagtatcttcaaatacattttgggaaagggcaagaaataactacttgttaccaaagtcactgagtcccgtggttccttctcagctcgcacccacctctgcccttctctaacttttgatgctgctgctggctgtcacatggaaacaccctccttgttccatctctgtcatgctctgtct

SEQ ID NO: 338873 - DNA, 504 bp, Homo sapiens
tgtcctcctttctccttctctacaccacaaaaccactcttaaggtttgtctggacttgctcttccacttcctttctcaccccctaccctacatccctttctatcctaagtcgtgtaagttgtgtgtttcttacccccaatgaaactgaacccttaaaggcataccatgacttctaaatctcctacctgccaagaaactcagtgctaaatctagtgctcaactgcagcacttaactcacttctagtgccaccttctagttcattattgagctgtcttcttaaaatgtttatttcagttctcctacttaatgtgtgttataatcttttaagtatcttcaaatacattttgggaaasggcaagaaataactacttgttaccaaagtcactgagtcccgtggttccttctcagctcgcacccacctctgcccttctctaacttttgatgctgctgctggctgtcacatggaaacaccctccttgttccatctctgtcatgctctgtct

SEQ ID NO: 338874 - DNA, 502 bp, Homo sapiens
accatgacttctaaatctcctacctgccaagaaactcagtgctaaatctagtgctcaactgcagcacttaactcacttctagtgccaccttctagttcattattgagctgtcttcttaaaatgtttatttcagttctcctacttaatgtgtgttataatcttttaagtatcttcaaatacattttgggaaagggcaagaaataactacttgttaccaaagtcactgagtcccgtggttccttctcasctcgcacccacctctgcccttctctaacttttgatgctgctgctggctgtcacatggaaacaccctccttgttccatctctgtcatgctctgtctctactttctttgctctctccttgtcctgcctgaggcagacacagttcctgccatttgccctagttctctcttccccttgtttctactttctttcatccccaccccattctctctccaatggatgtcccactcagtgccatggttcaactaggactgagat

SEQ ID NO: 338875 - DNA, 502 bp, Homo sapiens
accatgacttctaaatctcctacctgccaagaaactcagtgctaaatctagtgctcaactgcagcacttaactcacttctagtgccaccttctagttcattattgagctgtcttcttaaaatgtttatttcagttctcctacttaatgtgtgttataatcttttaagtatcttcaaatacattttgggaaagggcaagaaataactacttgttaccaaagtcactgagtcccgtggttccttctcagctcgcacccacctctgcccttctctaacttttgatgctgctgctggctgtcacatggaaacaccctccttgttccatctctgtcatgctctgtctctactttctttgctctctccttgtcctgcctgagkcagacacagttcctgccatttgccctagttctctcttccccttgtttctactttctttcatccccaccccattctctctccaatggatgtcccactcagtgccatggttcaactaggactgagat

SEQ ID NO: 338876 - DNA, 542 bp, Homo sapiens
gtttttgcgcattggaagacgtgtctacccactggccccctaacccagtacttcaggtttcttcagtcaatagcaggaaggaaggaaggggatcagggcagacactcacagccatttatcttcttcttcaagtgctgcattctttgtaaatgaaagaggccaatcaatagggcaataaggaaggaggacaagtagctgggaggkacccactgcatggtgaggtctattcacagccagggccccttgccttgtgcactctatcccggaggcatgactcattagcattccagagaggtttgttattgaaaattagccctctattacacagaacaagatgatcacagtgaatattttcactgctggcctctgtagaataaatgtacacatctgtttaacatttggagttattgaaatcagacctgttgtgcatttgccatctattaagaggcagtgctataaaggggaaagtcccagaccagcagtgagacagactggggttcaaatccagactttacctcttatcagctctgtccacttgtaca

SEQ ID NO: 338877 - DNA, 542 bp, Homo sapiens
gtttttgcgcattggaagacgtgtctacccactggccccctaacccagtacttcaggtttcttcagtcaatagcaggaaggaaggaaggggatcagggcagacactcacagccatttatcttcttcttcaagtgctgcattctttgtaaatgaaagaggccaatcaatagggcaataaggaaggaggacaagtagctgggagggacccactgcatggtgaggtctattsacagccagggccccttgccttgtgcactctatcccggaggcatgactcattagcattccagagaggtttgttattgaaaattagccctctattacacagaacaagatgatcacagtgaatattttcactgctggcctctgtagaataaatgtacacatctgtttaacatttggagttattgaaatcagacctgttgtgcatttgccatctattaagaggcagtgctataaaggggaaagtcccagaccagcagtgagacagactggggttcaaatccagactttacctcttatcagctctgtccacttgtaca

SEQ ID NO: 338878 - DNA, 491 bp, Homo sapiens
atctgtttttttaaaaaaaaaaaaaaaaagcttaatgatttgctattgaaractgactataatacatagatatcaaagagtgttttaccaagaaagaatagcattcccattgtatagaaaataaaactgaagtgtttgcatattaagaggtctcatcataaatcattggatgaagtctttcactcgtttatcatttctatttttttctttacaacgtcaatttacttttcccttctcatatttggctgttacacctctcaattaacctttgcgttactgtctgctatcccacatttccttccttctctacactatttcccccactctgtcctcatctggccatctttatactctagagaagctttaaaagaggaaagaatgaaggcagccaaaaaagaaaacaaccaacttttaatcatggtttgggcagctgatttaaggcaaaatatactatttttaaaatacctatttttgaaagggaggaaagaaga

SEQ ID NO: 338879 - DNA, 590 bp, Homo sapiens
ttcactcgtttatcatttctatttttttctttacaacgtcaatttacttttcccttctcatatttggctgttacacctctcaattaacctttgcgttactgtctgctatcccacatttccttccttctctacactatttcccccactctgtcctcatctggccatctttatactctagagaagctttaaaagaggaaagaatgaaggcagccaaaaaagaaaacaaccaacttttaatcatggtttgggcagctgatttaaggcaaaatatactatttttaaaatacctatttttgaaagggaggaaagaagaaaggaagccgggagaggaagagagacagagaagacgaaggaatgaaaaaaggaaggaaggagggaaagaaggatggaaggagggagggagagaaggaaggaaggaaggaaggaaaaggtcggagggtgggaaggagggaggaagggagggaggggatattaaaagggaggagggaataaatgaattaccaatgtttgctagcacagtcctgcaatgacgaatgtgaacttccacatgccrtttctgtgtaatgcttgagcattattggggacaagca

SEQ ID NO: 338880 - DNA, 601 bp, Homo sapiens
tatagaggagttctgttactgcttaggatatagaaagctgaaaggagtgtcactcccaccctaacagcaaagaaacaccaggtagactacaaaaccaccacttttcttgagccttggaagagctgatgctgcagagtaaccaagtagcctgaattgcaaaggcgagtaggcacccccaagaagagataggctatgcagacaggctcagcagggcagaaagatgcacygaccactgtccaaggaagtaaaaagaaatctgctgaaattctcacaaatgctaaagaccaagtgtgggctagtatgaccacataaaatttttgtgagcccccaaacacaaaggaattaactctcacaggccattttccatagccctccattgagtgctaataagattgagtacagggtgagaaaccaaagaaatcaccctcagttatgcaggtatgcaggaagggataagctgccactgcaggaatacataagatctgttctgttcttctacccagaaccttttctcatatgaggcaaagccataatccactgggaggggacacaacccctgtcttttcaggacacaggtaaacatccatcagaaggaaaaaac

SEQ ID NO: 338881 - DNA, 616 bp, Homo sapiens
atgccaggcagaaacttgaatctatataaagaaataaaaagctctagatggtaaaaactgaagataaatataaaagatttttcttattttaatcattcttaaagttaattgatgttctaaagcaaaaataataacaatatattgtgaggtttataacatacrtaagttaaatatatgacaacaataacacaaaagttgggagggggtgttgaaagtatactaatttaagactcttacactatacaagaattggtataacattatttaaaagtggaacttgataaattaaagttatcaattgtataccttacgaggcaatcactacttataagaagaaaaactaataaataaataaataaataatgaagacaaaacaaaataaaaaatagtaatccaaaagcagacaggaacaaagaaataatgaagagaaagaaattatatatttaaatccaactatattaaaaattacactaaacttaaatgctctgaacacccaattaaaagaaagagattgccagattgattaagaaagtaggaagtccgtataatgtcatatgttaaatataatggcatgttaaaatataatggcatatgttaaaataaaggggttggaaaa

SEQ ID NO: 338882 - DNA, 599 bp, Homo sapiens
ctgtgaaagtagaaagatcctttctgagcctctgcagttgtttaagcgaggtgttattatcatgggctaaggtggagcacaagtggtcatataaaggatgcatttggacagaatctctgacagcacatgatagctatatagatgttagtaaaggagcaaaactctgcctgcatgagaatagtttccagcctgaattggaagatatgactctaagtagatttcaaagaccwgaaagtagctgactgtatagtacggttaggcacaaaatgactgtaaatatttttaaattctgcaagacattgcaaatgttttcaaatggtagaatcccaacagaaagtgcattttaacagagaacatatttgcaccattcttcaaaatgttttttttgtgtttccacccggggtgctctccctagtgagagccattggttgaatcgttttgaaagtgcttgcctttcatcacaggccaaaataaatcaaaaactgtggtcacagcttttgcaaggattggttcaattgtgaaaaagaatatgtttgatctgtagaggctctccaggggaaaatgttttgagcaaaagggcagcattttattttctaaaa

SEQ ID NO: 338883 - DNA, 561 bp, Homo sapiens
ctaaactgagcaagtggccaagattattgttctactttcacttcacctatttttattttcctaggaaactactagcattcttcagacactattaagatacatttatcaagtgttatatgtttaagtcaaagtttagttaattttcataattctggatattaaatgagaactgctataaaaatcaactattttctaaatgccaatccagcatkttcccatgtggaatgctgtttgttcatgattagatttgtagcttttgtttacttccttaatcaatgtagtttcaatcaaataattctaatcaattttgcttcctaatttgatgaattatactaataaactccaattttcagtaagaaaatgtagatttacagttaattcctcttcatttgaaagagatacttccactatttccaaaattatctgatctcatttttttttttcagaggttttgactaaactaaatgttctattggactatgcccaagaagctaaggttttatttctctgtaggtggtgccagatgtttttcattggttactatgagagctattaaataag

SEQ ID NO: 338884 - DNA, 595 bp, Homo sapiens
tgctgctcccaatcacaaagatccagattaatatgaatgtatgagagaggaagagctgtgtgggaacattatcaatctggggaaaatgctcaagagcaccagtacagcttagtggggaggaacatgtactctgtttttcagctgcatggggtcaaaacccagctttatcacttaccacattgacttggatgaattatttaacctctctatattttagctcctcatctataaaattaggagagtatttatctcattgtattattattaagattaagtaattgatatttatatagttctagatttgcctagcccatacctatctacacatttattaaacacagtgcagtgatataaatgttcaatctatccaagatayaaaccagaatacatagagacatgccttgtctaaacattatttcatttgtgttttttgtaggagccaaattttaaagttagaaggttctggtgaagatttgtagtgcaattatttgtatactgttcattaagatttcaactttagctaaaagtggtatcacaacattcagatggaaggcattggacacttttttaaattaataatcactttagactggta

SEQ ID NO: 338885 - DNA, 505 bp, Homo sapiens
agctaaatacaactatgctttacaatattttagattaatagccttttgagaggtcatttctgcaggcactgtttctggtagagatttcacagtgcaaatctgcatgatcatttgatagcaggccatctctgtttctacagcttggtctccagtcaatgcccagtgaaaaggccacaaaagaaacaaatagtaactttaatttattaaaaggagagccccatatgacattttgatagactgttcaggaaactaatatgtctggtgtttaaagtccatgagagactatgggtagagcactcttactatgacgcaggtgttgattcttgaagagttcattgctatgagcatttcagaaggatcggagtccagtaatcataataggatttaaaccatcgtcttagtaaatcatccttccactaaagtacacccttcctgcttgaaaaggctccagtgagttayaaccaggattaccaggcttgcactgatgaaaagactacagtctatg

SEQ ID NO: 338886 - DNA, 519 bp, Homo sapiens
gtcctataccccctcttcacattatggctcctgaaaagaaactctatacatgatgcattggattcatcaccctcgtttaacttttttaagcttcatcaatccagtatgaattcacacaattccattgtaatttccatcatcagggtcaccggtgacttggactggaagacctgattaactattttcaggactttgctttttcacacttggtgatgcagttaacatttgtgatttacttaaaaccttctctcctgatttttctgacatatctcccttctggtttttccctttgcttccataactgttttcttctaatatccttttctgaatcctagaatctagacctcagaaaagccaggagctaaagacacgcccacgaataataaggttagagatataaattaagggcagcagagwggataagatgactcttatccactgtggataagaatggatacagggagagtgcattctgtaaaaagaaaggagggacaaagatgaaacccaggaaaagcaaat

SEQ ID NO: 338887 - DNA, 578 bp, Homo sapiens
attaagtgagaagccattctgtttaattcaaaatcaatgctcttaattatcagtgccttaattatgaatcaattagttctcctttcagccgcactggaataaataatactacacaaatctttctattgcacaggacactattacyaggcaaatatatgaagcaagtgatattaggaggcagacagtaggtagccaaagactatgaataattctagagacaagcagtactcctgaggtgggtctcattatggccctggtctctgccagaggaatatttcctgactacactctgagcaaaacaaagaagttctgttgaactgagaagacagagatcttagttcagggcagctgaagctgctagaatatgtgtggtgggtctctgagagcaggtggctgtgtagagaggtagcctaagaggtccatgggaaggattccacaagtctgtggctgagagatgagctgtacatgtgtaaagcaaaacagtcaaagcatgcaagacagcaacttctagggtattgaaagcaaaagagagacactagaggttgagcagagttgaggaaaaagccagcctgggagtg

SEQ ID NO: 338888 - DNA, 387 bp, Homo sapiens
ggtttctaagaacttgttttatgaatctgggtgctyctgtagtgggtgcatgtatatttaggattgttagttcttcttgttgcattgatccctttaccattatatagtgcccttgtcttttttgatctttgttggtctaaagtccattttatcagagaatcctctctttttctactttttacttatattgtgatgccacaaaagcacacacattcaattctttagctgttctttttgctatttgctttcacaatggtaaataaatattttatagtattggcccttgattattagttgtctctctggtgtttgaattctctgtttcctgggtcccatgtcctactgcctcctagtttacttttgtatttggatgtctgcttgctttat

SEQ ID NO: 338889 - DNA, 533 bp, Homo sapiens
aaatgtactccatctttcacatgtcaaaacagtttgcaaatgacaattcattttccagaaagtttgcaaatgacaatgcttgttctgtraagaatacaatagcaataagttttaacgtgaccatggtgaaaattaaggaaggtatcttggaagtcataggggaaaggcttcttgtttattagatttgcagagtaaccacagaatgcaatatattttgaagcatttagggacatcaaaacaaaaattctttacatgagaaaaatgtataatcataaagtcattcatgctaattcacagttagagccagagtattgcttttgtttgctgttttgcttgttttgttttttataagctgaacaaggaaaataattagatttgtcttgtatatccaaatagtacctcagatgctttttgattatatgccaatattctctaaagtcatagtcaaacattttgctttttcactagtgcagtcattaattattacagtctgaaaaatacaaaatggattggagaattaatactgggaatcc

SEQ ID NO: 338890 - DNA, 542 bp, Homo sapiens
atcttgcactggcttttcatgctttctcccacaggcaacgcacatgactgctactcatgtttcgttgcccaaaccaaccctggtgtccataccaacatcaggatacaggaagtataatgataccataggttcagaaagaggattggacatttttgataaagatgtctaatgactctcacaaacctgtatcagatgcaaatgaaagtaagataacagaggtagaataagatttctgctctttttttaatatttgtcatgaacagaggagcttctttgcatttagaaagttctcagaattacttgaacaagtggcatggactgatcatacaaagayacactcctgccaaggttgttgaggaagaacaattcccaatgagataagcttaattggtaattggtatggaatattttagtatttatatgctttaaatgagtatatcaaaatatatgaaaaataagagggagtatactgggtggttaaagccatcaaggctgggtttgaatcctggttctgccacttattatcagcaagaccttgaaaa

SEQ ID NO: 338891 - DNA, 433 bp, Homo sapiens
tgtcttgagctagttatacattcccctctcttatctatgtaaacattgtgatttaatacagtcagaacatattatgattggctctggaattttttttcttgtgcacttcaggctttcatattatcctctcagtactattctttgctattatrcccttgccaaagcattaatgctatccaatatgttatttggattactttttgacaaattaattaaaataatattgaaagtaaataagctaatttggggaggctttgaagcactgacaaatctaatgctttcagctaaataattttgctctgtgttaaatatctggaacatcttttctcccttcttccaaaaaatcctttgtgataggaagtctttaatcaggtccatttgtttcttttaatcttatggttagcttttaaatatctgtgaatactatgctaca

SEQ ID NO: 338892 - DNA, 525 bp, Homo sapiens
taggcacaatggcttacacctgtaatcctagcacttaaggagcttaaggtgtgcagatcacttgaggtcaggagtttgagaccagcctgggcaacatggtgaaaccctgtctctactaaaaatacaaaaatttgctgggtgtggtggcaggcatctgtaattccagctacttgggagtctaaggcaggagaatcatttgatgtggggaggaggagtttgcagttagctgagattgtgccactcactccagcgtggcccacagggtgagactccwtctcaaaaaaaaaaaaaaaaaaaaaaaaagtggagggtataaatgtaacacactctggctacgggcttatccctattctgcaggaaaagtcacaaagctgtaacacagctggagctgtaacattgcctcttcagtaaagctgttttcctccacctgcggcttgtccttcaattcttcccagagcaaagcaaagaacccacaaggaataagccctactttgtggctctcctgccctgcatcatgggaacttc

SEQ ID NO: 338893 - DNA, 611 bp, Homo sapiens
gattacatctacagtttgaaatgtcaaaactatggcctacattgccaatgtkggctgattatttatttgcaaagggtggtggatgggatatggtcacttaaaatattaactaaagactagcaccatccaacagaaacataacacaagccacaaacaggagccatgaaaataattttaaattttctcataatctcattttaaaaagtaaaatgaataagtgaagctaaattcaataacatattttatataagccattatacccaaaatatgatcatttcagtatgtaaataattttattatgattattattttaaagaaagagtctgttatgttgccctggttggagtgcagtggcattcacagtcatgaccaacgcacactatagcctgtaattcctggcctcaggtgattattttgcctccacttcccacacaaccaggaatataggcacgtgccacagtgcctggctatatgtcaataatgtgttagaaattattggaatattttacattctctttcttgtactaaattatagaaatctggtgtatgttttgcatatagagtacatctcaatttggactgttgtccaaaagacgaccacaatggttaaa

SEQ ID NO: 338894 - DNA, 611 bp, Homo sapiens
gattacatctacagtttgaaatgtcaaaactatggcctacattgccaatgtgggctgattatttatttgcaaagggtggtggatgggatatggtcacttaaaatattaactaaagactagcaccatccaacagaaacataacacaagccacaaacaggagccatgaaaataattttaaattttctcataatctcattttaaaaagtaaaatgaataagtgaagctaaattcaataacatattttatataagccattatacccaaaatatgatcatttcagtatgtaaataattttattatgattattattttaaagaaagagtctgttatgttgccctggttggagtgcagtggcattcacagtcatgaccaacgcacactatagcctgtaattcctggcctcaggtgattattttgcctccacttcccacacaaccaggaatataggcacgtgccacagtgcctggctatatgtcaataatgtkttagaaattattggaatattttacattctctttcttgtactaaattatagaaatctggtgtatgttttgcatatagagtacatctcaatttggactgttgtccaaaagacgaccacaatggttaaa

SEQ ID NO: 338895 - DNA, 512 bp, Homo sapiens
ttcctacttcttttttttttcttcgaacagtggtttctaattcatgattatggtttttcttttcaaatatcatgaaaatgtcatgaagaataggaaagaaaaatgaaaactctataccatgcatttgcaaacagcaggaatttgtaagttttatgaaatataagtttgcttattttaggaaatgcataatgagatgtttttattattccttgacctttcaaggtttgaattccttcactttattctttgagatactataaatcaggcaatgactttttggaagaaattctgaaatgggccttttttttttccaccttcaccattagctgtrattttgacattattccacattaaattacgttatatgcaaggttgcttttatttggaattgctgtcttagacagtgtagtttaatggaaataaaatataagggaaaaagattaaattacacgataaaataaggctaatcttggaataaaacagaaacagatttttttttccaattttcaact

SEQ ID NO: 338896 - DNA, 512 bp, Homo sapiens
ttcctacttcttttttttttcttcgaacagtggtttctaattcatgattatggtttttcttttcaaatatcatgaaaatgtcatgaagaataggaaagaaaaatgaaaactctataccatgcatttgcaaacagcaggaatttgtaagttttatgaaatataagtttgcttattttaggaaatgcataatgagatgtttttattattccttgacctttcaaggtttgaattccttcactttattctttgagatactataaatcaggcaatgactttttggaagaaattctgaaatgggccttttttttttccaccttcaccattagctgtgattttgacattattccacattaaattacgttatatgcaaggttgcttttatttggaattgctgtcttagacagtgtagtttaatggaaataaaatataagggaaaaagattaaattacamgataaaataaggctaatcttggaataaaacagaaacagatttttttttccaattttcaact

SEQ ID NO: 338897 - DNA, 380 bp, Homo sapiens
tttctggggaaaagcatctttcatggcttccatcagtatttaaagaccccccttgccagcctctctcccagatcatatctcctgcaggcaaggctcagtgtaattcccaaaacaggctattacacccccaccccagtttgggtstgtacctcagacagaaaagcaaggaacttctctataggacttgccacttgtaaatcacagtcacatccatttttaaaatgtaatctttgcaccaacaataaaggtagacaggaattgctatttgtagaggtcacctcccactcccaccccttggctgggttggggcccctccctgtgctcccagcagcatagccctccatactctgcatcagaagggccaaggcattggtcggtct

SEQ ID NO: 338898 - DNA, 303 bp, Homo sapiens
atgatttattttttccataaatgttgaatgcttattgtaagtaaagcattgatatagacattgggggtacaacactggmccaaaaaaaaaaaaaaaaaaaaactcctgcccagcttaaattctgggcaagaaaatcagcaatataagttaaaatatatagtatattagatattgataggtgttaaagaaaaacgataaatcagggaagacgattacacaggacagtcaggaaactcctttctgagatagcaaattctgagtaaagacctggatagaagtaaaaaagaatatttcagcaagttc

SEQ ID NO: 338899 - DNA, 303 bp, Homo sapiens
atgatttattttttccataaatgttgaatgcttattgtaagtaaagcattgatatagacattgggggtacaacactggaccaaaaaaaaaaaaaaaaaaaaactcctgcccagcttaaattctgggcaagaaaatcagcaatataagttaaaatatatagtatattagatattgataggtgttaaagaaaaacgataaatcagggaagacgattacacaggacagtcaggaaactcctttctgagatagcaaattctgagtaaagacctggatagaagtaaraaagaatatttcagcaagttc

SEQ ID NO: 338900 - DNA, 619 bp, Homo sapiens
gccttcttttttttcttctttttctctgtattcagtatctgaacaaaaattctccatattttcttcccttatttcttgctcagtattatatttctgtataatggtgttttctgatttttcagttgacatttcactgttttcattatttacttctggaacattctagtgtaaaatggaagagattcttttaaaaacattgcctacaagtataaaacatttgagcaaatgtgataaatgtggaatctgtgtttcagttcaaccattcagcaatttctatttgaaagtcaaatgattttttagtaagtttaatataccatactctttataacgatatcactttacattcattttatatagtctatcatatttaagcaaaatggagatctttatacattttcaaacatgcataccacattattatataataccacattatatgtaatagaagaaccaccccattactaaaaacaagatagacatggcaggcaaattgttttgagcagtastttatttttttaagagatgagttcttgctatgttgcccaggctggagtgcagtggctattcacaggtgcgatcatagtgcacgacaagcctcaaaattctgggcccacactat

SEQ ID NO: 338901 - DNA, 544 bp, Homo sapiens
aagggagagaacacacggggcagagtgatacatcaggagagtgctgcagcagtccaggtgatatcagtaaagatgaagagctgtgaacccattggtgatgtatggaactaaagttaattggacttggtcaaygattggatgtgaaggctgagggagaaggtgagtcaagattgacttccgtagttcagattaggtaagtagatgactggtggatgtcattccttgagcgagaaaacaggagtagtagtagatttggacgaaaatatcatgagttcagtttgaacttactgagtatgaagagttagtaatacattaaagtggcaatatctaatgaacctgtatttatttattacttttgtcttttaaataattccaacttttattttagattaagggtatacatgtgcaggttggttacatggctatattgcatgatgctgagctttggggtatgactgatcccatcactcaggtagtgggcatagtaatcaatagtttttcaactgttgtcttcttccctccctacctcttctagtagtcccca

SEQ ID NO: 338902 - DNA, 536 bp, Homo sapiens
attatgggaagtaggaaatgaataaaatcatttttaatcacaactgacaatagaatgtaaagtagtagcataaatttgttgagggaaattgggaaaactattttcttggagatggaaatatattttcatctgtcctgaataatttaggtgaatgggatgtgtgtgttattgttctttctctcccctttcctttcttttattagaacttcctaggctcttgcctcttccatagtaccrctttacccaagtagagttataatgttatgatcaaaatctgagatgcaagtagggagatgacaaggattagaagagatgattattatgcactgtagcctccataaatatcaatcatcagtaactaagaaatagtagtacaaaaatgagaaaaaaaatcaaatgaatccttgtacataccttcagctcatttcaattctgtagcttttcttgactaaaatttctcttcagttcctaccaagagaatattataacagtttgagaaaatgtgctcatgtaaaatatcctctgaaagtttcctt

SEQ ID NO: 338903 - DNA, 536 bp, Homo sapiens
attatgggaagtaggaaatgaataaaatcatttttaatcacaactgacaatagaatgtaaagtagtagcataaatttgttgagggaaattgggaaaactattttcttggagatggaaatatattttcatctgtcctgaataatttaggtgaatgggatgtgtgtgttattgttctttctctcccctttcctttcttttattagaacttcctaggctcttgcctcttccatagtaccgctttacccaagtagagttataatgttatgatcaaaatctgagatgcaagtagggagatgacaaggattagaagagatgattattatgcactgtagcctccataaatatcaatsatcagtaactaagaaatagtagtacaaaaatgagaaaaaaaatcaaatgaatccttgtacataccttcagctcatttcaattctgtagcttttcttgactaaaatttctcttcagttcctaccaagagaatattataacagtttgagaaaatgtgctcatgtaaaatatcctctgaaagtttcctt

SEQ ID NO: 338904 - DNA, 536 bp, Homo sapiens
attatgggaagtaggaaatgaataaaatcatttttaatcacaactgacaatagaatgtaaagtagtagcataaatttgttgagggaaattgggaaaactattttcttggagatggaaatatattttcatctgtcctgaataatttaggtgaatgggatgtgtgtgttattgttctttctctcccctttcctttcttttattagaacttcctaggctcttgcctcttccatagtaccgctttacccaagtagagttataatgttatgatcaaaatctgagatgcaagtagggagatgacaaggattagaagagatgattattatgcactgtagcctccataaatatcaatcatcagtaactaagaaatagtagtacaaaaatgagaaaaaaaatcaaatgaatccttgtacataccttcagctcatttsaattctgtagcttttcttgactaaaatttctcttcagttcctaccaagagaatattataacagtttgagaaaatgtgctcatgtaaaatatcctctgaaagtttcctt

SEQ ID NO: 338905 - DNA, 438 bp, Homo sapiens
gaaacttgcaatactacattatcattttctccttcctgtcctttgtgttgttgttatcatacattttacttctatatgttataaaacctaccatatattatttatttcagagaattatctgacaaagaaaattaaaaatgagataaagtatcttttctattcaccaccacatttaccacttctgtcactctttattcctttgtttagatccacatgtccacctggtatatttcttcaacctgaagaacttccttttaacgttttttttttktttttttttttttgcatatctgctggaattctttccagcttttgtttgtctgaaaagggggtttatttctccttaattttaaagaatattttcactggatataaaattctagataatttttctttcattaattttaagaggccattccatttttttttttttttttt

SEQ ID NO: 338906 - DNA, 438 bp, Homo sapiens
gaaacttgcaatactacattatcattttctccttcctgtcctttgtgttgttgttatcatacattttacttctatatgttataaaacctaccatatattatttatttcagagaattatctgacaaagaaaattaaaaatgagataaagtatcttttctattcaccaccacatttaccacttctgtcactctttattcctttgtttagatccacatgtccacctggtatatttcttcaacctgaagaacttccttttaacgttttttttttttttttttttttttgcatatctgctggaattctttccagcttttgtttgtctgaaaagggggkttatttctccttaattttaaagaatattttcactggatataaaattctagataatttttctttcattaattttaagaggccattccatttttttttttttttttt

SEQ ID NO: 338907 - DNA, 506 bp, Homo sapiens
cgtcagcctacaaatatgctttacacacattcctaatatttttcctccttgacccagttcctctgtctgtttcactttttttttctttttttttttttttttttttgagaaggagtctcactctgttgcccaggctggagtgcagtggcgtgatcttggctcactgcaacctccgcctcctggattcaagcgagtcttctgcctcagcctcccgaacagctgggcttacaggcttgcaccaccacgcccagctaatttttgtgtttttagagagtttcactatgttggccaggctggtctcgaacccctgaccttgtgatccgcccacctcggcctcccaaagtgctgggattacaggcatgagtcactgagcctggccctgtctttctcatttcttaaagtctatacttgctactttcaaattctaacctcccatcactccttaataycctgacttctgccctcattgttctactgtgttctcaaatatcacctgcaaaatagca

SEQ ID NO: 338908 - DNA, 560 bp, Homo sapiens
aatcatttcttgtctgcacccaataactctatctaaaggaaactacctacttcaggtattctctcgatttcagttttttggagacatccatcctttcattacaattttgacctacttctctctgtcagctatacaaattaggttatctctgaggataccctttttcagttctgtcatgagtctcctgtttcccagatcccatagtttcctgtcttggtttactcccttgtcttggtagcacaaacattctactacttcttgataaaggaggcatagggtggtaaattttttgagaccctatatgtctgaagatgtcttgattctaccaatactcggcaatttgtttggctaaatacaatacaactctgcttcagaaatcaattttttcccaacatctgaaggcatggttctattgtcttctacgttccagygttgccactgagaagtctgaaaccttgtgttaccactctcattcttaatccctgtatattacctactttcttgtacaattttagaatcttttctttatgtgttgtacaaaatttcataatgatatgcat

SEQ ID NO: 338909 - DNA, 595 bp, Homo sapiens
gaagcagtctattaggaaaaaataagagacttggaggaaagaggcagaatatgtatattaatagctgcattttcagtagaagtcataaaactgtctagaagaaattcaagaataaaaatctaagagtatgaaattcctcatagtagaaaggacaaaaaatactctaatcatagggtggaaacagcttactaagtaccagcaggattagaaatggtgaaggaacaaaaacaaaagaaaaaagaaaaagaaagattaaatacacaaatgattatagccctaaatttcttatcatacaaaactattagcaattatcgcttgagtaattatcactacgagtcagacactattgtatgtgtgttatatacacatayaattgatttattagttatcgcaaccacccctgtgttagaaactggaatatccattttagagtagaagatagctagagttagtaaaggtaaataatgagtccaaacttacatagttttgaacctagttctgtctgaatataaaggatgttttttaatggtaatgtgtatagcccttctaaatgtttcacttaaaaacctaatagaaacaataaaagcaatattca

SEQ ID NO: 338910 - DNA, 643 bp, Homo sapiens
actttatttacaacttaataataaaagcacaaataacccaattacaaagtgggcaatagattttcatagaaaaattccaaagaagatatgcaaatggccaataactacatgatactttactcaacatcattattcattatggtagtgcaaatcaaaatcacagtgagataccctttcacacagtcaaatggatttgatgaataagacagtgaataacaagcattggcaaggatttagaaaaatgatatccctcagacattgctggtgggaatgtagaattacgtaaactctttggaaaaagttccatacttcctcatattattattatgcaacatgcagttacctatgaccaggaattccactgctaggtatatactcaggacaattttttttaaatgtctgcataaaattttatatgtggaggttaatagcagttttatttataattgttaaaaagtgaaaacaatttgaatgacatcaactgatgaatgaataaataaaatatagtacttcataaaacatgatattatttgttaataaaaaggaacraagtgctgatatgtgatacaacatagacaaaccttgaaaatattataccaaatgagtaaagtcagccataaaagatcacatggcataattccat

SEQ ID NO: 338911 - DNA, 622 bp, Homo sapiens
tgttaataaaagaacattaaaatggttttgatttttaaaacgtagatagttgcaccctaagtttaaacatcaggaaaattaaccaaaatatcaatatgtgttttttgtttgttttaacttgatatcttaaaatttccagatttttttatgcctctttttttgcaatggaacatccttagccaaagtctcattcagcatacattgtagttttagaaaaataacattcagcttcattaaactactcttacaaattagtaacttgaaaataaaaggaagccagtcttcataattgaaggatggttttatgttctaaatggagactttttattaaamgctaaaatgtggctattcctgataaaaaaacatggaagaccttatcagatgtatatagctacatgtatttgccacataatactttgaccaaatattaattctttttacaataacaaaggttaaaaaatcatgtcattgaaatataaaatgttttatataaattgaagatgactaacttatgtgattatatcatattttgctactaaaaattatagattattatgcatataaatatatagacacatattaaaatattcaagtctaattttactaatgcatattacaaaac

SEQ ID NO: 338912 - DNA, 557 bp, Homo sapiens
cttgcaaattaattctatttaatttttctttcaagtaggaaaagagttaatgactatctgtatccttgataaatgagtgggtttatataaacagattatccaaataatttagcctataaaagccctctgacctgcaacatccgggtagttcaagyagaagaggaatgctatctttagtgttatttatttaattattgctatattatcagctcatctttctctttacagattttattgcatttaaatagtaaaatgacaaatctggctattgttttgaaaactgtaaaatgtatataattttagttgctattcttgttgttattctaactctatgtaaattctgtatctctagcgtgtatgtgttgcatactctatttcagtcatgaatatcattgactattcaatttagttactactttgtctttacttagagttttcctttcatatgtttgtgggtttattaaactctctgaaggacttttaatgatgcagttttgaaagacctcactatttaatgcaaagatgtctataaattgattccctaaaatttggcttac

SEQ ID NO: 338913 - DNA, 557 bp, Homo sapiens
cttgcaaattaattctatttaatttttctttcaagtaggaaaagagttaatgactatctgtatccttgataaatgagtgggtttatataaacagattatccaaataatttagcctataaaagccctctgacctgcaacatccgggtagttcaagcagaagaggaatgctatctttagtgttatttatttaattattgctatattatcagctcatctttctctttacagattttattgcatttaaatagtaaaatgacaaatctggctattgttttgaaaactgtaaaatgtatataattttagttgctattcttgttgttattctaactctatgtaaattctgtatctctagcgtgtatgtgttgcatactctatttcagtcatgaatatcattgactattcaatttagttactactttgtctttacttagagttttcctttcatatgtttgtgggtttattaaactctctgaaggacttttaatgatgcagtttygaaagacctcactatttaatgcaaagatgtctataaattgattccctaaaatttggcttac

SEQ ID NO: 338914 - DNA, 525 bp, Homo sapiens
atgaatatactaaatctctctaatagggctacacaaattaaataaaagtgaattatcaatgtatatctctcagactgtcaaaaattttaaatggatatgcaacttgtttgggatgtgagtgaatwtcatgcatcactggttaaagattcaagtgtcaaattcttgttaagatgatcataaaatatctattaaaattaaatattattatactatcacatataacagttccactcttgagcagctataccataggaataaagtgccaattcctaagggcatatatacagaggatgtttattgcaatattatttcaagatgacaagaacaaaaaccaaataagcactgataagcactggttgactatattttgatatatccaaaacattaataactacatatttatatagaagaatgaattgagcttacagatggattagtaatatatcaaaatttgtcatttcatgagtaaaaaaatgcataaaacatgcttatgttattccctgtctgactcatatttagaaacca

SEQ ID NO: 338915 - DNA, 625 bp, Homo sapiens
gctggtaaataagatgaagatatacacatttttgtaattagcttgaattttttcatatggtcaggaaattcttgaataagggatctgaaatttgcactgtaacagatgcaagacaagtcacttgatctgaaagacatgagatcataaattaccaattagctcaattagcttcacaaatatatgcacaattagaatcaaatgttactccttataaatacttttaagtttgtcaatatttataaacattgtgactattttctctattcattaaaaacatttctgtaaaaatatgattttataaaattctatgaccaaaaaatattccccaattttatcaagcaattctttstttttgaaaattcagatgtttcaaattattgaaaattattctataattaaaaatcttatagccaaatctttgtgaatatccatcagtgtaggaaaaatataataaaaatacaggcaggggtagatgagaggagctttggaccaagcttgggcaggaagctgtgcatgatagtagaggaacctctttaatcagtttgaaaacacttaatacaatagtctcaaaaaggggggaagaaaagagggtttatcagatataatgtggatagaaaaacaaaag

SEQ ID NO: 338916 - DNA, 596 bp, Homo sapiens
ctcatacttcataaagttttcaccagtactgtaataaagaaaatttggcatttattattaccaatccccctcaggcacattgttttgctaaatgtttacacatacccacatttaaatatatattcatatataatatataattagtattatatgtattgtttctattattacgtaattttattccatacagtacattaagttatttcactgagatgaatctggttttgcaatccaaaattctgaattagaaaatataaaacaacttaaaactttgttaagaggcataacctgaccgtatgcatcaaataacctctgtagtcacttccctcttgccatgctcagataggtttttaaaatcacatacataaatccttgtatatcatgaactcagtatatttctcattattaaaattatattatatgtgtttccactcacatggatttgtaaaggaaactggatcctctttcattttaaaaagtattattttggagaagcacttgttttaataaagtttaattcacaaaaatttcacatatagttaatgacaacctcattgtttytataactcaataagacataagatgattgcactctg

SEQ ID NO: 338917 - DNA, 570 bp, Homo sapiens
acataacactttttgtgttgcttgactgatacatttaagcctcttaatgtagtagcttaaggctagcctctctgtttctgactcaccagctcatcatccactttaattttccctttcctggcccttctctctacctacctaaatactccattcaggatctcttgctcagccctctcaacatgaaatattagatacctttgatgagcggtgatttgtcctgtttcaaaccctagtgttgccaacattcagctatgaacatttgggcaagtcacttatattatctgggtctaattcctgcaccttagattatttctatctaaacccaactataaaattgtacaatcttctaatgtctttgtattatgttattatgaaacatactaatttttaattctatcatgtctgctatttttatarccaaaaaaatcaccaagcctaaataactgtttctgattaattagtagagattatatagttactatttaacttcataatttatatgatacagttgcatctattaataaagaagatatatcacataatgacaatgtattttattgtcacagcccc

SEQ ID NO: 338918 - DNA, 408 bp, Homo sapiens
atataaagattttatatactactcatttaactttctctattgccttcccaattagaatatagtgcttatgcacagttccttaatgcctttaattttaaaatttacttgggtcagtatayttaccccacatctttcagtgaggttattttacacacttacaaggttagatgcttttgtagcattctatattatatcctggaattccctgctctcctacattatttaaaaatgtttttatacattatgtttttatttttggagctataatattctatggcttttaacaaaagcatagtgccactatccatgattacagtgtcatatagaatagttttactgttctgaaacattcactgtacttcccttactcaaaacatacccttccccaaattcctggcaaccacttat

SEQ ID NO: 338919 - DNA, 360 bp, Homo sapiens
gctgtttttctccaaaaaaaatgtgaaataaactccaagcttattttgcattctattaatcaatatagaaatgttcagaaataattcttcattcattcagtttattcaacaaatattaattagatatccaatgtctgcccaatccatagtaayagctgtaaatactttggtgagaaaaacagacctgttcatataaagagccattggctagtgaagataaataggtatttgttattcaaataataccaaaataaatgttaagttacaactatgataagtgtgatgagtgagaggtatgtggctctatggagggtgtaagatagaagaatgtggtttggtctggatagttaggaatatttt

SEQ ID NO: 338920 - DNA, 509 bp, Homo sapiens
ttgccttatttccttctaagcacaagattataagacagaagtctcgatattagatctttcatagcatttagtgtcctaaagcaagatttttcagtgcctgcattatgcaaggcagaataaaatattattgcataaaaactaaaacatactgactaccttatctcaatatttgtatggcctcattctcaatttatataaatggaaaaaatactcaatagaaagtacttcattattttcccaaatccaaatattaaataagcaccactaattttttttaagtttctacatttctaattctatttgtgcaattaggtaaattgatgactgcttaactgaccatacctatatgttgatgtgaaatcactgcccatgtcaatgatggtagaaagtcccacagctttattttcttctacttcattagtaactygcattaaaatattcaaggcgcactcagaaaatgtgtttaatatgagtttggtagtcatgatgacacaataacattccaagaa

SEQ ID NO: 338921 - DNA, 509 bp, Homo sapiens
ttgccttatttccttctaagcacaagattataagacagaagtctcgatattagatctttcatagcatttagtgtcctaaagcaagatttttcagtgcctgcattatgcaaggcagaataaaatattattgcataaaaactaaaacatactgactaccttatctcaatatttgtatggcctcattctcaatttatataaatggaaaaaatactcaatagaaagtacttcattattttcccaaatccaaatattaaataagcaccactaattttttttaagtttctacatttctaattctatttgtgcaattaggtaaattgatgactgcttaactgaccatacctatatgttgatgtgaaatcactgcccatgtcaatgatggtagaaagtcccacagctttattttcttctacttcattagtaactcgcattaaaatattcaaggcrcactcagaaaatgtgtttaatatgagtttggtagtcatgatgacacaataacattccaagaa

SEQ ID NO: 338922 - DNA, 554 bp, Homo sapiens
tctctctctcatgcacacacacacacactctctataaaacacgtacacacacacacagagaattcccaaatatcacaatcttctatattgtgtataactttgtgttttaaatcttgttgtcttaaaatttgggttcaaatcatctttctcttttcttgctccttctattcattttataaccagaagtaattggatataaagaccttaaatttagtcacaactgaaataactgatttgcactttatatatttgacattattgcctgcraagttgaaatattgactctgcacttgttttgttattgttgtttcttccccaaacctccaccttaatcacacagctgtatgtgtcttccacagcctcctgtattgcttttcatttagttggaataattttccataatttagatgtttgataggtaactatatttgtcaaatcttctaaggcagtgttgcccagctgttggctttttttttttcattttaaagggaaaatatttctgtgatactcagtagatgataaaaagtcatttgataaaagtcgaaactcatact

SEQ ID NO: 338923 - DNA, 468 bp, Homo sapiens
taggggtagaaagtttattcaaagggttaataacagagaactccctaaagacaaagaaggatattaatatccaagtccacaaaggttatagagcaccaagcagatttaaccaaaagaactacttcaagacatttaataatcaaactcccaaatgttaaggataaagaacgtaycttaaagcagcaacacaatagaaacaaataacatgtaatggagctccaatacatctagcagcagattttcagcggaaaccttacaggaggagatagtggcatgacaaattgtattattagatggtgaaggaaaaaaccttctactctaaaacattatacccagtgaaaatatccctcaaccatgaagaagaaataaagactttcccagacaaacaaaagctgaaggattttatcaacaccagacctgtcctacaagaaatggtaaaggtgatatttcagtgagaaagaaaaatac

SEQ ID NO: 338924 - DNA, 468 bp, Homo sapiens
taggggtagaaagtttattcaaagggttaataacagagaactccctaaagacaaagaaggatattaatatccaagtccacaaaggttatagagcaccaagcagatttaaccaaaagaactacttcaagacatttaataatcaaactcccaaatgttaaggataaagaacgtatcttaaagcagcaacacaatagaaacaaataacatgtaatggagctccaatacatctagcagcagattttcagcggaaaccttacaggaggagatagtggcatgacaaattgtattattagatggtraaggaaaaaaccttctactctaaaacattatacccagtgaaaatatccctcaaccatgaagaagaaataaagactttcccagacaaacaaaagctgaaggattttatcaacaccagacctgtcctacaagaaatggtaaaggtgatatttcagtgagaaagaaaaatac

SEQ ID NO: 338925 - DNA, 599 bp, Homo sapiens
aaactaactttggcatttccagtgcagtgaatttgtataatttcttgttgctttggcattcattttgaatacaaatttacctttcttataccagaagctggtctcagtcacctttgacacagtttccatttctacatcatatccaaatggcaagagataagaacttagtggcatctctttcatctggcaggctgggctcccagctttccagcatcttcytttaaagaaactagacagacatttgcctgcaaacttaatgtgacctattcactactcccttaactgtgagttgctgcatgtttttctctctctctactcgaccccttcattcctttatccagtgattcagggatggaggactgcccttccaactcattaggcctgggatttgtaaataaaaatcttttaacttttttcctatagtgatggtgtcttaaatttgtaccttccatatgaagaacaaggagctaccccaaactagtttcctgggacaccagtggggaacacaaggttgggcttctgtgccagagtaatgatcaggtaagcaaaaactggacacaggtcaaacaaaagccataggggcacctgccagtacaaac

SEQ ID NO: 338926 - DNA, 567 bp, Homo sapiens
aatagcatgaggtgatatttaacagggtttttgtggctgtttcatggagaatacactgaagggggctattgcaattatctaagtgaatgatgatggtatgttggaccaggaggagtttgggctaacaagcaaaatggaagtgactgaaatgtccagctgagattcgctcatagagtatatgtagagtgatgaaagactgactgcaaattttggtttgagaaagtaagtgggaaattgccattaatttaagacagctagaggaataggcttggagcagggagcagattgggaattcattttttgatgtattgaatgtgtacacacatakaaacactaattcatacacatgctagagatgagtgtagtttttatcttgtattggttattggtagaaaaatcatgggatctggaattttgaaaagctagactttatcattaactaatgcttactaacattgtgaccacaagtgaatcataaaacctctggccttcactttcctgatctggcaaataatcataataaaaccatggattgttttatgtagtaataataataataacagtaac

SEQ ID NO: 338927 - DNA, 559 bp, Homo sapiens
catctaacactggagctcccaaatttatcaaacaattactaatagaccccagaaatgagacagacagcaacacaataatactgggggacttcaatactccactgacagcactagacaggtcatcaagacagaaagccaacaaagaaacaatggatttaaactatgccttggaacaaattgacctaacagatacatacagaatattccattcaacagctcatggaactttctccaagatataccatatgataggccataaaacaagcttcaataaatttaagaaaaytgaaattatatcaagcactctctcagaccacagtggaataaaactggaaatcaactctataaggaggatccagacccatgcaaatacataggcatcaagtaacctgctcctgaatgagcgttgggtcaaaaaagaaatcaagatagaaattagaaaattctttgaactgaatgacaataatgacacaacctgtcaaaacctctgggatccagcaaaagcagtgctaagagtaaagttcatagccctaaacacctacatcaaaaagactgaaag

SEQ ID NO: 338928 - DNA, 559 bp, Homo sapiens
catctaacactggagctcccaaatttatcaaacaattactaatagaccccagaaatgagacagacagcaacacaataatactgggggacttcaatactccactgacagcactagacaggtcatcaagacagaaagccaacaaagaaacaatggatttaaactatgccttggaacaaattgacctaacagatacatacagaatattccattcaacagctcatggaactttctccaagatataccatatgataggccataaaacaagcttcaataaatttaagaaaattgaaattatatcaagcactctctcagaccacagtggaataaaactggaaatcaactctataaggaggmtccagacccatgcaaatacataggcatcaagtaacctgctcctgaatgagcgttgggtcaaaaaagaaatcaagatagaaattagaaaattctttgaactgaatgacaataatgacacaacctgtcaaaacctctgggatccagcaaaagcagtgctaagagtaaagttcatagccctaaacacctacatcaaaaagactgaaag

SEQ ID NO: 338929 - DNA, 522 bp, Homo sapiens
ctgagatgtactggaatatccagcacttgttccagatgagtttgttgactccttggaccattaggtctgaaagaatagaagcctgaatttactcttgagtaaaactaatgatatgctgttgctagagagagaaagagaaagagagagagaccatttagatatcaaacaaagaaaagaaggtccattattgaaaaaaagagtgggggaataaggaggggaaccaggtgcatagagggaagtattgcgcaaaacctggattataagaaatattagcacttctcttattttcakttcagcatccttagtccagacaaatctttccagacattctatttcagcatagtatatcatcatccagtttttatcactacccaactaaggaagaaaaaaagaaaacatggataaagaggtaatgcatacatggaagttctctctctctctctctctctctcactttatcaatcttcaataatttaggacaagaaaactttcatgagatttccccatttattcacagctact

SEQ ID NO: 338930 - DNA, 524 bp, Homo sapiens
acactttgtgacctttggccaaatatttacacacattaaacctcaaattttacaactttaaaatggagagacagatgcaggcaaactctgcctccattattattttattagaaggataaaatgagataaagtgtatgaargcattttgtaaatctctgagcactgtgcaaatgtaagacattatttttgtactgatacctattatgagaaaaataaaagattaattcaagacatattgcatggttatgaaaaactctgtactttaagatattcagttaattttaagggtcctcattgctatagacatgaacatttaatcggtcactggaagaagaaaaaaaacatccaaaagaaactgcctaagaaaaaccgatacaacaaagtcatgccatgtatgcttcacaatcttcttttaacattctttcacccttactggctgcatgctttgcatacttggagttttaggccattgaaaatatgtatatttgttgaatggaaatgatgcaagagaaatagatgccatt

SEQ ID NO: 338931 - DNA, 525 bp, Homo sapiens
acatgtaaaaacatcacactgcaccccataatatgtacaattgttatttttcagttaaaaaaataaaatttcaattaagacgtgctttttgactgggcgcagtggctcacgcctgtaatcccggcactttgggaggccaaagcgggtggatcacaaggtcaagagatcaagaccaccctggccaacatagggaaaccccatctctactaaaaacacaaaaataagctggacatggtggcacatgtctgtagtcccagctactcaggaggctgaggcaggagaatcacttgaacccaggaggaggaggttgcagtgagctgagattgtgccactgcactcyatcctggtgacagagtgagactccatctcaaaaaaaaaaaaaaaagtgcttctttttttcttttctaaaccccttggttttatatgattccccactcagtatggagttatattaattcaaacagcccaatatctgaagcacttaaatattcattaaaatcattatttatgttcctcattgaacat

SEQ ID NO: 338932 - DNA, 565 bp, Homo sapiens
tgagtatttctgacagaataaggaaagcctcctaatctaaatgtgaaaacaaaaaaaaaaaaaatggaagtaatctytttaaaccagcaagtgacacaactttggcctgattcactgtgtataaattagactctcttcttatataagaatcttagtttcttaaggttatctctagctccttaggacagtacagaagttgatttttctaccttatggattaatttatatttttatactgtttgttaccatgaaacttcattagagtcttagagatctaggtagaacagagtgctggttttggagccagactatctgggtttaaatcctaactttacttactggccgtgtgaccttgggcaagttacttaacctctgtgtacattagatttgtcatctgaaaatagaaacaataatagtatgtaccccatatagtaattatgatgactaattaaaataatatgcacaaagtttttggagcagaagcattcaggaagtgttggctatttaattattaatattaaccaagtcttctgaaagttttacagcattgcaaatgttaaccctt

SEQ ID NO: 338933 - DNA, 565 bp, Homo sapiens
tgagtatttctgacagaataaggaaagcctcctaatctaaatgtgaaaacaaaaaaaaaaaaaatggaagtaatctttttaaaccagcaagtgacacaactttggcctgattcactgtgtataaattagactctcttcttatataagaatcttagtttcttaaggttatctctarctccttaggacagtacagaagttgatttttctaccttatggattaatttatatttttatactgtttgttaccatgaaacttcattagagtcttagagatctaggtagaacagagtgctggttttggagccagactatctgggtttaaatcctaactttacttactggccgtgtgaccttgggcaagttacttaacctctgtgtacattagatttgtcatctgaaaatagaaacaataatagtatgtaccccatatagtaattatgatgactaattaaaataatatgcacaaagtttttggagcagaagcattcaggaagtgttggctatttaattattaatattaaccaagtcttctgaaagttttacagcattgcaaatgttaaccctt

SEQ ID NO: 338934 - DNA, 565 bp, Homo sapiens
tgagtatttctgacagaataaggaaagcctcctaatctaaatgtgaaaacaaaaaaaaaaaaaatggaagtaatctttttaaaccagcaagtgacacaactttggcctgattcactgtgtataaattagactctcttcttatataagaatcttagtttcttaaggttatctctagctccttaggacagtacagaagttgatttttctaccttatggattaatttatatttttatactgtttgttaccatgaaacttcattagagtcttagagatctaggtagaacagagtgctggttttggagccagactatctgggtttaaatcctaactttacttactggccgtgtgaccttgggcaagttacttaacctctgtgtacattaratttgtcatctgaaaatagaaacaataatagtatgtaccccatatagtaattatgatgactaattaaaataatatgcacaaagtttttggagcagaagcattcaggaagtgttggctatttaattattaatattaaccaagtcttctgaaagttttacagcattgcaaatgttaaccctt

SEQ ID NO: 338935 - DNA, 565 bp, Homo sapiens
tgagtatttctgacagaataaggaaagcctcctaatctaaatgtgaaaacaaaaaaaaaaaaaatggaagtaatctttttaaaccagcaagtgacacaactttggcctgattcactgtgtataaattagactctcttcttatataagaatcttagtttcttaaggttatctctagctccttaggacagtacagaagttgatttttctaccttatggattaatttatatttttatactgtttgttaccatgaaacttcattagagtcttagagatctaggtagaacagagtgctggttttggagccagactatctgggtttaaatcctaactttacttactggccgtgtgaccttgggcaagttacttaacctctgtgtacattagatttgtcatctgaaaatagaaacaataatagtatgtaccccatayagtaattatgatgactaattaaaataatatgcacaaagtttttggagcagaagcattcaggaagtgttggctatttaattattaatattaaccaagtcttctgaaagttttacagcattgcaaatgttaaccctt

SEQ ID NO: 338936 - DNA, 581 bp, Homo sapiens
ggcgatgatacaggaaactggggtaatacggtccaggcagctcctatggaaataatcctgagctatgccatgtgaccatgcctttctggacactcctgattaggccagggagcgagcacacgacttgagggcagtgcaaaagctctacccagagatgacagccactttctattccaatcagattttctctttcagaaatgtgtacatttttagacctgacattggcttgggaaagagactcactcctgctccataatctttatcactccccacctcaattccttaacgtaggcaattttattaataatgaaaacatcattttaaggcccttttcaaacctcatgcctgcccttgagtctcagccatacagaaatccyaaagatgccactaaaaggagacttgagcagttcttaccagaagctggaaacatacaaagggaggccagggtgctcaggtggcaacattcagaaagatggccccgtggtaatgtggctggtagcaccagtacagagtgtgtttctgaattatgttaaacgcaaaagatgaacaatatctaagttcctaggggctaaaagttaacc

SEQ ID NO: 338937 - DNA, 581 bp, Homo sapiens
ggcgatgatacaggaaactggggtaatacggtccaggcagctcctatggaaataatcctgagctatgccatgtgaccatgcctttctggacactcctgattaggccagggagcgagcacacgacttgagggcagtgcaaaagctctacccagagatgacagccactttctattccaatcagattttctctttcagaaatgtgtacatttttagacctgacattggcttgggaaagagactcactcctgctccataatctttatcactccccacctcaattccttaacgtaggcaattttattaataatgaaaacatcattttaaggcccttttcaaacctcatgcctgcccttgagtctcagccatacagaaatcccaaagatgccactaaaaggagacttgagcagttcttaccagaagctggaaacatacaaagggaggccagggtgctcaggtggcaacattcagaaagatggccccktggtaatgtggctggtagcaccagtacagagtgtgtttctgaattatgttaaacgcaaaagatgaacaatatctaagttcctaggggctaaaagttaacc

SEQ ID NO: 338938 - DNA, 629 bp, Homo sapiens
aaatttaacatggtttttctttgttcattcggaacctgtgctacccactcagctacctacttaaacaggctctggaaatattactcacctgcatccccacagaatcctcacatttttgtctgggaatgaatggcaaagaaaacacattatttttgtaatttgtgggygaacccggctcttctagttgtagaaaattttgtaatttaaatcaaattaaatttaatatgtgttagtttttaaatttaaggagtatgctccttccggtggttaaaaaatattgtaacttaattaaatgcattcacattcccatcctaggtctgaacaaaatttctaattctggaactatctttatacatgtatgcatatattattaatatcaatagtgatacctttactcttgtttttttttccagcttatgatttgccaaaatctctagctgtcatacctacttctattgtttagctgtatctctttcagttttctttcccctatcttttataaataaaacatgatccttaagaatgaaatattattaatgctgtgttattagactgaaggcagctcaatatttcatacacatgtcttataatgaatgaaatacagccacacagagatgtccacaaagcaa

SEQ ID NO: 338939 - DNA, 629 bp, Homo sapiens
aaatttaacatggtttttctttgttcattcggaacctgtgctacccactcagctacctacttaaacaggctctggaaatattactcacctgcatccccacagaatcctcacatttttgtctgggaatgaatggcaaagaaaacacattatttttgtaatttgtgggcgaacccggctcttcyagttgtagaaaattttgtaatttaaatcaaattaaatttaatatgtgttagtttttaaatttaaggagtatgctccttccggtggttaaaaaatattgtaacttaattaaatgcattcacattcccatcctaggtctgaacaaaatttctaattctggaactatctttatacatgtatgcatatattattaatatcaatagtgatacctttactcttgtttttttttccagcttatgatttgccaaaatctctagctgtcatacctacttctattgtttagctgtatctctttcagttttctttcccctatcttttataaataaaacatgatccttaagaatgaaatattattaatgctgtgttattagactgaaggcagctcaatatttcatacacatgtcttataatgaatgaaatacagccacacagagatgtccacaaagcaa

SEQ ID NO: 338940 - DNA, 629 bp, Homo sapiens
aaatttaacatggtttttctttgttcattcggaacctgtgctacccactcagctacctacttaaacaggctctggaaatattactcacctgcatccccacagaatcctcacatttttgtctgggaatgaatggcaaagaaaacacattatttttgtaatttgtgggcgaacccggctcttctagttgtagaaaattttgtaatttaaatcaaattaaatttaatatgtrttagtttttaaatttaaggagtatgctccttccggtggttaaaaaatattgtaacttaattaaatgcattcacattcccatcctaggtctgaacaaaatttctaattctggaactatctttatacatgtatgcatatattattaatatcaatagtgatacctttactcttgtttttttttccagcttatgatttgccaaaatctctagctgtcatacctacttctattgtttagctgtatctctttcagttttctttcccctatcttttataaataaaacatgatccttaagaatgaaatattattaatgctgtgttattagactgaaggcagctcaatatttcatacacatgtcttataatgaatgaaatacagccacacagagatgtccacaaagcaa

SEQ ID NO: 338941 - DNA, 629 bp, Homo sapiens
aaatttaacatggtttttctttgttcattcggaacctgtgctacccactcagctacctacttaaacaggctctggaaatattactcacctgcatccccacagaatcctcacatttttgtctgggaatgaatggcaaagaaaacacattatttttgtaatttgtgggcgaacccggctcttctagttgtagaaaattttgtaatttaaatcaaattaaatttaatatgtgttagtttttaaatttaaggagtatgctccttccggtggttaaaaaatattgtaacttaattaaatgcattcacattcccatcctaggtctgaacaaaatttctaattctggaactatctttatayatgtatgcatatattattaatatcaatagtgatacctttactcttgtttttttttccagcttatgatttgccaaaatctctagctgtcatacctacttctattgtttagctgtatctctttcagttttctttcccctatcttttataaataaaacatgatccttaagaatgaaatattattaatgctgtgttattagactgaaggcagctcaatatttcatacacatgtcttataatgaatgaaatacagccacacagagatgtccacaaagcaa

SEQ ID NO: 338942 - DNA, 597 bp, Homo sapiens
catatctctcacttttgataagtactttagagtttcccaatcactttcatatccactatcttgtttgagcgtcacaactacctcatcatgcatagattgtgggaatcctcttgttttttgataagcaaagagaggttgttgcatgagttcaccacagctaatatgagccagatttcaatgtaggtctcctgacttctaaaattgtggatttttaaaatggcaacttattctttctctatgtgtaacaatagaagctattattctttaataacttagagtagagggcactctcaggatcaygtgttgattgctactatgactgttgctatcactatatagttcaaaataaaacttctcatgatttaaggcttctgataatttggagtctaagcatggtgataaacactatctcaggattgttttctaataaaagtaattgttaacaaagctcactttgaaagtggcaagtttcggactcattcatagtcatatcagtaaaatcattacttttatcatatagttcctgccttacccactctaacacatatccacattttgtttatatgtaacatataacaagaaaagatattcatctct

SEQ ID NO: 338943 - DNA, 530 bp, Homo sapiens
acctttgttgttggtttattgacaataattagagggaaaataagtcttattaagttataatttacatgcaatcaaattcatgctttgtaagtgacaaatgatttttagtacatttatagaattgtgcacccatctagttttagaacctcctaccatccccaaaatatccttcaaacacatttgtaaccattccttgttcctcagccccaggaaaccactgatttgcttaccacttttatagacttgctgttactggaaatttcagataagtgaaattatgcaatctgtagtctttatagtatgactccctctacttagcataacgtttttgaraatcatccatgttatagcatttataagtgtttctttcattttaattcatgaacttattgtgtggtatcaatatatacattttgttgatacattcactactttatgggcattgaattgttttcagtttttagctactatgaataatgatgttgtgaacattcacatacaaccatgtggaagtaagttttcatttctct

SEQ ID NO: 338944 - DNA, 530 bp, Homo sapiens
acctttgttgttggtttattgacaataattagagggaaaataagtcttattaagttataatttacatgcaatcaaattcatgctttgtaagtgacaaatgatttttagtacatttatagaattgtgcacccatctagttttagaacctcctaccatccccaaaatatccttcaaacacatttgtaaccattccttgttcctcagccccaggaaaccactgatttgcttaccacttttatagacttgctgttactggaaatttcagataagtgaaattatgcaatctgtagtctttatagtatgactccctctacttagcataacgtttttgaaaatcatccatgttatagcatttataagtgtttctttcattttaattcatgaacktattgtgtggtatcaatatatacattttgttgatacattcactactttatgggcattgaattgttttcagtttttagctactatgaataatgatgttgtgaacattcacatacaaccatgtggaagtaagttttcatttctct

SEQ ID NO: 338945 - DNA, 578 bp, Homo sapiens
aaaaacatagacaatataaagaaaaagacccaaatcaaatgtctagagaagaaaactacaaaatgggagataaaaaatatacagtgggatagcattatggcagattaaacattgtagaagaaaagattgatgatctgaaagatatagcaatattaaccaaaataaaacacagacaaaaataataattaaaaaaaataatctgagcatcagtgagttgtgggataacytcaaacaaaatccttgaatgtgaggaaaacagagagatcaaaagtatttgaagaaaaatggccagaatttttcgaaatttgttgaaaaccatgaactgacatatccaagaagttcaatcaacttgaaacacaagaaacaaagactacatcaaggcacatcacaatcaagttgttcaaagccagagataaagagaaaaatcttaaaagcaaccagagaataaagacacacacacacacacacacacacacacacacacacacacgatatagagtaacaaatataagtttgacatcaatatgtcatcagaagcaatggaagcaagaagacagtaacacaacattttaaaaata

SEQ ID NO: 338946 - DNA, 577 bp, Homo sapiens
aaccatttgttgacccaagaatcaccccatatttggaactgtcatttatgcaaaagttatgaaagttgagctctagtaggaaatttaattcaaatatctgtaaaagtatttacatagaaaagactattgtttcctacatataggagcttataacagaacatttttaaactcaaaagtgtctctccaggtattaagcacaatgctaggcactaagaatttaaagatgcataaggcccaaccttcatttaaagaacactgcagttaaacagacaaataattgsatcacttaaaaataatatacaggtgcagtaccaacaatgtttccaaagagtaccgggtaagagcagccaatcgcaggagtatgggggtggggggattgggaaaataggccaaagaaagctaactggagttgttgggtgtaaatcaggccatgaggcaggaaagggtattccgggcagagggagagaatcgtcattgtgatccaaataacaaagtcagtcatattttcagcactgctgcagctcctgatgggtcactaggttttgggactagactcaagctctgaactttaagatac

SEQ ID NO: 338947 - DNA, 577 bp, Homo sapiens
aaccatttgttgacccaagaatcaccccatatttggaactgtcatttatgcaaaagttatgaaagttgagctctagtaggaaatttaattcaaatatctgtaaaagtatttacatagaaaagactattgtttcctacatataggagcttataacagaacatttttaaactcaaaagtgtctctccaggtattaagcacaatgctaggcactaagaatttaaagatgcataaggcccaaccttcatttaaagaacactgcagttaaacagacaaataattggatcacttaaaaataatatacaggtgcagtaccaacaatgtttccaaagagtaccgggtaagagcagccaatcgcaggagtatgggggtggggggattgggaaaataggccaaagaaagctaactggagttgttgggtgtaaatcaggccatgaggcaggaaagggtattccrggcagagggagagaatcgtcattgtgatccaaataacaaagtcagtcatattttcagcactgctgcagctcctgatgggtcactaggttttgggactagactcaagctctgaactttaagatac

SEQ ID NO: 338948 - DNA, 596 bp, Homo sapiens
tctgagcaatcaaaggtcctcatgacgaatcaagaattttcagaaattctacttttagcacaactgtatttctggtagataattatatttgcatctttctttttcctttgtaagtaaaatttccttatcagtgaaatgctctgttaagaattagacactttcccaagctataaagatttagagagatgcagtaggtgggacatttgtccaatcttcctagtccttgagcaacatttctgaaggatccccgctactaaacaggaaagtgggcccacaggcaagccacttagaaaatgtatatcytggatggtagcagctcttctccttttagtatttccacaggggacttcattacctgaatggaatactttttcctgccatagtaaggggcacttagtcctttggcaaattttagccatttgctctttcctccagtaagtaaataggataaactgcctcctctgaggtgttctttgctggtcagtgccatccaagtgtctcctgggaaaaaaatagtctggagatattaatactcttgactaccattgtcatttcatttccaagcatatatcacaaattgaggactattgttacat

SEQ ID NO: 338949 - DNA, 532 bp, Homo sapiens
gtggaatatatgccagccccgatgwgggaatatatctgtgtctggttttatagatgctgaatatcttttatctaatcaatatactgaccattgagccccagtgaaaccacattagccacatctacagtgctacaaagtgattactgatgttcaacactttgacctagatacactacttgaatcatagatatatgaaaaatataaacttaattaagttcacaaaagcttaattacatcaaattttctatagttaccaggaatataatcaatattagaaaatttttcaatgcaaggaataaaacaagaggcatcaatctaatattagtttaaccaaaaactcaattaatcataacacccattgcactcaaacattttattgtcagtaatcagttataacaccactccaaacaaagtatgtaggttttcgtatacatataaatatacatatcaccactgtttcgatcccaaatgtggttaacagacttccacaatcgctgttctggaaattctttttttttttctttttttggct

SEQ ID NO: 338950 - DNA, 532 bp, Homo sapiens
gtggaatatatgccagccccgatgtgggaatatatctgtgtctggttttmtagatgctgaatatcttttatctaatcaatatactgaccattgagccccagtgaaaccacattagccacatctacagtgctacaaagtgattactgatgttcaacactttgacctagatacactacttgaatcatagatatatgaaaaatataaacttaattaagttcacaaaagcttaattacatcaaattttctatagttaccaggaatataatcaatattagaaaatttttcaatgcaaggaataaaacaagaggcatcaatctaatattagtttaaccaaaaactcaattaatcataacacccattgcactcaaacattttattgtcagtaatcagttataacaccactccaaacaaagtatgtaggttttcgtatacatataaatatacatatcaccactgtttcgatcccaaatgtggttaacagacttccacaatcgctgttctggaaattctttttttttttctttttttggct

SEQ ID NO: 338951 - DNA, 313 bp, Homo sapiens
gctgtgtgtgcatgtgggcactcatactgtgtaaaaagaagggagtgaggaggtacaaaagggctttaactgaatatgtaatgttttatttttttaaacagaaacaagttcagcaaatatggcaaagtaatatgttaagaatgtacaacaccaagagtgaaccctaaggtaagcttcrggctctaggtgataacgatgcatcattctaagttcgtggatgtttaaatatgtaccactttggtgccaaatgttaatagtaagggaggcatatgcaggggcagaaggtatacgtggactctcaactttctgttca

SEQ ID NO: 338952 - DNA, 499 bp, Homo sapiens
cctgcacaggggcccttgtttcttcttacccaatgtccagagcacagtgtcaggtgtccagctcccctgggaccactagtcccttcactagtgacatatttcatcaccagtttagagagttcggcatgcttacaggcagttattattctaggtgttaggtttctgggtttacagagcagctccaagctggcagatacggaccgattgcccttgctatcaaagagaagagggctaggtgctccatgatttagcctgaggctcttcamacatccatcctgcttccacacatggcttctgccattggctctctcctctagcaccctgcaatgacagaaaaaagcaatccgattccagaaaatttggaggcaaatggagacacctggtgctctgcccagaaccctgacatgggaacccatggagtagatccagtatttacacaaggaatttgcagagtcctggtcagttcccaggttggctgaaggttttgatgtcagcactg

SEQ ID NO: 338953 - DNA, 522 bp, Homo sapiens
cttctcaaacttggctgcataaatttttaaaatctcaatatccaggtcataccccataacaattcagaatctctggggttgggatctgggtctcagaactttcttaaagcaccctacttaattataatcgctagccagagttatgaccactgctctagtgtgacaggcaagcagaataattttctcagcccatctctgaagaaaaccaaactcccaggctgataaccaatcagctgctttcaggccatggaccggaagaggactgacatagccaggaggttcaacrttatgttgaaagcatcaggatccagcagagaaggctgtggagatggcaggaggtctaacccagaagaattaaagcaagagtagaagcagagtagaagcaagtctggcctggggcctttctggaaaccggcaaccaaaccacactttggatcagaaccaggagagtgattcaaagtaggagattgcaccagagattaaaacaaggcaatcagtggagacgttactgtaaaataataa

SEQ ID NO: 338954 - DNA, 574 bp, Homo sapiens
caccaggtcccccccagaacacgtgggaattatggaagctacaagatgagatttgggtggggacacagagctaaaccatatcagggggatatattatgcatttctagaactatctgtatgtagaactagcaccaggcagatttgatttgactaagtaaaatctttcaaatgygaaggtatctgggaacacaaggaaggcaataaagtcatcatccagtcaggtgtgtagagagggaaatacatagaaaagataactttggaagagtaactatttgtaggaggtggagaaagaaagatgacccagaaagaacacattaagaaaagtgaactcagagacagaaggaaaataatgaaaaaataatttattctttgaaagtcagtagaaaataaggcatttaagaagaaatgttggagagcatcttcgaacatttgaatggataacgaggatagagaacaggctactagttttgctgtgacttgttatttggatcactagtgaccttttcaagagcagtctcagtagaatgctgaaaaaaagcattaagggggaattggcaagtgattttgaatatgt

SEQ ID NO: 338955 - DNA, 574 bp, Homo sapiens
caccaggtcccccccagaacacgtgggaattatggaagctacaagatgagatttgggtggggacacagagctaaaccatatcagggggatatattatgcatttctagaactatctgtatgtagaactagcaccaggcagatttgatttgactaagtaaaatctttcaaatgcgaaggtatctgggaacacaaggaaggcaataaagtcatcatccagtcaggtgtgtagagagggaaatacatagaaaagataactttggaagagtaactatttgtaggaggtggagaaagaaagatgacccagaaagaacacattaagaaaagtgaactcagagacagaaggaaaataatgaaaaaataatttattctttgaaagtcagtagaaaataaggcatttaagaagaaatgttggasagcatcttcgaacatttgaatggataacgaggatagagaacaggctactagttttgctgtgacttgttatttggatcactagtgaccttttcaagagcagtctcagtagaatgctgaaaaaaagcattaagggggaattggcaagtgattttgaatatgt

SEQ ID NO: 338956 - DNA, 410 bp, Homo sapiens
attctcccaaatgaccagtgggtcaatgaagacattgagaaggaaattgaaaaattccttgaaacaaatgataatggaaatacaatataccaacacctgtgggatacagcaaaagcagtattaagagaaaagtttatagctataaattcctacatcaaaacagtagaaaaacttaaaattaacaatctaacaatacatcttaaagaatcagaaaagcaagagaaagccaaacccaaaactagtagaagaaaagaaataatagaaatcagagcagaaataaatgaaattgaaacaaaagatataaaagatcaacaaagtgaaaagttgattttttaaaacataagcaaamccacaaaactttagcaagattcagaaaaagagagagaatacccaaataaataaattcagag

SEQ ID NO: 338957 - DNA, 511 bp, Homo sapiens
tctagaacattctcaagtggaaatgatcactatctccccttaagtcccagatgtttctgttgtcacacattatacctttcatatcctactttgtatctagttattgtgcaccttatctcttccactactgacatgctgcttgaggtccagaaccacattgtttttccattctccattgtgcctatcagagcaccaggaaaaagtaggcactgaagtgtctttaaacatgaatgacaaaacagtatcactacrttttcctcatgatcctgttttaagctcccatcagccaagcattgagagtcctttagaagttgttactatcccccatattttaatgtgaattatcaaatgctattttggaaaaaaacaatatcttaacaggatgaggagtagacatatatatatcctctgtataaacataccatatatatatttatatatagtatgtatttatatataatatatatttgaatttatatatatccttaagaatatatatgtacttaaatat

SEQ ID NO: 338958 - DNA, 468 bp, Homo sapiens
cgggactgggccagaagatggcagaccaagcctgggatctccatatggacaaccccctcgctttccagtccctcacaatggcagcagcgaggccaccctgccagcccagatgagcaccctgcatgtgtctccaccccccaggtagcacagagatgccttcggtgccatgcccagaacccatcttaacccttgatccctcaaatctcacccagtcccactctgacccctgacacttgatccttgggtcttagctggttgcattctgactcataagccttaccagaccccaagtccacagggtgaaggctggaactgcatcccttcctcctctatttctttctccctcccagcgctgacccagccagaggcctcccgcggagccgggactgcagartcgacctgggctccgaggtgtacaggatgctgcgggagccggccgagcccgtggccgcggagcccaagcagtca

SEQ ID NO: 338959 - DNA, 468 bp, Homo sapiens
cgggactgggccagaagatggcagaccaagcctgggatctccatatggacaaccccctcgctttccagtccctcacaatggcagcagcgaggccaccctgccagcccagatgagcaccctgcatgtgtctccaccccccaggtagcacagagatgccttcggtgccatgcccagaacccatcttaacccttgatccctcaaatctcacccagtcccactctgacccctgacacttgatccttgggtcttagctggttgcattctgactcataagccttaccagaccccaagtccacagggtgaaggctggaactgcatcccttcctcctctatttctttctccctcccagcgctgacccagccagaggcctcccgcggagccgggactgcagaatcgacctgggctccgaggtgtacaggatgctgcgggagccrgccgagcccgtggccgcggagcccaagcagtca

SEQ ID NO: 338960 - DNA, 550 bp, Homo sapiens
tgcatgttgccaaccaccctaggattctccccgcagatgcgccttcctaattcatccattggtttctcagatcctgctcatgacagcaattgtaatgagaaaaacctggaattgtatttaaaaaaaaccttaccccaaactgggagggagcaaagagaccaagcatgtctgggacaagttcagcttggctagtagatgagtttattaggacttatgcatgaggcactcctgaatggcagcrggacagctttagagatccgtgccacctcccatctctaagctaattttctgtctctttacctactatgtgtgtgtgatgggactgtttcccttggtaggttctcagctattctccaggatgtttgggttcccagggacacctattcctcagctatacaccatggccttggctcattgcctggccttcagggttcaggcagtggacatgtacccttaaacaacctggcaggggatctgtcacactacataggtagttcttaacttgtggccctatttttgtcctaaggcagcaccgggtctagccaagacg

SEQ ID NO: 338961 - DNA, 550 bp, Homo sapiens
tgcatgttgccaaccaccctaggattctccccgcagatgcgccttcctaattcatccattggtttctcagatcctgctcatgacagcaattgtaatgagaaaaacctggaattgtatttaaaaaaaaccttaccccaaactgggagggagcaaagagaccaagcatgtctgggacaagttcagcttggctagtagatgagtttattaggacttatgcatgaggcactcctgaatggcagcgggacagctttagagatcygtgccacctcccatctctaagctaattttctgtctctttacctactatgtgtgtgtgatgggactgtttcccttggtaggttctcagctattctccaggatgtttgggttcccagggacacctattcctcagctatacaccatggccttggctcattgcctggccttcagggttcaggcagtggacatgtacccttaaacaacctggcaggggatctgtcacactacataggtagttcttaacttgtggccctatttttgtcctaaggcagcaccgggtctagccaagacg

SEQ ID NO: 338962 - DNA, 330 bp, Homo sapiens
gggaggagagtagatgatattgtcacagccggcgggggagggcagccctttcctgtaggaagcctggggtatgctctccctgccttacccgctcacacacgggaggcttggaggctccacaatcaccctgtgccactaaaaaggcagatctcagtgctgcccattctatakaaccggggatgccaccacctggcacaagtcccaccttgttcccattcccacagagagagcttctctggcttcaccgcgactctctacccttctgttccagatggtccttcaggtcctcctgggatatgggcctgctggtcagagacctccgttttgggg

SEQ ID NO: 338963 - DNA, 330 bp, Homo sapiens
gggaggagagtagatgatattgtcacagccggcgggggagggcagccctttcctgtaggaagcctggggtatgctctccctgccttacccgctcacacacgggaggcttggaggctccacaatcaccctgtgccactaaaaaggcagatctcagtgctgcccattctatataaccggggatgccaccacctggcacaagtcccaccttgttcccattcccacrgagagagcttctctggcttcaccgcgactctctacccttctgttccagatggtccttcaggtcctcctgggatatgggcctgctggtcagagacctccgttttgggg

SEQ ID NO: 338964 - DNA, 330 bp, Homo sapiens
gggaggagagtagatgatattgtcacagccggcgggggagggcagccctttcctgtaggaagcctggggtatgctctccctgccttacccgctcacacacgggaggcttggaggctccacaatcaccctgtgccactaaaaaggcagatctcagtgctgcccattctatataaccggggatgccaccacctggcacaagtcccaccttgttcccattcccacagagagagcttctctggcttcaccgygactctctacccttctgttccagatggtccttcaggtcctcctgggatatgggcctgctggtcagagacctccgttttgggg

SEQ ID NO: 338965 - DNA, 602 bp, Homo sapiens
accatccctattgacactattcctttcaaatcctgtatcatgtttttgatttatttaagtaggacttcacttttctctggtacctccttgattaatttaataatcgaccttctgaattctttttctggcaattcagagattttgtcttggtttggatccattgctggtgagctggtatgatcttttgggggtgttaaagaaccttgttttgtcatattactggaattgtttttctggttctttctcatttaggtagactatgtcagagggcaggtctggaattcaagggctgttgtttagattattttgtcccatggggtgttcccttgatgtggtgttctcccccttcccctaggaatggggcttcctgagagctgaactgtagwgattgtttttgctcttctgggtctagccacctagctgagctactgggctacaggctggtactggggagtgtctgcagagtcctgtgatatgatccatcttcaggtattgcagccatggataccagcacctgctcctgtggaggtagcaggggagtgaaatggactctgtgagggtacttggttttgtgttggttggcctccatgcaggaggtggtg

SEQ ID NO: 338966 - DNA, 596 bp, Homo sapiens
tttttctgcccttttctctctctctcctctcctagtaattctattatgcatatattgctatgtttaatggtgttccccatttctctgagactctatacattttctttattccctttttcctctctgttctttggattgcataatttccaatcctctatcttcaagtttgctgattctttcttttgcctgttcaaatcttctgttaaggcccttgagttacttttaaatttcaattattgtatatttttactccagaagttctattcagttgttttgtttgtttaagagacaaggtctctttctgttgcccaggctggggttgaactcctgggcttaagcaatcctcctacctcagcctcctgagtaactgggactataggcacatgccatcatgtctggctcagcttttaaaaatataaatgtaatttttctctctttattgctattctctatttgatgcaatattgtcatcacacttttaaaagcatgacttcctttcattctttgaacatatttataatggctgccttatgccttaaagtctgttaaaatctgacatgtggaccctctcargcagttactgttgcccacgtttt

SEQ ID NO: 338967 - DNA, 585 bp, Homo sapiens
ccactctgtgatgctgaggataatgtcctcgagaatagtcctgtcctagagacaatagcaagattcatgaggccgcctgtcacagtgctcaaatgctggccacaggcaaygcccaacacagctctgcagaagaaaaacaactcgggccaggaagttagcgctctgctgctcaggcacaatccaaggataaatctcagactgtacccagagcaggattgcctcgcctggggctcttgcatgggcttcaggagaaagggaaatgaatcctctaaaactgtatggccagattaatgtgttctgccagtccatagaccggaagtggtaaacaggacgtgtgcctgcattcatggccatctccctccaaaaataattgtccaaagcttcagataaaagcttgggttctgcttctgacttagagagatgagcaattgaggcccaaagcctcatgatgtggtgtgacccattttgcagaagattaaactgagactgtgagaatgggatttgtctgaagtcatagcaagtaaatgagcatgatagatacctacttgggcctcagaacccaatcttgtaccagtgtcctgcttt

SEQ ID NO: 338968 - DNA, 509 bp, Homo sapiens
ctcctctttcttccttcccttcttcccttccaccaagagtggaagcttcctgaaaccctcaccagaagcagaagcagacactggtgccatacttcctgtacagcatgcagaaacatgagtcaaataaaactttcttctttataaattacccagcctcaggtattcctttatagcaatacaactgtctaatctgattagrttgtaagatgttaattgctatattccagtaataaagagaggaataatagtttttggtgtgaactgtttacagagataggcaaaatacatgccttgaatactcctagtcaactacttatgaaaaacaaggagctaattaactctgtatatgatactttcaaatatttttgaggaactaaggaatacaatgacattggttggttgtccctaactttgggagacaaaaggggtgaaagaaaaatataagtccagggattcaaattcttagctcaagcactccataaggagtctaagagcttgtaggtctgccc

SEQ ID NO: 338969 - DNA, 572 bp, Homo sapiens
ttatcattcagttcaaataattttttaatttccatcttgatttcagtgttgacacaaagatcattyaagagagattaatttctaagtattatatagttttgagggttccttttgtagttaatttcctgtttaattccactgtgttctgagaggatacttgatataatttcagttttcttaaatgtattgaggcgtgttttgtgacctatcatatggtctatcttggaaaattttccctgtgctgatgaaaaaaaaatgtatattctgcagttgttgggtagaatgttctgtaaatatctgttaaatccatttgttctagagtttagtttaagtcaatcgtttctttgttgactttctgtcttgatgacttgactagtgctgtcagtggaatattgaagtcccccactattgctgtgttgccatctatctcatttcttatgtctagtagtaattgttatatacatttgggatcttcagtgttagctgtgtatatatttaggattgctatattttcctgttggactaatgcttttatcattatataatgtccctctttgtcattgtgtttttac

SEQ ID NO: 338970 - DNA, 579 bp, Homo sapiens
aatctaaagttgtctaacatattgagagactcagggaagaygagagagaaatatagtgaaaaaaattgaaagaaataatgacattttcccaaacgtgaaaactataatttcacagtttcaaaagactccatgattaaaaggaagataaacagaaagaaaaccacacatgtacaacataatcaaactcttgaaaatcaaagataaagaacaaacatttaccggatccagagaaaacaacgtactgcatacaggaaatggaacaaacaactaaccatacaaagcctcaacacatttcaatgtttaatttacaaggagtatgttctttcaccaaattgtaactatgccagaaaatagaaaaaggaagattattcaaaattcttatacttttgaaaattaagaaattctcgtctaaataacaccagtcaatgaaaaagccactgaaaattcagtaatatcttttaaaaagtataatgaaaaaactatatctaaatacatggcacatgaatgatgatgctgactccatatttagagatagatttgaagaattacatgcatttaatagataagaaaaaaggctga

SEQ ID NO: 338971 - DNA, 579 bp, Homo sapiens
aatctaaagttgtctaacatattgagagactcagggaagatgagagagaaatatagtgaaaaaaattgaaagaaataatgacattttcccaaacgtgaaaactataatttcacagtttcaaaagactccatgattaaaaggaagataaacagaaagaaaaccacacatgtacaacataatcaaactcttgaaaatcaaagataaagaacaaacatttaccggatccagagaaaacaacgtactgcatacaggaaatggaacaaacaactraccatacaaagcctcaacacatttcaatgtttaatttacaaggagtatgttctttcaccaaattgtaactatgccagaaaatagaaaaaggaagattattcaaaattcttatacttttgaaaattaagaaattctcgtctaaataacaccagtcaatgaaaaagccactgaaaattcagtaatatcttttaaaaagtataatgaaaaaactatatctaaatacatggcacatgaatgatgatgctgactccatatttagagatagatttgaagaattacatgcatttaatagataagaaaaaaggctga

SEQ ID NO: 338972 - DNA, 531 bp, Homo sapiens
aaaactgtaaattttaagattatattccctaccaaacagaaacatacaagttagcatgtaattgtgtggattctgagctctttatagtacatataaagtgaactccaagtacattttcttgtataattaaataatccttatgtcagtctaccatttcawtgatcaatttttaatatttttctaaaaatctgcccattttgctcatataaatttgtcaaggattattctatagcacaagaagctgatcctgtttgccctgattattttcacagtgaaacaagaggtgtttattgtcatataagtctattatgggagactatgagtacagataattaacttctaactggaaatttcattcagtaatatagagttggattttcatgatgcctctattatttgctttttcatcctaaacgtaggaaaccaagcccaagaaactctattgttgaaatttcacacacacacaagattttcatgagttattttctctttgagatccttaagagattttgaaaattctgccctgcccaa

SEQ ID NO: 338973 - DNA, 385 bp, Homo sapiens
ggaattgagttttaataaataaaattgatctctagtcyttctcaaaattttttcttacaagtcatactaaatgtcttatatttctctcagaaaaatgactgaatgtctatattttaatctgcctaggctttttcttgtgagaatttaataggctatgtagggttcatggcccaaattctccaactacaaaaaaatacacaatatttattatctgttatctgtaccattatactaataaattcacatacaatatttttgtttacattttaataaaaaataaatcagatttctaaagaactgctctcgttgataacctatataaattaatgcttagaaaatttgggtcttaaacataaacttcagaaacatttttggagcttaatca

SEQ ID NO: 338974 - DNA, 555 bp, Homo sapiens
atgtatgattgattatattttcatttcattcatgtgtggatatatttctccccaagtatgtcataaactttttaagagattaaagtacatatctttttttaattacatctagcccagtattaaacatggaatatatatttaattaatacttagcaattgtttatggattttttcttttgaatgaagtaaaacaaacgtatcataatagttcaatgatggttttacttgtagcatcatccatacacaattctttgaaattttttattattagtattctatgttcatgaaaatatgaaaaataaartacaagaaatatgtaaaattatgttgacagctttacccttaaggcgtggattataattcagcccatgaatctaagatatcattattaaaacagagatcaatgttgttttatgtcctgatcaatagcagtgtagtaaaatacagtgctaataatattaacaacacttccacaataattaacatatatagacacaggcctaagcatgttatctggattatctcaagtattcgtcctaaaaagtcttacagata

SEQ ID NO: 338975 - DNA, 556 bp, Homo sapiens
ttcaatctctttcctggtgaaagtcaaattcctttcagtgtctatgagataacaggaagacagtatctggtgtgtcattgcttattgtcctcatctccttattttttcttcctagcatatttaattccaggcacttgaataarataaacaaaatccttgccctcatcggaattatagcaaaacaaatttagatagacaagtcacagaaacaaacaaatgctaagataatttcagataatgtatctgttatgaagaaaataagcctggtacatagggtaatctgaggcacttaatggaattgctatttgagctatggattgagaataaaccaggaataatgaagcacatggcagaaggtcagagatcactctatgtgaacagcctataaattggtagaaagcagagtgactattttttgttcatattttggtaatttatttgaaaaatcacatgaaatgaatttgaaaaccactcatttttaatgccttatcttgcaacttcaggctaatttgcagttaaactagtcagactcttatatcaatagtagaatatatta

SEQ ID NO: 338976 - DNA, 647 bp, Homo sapiens
ttacctgaactgacatgaggatagctaggtttcttattgatytcactcttgtgaataactcatatgttttgctaaaggaatactatgtgtttgattacagaggatttctccagaatctgctgggatgtgatatttggtacatgtttgcttttgtatctctaaaatttaaaaaaaatatattttacttattaatacatgtggccctcaaggctatacataaagaattgtggaggtgtatctgaacttattgagcaattattttgtgccaaactgaaaatacaataaggcaaaatttcaatatattagtagcaaaaaaaagaaatcaaataaaataattatgggttgtgttaactgccagagacagagaaggatagctttggagtacttgaaatagaaatgccagggaagacctcacagtaagaatgaactacgaatactatatcaataaggaatattttctctgttcactgtctttaaccataacaaaacttacactgaatgtaaaattaaaagaatgtgcatttatccttagttaggggtgacatatcagtttgtcttcatggtaagtgtaccttcaaaaggggtacacatgatggtcacatagagctcctatatttaccttacaaagtcataaatattcagcagtg

SEQ ID NO: 338977 - DNA, 647 bp, Homo sapiens
ttacctgaactgacatgaggatagctaggtttcttattgatctcactcttgtgaataactcatatgttttgctaaaggaatactatgtgtttgattacagaggatttctccagaatctgctgggatgtgatatttggtacatgtttgcttttgtatctctaaaatttaaaaaaaatatattttacttattaatacatgtggccctcaaggctatacataaagaattgtggaggtgtatctgaacttattgagcaattattttgtgccaaactgaaaatacaataaggcaaaatttcaatatattagtagcaaaaaaaagaaatcaaataaaataattatgggttgtgttaactgccagagacagagaaggatagctttggagtacttgaaatagaaatgccagggaagacctcacagtaagaatgaactaygaatactatatcaataaggaatattttctctgttcactgtctttaaccataacaaaacttacactgaatgtaaaattaaaagaatgtgcatttatccttagttaggggtgacatatcagtttgtcttcatggtaagtgtaccttcaaaaggggtacacatgatggtcacatagagctcctatatttaccttacaaagtcataaatattcagcagtg

SEQ ID NO: 338978 - DNA, 381 bp, Homo sapiens
cctgaaaaattataaacacgttagttacttccaagatataatgaagggataagcattgactaaatagtcttattccaaatgaaataaatcaactaaaagaaagaggctacagkccccttgcaagtccataatccagaagggcaattattaaatcttaataatccaaactaatctcctttgacttcatgtcctacatccagcacacactggtgggctccaaaggccttgggcagctcttctcctatggatttaaaggattcagcctctgtggctactctcacaggttagcaccgagtgcctgtggctttgccagatgcatagtgcaagctgtcaatggatccacaattctgggatctggaggatggtggacctcttctcaca

SEQ ID NO: 338979 - DNA, 608 bp, Homo sapiens
ctgtcaatggatccacaattctgggatctggaggatggtggacctcttctcacagcaccacaaggcagtgccccagtggggactcggtgtagagcttccaaccccacattttccctcttcactgctgtagtaaaagttctccctcagggctstgcccctgaagtaaacttctgcatagattttccatacatcctctgaaatataggtggaggctcttaagcctcaattcttgcactgtgtgcacctgcaggcttaacatcaggtggaagtcacaaaggcttacagtttgcaccctctggaggagcagcttgagctttacctgggcccctttaagccactgctgaagctggagtggctgagatgcagggagcagtgtcccaaagctatcctgggtctggaccatgaagccattcttttcttctagacctccaggtctgtgatttgagcagctaccttggtctctgacatgtctttgagaccttttctccattggcttggctatcagcacttgttttctttttagttatgcaaatttctgcagccaatttgaattgctcccgtgaaaataagattatattttcgatcatatagccaagctgcaaatttct

SEQ ID NO: 338980 - DNA, 608 bp, Homo sapiens
ctgtcaatggatccacaattctgggatctggaggatggtggacctcttctcacagcaccacaaggcagtgccccagtggggactcggtgtagagcttccaaccccacattttccctcttcactgctgtagtaaaagttctccctcagggctgtgcccctgaagtaaacttctgcmtagattttccatacatcctctgaaatataggtggaggctcttaagcctcaattcttgcactgtgtgcacctgcaggcttaacatcaggtggaagtcacaaaggcttacagtttgcaccctctggaggagcagcttgagctttacctgggcccctttaagccactgctgaagctggagtggctgagatgcagggagcagtgtcccaaagctatcctgggtctggaccatgaagccattcttttcttctagacctccaggtctgtgatttgagcagctaccttggtctctgacatgtctttgagaccttttctccattggcttggctatcagcacttgttttctttttagttatgcaaatttctgcagccaatttgaattgctcccgtgaaaataagattatattttcgatcatatagccaagctgcaaatttct

SEQ ID NO: 338981 - DNA, 608 bp, Homo sapiens
ctgtcaatggatccacaattctgggatctggaggatggtggacctcttctcacagcaccacaaggcagtgccccagtggggactcggtgtagagcttccaaccccacattttccctcttcactgctgtagtaaaagttctccctcagggctgtgcccctgaagtaaacttctgcatagattttccatacatcctctgaaatataggtggaggctcttaagcctcaattcttgcactstgtgcacctgcaggcttaacatcaggtggaagtcacaaaggcttacagtttgcaccctctggaggagcagcttgagctttacctgggcccctttaagccactgctgaagctggagtggctgagatgcagggagcagtgtcccaaagctatcctgggtctggaccatgaagccattcttttcttctagacctccaggtctgtgatttgagcagctaccttggtctctgacatgtctttgagaccttttctccattggcttggctatcagcacttgttttctttttagttatgcaaatttctgcagccaatttgaattgctcccgtgaaaataagattatattttcgatcatatagccaagctgcaaatttct

SEQ ID NO: 338982 - DNA, 590 bp, Homo sapiens
ttcaccaatgcttagtagttttatgtatacaaatcctgcacagtttatagttagctacttcattttgtgttattataaatggcattgatttttaaattttacatgctgattgttcattgctaatatataggaatacaaataattggctttttttatattgactttgtatgctgggactcacttgttaatctargatttttcacttttaatggattcttttagattttctacataaacaaatatattgtctgtgaataaaaatagtttaaatttgttcttttcaaactgtatactttttgtttctcttggtcttattgcacagttaggatttctaatgcattattaaattgaagagatgagaaataacacctttgctttgttcatatcttaggacagtattaagcctcttaccattaagtatgaggttagctgtagatttttcagatatcctctattaggttaagaaaattctttaggcagaatgattatgatatagggaagaagcttatttatctgagacaggaatgttttaaaatctaccttattgaaattaatacatccacttcatttttcttttggttaaatgttta

SEQ ID NO: 338983 - DNA, 590 bp, Homo sapiens
ttcaccaatgcttagtagttttatgtatacaaatcctgcacagtttatagttagctacttcattttgtgttattataaatggcattgatttttaaattttacatgctgattgttcattgctaatatataggaatacaaataattggctttttttatattgactttgtatgctgggactcacttgttaatctaggatttttcacttttaatggattcttttagattttctacataaacaaatatattgtctgtgaataaaaatagtttaaatttgttcttttcaaactgtatactttttgtttctcttggtcttattgcacagttaggatttctaatgcattattaaattgaagagatgagaaataacacctttgctttgttcatatcttargacagtattaagcctcttaccattaagtatgaggttagctgtagatttttcagatatcctctattaggttaagaaaattctttaggcagaatgattatgatatagggaagaagcttatttatctgagacaggaatgttttaaaatctaccttattgaaattaatacatccacttcatttttcttttggttaaatgttta

SEQ ID NO: 338984 - DNA, 562 bp, Homo sapiens
ctttctctggctgagcattcaaacaactctaaagctttgctgctcattcattcattcattcatccaacaaatatttctaagtgttttccagctttgttgtccagggtggctgggtatttaatgattaacaaaaaacatatgatttctgtcctcataattacacatacacatgtagtgagtaacattacatgtgaatgtgtaaaactttgcaatatgcttctacaagttataataatttccccaatttattttgaaatatgttaattaattgattctcttgggtctgttgtgtagayataacaacaatttagctcatctttttctcacatttagtcatacttataataatcataattaacattatatcagtatacttttgcttcaagaaacagaatagccaatttaaagagtctagaatttatgaacatatattattttacatattaagatatctgaacatacctttgcttttcatggggtaacctccaaatccaatttttaatcaatagcttctgagcagctggtaatgaattattaaacactaaagatagtattgaatagt

SEQ ID NO: 338985 - DNA, 605 bp, Homo sapiens
ataagtctattgcccaacaaggatgtattagtccattcttgcaccatcataaagaaatacctgatactgggtaatttacaagaaaagaggtttaattggctcatgctaccacatgctgtacaagaagcatggctggggttgcctcaggaaacctataatcatggtggaaggcaaaggggaagcatgcacatcttcacatggctggagtagatggaagagagggggaagtgctacacacttttaaacaaccagttctcctgagaactcactcactgtcatgagaacagcaccagtggggaaatctgcccccccattatccagtcacctcccaccaggcaccacttccaacattgggaattaccatycaacatgagattttggtggcaacaaaggtccaagccataccaaaggatatactggagaattgcacaaaattatgttatttagccagacacagtgacttgatcctgtattcccagcaactcaagaggctgaggtagtagaattgcttgaacctaagaattcaagtccagcctgggtaatatagcaagaactcatctcaaaaaacattattgtttcctgacaatttaaatatggatgtttta

SEQ ID NO: 338986 - DNA, 605 bp, Homo sapiens
ataagtctattgcccaacaaggatgtattagtccattcttgcaccatcataaagaaatacctgatactgggtaatttacaagaaaagaggtttaattggctcatgctaccacatgctgtacaagaagcatggctggggttgcctcaggaaacctataatcatggtggaaggcaaaggggaagcatgcacatcttcacatggctggagtagatggaagagagggggaagtgctacacacttttaaacaaccagttctcctgagaactcactcactgtcatgagaacagcaccagtggggaaatctgcccccccattatccagtcacctcccaccaggcaccacttccaacattgggaattaccatccaacatgagattttggtggcaacaaaggtccaagccataccaaaggatatactggagaattgcacaaaattatgttatttagccagacacagtgacttgatcctgtattcccagcaactcaagaggctgaggtagtagaattgcttgaacctaagaattcaagtccagcctgggtaatatagcaagaactcatctcaaaaaacattattrtttcctgacaatttaaatatggatgtttta

SEQ ID NO: 338987 - DNA, 626 bp, Homo sapiens
cttaatcagctgtggcaaagtacaaatgaggcaaaaccatagtacgtttatttcattatctaaatttgcaaactttgcctcaacgtttaaagaaaaacaacccaattaaatcagatgaagrataaacagacttctcagcagagatacttcaactgagctagtataatatgctgcccattataaagtagtctcttacagatattgattacattattcttttctactgttgtaactgagttagaaaaatataattcagcatcttatactctctgtaaagaaatattttttcattccatttgtgtcctccagataatgcaatagtatgtctattataagagtattttattatttttgttatttcttttttaaaaagacctcatcaattaatagttaatcataattgatttatacatctgagaaaacagaatagtttaattggaatgttggcatatggcacaacaaagttttactatcatttatgtagccattataaagtgatttttggattgttagacttacaaatttaaaaaatgcaatcaatgagtgtgagaatggtaaaataagggtttcattaaaaaattaatgtaagttattttaatgaattatccttttcttgagaaagattt

SEQ ID NO: 338988 - DNA, 457 bp, Homo sapiens
tttgctttacccaaagtctactggcttaaatgttaatcaatctaagatctaccttcatagcaatatctacactggtatttgaccaacatctgggtgtcatmacctagccgaatagacacataaaattaaccatcactgttagcggtggaagacatccaagttatccaaagttacctgtggtgcatctgtgtgagttggcagcaactccagtccttgcctcctcagaagaaagaatttgactgaggggcataaagcagaagaagagactgccgcaagtttcagggcaggaatgaaaatttattaaaaggctttagaacagtaaggaaagaaaagaaggaaagtacaacttgaaagtacaagaggtcaagctgtgcacttggtttctcaagggccaggcaggcaacttgagaagtcaagtgcatagcctgacctcttgacttggggttctataggttgg

SEQ ID NO: 338989 - DNA, 457 bp, Homo sapiens
tttgctttacccaaagtctactggcttaaatgttaatcaatctaagatctaccttcatagcaatatctacactggtatttgaccaacatctgggtgtcataacctagccgaatagrcacataaaattaaccatcactgttagcggtggaagacatccaagttatccaaagttacctgtggtgcatctgtgtgagttggcagcaactccagtccttgcctcctcagaagaaagaatttgactgaggggcataaagcagaagaagagactgccgcaagtttcagggcaggaatgaaaatttattaaaaggctttagaacagtaaggaaagaaaagaaggaaagtacaacttgaaagtacaagaggtcaagctgtgcacttggtttctcaagggccaggcaggcaacttgagaagtcaagtgcatagcctgacctcttgacttggggttctataggttgg

SEQ ID NO: 338990 - DNA, 457 bp, Homo sapiens
tttgctttacccaaagtctactggcttaaatgttaatcaatctaagatctaccttcatagcaatatctacactggtatttgaccaacatctgggtgtcataacctagccgaatagacacataaaattaaccatcactgttagcggtggaagacatccaagttatccaaagttacctgtggtgcatctgtgtgagttggcagcaactccagtccttgcctcctcagaagaaagaatttgactgaggggcataaagcagaagaagagactgccgcaagtttcagggcaggaatgaaaatttattaaaaggctttagaacagtaaggaaagaaaagaaggaaagtacaacttgaaagtacaagaggtcaagctgtgcacttggtttctcaagggccaggcaggcaacttgagaagtcaagtgcatarcctgacctcttgacttggggttctataggttgg

SEQ ID NO: 338991 - DNA, 586 bp, Homo sapiens
gggttataggactatgaaagtcagagctaccatctgcacccttcttgcatggatttttttccatgtggtaagaagtaactcttgccacctctgggataacagtcctatagcactgggatccaagggggaaaaataaatcagtttatagttcactttggaaaaaaactcaggaaaaatctttgatggtcatgtctgagggcatatgcaaacaagatcaagatttttttttttttaatttgttatgtctcattctctatttttaagtttttagtcaaaatctaaaaaattgaaaatattttactagaaatatttatctagaaaaatgtagatgcaaaatgagcaagtttgtgatttctggaactagctaatcacagcagtagtgagaaaaagaatcacaaaggaaaatacagataacatttctaaacctttaaaattaaccataaaagaccaaaaacaaaattaaatgcaattgcaaacataagaatatagagaaaaggataaagaatgttcttatacattaagaataaaaacatgaattayccaaaataatatagataaaatctttttaaaaaaacaacaaaaaagg

SEQ ID NO: 338992 - DNA, 486 bp, Homo sapiens
gatttcatagcatagtaataatctatttcttaaatatttgaaacaattcccaataaatgcatttgggtttaaaacccctttctgtttcattgacattttaccatcaaattaaaaargcattgatagaattgtttttagtaatttttaatcatttattttaagtatctaccaatccattgcttaataggaaaaatatcttttgtatattccaaatttgaaagcattttgatttatttgtaattgattcttagcactgtagttaaagcaggcctatatattttgtttttttttttaatctgtgtttaacactggtattcgatatttttaagtgacagaattctaacttaagcagaagattgtataggctcatgaaattcaaggaaagcgtgagtgactaagtaaagaatgcctgggatgattctgaatcttagaaatcactggatttataattatcacatgctgccatgtcctctgtttcactctttc

SEQ ID NO: 338993 - DNA, 583 bp, Homo sapiens
aataacttactaaccaggtttttcactaaaaataaaagttgctaagagttaacattgtatgcattccagcctggcaagagagccagactacatctcaaagaaaaagaaaaagagttgacattgtaacatataattgagactactgaagaaacagttttatgttcaaggtgtgtaagaaaagtagaatgtgctttcggtaaaagattacaagaaaacatgggaatacagatttcttgcctaartttagagagttaaaggattgttttaagttaggataaagctgaaggtttaagcaagttgttaaaggtctgtgaaatattaatcttaaagaagaaattatctgtgtgaacatattggctaaaattaaagggctattattcagttttttgataaatcggacattggaataaaagcacaacaggtttttcttagagctaacacctgcttgtaatctgctgtttaacaaacatttttaaaggattataaaagatttattaaaatcttacctcatggtcaagctgattaagattaaatacatttgtctataaggttttattaagatttgggtttaacacaaatagca

SEQ ID NO: 338994 - DNA, 576 bp, Homo sapiens
ataatcaactataggacttcaacaggtacatttaaatggaggattttctgataactttggagattgtgacattagatagagaaaaaaacctttcagaactctcgtagctgaatgttcatgaatcaagcaggacaggagttaactgcatggactgaagtaatagaagctatttacagcttttaacaattgagtatactcctgtgaacaaaatgtgaaggatatttgtttctctctgcctactttctccaaaatttggaaactatttgtgagtattmctaatttatgggaatatggttatttgcttaagtgcaatacaaatctgttttattttgcatcaggacacaaactggagaaactggttattttatggagactttaactggaatggcatgctttcctttaaggaatcaaatttgacttgtagagccaatgaaagccacttggggaactggcctcataccttgcctacacagtccctgtacagggtttctgccctgtgataagtaaagaatgtcactttctaacaggcccaggaacccccaggttatcttggaaccccaagaggagagagatttg

SEQ ID NO: 338995 - DNA, 533 bp, Homo sapiens
ggcaactggtggcaatgataaaaataaaaagtagtttttatttttgaaaaacatttatctagcaaagaataactcagagatgacagcttagacaactgcaaaggcagaagacagaaagggaggagattaaacctgtatttaaggccatctaaggaaactgaaaggtgtttctgtgactggacagacagtagctaaagataaaataaggcmagtaactaaatttaacagtttgactcaaggtgacaaagtggcagcctattctaacacgaatgagaagaacaaagataaatcacttttcatattttaatctcatttggtgaaaaatccactttatattcaaaaagtaggaacccatttttcttttttcaggagtgaaatgagggttaatccacaggagaataaacaattgtggcctcatagcatacgagattacttttctttcatggatagaatataattaaatgcaagcagtttttaatggaaagagtggaaaacttttatttgcctaatttgtggaggtagcaattattgtt

SEQ ID NO: 338996 - DNA, 381 bp, Homo sapiens
tctttagcagtgaatataattaagtagaattactttccataagctgatatcactgaatgtaaagacaatgacaaaatactttctatgttgaactaaccatgtgtggatcttataaaacacttttytctggatatccgtggtgtcttttggccctaagtaagttaaaaagggacttttgatcttctcctttagcctataaactttccacaggtggagactctgcagattactgaattaactcatttacactttaatatttaaaatgttaataaagtattggatgaacatggctaaaagatcaaatagtagagaaaggcatatctgttagtaatgtttacaaatatgagtaacacaaaaccaactaactacaagaggtttaaa

SEQ ID NO: 338997 - DNA, 381 bp, Homo sapiens
tctttagcagtgaatataattaagtagaattactttccataagctgatatcactgaatgtaaagacaatgacaaaatactttctatgttgaactaaccatgtgtggatcttataaaacacttttctytggatatccgtggtgtcttttggccctaagtaagttaaaaagggacttttgatcttctcctttagcctataaactttccacaggtggagactctgcagattactgaattaactcatttacactttaatatttaaaatgttaataaagtattggatgaacatggctaaaagatcaaatagtagagaaaggcatatctgttagtaatgtttacaaatatgagtaacacaaaaccaactaactacaagaggtttaaa

SEQ ID NO: 338998 - DNA, 549 bp, Homo sapiens
atagaatgtaaatatttcttatcagacttaaaggctgggttgatgtcaaattgctggtctgctattcctgaattacaaaagggaagacagcataatggggcatgtccagctccccgcttcctgtcatgacctgaacccgtctttcacgttaaatctggagggccctggtccattatgggtccatttagatggttgcagggcaagtggaagggcttcaaattttatttttggtttacaacccccagaccaacaatttccacttcccattataaaataagatccatccacaacctgattcgtccgtaaattattttgattttgccttcttctctattaacaaaaatgacatttttataacaaataatgtaaccacccacggggttcttcttgcccacygtatgtaaaataaagaccatggcactgcagtaggaaagagtttaatagacataaggctggccaagccatgtcggaaatagagctagtactcaaatcatctcttccaaagctcttaggttaggtgtttttcaaactcaatttggggaaaggggt

SEQ ID NO: 338999 - DNA, 609 bp, Homo sapiens
aagtaagcaaattcaggtctgtgtaatgaaccgttcaagatgcagacacaggcagatgaaatgcagactaccccagagaaaagattgatatttttatctccctgaagggcagagaaagcaaatacataatggtctgaaagaggatcataaataataagttgtcaaatcatagaatgccaaattttgtttttacatttcaaagtgagaaattgtcagactcagaaaatacttatgttaaatattgcttttaatatataaataatgacttctttgagcttaaaaagtataaagctcagtagtaagtgggagatgaatattgtagtttacactaaaaatagttattgtacccagtgttataagataatgactcattatactttatatgaaaatattaaagcatattgtaggggagaaggaataattttcctctctacccctcttgagttcttagctaggagcccctgtaaaaagatacagattaacaagaaatacacaaatgtttaataacgtgtgtaactcctatatacatgggagttaacccagagaaatgagtaaatctytaaagtagatttcaaagtacagttgacccttgaacaacacaggcattag

SEQ ID NO: 339000 - DNA, 510 bp, Homo sapiens
ctcttctcttataaaattataaaggaagaagagtttcactcttgggcacctaatcccaagcaggaggtctggccctcctctggttgattgtggtactacaattttatctttttgcacaaagtgggagaggagaatgaagtaggtgatgttctccttgagacagtcctttgctcacctatttagattctggcaaaatcytccaactgcactgctgccctggctgccttctctcacgcaattcctgggctatggttttctctactgtcacccttttttttttttgagacggagtttcgctctgtgtaatggcacaatgtcgactcactgcaacctctgcttcccgggttcaagtgattctcctgcctcagcctcccgagtagctgggattacaggcgtctgccaccacgcccggctaatttttgtatttttagtaaagccggggtttcaccacgttggtcaggctggtccggaactcctgacctcaggtgatccgcccgcctcggcctccca

SEQ ID NO: 339001 - DNA, 594 bp, Homo sapiens
ctaaatgtcttcatcaagaagttagaaaaatctcaaatcaacaatctaactttggaaaggaagaaattagggcaactaagggaaaggaactggtggggggagaaaatcccaaagctagcaaaagaataataaatcactgaarttagagaagaacttaatgaaattgatgtgtaaaaatccatacaaaagatcgataaaaccaagacttggttttcaaaaaaataaataagatcgataggccactagtttaacaaagaaaaagaaagagaagatccagaaaagcacaatcagaaatgaaaaaggtggtttttatccatatcaccactgatcccacagaaatacaaaatatcctcagaaactattgtgaataactctaagcacacaaattagaaaatctagaggaaatggatactttcctgtaagcacacaattttccaagattgaatcaggaagggactgttaccctaaatagaccaatatctaaacttctgaaatggaatcagtaatgaaaaacctaccaacaaaaaaacatcctggaccagttggtttcccagctgaactctaccacactgaaagcaatcctgcacaaaacta

SEQ ID NO: 339002 - DNA, 594 bp, Homo sapiens
ctaaatgtcttcatcaagaagttagaaaaatctcaaatcaacaatctaactttggaaaggaagaaattagggcaactaagggaaaggaactggtggggggagaaaatcccaaagctagcaaaagaataataaatcactgaagttagagaagaacttaatgaaattgatgtgtaaaaatccatacaaaagatcgataaaaccaagacttggttttcaaaaaaataaataagatcgataggccactagtttaacaaagaaaaagaaagagaagatccagaaaagcacaatcagaaatgaaaaaggtggtttttatccatatcaccactgatcccacagaaatacaaaatatcctcagaaactattgtgaataactctaagcacacaaattagaaaatctagaggaaatggatactttcctgtaagcacacaattttccaagattgaatcaggaagggactgttaccctaaatagaccaatatctaaacttctgaaatggaatcagtaatgaaaaacctaccaacmaaaaaacatcctggaccagttggtttcccagctgaactctaccacactgaaagcaatcctgcacaaaacta

SEQ ID NO: 339003 - DNA, 624 bp, Homo sapiens
ctaattctagttttgtctgatttaggattgttttaaagttttcctcttgtagggtttgcatgtttccataaaaagtttattcttaagtattttaagaattgtttttattgcaaatgggggttaactccccatttatatcttgtaattattacaatatatgttaaataattacagtagaagcttttaaatatcacaatggtaacaagcagctataaaggtaacaagcagctataaagaaacaagracatcttgttttactgcactctgctttagagcactttgcaggtattgtgcattttacaaattgaaggtttgtggcaaccttgcatccatcgagttcattggcaccatttttccaacagcatttactcacttcatgctatattttgctatttcttgcagcatttcaaactttttcaatattattacatctgttatggtgatctgtgatcagcaatatttaatgttcctattttaattgttttggggtatcataagtcacgtccaagtaagatagttatgagtgttctgattgctccactatccagctgttttcccaccttcctcccttttttcaggcctttctattctctgagacttaagattattgagattaggccaatt

SEQ ID NO: 339004 - DNA, 624 bp, Homo sapiens
ctaattctagttttgtctgatttaggattgttttaaagttttcctcttgtagggtttgcatgtttccataaaaagtttattcttaagtattttaagaattgtttttattgcaaatgggggttaactccccatttatatcttgtaattattacaatatatgttaaataattacagtagaagcttttaaatatcacaatggtaacaagcagctataaaggtaacaagcagctataaagaaacaagaacatcttgttttactgcactctgctttagagcactttgcaggtattgtgcattttacaaattgaaggtttgtggcaaccttgcatccatcgagttcattggcaccatttttccaacagcatttactcacttcatgctatattttgctawttcttgcagcatttcaaactttttcaatattattacatctgttatggtgatctgtgatcagcaatatttaatgttcctattttaattgttttggggtatcataagtcacgtccaagtaagatagttatgagtgttctgattgctccactatccagctgttttcccaccttcctcccttttttcaggcctttctattctctgagacttaagattattgagattaggccaatt

SEQ ID NO: 339005 - DNA, 619 bp, Homo sapiens
cctcataatttttagctgtttacctgtttattattttcttcagaggatttaaatcaaactcattcctttcaataattgctcttttcttagccatggcaaggaaaatgtctcactatcattttaacgtcaggttaaaacaatgayctcaacatttattacagttgacattaatggtttcctgttattaggacaggatcatattaagaagtttataacatgattactcatttgctttgagtaaaaaaattattagtaaacacctcattgttccttccctctgagaatgtcttgattgcaatttatttctatcaaatagaggattcttcaaatcagtaatgttacctgtaggtcattgaaaataatcagatgaaacataggatattctaataataattatggacagcaaattaattcactgacttcccaagagttgaggagtgttgtttgattttattgtaatcaaacaagggaaggtctggtgagttaattattcagggaaaatctaaaagtgtcaatatgcatgaagcataaggggagaggagtgagacaagagaaaattacagaatttcccaaagggcatatccagccaacttatcagctagaggactcataaatagca

SEQ ID NO: 339006 - DNA, 619 bp, Homo sapiens
cctcataatttttagctgtttacctgtttattattttcttcagaggatttaaatcaaactcattcctttcaataattgctcttttcttagccatggcaaggaaaatgtctcactatcattttaacgtcaggttaaaacaatgacctcaacatttattacagttgacattaatggtttcctgttattaggacaggatcatattaagargtttataacatgattactcatttgctttgagtaaaaaaattattagtaaacacctcattgttccttccctctgagaatgtcttgattgcaatttatttctatcaaatagaggattcttcaaatcagtaatgttacctgtaggtcattgaaaataatcagatgaaacataggatattctaataataattatggacagcaaattaattcactgacttcccaagagttgaggagtgttgtttgattttattgtaatcaaacaagggaaggtctggtgagttaattattcagggaaaatctaaaagtgtcaatatgcatgaagcataaggggagaggagtgagacaagagaaaattacagaatttcccaaagggcatatccagccaacttatcagctagaggactcataaatagca

SEQ ID NO: 339007 - DNA, 543 bp, Homo sapiens
actctaataaggtcaaaaactattctgaaattgtgttmctttctgagagaaaacatgtttccaaaaatatcatatattttggagtccattgttggctatgttttccaaacttggggtataaatttattccatatctgcttattgggtacctcaatagtaatatgtgaaaggtaagaatttaaaggatttttaagatttctgattgctctggtattcaatttggctttataatgtgtatatatatatatatattttacatagaattagtagtttgataagagaaattagtgctttgggcttatgaaagcagtataatatgacaactaactgagtctgaattattactgacatgactggagcctggctctttcactactgtcttaatctgtttgggttgctataacagaatacctgagactgagtaacttataaggaattaaagttaattttctcatagttctggaggctgagaagtcaaagaccaacctgagactgagtaacttataaggaattaaagttaattttctcatagttctggaggct

SEQ ID NO: 339008 - DNA, 570 bp, Homo sapiens
tttgttttatacagtatgtcaatttttaaaaattacctaaagcattagagtaaatccatctctattactctaataaggtcaaaaactattctgaaattgtgttcctttctgagagaaaacatgtttccaaaaatatcatatattttggagtccattgttggctatgttttccaaacttggggtataaatttattccatatctgcttattgggtacctcaatagtaatatgtgaaaggtaagaatttaaaggatttttaagatttctgattgctctggtattcaatttggctttataatgtgtatatatatatatatattttacatagaattagtagtttgataagagaaattagtgctttgggcttatgaaagcagtataatatgacaactaastgagtctgaattattactgacatgactggagcctggctctttcactactgtcttaatctgtttgggttgctataacagaatacctgagactgagtaacttataaggaattaaagttaattttctcatagttctggaggctgagaagtcaaagaccaacctgagactgagtaactta

SEQ ID NO: 339009 - DNA, 570 bp, Homo sapiens
tttgttttatacagtatgtcaatttttaaaaattacctaaagcattagagtaaatccatctctattactctaataaggtcaaaaactattctgaaattgtgttcctttctgagagaaaacatgtttccaaaaatatcatatattttggagtccattgttggctatgttttccaaacttggggtataaatttattccatatctgcttattgggtacctcaatagtaatatgtgaaaggtaagaatttaaaggatttttaagatttctgattgctctggtattcaatttggctttataatgtgtatatatatatatatattttacatagaattagtagtttgataagagaaattagtgctttgggcttatgaaagcagtataatatgacaactaactgagtctgaattattactgacatgactggagcctggctctttcactactgtcttaatctgtttgggttgctataacagaatacctgagactgagtaacttataaggaawtaaagttaattttctcatagttctggaggctgagaagtcaaagaccaacctgagactgagtaactta

SEQ ID NO: 339010 - DNA, 602 bp, Homo sapiens
gtggctcccaagttcaaccaaaggaaactatgaccagtgtgttcactggaagggagcrcacatatgttggaattactccagactccacttgatgttttgcaagggtgaggagtaagaagtatgcaagggtaatgtggactctgccagacattttacttcacgtcttaaaccctataagagtttcaactctactaaacctagaaggattttggacataaaaaaataaattttgcaaactaaggacactaactctgagaagttagatggacaaagtaccattgcatttgcatcagtaataaattatgtaagctacacaggctaagtaggtacaacagcaagatggctttgcctatttatttagagatggagtttcactgtttttgcccaggctggagtgaaatggtgtgatcttggctcgctgcaacttccacctcccaggttcaagtgattctcttgcgtcagcctcccaagtagcttggattacaggcatgtgccaccatgcctggttatttttgtttgtgtgtttttagtagagatggggccttttcataatgatttcatttataagaactttacatgatttggaataattttctcttaca

SEQ ID NO: 339011 - DNA, 602 bp, Homo sapiens
gtggctcccaagttcaaccaaaggaaactatgaccagtgtgttcactggaagggagcacacatatgttggaattactccagactccacttgatgttttgcaagggtgaggagtaagmagtatgcaagggtaatgtggactctgccagacattttacttcacgtcttaaaccctataagagtttcaactctactaaacctagaaggattttggacataaaaaaataaattttgcaaactaaggacactaactctgagaagttagatggacaaagtaccattgcatttgcatcagtaataaattatgtaagctacacaggctaagtaggtacaacagcaagatggctttgcctatttatttagagatggagtttcactgtttttgcccaggctggagtgaaatggtgtgatcttggctcgctgcaacttccacctcccaggttcaagtgattctcttgcgtcagcctcccaagtagcttggattacaggcatgtgccaccatgcctggttatttttgtttgtgtgtttttagtagagatggggccttttcataatgatttcatttataagaactttacatgatttggaataattttctcttaca

SEQ ID NO: 339012 - DNA, 602 bp, Homo sapiens
gtggctcccaagttcaaccaaaggaaactatgaccagtgtgttcactggaagggagcacacatatgttggaattactccagactccacttgatgttttgcaagggtgaggagtaagaagtatgcaagggtaatgtggactctgccagacattttacttcacgtcttaaaccctataagagtttcaactctactaaacctagaaggattttggacataaaaaaataaattttgcaaactaaggacactaactctgagaagttagatggacaaagtaccaytgcatttgcatcagtaataaattatgtaagctacacaggctaagtaggtacaacagcaagatggctttgcctatttatttagagatggagtttcactgtttttgcccaggctggagtgaaatggtgtgatcttggctcgctgcaacttccacctcccaggttcaagtgattctcttgcgtcagcctcccaagtagcttggattacaggcatgtgccaccatgcctggttatttttgtttgtgtgtttttagtagagatggggccttttcataatgatttcatttataagaactttacatgatttggaataattttctcttaca

SEQ ID NO: 339013 - DNA, 602 bp, Homo sapiens
gtggctcccaagttcaaccaaaggaaactatgaccagtgtgttcactggaagggagcacacatatgttggaattactccagactccacttgatgttttgcaagggtgaggagtaagaagtatgcaagggtaatgtggactctgccagacattttacttcacgtcttaaaccctataagagtttcaactctactaaacctagaaggattttggacataaaaaaataaattttgcaaactaaggacactaactctgagaagttagatggacaaagtaccattgcatttgcatcagtaataaattatgtaagctacacaggctaagtaggtacaacagcaagatggctttgcctatttatttagagatggagtttcactgtttttgcccaggctggagtgaaatggtgtgatcttggctcgctgcaacttccacctcccaggttcaagtgattctcttgcrtcagcctcccaagtagcttggattacaggcatgtgccaccatgcctggttatttttgtttgtgtgtttttagtagagatggggccttttcataatgatttcatttataagaactttacatgatttggaataattttctcttaca

SEQ ID NO: 339014 - DNA, 591 bp, Homo sapiens
cagccctgctgagaccttgattttagcccagcgcaactcaggtttgtttctaacctacagaactgtaasataacacatttgtgttgttttaagccactaaatttgtagtcctttacagcagtggtgggaaactaatacagattctgagcccatatcctagctctctgttctcagtggagcagcccagagctcttgctgtcctgccggtgagaccccctcagacctcaggacaggctccgggtgctgcctccgcacaaaaggtgtagtctcaggtgtggcctgtggtctccagcaagctgtttcccctccttccagacccggctccagacgccccctccgggtcactgccagtggtgctgatctctgactcctcagacctggctatttcctctccaagggacgtgggccttacttcctgccacagtgcctgaactcttcttcctttctgaccatcacatgacttgctcagttagcctatgtggaatctactcaaagccaccttttcagtgaggtacatatgtttataacatatgctatacatatatgtgtgcatacatacacatatcttgccgaaaagacacagagaaggga

SEQ ID NO: 339015 - DNA, 591 bp, Homo sapiens
cagccctgctgagaccttgattttagcccagcgcaactcaggtttgtttctaacctacagaactgtaagataacacatttgtgttgttttaagccactaaatttgtagtcctttacagcagtggtgggaaactaatacagattcygagcccatatcctagctctctgttctcagtggagcagcccagagctcttgctgtcctgccggtgagaccccctcagacctcaggacaggctccgggtgctgcctccgcacaaaaggtgtagtctcaggtgtggcctgtggtctccagcaagctgtttcccctccttccagacccggctccagacgccccctccgggtcactgccagtggtgctgatctctgactcctcagacctggctatttcctctccaagggacgtgggccttacttcctgccacagtgcctgaactcttcttcctttctgaccatcacatgacttgctcagttagcctatgtggaatctactcaaagccaccttttcagtgaggtacatatgtttataacatatgctatacatatatgtgtgcatacatacacatatcttgccgaaaagacacagagaaggga

SEQ ID NO: 339016 - DNA, 591 bp, Homo sapiens
cagccctgctgagaccttgattttagcccagcgcaactcaggtttgtttctaacctacagaactgtaagataacacatttgtgttgttttaagccactaaatttgtagtcctttacagcagtggtgggaaactaatacagattctgagcccatatcctagctctctgytctcagtggagcagcccagagctcttgctgtcctgccggtgagaccccctcagacctcaggacaggctccgggtgctgcctccgcacaaaaggtgtagtctcaggtgtggcctgtggtctccagcaagctgtttcccctccttccagacccggctccagacgccccctccgggtcactgccagtggtgctgatctctgactcctcagacctggctatttcctctccaagggacgtgggccttacttcctgccacagtgcctgaactcttcttcctttctgaccatcacatgacttgctcagttagcctatgtggaatctactcaaagccaccttttcagtgaggtacatatgtttataacatatgctatacatatatgtgtgcatacatacacatatcttgccgaaaagacacagagaaggga

SEQ ID NO: 339017 - DNA, 591 bp, Homo sapiens
cagccctgctgagaccttgattttagcccagcgcaactcaggtttgtttctaacctacagaactgtaagataacacatttgtgttgttttaagccactaaatttgtagtcctttacagcagtggtgggaaactaatacagattctgagcccatatcctagctctctgttctcagtggagcagcccagagctcttgctgtcctgccggtgagaccccctcagacctcaggacaggctccgggtgctgcmtccgcacaaaaggtgtagtctcaggtgtggcctgtggtctccagcaagctgtttcccctccttccagacccggctccagacgccccctccgggtcactgccagtggtgctgatctctgactcctcagacctggctatttcctctccaagggacgtgggccttacttcctgccacagtgcctgaactcttcttcctttctgaccatcacatgacttgctcagttagcctatgtggaatctactcaaagccaccttttcagtgaggtacatatgtttataacatatgctatacatatatgtgtgcatacatacacatatcttgccgaaaagacacagagaaggga

SEQ ID NO: 339018 - DNA, 546 bp, Homo sapiens
aagctctgttatttttaaatgaaaacagaacatttttacacaacctcaaatttccactttcagtcctttcctgggtcagaggaaataatgcattcggtgaatgttctcttttctttgtcctcaaaaccgtccatgtggcctgggtcataagatctcagttgtcttctcacagtcactgatgagcagtctgataggaaatcattttaataacaagccacccaagccgctcttgccacgtgccaggtgctggtcctggccagggtttctctgcccctgccctgtccacatttggggctggagagttctttgctgtaggaggctatccagggcagtgtargctgctgagcagcacccctggcctccacctccagatgccagtagcatccctctctccagcggtgacgaccaacagtgtctccggacattgctaaagaacccctgggcggcaagagcacccccggttgagaaccagtattctcagccctgtttgtaaatgtatttgtttaagccccatgacacagcttttatgactctctgttagacaga

SEQ ID NO: 339019 - DNA, 569 bp, Homo sapiens
ttcttttatgcaaagagaaaaggtcaatttacaactaaacctaaatgaaatggaattcaaatgstcagggtcaaatcctggggggaggcactgaggaaaggacagctgtctgggggtcggtggcagggactgaagctgagcagcaccaggcggtggcagggattgaagctctgcagtgccagtcaaggcagggatcgaagctctgtggcaccagttgatggcagggtctaagctttgcagcgctaggcggtggcagggatctaagctctgcagtgcagtcggcggcagagattgaagctctgtggcaccagttgatggcaggggtctaagctttgcagtgccagttaatggcagggatctaagctctgtggtgccagtcggtggcaggatctaagctctgcagtgcccatggcccattggttcatcctggccgagcctccaacaaacagccccgtgcagcttctttgcctcgagcatttgtcgatttgccaattcctgtagtataaacgctcgtgatttcatgccgccaacccaaagtcactgaatgcagagctgggaagagatgtgcc

SEQ ID NO: 339020 - DNA, 569 bp, Homo sapiens
ttcttttatgcaaagagaaaaggtcaatttacaactaaacctaaatgaaatggaattcaaatggtcagggtcaaatcctggggggaggcactgaggaaaggacagctgtctgggggtyggtggcagggactgaagctgagcagcaccaggcggtggcagggattgaagctctgcagtgccagtcaaggcagggatcgaagctctgtggcaccagttgatggcagggtctaagctttgcagcgctaggcggtggcagggatctaagctctgcagtgcagtcggcggcagagattgaagctctgtggcaccagttgatggcaggggtctaagctttgcagtgccagttaatggcagggatctaagctctgtggtgccagtcggtggcaggatctaagctctgcagtgcccatggcccattggttcatcctggccgagcctccaacaaacagccccgtgcagcttctttgcctcgagcatttgtcgatttgccaattcctgtagtataaacgctcgtgatttcatgccgccaacccaaagtcactgaatgcagagctgggaagagatgtgcc

SEQ ID NO: 339021 - DNA, 625 bp, Homo sapiens
cttttcttctgagaagtagatctcaacaggtaggcttaaaatatttagtaaaccatgctacaaacagatacgctgckatacaggctttgtggttccatttacagagcacaggcagagtagatttagcataactcttaagggccctaggatttggggaatgctaaatgagcactggcttcaataaagttactaggtgcattactccctgacaagacagtcagcctgtcctttggagctctgaagccaggcactgacttcttctctccagctatgaaagcactagatgacatcttctttccctggaaggttgttcttgcttagtgtagcctccttccccaatgatattagctagatcttctggagaacttgctgcagcttctccatcagtacttgctgcttcaccttgcacttttatattgtgaagatggcttctttccctaaacctcatgaaccaatgtctgctagcttccagcttttcttctgcagcttcctcgctcctctcagcctacatagccttgctctggattaggctttggctcaagggaatgttgcagctggtctgatcttctatctagaccaccaaaactttttcatatcagcaaaaggctatttcactttcttatca

SEQ ID NO: 339022 - DNA, 607 bp, Homo sapiens
tttttactcattcaatgcatttttagcgcatagtatgctctgggcagaatccatcgaaatagtatttgcaaatgctggatgaatttttctgcagagagtgatgcaaccrcatctcaactcagttcatctaaaatcaaactcatctccctcagctcttggcctgaaatttctttaaatggaatcatcgtcatcttggtcacccacacatgaaaactctgaaagtcacctttgaccactcctgtcttccatctctgatactcaagtagtccccaagccctgtttcttttttctttgtagtaacctctaagaactttccatttttgtgacctgtctatctatcaggctatgtccttctaaagcatccaagactcttcatttgtaaggtcagaaaacttaaacatgagggaaattgttggctcttgtaactaaaaagtcaagggctacatagaatggctgggtacatgggttcaaacactactatcaggaatcagtctctctctatggcttgtctctggcttccttcatgttagtttcattcctaagcaagagggatgtcagcagattcagttccatgatctgctgtgtcagcaacaagatggaaagagat

SEQ ID NO: 339023 - DNA, 568 bp, Homo sapiens
attggcctcatttctttttcttttttgagatagagtttcactcttgttgcccaggctggagtgcaatggtgagatcttggctcactgcaacctctgcctcccgggttcaagtgattctcctgcctcagcctcctgagtagctgggattacaggcatgcaccaccacacccagctaattttgtatttttagtagagacagggtttctctatgttggtcaggctggtctcaaactcccggcctcaggcgatccacccrcctcggcctcccaaagtgctgggattacagtgtgagccactgcacccggcctggcctcatttcaatattgtgtctcagggaataggcaggcccgaggagagggaaaatgatgggggaatggtgggttggtggagcagtcagaagacacacaacatttattaagtttgccatcttctatgggtgggatttgtggggccctaaagcaattataatagtaacagcaaagatcactgattgcagatcaccataacaggtataataaaaaagaaaaagcttgatatattgtgagagttgaccaaatgtgacacagag

SEQ ID NO: 339024 - DNA, 568 bp, Homo sapiens
attggcctcatttctttttcttttttgagatagagtttcactcttgttgcccaggctggagtgcaatggtgagatcttggctcactgcaacctctgcctcccgggttcaagtgattctcctgcctcagcctcctgagtagctgggattacaggcatgcaccaccacacccagctaattttgtatttttagtagagacagggtttctctatgttggtcaggctggtctcaaactcccggcctcaggcgatccacccacctcggcctcccaaagtgctgggattacagtgtgagccactgcacccggcctggcctcatttcaatattgtgtctcagggaataggcaggcccgaggagagggaaaatgatgggggaatggtgggttggtggagcagtcagaagacacacaacatttattaagtttgccatcttctatgggtgggatttgtggrgccctaaagcaattataatagtaacagcaaagatcactgattgcagatcaccataacaggtataataaaaaagaaaaagcttgatatattgtgagagttgaccaaatgtgacacagag

SEQ ID NO: 339025 - DNA, 583 bp, Homo sapiens
agttcttccaaagccttgttcatgttgatattctgaggtcctcccatgaatcacacatgtgcttaatggcgaatagggaatcctttccagaaggtgtgcaatttactttgctcaggcccatcagaggaatcacagtctctggcagctatagctttacaaaatgtatttcttaagtagtaacacttggaagtcagaattactttttgctttgtaggctgcagagtggatgttgtgttggcaggtgtgaaaacaacattcatctcgcacatctccatcagcactcttgggcgatgaggtgcattgtcattragcaggaatattttgaaagaaatcttttcttctgagaagtagatctcaacaggtaggcttaaaatatttagtaaaccatgctacaaacagatacgctgcgatacaggctttgtggttccatttacagagcacaggcagagtagatttagcataactcttaagggccctatgatttggggaatgctaaatgagcactggcttcaataaagttactaggtgcattactccctgacaagacagagagcctgtcctttggagctctgaagccaggcac

SEQ ID NO: 339026 - DNA, 583 bp, Homo sapiens
agttcttccaaagccttgttcatgttgatattctgaggtcctcccatgaatcacacatgtgcttaatggcgaatagggaatcctttccagaaggtgtgcaatttactttgctcaggcccatcagaggaatcacagtctctggcagctatagctttacaaaatgtatttcttaagtagtaacacttggaagtcagaattactttttgctttgtaggctgcagagtggatgttgtgttggcaggtgtgaaaacaacattcatctcgcacatctccatcagcactcttgggcgatgaggtgcattgtcattaagcaggaatattttgaaagaaatcttttcttctgagaagtagatctcaacaggtaggcttaaaatatttagtaaaccatgctacaaacagatacgctgckatacaggctttgtggttccatttacagagcacaggcagagtagatttagcataactcttaagggccctatgatttggggaatgctaaatgagcactggcttcaataaagttactaggtgcattactccctgacaagacagagagcctgtcctttggagctctgaagccaggcac

SEQ ID NO: 339027 - DNA, 576 bp, Homo sapiens
ggtgggcaacttctgtgaagtcccatcgagcccctctagggaattctgcaggacaggcctcagaatccacccctgtgcctcrtcgagcccctctagggaactctgcaggacgggcctcagaatccaccccgtgcctgcaggggaaagtggtctgcacatgccctgttgaggacgttctcaggatacacccgcatgggagtgaagacagtagaaggggaagaagaggggctaagcaaggtcaggtccaggtgcagcacagccagctccttgaggagctcttaagaatgagctgtgctgtgcatgggtccctccttgaggcaaacagcctgggcttctcaccccaccaggtagtcactgggcagagaagcggggtgagcaggacataactcccgggtaactctgagggacacagctccactcacctaagggcagtcttctacggaagatgtggcaggagctgtcggcaacacacgcagcccctggggaggagtccaccaacctagccacagggaccccaggaagcctgggtactcagagagcacctttcataacagcgtctgctattattactcaaaa

SEQ ID NO: 339028 - DNA, 557 bp, Homo sapiens
ggcccttgtttgtaattgcctgatgctaataacaaggaggaaagttcctagttaactgatcaattctatgctagcaatatacaagaaagccatcgcattactaccccattttatctgactcctggaaaatgtattaaagcagaaccctgcattaatttaaggaatgctaattccatacgtaacataagcccctgccaaacgcgtatgtatgttactgtttattcccataccattcaccccccaccctgatggcacaggcatatttttgctcttcaattagccagatccctccaatgcagatgggatgttcacagccatgagtgggttagtgtatatgagatgttatctgagctaattaaactaagatagaagacacccactgtaacactgctctcgatgtttctctcccttatatgtacttcatgctgggagaaaggttgaaggggccaaaaaatgcaaacaggattattgctaaaaaaaaaaaaaaaragagagaaactgaggcaagagaatgaaagtgatagctgcaaggtgacagagccaccaaaacattttta

SEQ ID NO: 339029 - DNA, 535 bp, Homo sapiens
gagttggcttgggatggaccctggagaccccacatagacagaacagagaggaggagagtagcatccccagaaactgcaggatgtggtggaggcagacccaggttctttgggagttgaagcttctacagttgacctgggggcacgtgtctaagaaaataaacacaaaattatgtacacggaattaccgaatatttaggttgaaaaaaaaatcaacaactaattacmaactgtcaaaagctggaaaattctataagcatcataaaatatataaaatataacacaatgtctttattaagtaacagcttgaaccacctatgtaatacctttttctaaattggctttgaacagtcatggccatgattttataactgctttattcatgaaataactgaaagatagctcattttttatgttagcatagtcaacaaaaatttattttttattattgatagtttagaaaagttcctttctgctttataactccatatttttaatgttacatatattttatgattatcctcagatttgagaaaaa

SEQ ID NO: 339030 - DNA, 573 bp, Homo sapiens
tgctgaacagagggtttgtggctggtgtctgattggttaggccgtcatttcaactggttgatgcccatgctgtactgagagttgaatattttgtaaatcaccactgcatgtgacagcaactgaaaaaccattcaaatctctcaacacacacactttctttgaagtcagagactactggaaatgttttgctctctactggaaagaaagaattttgagagtcaggcagcccatcacttgctctggggcaacaccaaacttcctcctttaagacttgagagggttgacttttctcccctctctgttttcctatctgtaaattgggattcatcactcctactccctgtgcgcctcacgtaattttgcaaacacgatttcaaagctgggggaagggaagattttaatgtgcttgtcctgaaatagtttgacgaggctgctgcttccagagctgaaagtcaggatgtcaaggttgagtctgtgggtagtcatttgtcatcagaatgaaggcaggatcacagggtgggtgctacaattaaagatgctgcagmgcatgggcaaaccagcttcctgtcacca

SEQ ID NO: 339031 - DNA, 643 bp, Homo sapiens
attttgctctctcacacatacacatacaattgagcatccactgtgtatagctttctgaatctagatgggacagcactgtgatgagagctcaggtgcctgtggctagattatctgggtgtgagtcagggctccatcactttcccattgcttgagcctagacaagttaatttaaacactctgtgcctcaattttctcacctataaaataaagataatagtatctacctctaagggttgtattgagaattaaaggagctaatacaagtaaaagtccataaaaatgtttggccccttattagcactcaataaaggtcaactatttttattattctgattttttttcacttaaaattatattgtggtcacttcattaggttactaaatgttgtcttagttcacttgtgtgctactataacaaaatacctggggcttggtaatttataaacaacagaaayttatttctcagagttctggagcctgggaagcctaagatcaaggggctgacaagttacgttgtctggtgagggttattctctgcttccaagatggtgtcctgttgctgctgcttccagagggcaggaatgttgtgtcctcacatggcagaaagcagataggcaagtgagtcaaatgctgggggaagccac

SEQ ID NO: 339032 - DNA, 609 bp, Homo sapiens
ttcccactgcatatgcgtgggaatggttgttattctgacattttgttttcttggaacataatgcaaactctacattctctacctagagcatttctttgtttcagccaacatttcccatattgcttcggctgatgactctcttgttactcttgttcagcagtagtgctatacaggtctaygcagttcctcctaccagggtgaccctcttcacatcagcttcttaaagttccagagatgtcatatcctctgggattatttaaaaaatgataaattagtaaattttattttattttcaaatattttctcttgtttcttataagaaatctactttagagggagatatatcttcaatcttctctccttcaagtttttgctctgctgtcgtattctcagtgagacttaccttgaccactcaagttagcattgcaatccctcttcctacttgtactccagattcccctgatgctattttttcttttccatacatctatcagtttctaaaacattgtatatttagtagtttgtttaacctatttttttatggttgtctttctttcacctgtaccctagctccactagaatataaattcccagaaggagaatagagat

SEQ ID NO: 339033 - DNA, 609 bp, Homo sapiens
ttcccactgcatatgcgtgggaatggttgttattctgacattttgttttcttggaacataatgcaaactctacattctctacctagagcatttctttgtttcagccaacatttcccatattgcttcggctgatgactctcttgttactcttgttcagcagtagtgctatacaggtctatgcagttcctcctaccagggtgaccctcttcacatcagcttcttaaagttccagagatgtcatatcctctgggattatttaaaaaatgataaattagtaaattttattttattttcaaatattttctcttgtttcttataagaaatctactttagagggagatatatcttcaatcttctctccttcaagtttttgctctgctgtcrtattctcagtgagacttaccttgaccactcaagttagcattgcaatccctcttcctacttgtactccagattcccctgatgctattttttcttttccatacatctatcagtttctaaaacattgtatatttagtagtttgtttaacctatttttttatggttgtctttctttcacctgtaccctagctccactagaatataaattcccagaaggagaatagagat

SEQ ID NO: 339034 - DNA, 573 bp, Homo sapiens
actaaattcttcagtgtgagtaaatatccagggatttattttctgtttgcatatatttacagaaacagatgtgttcttctctaatattcattacaggcatgtagaatggaaatatggtagatccctttggagactgatgtggatccttggcaagctcyttcaagttctgatagacataagaaaggaaaagtgcacattgactataaattggtgtcatccttccaaagattctgagcctcacatgagggatgagagatggaatgataagtaactggaatgtcatctctctcctgcacaactgcccctgtgtgtttgctctgggtgcctagagtttgcttaagtagtaaaccttagggacttccagtgccatcggtggtgtcaaaattctagcagctcacccaaagagggttttactcactttctcttattaagtaataaatatagagaagtttgttgttaactgaaatggaaagatagggcagctcttactttctggaaacaggaatggactattcataagttagaatgattcttcccatcttcctcagcctactcttgctctttttggaagca

SEQ ID NO: 339035 - DNA, 480 bp, Homo sapiens
gttcagaagctttaagaaaatgaagtggcaagttgggctaaatttgaataaaacaaaaaactattctacaaaatgtgacctctcaagttccattttcttgagctttaattgtagtkatttgtagttattgataatagcacagtactaggtaagtgcatctgtgatttgaaattcttgcctcctgaaaccactttttttaaagcatttccatgtagctcactggagtcctctgcaatttgccagagcattgcagtggaatcaccctcaggcatgggtactttctctggtcacttttgggacaatcacagctcctcaggcagctaggacagttttgtgttctgctcacatgcttgtgttttgacctttgaagtctttactccacaatctaaccagcaattgcttaaaggaaagcagagtcattgagatgctctctccacaaattcttagtgccttcagctatgcccagttccctagactgcc

SEQ ID NO: 339036 - DNA, 480 bp, Homo sapiens
gttcagaagctttaagaaaatgaagtggcaagttgggctaaatttgaataaaacaaaaaactattctacaaaatgtgacctctcaagttccattttcttgagctttaattgtagttatttgtagttattgataatagcacagtactaggtaagtgcatctgtgatttgaaattcttgcctcctgaaaccactttttttaaagcatttccatgtagctcactggagtcctctgcaatttgccagagcattgcagtggaatcaccctcaggcatgggtactttctctggtcacttttgggacaatcacagctcctcakgcagctaggacagttttgtgttctgctcacatgcttgtgttttgacctttgaagtctttactccacaatctaaccagcaattgcttaaaggaaagcagagtcattgagatgctctctccacaaattcttagtgccttcagctatgcccagttccctagactgcc

SEQ ID NO: 339037 - DNA, 480 bp, Homo sapiens
gttcagaagctttaagaaaatgaagtggcaagttgggctaaatttgaataaaacaaaaaactattctacaaaatgtgacctctcaagttccattttcttgagctttaattgtagttatttgtagttattgataatagcacagtactaggtaagtgcatctgtgatttgaaattcttgcctcctgaaaccactttttttaaagcatttccatgtagctcactggagtcctctgcaatttgccagagcattgcagtggaatcaccctcaggcatgggtactttctctggtcacttttgggacaatcacagctcctcaggcagctaggacagttttgtgttctgctcacatgcttgtgttttgacctttgaagtctttactccacaatctaaccagcaattgcttaaaggaaagcrgagtcattgagatgctctctccacaaattcttagtgccttcagctatgcccagttccctagactgcc

SEQ ID NO: 339038 - DNA, 597 bp, Homo sapiens
tgttttaattttttaaaaaaatttcattagtgtcttgcaagcaagaacgcagtcaattttctgaaacaatttttaataatacctttgaacaataaattgtgggctgactttcctttaaaaagtgacatttattattcactaattaattcagtgatcttgaaaagagccagtaggttttataaaactaatgatatgaccagcttgtgcttttttgtttctggagcacattaattttacttcagtatgcatctstgctccatttgcaacacttctaatactgaaacaagcacaatgattatgttcactgtagtcaaagttaggtggtatcgtccatgcatctcaaactggaaattcagaatttgttttttcttcttaaaaagcttacataaaatgtcttgacaaataagcaaagatgactttgccatggtaacattagaaactcaacagttacaccatctttcctggtataattggaagtagtggacatactttgttcagtgcactacatttagcagttgctacccaggaggaagcactaccatgaaaggcagatgcaacctggggattaatgacagcacaggagttgccaataaactg

SEQ ID NO: 339039 - DNA, 481 bp, Homo sapiens
cacatgtgccctagaacttaaagtataataaaaaaaaagaaaaactcttcaaagcaatgtcacagaaatgacagtagtcttaacaacaaaagtcagaagacgaggaaatgttttcagtgtactgtaagaaaacaaccgccaactaaaattttctacaaagttttctacagaastatcaagaatgaaggtaaaataatgtcattttcagacaaaaagagattttgacacctatggaaccctactaaaagaaattctacaagatacacccaagcagaagaaaaacacactctaatagaaagtctaaaatgcaaaaagaaaggaaaggcttaggaagtgttaaatatttgggtaaatttaagcaaacattgtgctaaacaatagtattaatgtcttgagggattaaaacgataaaacacgtatcagtagcatataaattggaacataagtaaatgaaaggaatccattctaagtacttgtaatg

SEQ ID NO: 339040 - DNA, 528 bp, Homo sapiens
attcagcgtcttcaagcatatagacggcatttaacatcgtgggattgaatgagatcacccagagagatacagagggaagaaaaagacaagatctgcaaccagctaatgtcagaggctcaagtgccagcttgagcctytattataggttctcttcattttggcatgagggtatctgttctgatacctccttttcacactgtttcagcttgaagagaaatttttgaaagtccactgaaagttcatttgcaattatttcaggtagtctctctctttgtaaacagaaactctcacactcaatctctgcgacaattaccacttcctcaacccaagatgcttgtttagtgccagaaccctagactgcttgaaaggaacacgttgcagtttactaaatgctttcatatctaccatctcatttgatcttcataaccatcccatggcataagcatggtactggcaatgataacccttaatgaggaaggtctaatgcttagagagactaaatagcttgcctaaggctctattattaag

SEQ ID NO: 339041 - DNA, 564 bp, Homo sapiens
taatgaggaaggtctaatgcttagagagactaaatagcttgcctaaggctctattattaagcagcaggactcaaacccatatcttgtgataccaattcctatgatctttctgcaatgccatgcctgctcaggacacctagtatgctgcattatagtgtttgcaaattccattcacttcatcaaaaaaagaaaaagtagaaatgcaaatatttaactttctcctactagccaaaatgtctaaaggttgatactgttgaatctcagtacatcatggattataaataagagccgacgaaaggagttagacaggaactgagcagccttccaacacttgctgaaggagagctacccagtggggcttcattattttgctaaacatgaattctcaaagcatgaaacacattttcatatgtaaatwcaaaactatattcaaaagtcaactgaaaatcaactgtgcatttttaaaccacaattgtatatttgtgttattacaaataattgataatttatattcaaagaaaagcatgggggtaaaaaatagcaacatataaaacccagacccca

SEQ ID NO: 339042 - DNA, 504 bp, Homo sapiens
tcaacctaaatgctcatcaatgacagactggataaagaaaatgtggtgtatacacaccatggaatattatgtatccataaaaaataattagatcatgtgttttgatggagctagaggctatcattcttagcacactaaggcaggaacacaaaatcaaatactgcatgttctcacttataagtgggagctaaatgatgagaacttatgaacacaaagaaggaaacaacagacactggggtctgcttgagtggggagggtgggaagagggagaggagcagaaaagasaactactggatactgagattaatacctgggtgatataataatatgtacaacaaacccccatgacatgtagttatctatgtaacaaactttcacaggtacgcccaaacctaaaataaatttttttaaaaaaagaaagaaaataactaccaagctagagagaacatgtatgcagtcaaaaatgggagaaaaatgaaaacattttctgacaaacaaaaactg

SEQ ID NO: 339043 - DNA, 504 bp, Homo sapiens
tcaacctaaatgctcatcaatgacagactggataaagaaaatgtggtgtatacacaccatggaatattatgtatccataaaaaataattagatcatgtgttttgatggagctagaggctatcattcttagcacactaaggcaggaacacaaaatcaaatactgcatgttctcacttataagtgggagctaaatgatgagaacttatgaacacaaagaaggaaacaacagacactggggtctgcttgagtggggagggtgggaagagggagaggagcagaaaagagaactaytggatactgagattaatacctgggtgatataataatatgtacaacaaacccccatgacatgtagttatctatgtaacaaactttcacaggtacgcccaaacctaaaataaatttttttaaaaaaagaaagaaaataactaccaagctagagagaacatgtatgcagtcaaaaatgggagaaaaatgaaaacattttctgacaaacaaaaactg

SEQ ID NO: 339044 - DNA, 545 bp, Homo sapiens
ggcactctctgtactagtgtgttagggttgccacgacaaaataccctacctttgttgacttaaacaacataaatttattttctaacaattctggaggttagaagcctcagatcagggtgccagcaggattggtttctaatgagggctctctccttgttttgcagatggctaccttcttactgtgtcctcacatggtcttctctgtttatgcacattcctaatgtctctttctcttcttatgaggatatcagtcctattacattagggccccacccttatgacctcatttaaccttaattacttccttagaggccccatttccaagtrtcatcacattgaggtttagagcttcagcatatgaatttgggggacataattaagtccataatacccccaaatgtgtttccctaccctttaggtgatgaacagccctgcactcatccttctcacacagcttaacaactgatgaagactttcaatatatctcatttcaggaatgaaggaaaaattacatttctttgaagttttctggagatttttgcaat

SEQ ID NO: 339045 - DNA, 442 bp, Homo sapiens
ctggcctcccaaagcttcagtggatatcttaatagggcatcagaggggagttatggtttggcaaatgaatgctacaaatcatgtctgaatgcattccagctgctatgagttcctctttctgcaaaatttgaatgcagttattcaaattttgtggaattattactgcaggtctttttasctactacaagagtttggttttaacatttgtaacttgcaagtcagtactctgagagatcattagaaaaagagggaattggtctttgggaataggaaagaaaatataaagcaagaggcagagaggggcagagttctttcatgaagacttgggagagatgagaaaactaagacacctctggccaagaatggccttcgcctcactgcctgatgggaagctggagctgggatgcaaaataagagccagctctgagtaggtgcttgtcat

SEQ ID NO: 339046 - DNA, 522 bp, Homo sapiens
tagatacaggggtcttaccacgttgcccaggtggggtctcgaattcttgggctcaagaaatcctcccagctcggcctcccaaagtgctaggattacaggmgtgagccaccacacctggttaaaaaaataatatattaaaagactaaaaaaaatacctatattagaacataattgatctccacataaggcgtggctttctaagcacaacaacaataaaagaaatcacaaaagaaatatgcagaaattctacatgtgattccaccaacgttaagcaatgtctctgcagggttgatatgtccagttgtatagattctacaatgtacaaccctagggggcaatagtacatttgtgtaaaatggtaacaaataaaattacagaggggattaaacaaattaaacaaaaaaattaaacaaagcagttaatagcatgctatttaaggagttatttaaaaaggtatagttttttgttttgaaacaaaaattagataccatttttcaactgtccaagtggcaaaggtaaaat

SEQ ID NO: 339047 - DNA, 522 bp, Homo sapiens
tagatacaggggtcttaccacgttgcccaggtggggtctcgaattcttgggctcaagaaatcctcccagctcggcctcccaaagtgctaggattacaggcgtgagccaccacacctggttaaaaaaataatatattaaaagactaaaaaaaatacctatattagaacataattgatctccasataaggcgtggctttctaagcacaacaacaataaaagaaatcacaaaagaaatatgcagaaattctacatgtgattccaccaacgttaagcaatgtctctgcagggttgatatgtccagttgtatagattctacaatgtacaaccctagggggcaatagtacatttgtgtaaaatggtaacaaataaaattacagaggggattaaacaaattaaacaaaaaaattaaacaaagcagttaatagcatgctatttaaggagttatttaaaaaggtatagttttttgttttgaaacaaaaattagataccatttttcaactgtccaagtggcaaaggtaaaat

SEQ ID NO: 339048 - DNA, 522 bp, Homo sapiens
tagatacaggggtcttaccacgttgcccaggtggggtctcgaattcttgggctcaagaaatcctcccagctcggcctcccaaagtgctaggattacaggcgtgagccaccacacctggttaaaaaaataatatattaaaagactaaaaaaaatacctatattagaacataattgatctccacataaggcgtggctttctaagcacaacaacaataaaagaaatcacaaaagaaatatgcagaaattctacatgtgattcyaccaacgttaagcaatgtctctgcagggttgatatgtccagttgtatagattctacaatgtacaaccctagggggcaatagtacatttgtgtaaaatggtaacaaataaaattacagaggggattaaacaaattaaacaaaaaaattaaacaaagcagttaatagcatgctatttaaggagttatttaaaaaggtatagttttttgttttgaaacaaaaattagataccatttttcaactgtccaagtggcaaaggtaaaat

SEQ ID NO: 339049 - DNA, 483 bp, Homo sapiens
gcaaaaacatggtagctgctgtgattacaaatattattatttatgtaaatatttctttaattaaacaatgcatgtctttagagtagggacttttactttttccctcctcagggtcctaatgccaggcacatggtggatattattgaatccatacagattgatcaaccagagaaggccactgcacagtctgttgcatagagaaggagaaatccatgctactaataatgtgaggggtcttaaatgttgataggttggggtaagccactgagtctagtcctgacacaggtacaargacacttaggtgtagagtcagtggccttgtgacacctcttgaaatgaggaagagaaaaatgcatttgaacacatctgaaaaacatttactttcaatgtgcacacaggaatcaaatcatatgaaaaagttgaaacttttgagtcatagttgaaatttgaacttgaatctccatttgatttaattcagcaaat

SEQ ID NO: 339050 - DNA, 559 bp, Homo sapiens
ggaactctgtggccactatactgtatagaagaccaagatcaaagactacctgaagctctccatctcttgcaggtaagctaagctaagctcaactaacagctgactctacacctaaatgcaatcgaatgagtgaacccaccaaaagtcaggaaagaaccaggcactcaagtcacataatcatgagaaataatgarccactgttattttaagccactaagttttgatgtagcttgctattcaaaagtacacaacagacccaaatgggtacctttgttgtaacaaagacttaaaacatatgacattggttttagttctgtgttgcaaatgaaggctgaaaggcagtgaaaagactattagtaaaagctggaagagcagtacggaaatctctatgggctggggaaatctctaaggctggggaaaggcaactcgtgtcatgaagtggtggtacatttgcaagagtgttttctgagataatgtagagcatggcaagtgtacctaataaacttgtggatcggcagaaagtggaaagcattatttggcacatttttctatgtatgat

SEQ ID NO: 339051 - DNA, 635 bp, Homo sapiens
ggtgagatgaactataaataggaaattcttcagtttgttagtatactttagaggaggggtataaggccaggacttgttgggttggaaaataaaactctttcatatagtcagtttctcctgatagcaaacaattatcgatgtatgagatggtcctaacacaaacatcaaatcacagctatggttgctggactttgttaaaacttcagaaagcttttagatggtgcccagtagatgctatcagctagataaaagaacatctgagaaactcaaggtgttgccacacagcagctatccacctaaaatacagagaagtctatctcaaaacaagaatagatgtggcttatggtgcatggcatgaacaatggaagactcataggaaactcacaatgtttttaagagagtcacaatgataaaaacactaatagcttggaacaaaatatactgctagtccaaaatgcaaagagccttctgggccttcaatgttctatataacactactcagctgcaaacataggttatttctcttattgaggtaaaattgacaaagttgtacatattaaaggtgtacasatgataatttgatatacgtatacattgtgaaatgattaccacaatcaagttacctaacatgttca

SEQ ID NO: 339052 - DNA, 622 bp, Homo sapiens
ggaggggccaaatgaaaggggctatagtgcagattgtgactttttatttaacagactagctaactttaaggggagaaggaggagggaaagtagcttgcaacaaatgttcaagctcttctaaaatgtcaatgctatgratattgtattttggatcaaaggtatgtctcaacttgccatttagctcctcctttagaatattgaatatattaacctcatggttcagttcaacacacttcaattaaacgtgtattatgttctaaactgtgggcttgatactactacttcataaaaactggcctatgaaaagatttcatgattaagacctcaaaagcacaggcaacaaaagcaaaagtagtcaaagtagttgattataccaaactaaaatacttctgcacagcaaaaggaaacactcaacagagtgaatatacaacccacagagtgggagaaaatatttgtaaactacttatacagcaggggattaatatccacaatatacaaggaactcaaacatctcaacagcaaaaaaccccaatttaaaaaatggacaaatgatatgaatcaatgtttctcaaaagaagacatgcgcatggctaacaaatatatgaaaaaaaacttgacatat

SEQ ID NO: 339053 - DNA, 622 bp, Homo sapiens
ggaggggccaaatgaaaggggctatagtgcagattgtgactttttatttaacagactagctaactttaaggggagaaggaggagggaaagtagcttgcaacaaatgttcaagctcttctaaaatgtcaatgctatggatattgtattttggatcaaaggtatgtctcaacttgccatttagctcctcctttagaatattgaatatattaacctcatggttcagttcaacacacttcaattaaacgtgtattatgttctaaactgtgggcttgatactactacttcataaaaactggcctatgaaaagatttcatgattaagacctcaaaagcacaggcaacaaaagcaaaagtagtcaaagtagttgattataccaaactaaaatacttctgcacagcaaaaggaaacamtcaacagagtgaatatacaacccacagagtgggagaaaatatttgtaaactacttatacagcaggggattaatatccacaatatacaaggaactcaaacatctcaacagcaaaaaaccccaatttaaaaaatggacaaatgatatgaatcaatgtttctcaaaagaagacatgcgcatggctaacaaatatatgaaaaaaaacttgacatat

SEQ ID NO: 339054 - DNA, 622 bp, Homo sapiens
ggaggggccaaatgaaaggggctatagtgcagattgtgactttttatttaacagactagctaactttaaggggagaaggaggagggaaagtagcttgcaacaaatgttcaagctcttctaaaatgtcaatgctatggatattgtattttggatcaaaggtatgtctcaacttgccatttagctcctcctttagaatattgaatatattaacctcatggttcagttcaacacacttcaattaaacgtgtattatgttctaaactgtgggcttgatactactacttcataaaaactggcctatgaaaagatttcatgattaagacctcaaaagcacaggcaacaaaagcaaaagtagtcaaagtagttgattataccaaactaaaatacttctgcacagcaaaaggaaacactcaacagagtgaatakacaacccacagagtgggagaaaatatttgtaaactacttatacagcaggggattaatatccacaatatacaaggaactcaaacatctcaacagcaaaaaaccccaatttaaaaaatggacaaatgatatgaatcaatgtttctcaaaagaagacatgcgcatggctaacaaatatatgaaaaaaaacttgacatat

SEQ ID NO: 339055 - DNA, 596 bp, Homo sapiens
gagccctgtttgtacaacttataagatttagctgaattctaaccttaaatttttacatacatattgatagtagaaattaattgtacaatctttgaaatcagtaccaatattaagtcaataagccattaaaaatgactgaaatcagtatctgattcatgaggaacatttgcttgtttagcttttcttttacccattatgattccttactatgtgaaggaatctatatttagtaaacaaaacaaaacaagcatcctccygaaacaaaaacaattctaccagggccttcctaatgcctgccaactctggcagcccaggggaacttgcagtcaagactacaggagcagaaggaaaatggaaaaaggagagaagacttgcttacatctctaccctcagggccttagagtatccccacctacccttttccaaagattgtgcttctaaatttctaaattacctcttcttgttaagagatttttttttcctgagattaattagtagccaggtataaatgacagaaataaatgactttttttggtgggcatttacttttcagcagggatttgttgagtccagttaaatatttagaggatggaatt

SEQ ID NO: 339056 - DNA, 593 bp, Homo sapiens
tttgaaatcagtaccaatattaagtcaataagccattaaaaatgactgaaatcagtatctgattcatgaggaacatttgcttgtttagcttttcttttacccattatgattccttactatgtgaaggaatctatatttagtaaacaaaacaaaacaagcatcctcctgaaacaaaaacaattctaccagggccttcctaatgcctgccaactctggcagcccaggggaacttgcagtcaagactrcaggagcagaaggaaaatggaaaaaggagagaagacttgcttacatctctaccctcagggccttagagtatccccacctacccttttccaaagattgtgcttctaaatttctaaattacctcttcttgttaagagatttttttttcctgagattaattagtagccaggtataaatgacagaaataaatgactttttttggtgggcatttacttttcagcagggatttgttgagtccagttaaatatttagaggatggaattgacaaacaccctttacttgacaaaactttatccaggcttttctgagtctttttcttgactaggcctcaaccttgcccctgttctagc

SEQ ID NO: 339057 - DNA, 538 bp, Homo sapiens
acatatgcacatcagcgttagctttcgccctggcctatgttgggtgtattggttatctattgctgcgtaaaaaattacctagaagtttgccagcctaaaacaataaacgtttattttctcatggtttctggaggtcaggaatttgggctgggagtctctggcccggagctctcatgagactgcaagttcagctgcttgccagggctgyaatcacctcccagttcacatgggggaggatctacttccaagctcactcattggctatcatccagatgttatcaggtcttcgccatgtgggcctctccacggcgcagctcacagcatagcagctggcttccctcagattaacagaatgagagagagtgcccgaggaggaagcaccagtctttttagaacctcattttggaagtaatattccatcaatttgtcatattctatttgtcagagcaagttactacgtccggcccatattccagggaaggggattacacaaggaagggcatgaataccaacagatgggatcactgcggccgtttag

SEQ ID NO: 339058 - DNA, 538 bp, Homo sapiens
acatatgcacatcagcgttagctttcgccctggcctatgttgggtgtattggttatctattgctgcgtaaaaaattacctagaagtttgccagcctaaaacaataaacgtttattttctcatggtttctggaggtcaggaatttgggctgggagtctctggcccggagctctcatgagactgcaagttcagctgcttgccagggctgtaatcacctcccagttcacatgggggaggatctacttccaagctcactcattggctatcatccagatgttatcaggtcttcgccatgtgggcctctccacggcgcagctcacagcatagcagctgrcttccctcagattaacagaatgagagagagtgcccgaggaggaagcaccagtctttttagaacctcattttggaagtaatattccatcaatttgtcatattctatttgtcagagcaagttactacgtccggcccatattccagggaaggggattacacaaggaagggcatgaataccaacagatgggatcactgcggccgtttag

SEQ ID NO: 339059 - DNA, 359 bp, Homo sapiens
tcacacgacttggtgacacgtccttctcccccctttttgtttacaccgctttatttgtccggacatcccggcaggtgtggggctgcggctggcacacgaggctcccgcctcgcctcgcctcgcccctcccgccgctgtttggcacgcgacgctcccccctactccctgaccacgtcgctggctttcttttctccccacccctcctgctccctcttcgcggggggaagaggctcaatttgtagcctattatcctatacgaaaatgtscattgaaaagtatgaatagtttcattgggctaaattttaataatgccagagggtgggggaggagagactggcgggcgtgtgtgtgtgtttgtg

SEQ ID NO: 339060 - DNA, 559 bp, Homo sapiens
actgggagtgtcattcaaatgcacgttctgattcagcgaggtcaggggagaggcctatgattctgcattcctaacgagctcctgggtggtgagattctgctgttctgaggaccacgtttccagtagcaaagaattagagcacttagtttttacttaaaacaaacccaacttctggaggcaggagattctagtggtgtgtgtgtawcgtttccaacacttcttccaaagggtagagaaggtgaaagcgcatgaatcatttgacaggttgtggtgctgactgtggcttccctgctgctacgtccactgcctgttactaaacctaaaaagagcgctggaaagcagagaactaagctgcttcagagacaagaacgaaggggctaaaaacgaaagccctgggaaatcacctcgcattggatacaagtttctcatgtctctgggttcctttcaggtctggggttcagatagcagcagacatcttcaatgtgtgtccttgtggttagagagattgaagtgctccccaggacccctctcactgccgcctgactgcaccaacaagcat

SEQ ID NO: 339061 - DNA, 559 bp, Homo sapiens
actgggagtgtcattcaaatgcacgttctgattcagcgaggtcaggggagaggcctatgattctgcattcctaacgagctcctgggtggtgagattctgctgttctgaggaccacgtttccagtagcaaagaattagagcacttagtttttacttaaaacaaacccaacttctggaggcaggagattctagtggtgtgtgtgtatcgtttccaacacttcttccaaagggtagagaaggtgaaagcrcatgaatcatttgacaggttgtggtgctgactgtggcttccctgctgctacgtccactgcctgttactaaacctaaaaagagcgctggaaagcagagaactaagctgcttcagagacaagaacgaaggggctaaaaacgaaagccctgggaaatcacctcgcattggatacaagtttctcatgtctctgggttcctttcaggtctggggttcagatagcagcagacatcttcaatgtgtgtccttgtggttagagagattgaagtgctccccaggacccctctcactgccgcctgactgcaccaacaagcat

SEQ ID NO: 339062 - DNA, 431 bp, Homo sapiens
agtataggatccgaggcagcaagtgtgagcgaggcccgtcctgggggaggtggcctctggccgcggggccaggttgccctcagaggcgcaggcggccaagagagttcccagccgccgccgcccccctccttccccttgggcccgtccagcaaatttcctccctcgtttctgttcgtgccttccctccctcctcctccccccgatattttcgctttctaaaaccataaaaaagagatcaacttcccaaacttcacrgggcccttttcagtgacaaatattgatgcccaaagtgtctgcgctctcccgcccccaaacgttaagaaaagacgccagcgaaagggagacataaaaagttaacaatgctgtgaaaatatgtttgcagaaaatagacaatcgttggattaaacgtattcaagtatgaaataatgcct

SEQ ID NO: 339063 - DNA, 501 bp, Homo sapiens
ttttttgtttttgaagaatatgtcatttagtaaaaattacaaagtctttagtgaagaggtctaaagtcattaatacataagcacttcaattgtaagcctttccattgtagttacctgtrggagtaaataaaggagctttattacatgtaaggccccatcttttctacttaagtcttttagacttttagattccttggaaatttcacctactaaaatcaaagtgtgattgctaaatcagtattaagatagaaagaatccaactgtgggtttttttttccagatgatttattttttatttcttcttggattctatacacaaatactatgctttgatattttgagacttaaataacagaaaagggggatttctataatgggattcctactacttattttatatctatgaaagctactttgcttgtttatttgctatatacagacagaaaaatgtatggaactaattttaaaaaccccatatattttctgttatggaatttaaag

SEQ ID NO: 339064 - DNA, 542 bp, Homo sapiens
cactccagcttgggcgacagagcaaaaccctgtctccaaaacaataacarcaaaattatctctctacacaaccagaataatgaaatgggcatttataattacccaatcaatttgatccctgtatgaagcctattggaatgatttaaacccgtgaaataatcttccagggccgcagtgctgagatgggtctgtctgcactgaccacattaaccgatttcacacgcgggcatgttgtcctttgtgttgcgttgtcaccacacagaagcctgtctgtggatggctctcctacccttgcaagaagtggaagccaactatttcagctcctttcaaaccacagatatgattcttcagtgaactgcagtcttgccctttattaaaatgtggtaatccacatttttaacactttataattgtaagggtctctcacttactttattacgtgtcatgtcatactcacaagttactccatgaggcaagttatctttgttttacacagatgtgaactgaagtccagagaaggtcatacagctagtaggcacagg

SEQ ID NO: 339065 - DNA, 542 bp, Homo sapiens
cactccagcttgggcgacagagcaaaaccctgtctccaaaacaataacaacaaaattatctctctacacaaccagaataatgaaatgggcatttataattacccaatcaatttgatccctgtatgaagcctattggaatgatttaaacccgtgaaataatcttccagggccgcagtgctgagatgggtctgtctgcactgaccacattaaccgatttcacacgcgggcatgttgtcctttgtgttgcgttgtcaccacacagaagcctgtctgtggatggctctcctacccttgcaagaagtggaagccaactatttcagctcctttcaaaccacagatatgattcttcagtgaactgcagtcttgccctttattaaaatgtggtaatccacatttttaacactttataattgtaagggtctctcacttactttattacgtgtcatgtcataytcacaagttactccatgaggcaagttatctttgttttacacagatgtgaactgaagtccagagaaggtcatacagctagtaggcacagg

SEQ ID NO: 339066 - DNA, 570 bp, Homo sapiens
gctcttgtaacatgggcctggtggtgacaaaatctctcagcatttgcttgtctgtaaaggatttagtttcaccttcacttatgaagcttagttttgctggatataaaattcttcattaagttgatcttcaatctctgatatcttttcttctgcttgatcgattcagctattgatacttctgtatgcttcatgaagttcttgtgctgtgtttttcagctcyatcaggttatttatgttcttctataaatgggttactctagttagcaattcttctaaactttttttaaggtgcttagcttccttgcattgggttagaacatgctcctttagcttggaggagtttgttattacccaccttctgaagcctacttctttcaatttgtcaaactcattctgcatccagttttgttcccatgctggcaaggagttgtgatcctttggaggagaagaggctttctggcttttggaattttcagatgttttgctctgttttttcctcatcctcatggatatatctacctttggtctttgatgttggtgacctacggatggggttttggtgtggacatc

SEQ ID NO: 339067 - DNA, 580 bp, Homo sapiens
acatggacacagagtatagatcatcagtagagactcagaagggtgggagggtgagaaggggttgagggatgagaaattacttagtggttacaacattcattattcaggtgatggttacacaaaagmtagacctcaccactatgcaatatatccacataacaaactgcccttgtacctcttatgtttatacgaataattaaaaggaccatccattctaagcagattcccaatttgaaaccataattagttaccactgtaatttgtttgttttcttcattggaggtaacaagattgtacattatttttcatattccttaattgtttacagtccatgtatccccactcccctacccacaagaatataagattcatggggatatatatatatatatacatatatatatatacatatatatacacacacacacacacacatatatatataatatatatgtttttcacaaaattatgtcaagtactgagtatagtgtatgatacattatagacatttaataaatatttttatataaacaagtaacattaatttgctatttaatttaattctgtataaattcacagt

SEQ ID NO: 339068 - DNA, 580 bp, Homo sapiens
acatggacacagagtatagatcatcagtagagactcagaagggtgggagggtgagaaggggttgagggatgagaaattacttagtggttacaacattcattattcaggtgatggttacacaaaagatagacctcaccactatgcaatatatccacataacaaactgccctygtacctcttatgtttatacgaataattaaaaggaccatccattctaagcagattcccaatttgaaaccataattagttaccactgtaatttgtttgttttcttcattggaggtaacaagattgtacattatttttcatattccttaattgtttacagtccatgtatccccactcccctacccacaagaatataagattcatggggatatatatatatatatacatatatatatatacatatatatacacacacacacacacacatatatatataatatatatgtttttcacaaaattatgtcaagtactgagtatagtgtatgatacattatagacatttaataaatatttttatataaacaagtaacattaatttgctatttaatttaattctgtataaattcacagt

SEQ ID NO: 339069 - DNA, 567 bp, Homo sapiens
gctgctaacatcacacctagagaaaatggaatgtaaaataatgttacatttctctgtatttctacgggcrttgagtctctcagcaggagcatttgggacaataaaagagctattgccaaatgcaaagaaacttaataatccataaaaagttataaaatataaaatataaaccactgccttctgaatgataagtctgtgaacaatgtagttctttagtaaagaagaacgtttatatgcaaagcaggacaaggtgtagtttcagtggtgctgagctggcactatttgaagaaagggtacaaacaaccaacagcagcaacaacaaatacaagaaataaacaaaatcttgcaatataggctctgccaaaatctgcatatttatatttggggattattctttagtttatcccacctccattttgaaatccagtgttcttcagagatagaacacatttaatcaatcataacagctgaactcaatcacatttctgcagtttgttatcattattgatatattgtatctacctccactccaagcccacaaattagccagtatagggcaggaaagat

SEQ ID NO: 339070 - DNA, 567 bp, Homo sapiens
gctgctaacatcacacctagagaaaatggaatgtaaaataatgttacatttctctgtatttctacgggcattgagtctctcagcaggagcatttgggacaataaaagagctattgccaaatgcaaagaaacttaataatccataaaaagttataaaatataaaatataaaccactgccttctgaatgataagtctgtgaacaatgtagttctttagtaaagaagaacgtttatatgcaaagcaggacaaggtgtagtttcagtggtgctgagctggcactatttgaagaaagggtacaaacaaccaacagcagcaacaacaaatacaagaaataaacaaaatcttgcaatataggctctgccaaaatctgcatatttatatttggggattattctttagtttatcccacctccattttgaaatccagtgttcttcagagatagaacacatttaatcaatcataacagctgaactcaatcacatttctgcagtttgttatcattattgatatattgtatctacctccactcsaagcccacaaattagccagtatagggcaggaaagat

SEQ ID NO: 339071 - DNA, 540 bp, Homo sapiens
cccacaaattagccagtatagggcaggaaagatttgtttactcacccattattaggttcatggctgaggcactcataacaaaagagaaattaatagaagaagatgacttaatataagttatgtgacaatataagaatagtatagtacaacaatagttatattgtcacatatgacttatattaagtcatcttattttattaattcaaattacaatttaaattttaataagttcattaagcataaaataatattgaaagagtaagaaattgagcttttcccgacttattgtagtagctcatcattatttatgaagcccaaatttgtcattcatcctacactgaaaagaaccaccccatttctcccastttaaaccatatacaaatattaagtcaaaatgaatcacagatgtaaatgtaagacctaaaactatacaattttaaaaatggagtaaatatttgtgatttttattgagtcaacggtttcttagttacatcactaaaagcacagttgacaaaagaaaaatagacaaactggaggggt

SEQ ID NO: 339072 - DNA, 605 bp, Homo sapiens
tcaaagacccaagctggacaaactcacaaagataagacagaatcaatttaaaaaatgctgaaaacccaaaaggccagagtgccttttctcctccaaatgatcgcaacattttgccatcaagggtgcagaactggatggaggatcagatggatgaattaacagaagtaggcttcagaagatggtaacaaagaactatgctgagctgaaggagcatgttctaacccaatgcraagaagctaagaactttgataaaagatttgaagaactgctaactagaataactagagaggaatgtaaacgacctgatgaatctgaaaaacacagcatgagaacttcgtgaagcatatacaagtatcaacagacaaatcaaccaagtggaagaaaggatatcagagtttgaagaccaccttgctgaaataagacatgcagacaagaatagggaaaaaagaatgaaaaggaatgaacaaagccttcaagaaatatgggacttcataaaaggaccaaacctacaattgatcagagtaccagaaaaatatggggagaatgtaaacaagctaggaaatgtaaggatgtaagaatgtaaggaaatgtaagaatgcaaacaa

SEQ ID NO: 339073 - DNA, 561 bp, Homo sapiens
agtcccaaacagctggagctgcttgcttttattcagtacagacataatgccacaagcctggagcaaacacagtttgcaggtaattaacattattgtttcccctttcagggagcagtcacagtagaatcgctcctgtataggctgtctgacaacccctgttggagtttctcacatagtttggtgccacagggaacaggacccatgatcaaaggtcagyttgtggtcaacataagtaaacaagcctgtttatgataaattcccatacacttctgtgtatatactccttgccctgtgcctcagggtcagagaacagttgctttcagcttattctcccccaaagatatgcagaggtttgtgacttttcagaaggcgtgctcttttccatatagtttatcccaccactctgagtgatctcctacacataatcatcagattctccaaggtcaaaatgaaggaaaagctgtgaggtcagccagagacaaaggccagatcacctataaagggaagcccatcagactaacagcagacctttcagcagaaactccacaaaccacaagagat

SEQ ID NO: 339074 - DNA, 561 bp, Homo sapiens
agtcccaaacagctggagctgcttgcttttattcagtacagacataatgccacaagcctggagcaaacacagtttgcaggtaattaacattattgtttcccctttcagggagcagtcacagtagaatcgctcctgtataggctgtctgacaacccctgttggagtttctcacatagtttggtgccacagggaacaggacccatgatcaaaggtcagtttgtggtcaacataagtaaacaagcctgtttatgataaattcccatacacttctgtgtatatactccttgccctgtgcctcagggtcagagaacagttgctttcagcttattctcccccaaagmtatgcagaggtttgtgacttttcagaaggcgtgctcttttccatatagtttatcccaccactctgagtgatctcctacacataatcatcagattctccaaggtcaaaatgaaggaaaagctgtgaggtcagccagagacaaaggccagatcacctataaagggaagcccatcagactaacagcagacctttcagcagaaactccacaaaccacaagagat

SEQ ID NO: 339075 - DNA, 488 bp, Homo sapiens
ataatgatttcactttaatttctctatactgtaattaagaaaactaatacttttcaaatatttgttccccaataatggtaatagtgctactaataataagtgtaattatagtgtacttatgtgttggttattacactaagcctgatacacacatgtttgaagtttctatgatgtagactctataatgtcttcatcaaggaggattattgacatggaacaatatttaatgaaaagccgaattaataatcaatgacaaaggcattacagaattttgagctcaaagagaaataagggattttttgtgcctttataattatagtatttatagtgtttataattgtggcaaaacattcaaacagactcagaaataaataaataaaggctgtgataatcaacttcaggcaatagatttgtttytaagttaatctaggcatatagctcaatgatcacatatgagcttgtttctctctttccattgctgggcctgg

SEQ ID NO: 339076 - DNA, 488 bp, Homo sapiens
ataatgatttcactttaatttctctatactgtaattaagaaaactaatacttttcaaatatttgttccccaataatggtaatagtgctactaataataagtgtaattatagtgtacttatgtgttggttattacactaagcctgatacacacatgtttgaagtttctatgatgtagactctataatgtcttcatcaaggaggattattgacatggaacaatatttaatgaaaagccgaattaataatcaatgacaaaggcattacagaattttgagctcaaagagaaataagggattttttgtgcctttataattatagtatttatagtgtttataattgtggcaaaacattcaaacagactcagaaataaataaataaaggctgtgataatcaacttcaggcaatagatttgtttctaagttaatctaggcatatagctcaatgatcacatatgarcttgtttctctctttccattgctgggcctgg

SEQ ID NO: 339077 - DNA, 597 bp, Homo sapiens
ggtttattcagcatctcacaattgcatatcggtagaacaagaacttgaatacagaactttgcacccctgtcttstctacttcctcttattctacgtttattactgtgaagtattgatgctggcagacatggtcatgatgactgctgaggcaaatgtcacactaaggttagtttatagcatgagaggaaaagtcaattttcagagtcagaacaagttgagtttgaataacagctgtgccatgtactacttttttggcttcaaaaatgtggcttattccctctcaggtaatgtcagctgaaaactgatgtttcatgcttagcataattcgtagcatttggaaagtgcttagtaaatgttaaccactatttttgtttttgttaatactattgcctcagttttcttatgtacaagtaggataatctaaatatttgttgagaagttcaagtagtcttgtacagataaatcattgtcctggttaatttgcctatggcaaagatttagtaaattatttcttaagattgaaatttaaagaggccaagttttttgctgcttcttttcagtccttttaaaaatccctggcttgcctatccagcacag

SEQ ID NO: 339078 - DNA, 649 bp, Homo sapiens
gactcaactaatcacaacgatctcttccaaagacatatatattcatttctgtgagtcatctttctttccaggaatcactcattatttcgtttgttgggtttttcgcatgcttcttttttaatacttcagttcatattttcctttaactgctatgattttttagcagttatcatttgggggaatgagttagcaatggcatcagtttctcatcttggtagtaacratataaatatgcatttaatgaatgattctgatgatgatgagtcaaaaagaaaatggtttattccatattttctagttcttaatgaggattaataagtattcttggaatgaatgataagctgtaagtttctggtaaaatcacagcatcggacatggccactttccatatattttgattataaaagtgtagaaagtcaagaatatcatttaaaaatagattagaggattagagtagaaagtatgaatatatatcatgcacaagattagtatatgtcacttatctttttcttggttgacagtatatggaaacattaatatatttatacatgtatgtgtatattgtactggatgtgattaaaatgcatttctacaataatggttctagtaggcatggaagacttaagtagagagaagagaaagttgaggg

SEQ ID NO: 339079 - DNA, 587 bp, Homo sapiens
tgttcttttgctgattgtgtcaattttgcctttcttttacatgtaatacaaataatattttctaatttattctctcataagtttctttcaagactgaaatgaagtgtggtattaaaaaatgtacttgtaaataaaagatataagataccatatcatcaatcaaatagaagaataaatatgacattcaaaataaccttgttaacaaggtagttaattttaagaattataggatttcatgtgtaagtgaatttgagatcatttggccatgaataacatcttaatttggttatttatttgtgttgaagatagagggcagatggaagttaaatactgttaaaactcacttgcaagtagaattcaaacatagytccttaacttcttaacccatttcactttccaaaatgttcgactttactgataagatggctcataattatttatgtttgtttcataaccactaacatagtaatcatatggacaatatacatggtttattgattaaaacatcattattaatgacctttttattttgaacaatttgtcattattcttattatgtatcaatgattttagatcttcagaaacac

SEQ ID NO: 339080 - DNA, 587 bp, Homo sapiens
tgttcttttgctgattgtgtcaattttgcctttcttttacatgtaatacaaataatattttctaatttattctctcataagtttctttcaagactgaaatgaagtgtggtattaaaaaatgtacttgtaaataaaagatataagataccatatcatcaatcaaatagaagaataaatatgacattcaaaataaccttgttaacaaggtagttaattttaagaattataggatttcatgtgtaagtgaatttgagatcatttggccatgaataacatcttaatttggttatttatttgtgttgaagatagagggcagatggaagttaaatactgttaaaactcacttgcaagtagaattcaaacatagctccttaacttcttaacccatttcactttccaaaatgttcgactttactgakaagatggctcataattatttatgtttgtttcataaccactaacatagtaatcatatggacaatatacatggtttattgattaaaacatcattattaatgacctttttattttgaacaatttgtcattattcttattatgtatcaatgattttagatcttcagaaacac

SEQ ID NO: 339081 - DNA, 587 bp, Homo sapiens
tgttcttttgctgattgtgtcaattttgcctttcttttacatgtaatacaaataatattttctaatttattctctcataagtttctttcaagactgaaatgaagtgtggtattaaaaaatgtacttgtaaataaaagatataagataccatatcatcaatcaaatagaagaataaatatgacattcaaaataaccttgttaacaaggtagttaattttaagaattataggatttcatgtgtaagtgaatttgagatcatttggccatgaataacatcttaatttggttatttatttgtgttgaagatagagggcagatggaagttaaatactgttaaaactcacttgcaagtagaattcaaacatagctccttaacttcttaacccatttcactttccaaaatgttcgactttactgataagatggctcataattatttatgtttgtttcataaccactaacatrgtaatcatatggacaatatacatggtttattgattaaaacatcattattaatgacctttttattttgaacaatttgtcattattcttattatgtatcaatgattttagatcttcagaaacac

SEQ ID NO: 339082 - DNA, 434 bp, Homo sapiens
tgctctgtcccttttctagaacttgcatttctgagtactgaggtgatactcatgctattggcccagagaacacattttgagattcactggcttacaggargaaagtctctgtagaatttattagattagcaaacttgctgtgggttgagatctcttaaggctgtaggttgtctccaattctctacacgtgttagattataaatttctagatggtgaagaatgtgtgtgtgtgtgtgtatgtgtatgtgtgtgtgtatgtgtgtgtttgtgttttgaaactcggatgttttacccaatgctagacacctattagctgcttcaaatttacttatttatttattgtgttttctttttcttccctctggcactattgcaggcagtaatatgtcctttcaaatgtatctgtactatggaaagcactttgtagactcata

SEQ ID NO: 339083 - DNA, 434 bp, Homo sapiens
tgctctgtcccttttctagaacttgcatttctgagtactgaggtgatactcatgctattggcccagagaacacattttgagattcactggcttacaggaagaaagtctctgtagaatttattagattagcaaacttgctgtgggttgagatctcttaaggctgtaggktgtctccaattctctacacgtgttagattataaatttctagatggtgaagaatgtgtgtgtgtgtgtgtatgtgtatgtgtgtgtgtatgtgtgtgtttgtgttttgaaactcggatgttttacccaatgctagacacctattagctgcttcaaatttacttatttatttattgtgttttctttttcttccctctggcactattgcaggcagtaatatgtcctttcaaatgtatctgtactatggaaagcactttgtagactcata

SEQ ID NO: 339084 - DNA, 434 bp, Homo sapiens
tgctctgtcccttttctagaacttgcatttctgagtactgaggtgatactcatgctattggcccagagaacacattttgagattcactggcttacaggaagaaagtctctgtagaatttattagattagcaaacttgctgtgggttgagatctcttaaggctgtaggttgtctccaattctctacacgtgttagattataaatttctagatggtgaagaatgtgtgtgtgtgtgtgtatgtgtatgtgtgtgtgtatgtgtgtgtttgtgttttgaaactcggatgttttacccaatgctagacacctattagctgcttcaaatttacttatttatttattgtgttttctttttcttccctctggcactattgcaggcagtaatatgtcctttcaaatgtatctgtactmtggaaagcactttgtagactcata

SEQ ID NO: 339085 - DNA, 317 bp, Homo sapiens
ggtatttcacttgtcaaaagctctgaatgtagcctaggtggctgattcagtttggtctttttctctattattaactcaaaacaattctataaataattgaagctccttccatgtgggaagtctactttttatttccatgtagctaagaaaatatactaatgccatatatgtgtttctcatttttcccctagtttctctactgccaatcctttmtagctgggagaaaaatttatttccattgctttacctttttgcctttgattttataagaagaacattctttaaattgtaagaagatatcaattttaaaatgcatt

SEQ ID NO: 339086 - DNA, 568 bp, Homo sapiens
taggtcactaatggaaaatgaaggggtgctgaacatgggcatttagtgtctctttaacagaaaacttcttttacctggtgaatgtcctaatgcctatttgcctgatctgtgaccaggggtttcctcccatgggagctggttatactagcaggtgccctgttggctcttgtctgacctgtttatgcctgcctgacctcttycactgtgctgctgggaacgctatggaccttgtgttttcctggcatcctggggaaaacccagcctgcgaagcccctagtttttttgattttgttttgttttgttttgttttgttttcagatggaaggcacaaatataacacaccaccaaagcataaacaattcaaaaggttttctacttacatatccttggcagggatgtgcaatgaatctggaggacaatcttctgtttctaggtcaagacagagatgaaaggtcagacagagagacagcaagcacatggcaactggcactaatatatatacaagcacgtggcaacaggtactaatgtatatgtaagcgaataaggtgtgggttattttaagtttgtt

SEQ ID NO: 339087 - DNA, 588 bp, Homo sapiens
tgaagaaaaagaagttccagactaataaaggtgacgggcttccctctttgataagtcctatgtgtcctatctatctcgacagaattctatcaggaataacactgtacttgttccacagaaattgtttgataagcttgtctggaatagaatctgagttaaatgtgccattgttcttccccagataactttttggagtctccatagatcatacaaagagagaacagagaaacaaggcaacaaattgggatacgctgcaacactctgcactgaacatctgacttcaattagccaaccctcaatttccaatacaaaaatcacaaaaggattactaagggagaatttataatggaaaagaggtgaaaaatggcttmtttgctttgattatcagcagggtgtccagtacagtaggtatagctggcatgggactggtagtgcaggctggctcttggaaaggagtatgtattccaggctggttggctgctgttccactgggagctgaagccagggctcatggtcactcgtgacttactagtttgataggctctcactgtggagctagactcgtttgcttgttatttcttaagaatc

SEQ ID NO: 339088 - DNA, 572 bp, Homo sapiens
tgatgtttaagttgaacctgtatagataagcagaagaaatgtcctttgcataacatagagcatgatatataataatctcacagtaaatatttgttgaataaacaaataaatgacaaagtaaaacttcccataatttttcatataatttctgcaaacttctgacttttttaaagaaattgaaagtttaaagcctcctatttttcttgtaaagattgataygcatgctttcaacatagataatttattagaattgcagccccgccgtgcttcacataccacctctaggacactgcttattaatgtcagaagagtaagtgacatgtcaagtttccagaaccatgccaatttctaaaaacccatttgttagctatggtacagaaacaaaatatgcccagcagttttcaactgggctaataaatttaattaaacattctcataaaagcaaagaaaacttttctatttaaactttcttacagaggaaaccacgtttgttgtcttgcttcttgatggaagaaacctaaacattatctacctaaaagacggatcatccatcttgtcatccatctgcaaag

SEQ ID NO: 339089 - DNA, 614 bp, Homo sapiens
ctaagctgtaactaccataagtcatctggaactttagctgtgtgggtcgataaagaaaccatttgcaagaaaggaaggactctctctataagtaaaacttaaagaaaaagagctgttctccatataaaattcatttcacagcacaaggaaagaaagcatttacatatatcagaagcaagactctttcataaagccctcaaggaccacatacatagtctctaggaataaagatgaagacttctcttttatctctctyttttttagtggtagaaaccacttgatctcacttgtcattcaccccttcaatacatatccatgaagtacttcttatgttctaggatctacacaggaaaaacgaggatgaagaaataatttttcacagtccagtgaacaaggcagacacataaacaacttctactatgtgtcagaattattctctacaatggaaaagatagggcaaaggaggaagttattaattcgcctgaagataagaagagaaagatggtgggaaagtttccacagaaaataaataagcaagttttaacttacaaaatgttgaattggaaatgggcaaatataataatagctaacactaccaattgttcactgtgtac

SEQ ID NO: 339090 - DNA, 215 bp, Homo sapiens
ttactttttccttcctttgtaatgacctataaccagagggtgccatggtctaaagtatctagaccgtatctctcctttttttttttttttttttggkggattttctttgagggatagtaaataaattggtttgcccactgatgtgattaataaaaatgttaatgaactaaccctttctacttcattttctaattttttgattttttttttgtcat

SEQ ID NO: 339091 - DNA, 577 bp, Homo sapiens
taataaacaaactctggcaatagtggaggctgattagtaacatataccaaattccgtgatgtaaatattactacaatgcccaatttcaagctaccatcaacttaacaactgattcacaaaattcccgaatatttaacaattaacatttaccgagtggtaagctccaacttcagagcatcactgtatgttcctaccctgaagctacacatttaccaatgataaaataagaaaagtcctgcagtgtaacctggctttttatccccaagatttttgaccatgaaatactttttatagactaacatcaayataatgtacttttacaagtaatattcctggtctcttcatatcttccaacactagtatttcaaagcaagtcaggccaacatctagctcctacatttctttgcaacaggctttctgccaagacacacttttcttactcttgttgcaggacagaaatgtggaattaaaacccctgcaataagcctccagccaatatttaagagaagtcttacaatgtcatccaaaaatttctgtaggatgattaacctacatcatcctcaactggctgccttcc

SEQ ID NO: 339092 - DNA, 562 bp, Homo sapiens
catccaaaaatttctgtaggatgattaacctacatcatcctcaactggctgccttccctttctcgtcttacttctccattactctgctgccatgcattccttttcccaaactacttagttttgaatttttgtctcaggggaaatccaacctaaaacaaacagttgagaaaacgatgggctagaaaayctcaatggccactcagggttctaattttcaaagattaaaatacttccagggattatttctgacattttcaggctgaaaacttccagtaccatttatgatgcttagcttatgtaagtcaacaagcagatttctgctgaacaaatctgtagggcaaatccaagagaatgttgacaaaggaaagagtatgaagtaaaagaagttgcttctggccaggcgcaatgactgaggcaggcagatcacttgatgtcaggagtttgagaccagcgtggccaacctggtgaaaccctgtgatatggtttggctgtgtccccacccaaatctcatattgaattgtaactcccacagttcccatttgttgtgggaggaacctggtgg

SEQ ID NO: 339093 - DNA, 562 bp, Homo sapiens
catccaaaaatttctgtaggatgattaacctacatcatcctcaactggctgccttccctttctcgtcttacttctccattactctgctgccatgcattccttttcccaaactacttagttttgaatttttgtctcaggggaaatccaacctaaaacaaacagttgagaaaacgatgggctagaaaacctcaatggccactcagggttctaattttcaaagattaaaatacttccagggattatttctgacattttcaggctgaaaacttccagtaccatttatgatgcttagcttatgtaagtcaacaagcagatttctgctgaacaaatctgtagggcaaatccaagagaatgttgacaaaggaaagagtatgaagtaaaagaagttgcttctggccaggcgcaatgrctgaggcaggcagatcacttgatgtcaggagtttgagaccagcgtggccaacctggtgaaaccctgtgatatggtttggctgtgtccccacccaaatctcatattgaattgtaactcccacagttcccatttgttgtgggaggaacctggtgg

SEQ ID NO: 339094 - DNA, 595 bp, Homo sapiens
agggagacttctgattttggtaatgtagtaatgtttggattacatgcacattacatgagtgtcctcagtttcagaaaatcattaaacatatgtacacatatgtactctttgtacatacatatattattcaaaaaattttagttaaaaaaaaattggggatattaaacctatttgcaaatgacagaacaagctcataactgtttagtaatttttcaaaattgggacagctattaagtggtagagccaagtatgtccctaaaatctaggatgctgtcattagattatactattccttatattaagaaaaaacamtaaataaatttaggaaagttttgcctacatcccctactactactattattgtctaaatgataatactattagaatattattgtctaaatccttaaaaatttcttttaataaacattcaacgtagcattttccgaatctccttagtgaagcaatatggagttgtgataagaattttcctagatctctttttcattaactgtgtttccttggatcaatactaagcctcatttataaaataataatcacactaaagtagtggtaatgtcatgtatttcataatatt

SEQ ID NO: 339095 - DNA, 619 bp, Homo sapiens
aaactccttttctcttagtagcaatgttgaacacatagtaaggaagctcacccagccaaaataaatctaactatgyggtgaactccttgcactggtggcacttctttggccactactgtccactgtacacagcattgtttctacaggaaataaccttgagtccactccaaaagccagacctgcagctgctcctttcccttatgtcaactctcccacaggctctagggaatcccttctcctctcttaatggcaagcagggggaagcaggaagttgagcatgcaagatagacagtcctagtctcccacagcctatacgcccattctgcacagataattctgcactctccatctgatatctctagactaaatgtcccttgtgtgctctgatttggtattgcacacaaggcagatgggaacttaggggactccttccccttgtggcgcaaatatattgttagtttttcaaattaaactaacataaaaagattgcagtggctcacgcctgtaatcccaaagacttgggaggctgaggtggaaggatggcctgaggccaggaattagagaccacgctgagcaacatagtgtgcctctatctctaaaagcaataaaacattagctt

SEQ ID NO: 339096 - DNA, 619 bp, Homo sapiens
aaactccttttctcttagtagcaatgttgaacacatagtaaggaagctcacccagccaaaataaatctaactatgtggtgaactccttgcactggtggcacttctttggccactactgtccactgtacacagcattgtttctacaggaaataaccttgagtccactccaaaagccagacctgcagctgctcctttcccttatgtcaactctcccacaggctctagggaatcccttctcctctcttaatggcaagcagggggaagcaggaagttgagcatgcaagatagacagtcctagtctcccacagcctatacgcccattctgcasagataattctgcactctccatctgatatctctagactaaatgtcccttgtgtgctctgatttggtattgcacacaaggcagatgggaacttaggggactccttccccttgtggcgcaaatatattgttagtttttcaaattaaactaacataaaaagattgcagtggctcacgcctgtaatcccaaagacttgggaggctgaggtggaaggatggcctgaggccaggaattagagaccacgctgagcaacatagtgtgcctctatctctaaaagcaataaaacattagctt

SEQ ID NO: 339097 - DNA, 619 bp, Homo sapiens
aaactccttttctcttagtagcaatgttgaacacatagtaaggaagctcacccagccaaaataaatctaactatgtggtgaactccttgcactggtggcacttctttggccactactgtccactgtacacagcattgtttctacaggaaataaccttgagtccactccaaaagccagacctgcagctgctcctttcccttatgtcaactctcccacaggctctagggaatcccttctcctctcttaatggcaagcagggggaagcaggaagttgagcatgcaagatagacagtcctagtctcccacagcctatacgcccattctgcacagataattctgcactctccatctgatatctctagactaaatgtcccttgtgtgctctgatttggtattgcacacaaggcagatgggaacttaggggactccttccccttgtggcgcaaatatattgttagtttttcaaattaaactaacataaaaagattgcagtggctcacgcctgtaatcccaaagacttgggaggctgaggtggaaggatggcctgaggccaggaattagagaccaygctgagcaacatagtgtgcctctatctctaaaagcaataaaacattagctt

SEQ ID NO: 339098 - DNA, 215 bp, Homo sapiens
atattataataacatgttattattggaattgactaccagggtcatcttgtcaagctcattaaacttcctaatgaaatgtcatactcttcttatatttatattgtcattatattcataatgacaatataaatatgtcattaatattcccaaktaagtatcaatgtctttacaggtcacaggctatttaaatgactcagttaaacatttccaagcaa

SEQ ID NO: 339099 - DNA, 532 bp, Homo sapiens
atccaccatcataaaacacacttaagtaattaatattaatgataacctgaatacctgccctacttcttccccacctgtgttagtttcctaattaaattaccacarattgagtgatgcaaaacaacagaaatttattatttaataattttgaaagccacatgtcagaagtaaccagcccagaatcaggagcaagctgtgttgagctccctccagaggccctacgggagaatatgtcccttgcctcttccactttctcatggctgttgtaattccttggatttcagcccacattcacatccctcccattatcaaagtcggcatcttcaaatttctctcaccctgtcttcatatcaattcctcccctatgtgtgtgtgtcaaatctctctctgcctttctcttataaagacagttgtgattacatttagggtctactgaaattatccaggataatctcatcacctcaagatccctaactgtatcacatatacaaatatatttttgccttataagtttgcatggacatgtttcagg

SEQ ID NO: 339100 - DNA, 573 bp, Homo sapiens
gcaaatccaaacacattttagagtcacctgtttgaaatactaatgaccactcagttggaatttacattgagtttagtactcaggtattactgatgttatcagttggtgtgctattgtctctacagactaagaatttatartttttgaattgtgaagctgaaattaaaaaatcatggggatcattttatgcaaacctcttattttaccagtgatattcacaaaagttttgacttttcccagatgatgcagcaaataagtcttaaatgctagcaaaaattctactcttcattctcaaggttcttttctcatctttccttcctttcttcctttttatgttccttcatttagtttctttcttctttattgattgtttgtttcttacatgcttttatcctttctttctgtgcagcatgtcgcagtaaccaggagtaaagtatcttgcctttcagccccttatgtaaaaatctaagaattcaagttttagctggttctaatcaatatgagattttctaatttctatgatttttaaggttattacaaattgtataaattttatttgtttgtttgtttgtt

SEQ ID NO: 339101 - DNA, 573 bp, Homo sapiens
gcaaatccaaacacattttagagtcacctgtttgaaatactaatgaccactcagttggaatttacattgagtttagtactcaggtattactgatgttatcagttggtgtgctattgtctctacagactaagaatttatagtttttgaattgtgaagctgaaattaaaaaatcatggggatcattttatgcaaacctcttattttaccagtgatattcacaaaagttttgacttttcccagatgatgcagcaaataagtcttaaatgctagcaaaaattctactcttcattctcaaggttcytttctcatctttccttcctttcttcctttttatgttccttcatttagtttctttcttctttattgattgtttgtttcttacatgcttttatcctttctttctgtgcagcatgtcgcagtaaccaggagtaaagtatcttgcctttcagccccttatgtaaaaatctaagaattcaagttttagctggttctaatcaatatgagattttctaatttctatgatttttaaggttattacaaattgtataaattttatttgtttgtttgtttgtt

SEQ ID NO: 339102 - DNA, 573 bp, Homo sapiens
gcaaatccaaacacattttagagtcacctgtttgaaatactaatgaccactcagttggaatttacattgagtttagtactcaggtattactgatgttatcagttggtgtgctattgtctctacagactaagaatttatagtttttgaattgtgaagctgaaattaaaaaatcatggggatcattttatgcaaacctcttattttaccagtgatattcacaaaagttttgacttttcccagatgatgcagcaaataagtcttaaatgctagcaaaaattctactcttcattctcaaggttcttttctcatctttccttcctttcttcctttttatgttccttcatttagtttctttcttctttattgrttgtttgtttcttacatgcttttatcctttctttctgtgcagcatgtcgcagtaaccaggagtaaagtatcttgcctttcagccccttatgtaaaaatctaagaattcaagttttagctggttctaatcaatatgagattttctaatttctatgatttttaaggttattacaaattgtataaattttatttgtttgtttgtttgtt

SEQ ID NO: 339103 - DNA, 573 bp, Homo sapiens
gcaaatccaaacacattttagagtcacctgtttgaaatactaatgaccactcagttggaatttacattgagtttagtactcaggtattactgatgttatcagttggtgtgctattgtctctacagactaagaatttatagtttttgaattgtgaagctgaaattaaaaaatcatggggatcattttatgcaaacctcttattttaccagtgatattcacaaaagttttgacttttcccagatgatgcagcaaataagtcttaaatgctagcaaaaattctactcttcattctcaaggttcttttctcatctttccttcctttcttcctttttatgttccttcatttagtttctttcttctttattgattgtttgtttcttacatgcttttatcctttctttctgtgcagcatgtcgcagtaaccaggagtaaagtatcttgcctttcagccccttatgtaaaaatctaagaattcaagttttagcyggttctaatcaatatgagattttctaatttctatgatttttaaggttattacaaattgtataaattttatttgtttgtttgtttgtt

SEQ ID NO: 339104 - DNA, 563 bp, Homo sapiens
tcacgttaattggaatttagatttaaaatctgctctgtcttaccctacagctccaccttaccagtttggctcactgatcacaacgcaaaaaactgtttcaaagtttacacacaagatagcatgtggaatagattctaagtcccttctcatcagcctatatgtcctccattgaccttggttctaaattcaaaactctattattgacatgcatttggattgagccaatgatatctattaaaaaatataaaatcaattgttttacatggactcttmttattatttatagtgacatgtttattatttatttaatgtgaaattctctttaaagtctaatattaagaaaaacttgaaaagagcactccgaacatgtgtctgaaacaatattattttaattatttcattggtttgaaataaatcatgctcaatattacaccagtatttgtggctctgtgaagtagtgatagaggacataagcaacattttgaatagcaatagtagaacattattcagtcggaaaatagaaaatcttgtcatttgtgacaacatggatgaacctggaggac

SEQ ID NO: 339105 - DNA, 563 bp, Homo sapiens
tcacgttaattggaatttagatttaaaatctgctctgtcttaccctacagctccaccttaccagtttggctcactgatcacaacgcaaaaaactgtttcaaagtttacacacaagatagcatgtggaatagattctaagtcccttctcatcagcctatatgtcctccattgaccttggttctaaattcaaaactctattattgacatgcatttggattgagccaatgatatctattaaaaaatataaaatcaattgttttacatggactcttattattatttatagtgacatgtttattatttatttaatgtgaaattctctttaaagtctaatattaagaaaaacttgaaaagagcamtccgaacatgtgtctgaaacaatattattttaattatttcattggtttgaaataaatcatgctcaatattacaccagtatttgtggctctgtgaagtagtgatagaggacataagcaacattttgaatagcaatagtagaacattattcagtcggaaaatagaaaatcttgtcatttgtgacaacatggatgaacctggaggac

SEQ ID NO: 339106 - DNA, 563 bp, Homo sapiens
tcacgttaattggaatttagatttaaaatctgctctgtcttaccctacagctccaccttaccagtttggctcactgatcacaacgcaaaaaactgtttcaaagtttacacacaagatagcatgtggaatagattctaagtcccttctcatcagcctatatgtcctccattgaccttggttctaaattcaaaactctattattgacatgcatttggattgagccaatgatatctattaaaaaatataaaatcaattgttttacatggactcttattattatttatagtgacatgtttattatttatttaatgtgaaattctctttaaagtctaatattaagaaaaacttgaaaagagcactccgaacatgtktctgaaacaatattattttaattatttcattggtttgaaataaatcatgctcaatattacaccagtatttgtggctctgtgaagtagtgatagaggacataagcaacattttgaatagcaatagtagaacattattcagtcggaaaatagaaaatcttgtcatttgtgacaacatggatgaacctggaggac

SEQ ID NO: 339107 - DNA, 546 bp, Homo sapiens
tgatgctacttatgtaaagataaaaataaagttgaaattctcttataatcatacaactgggttcatattgctgattgtgtgtgtacrcgcccacgcacgtgtgcatgtgcatatataaatgtactccctaccctattttaaaactgactttaatctcgtttaaaatgttttccttgttttaaatcgtatgtgagcattttttgatttgagtaagctggctttctcactgagccctaaatgactccaacaaaataaatattatccattatacccagtattctgattactctggtatgttgatattttccatcataatcaggattcaaaataaaacataattagtgagattgatcaaggaagacttatcgtgaattagtcatggctcaatggtcttaattaattgcatttaataaaaaggaaatgaaaaggtagaaataggtaatggagaaattataaaaaattaaagtaattgtataacaagataaagaatcaaagaagaaaaatgtatgcagtatttaataggatgcttacattttaaaggctatc

SEQ ID NO: 339108 - DNA, 651 bp, Homo sapiens
cagaaactaatttttaataatatttttaaatgaaaaaatgctgagtagcaaaaaaagtgtggtgagaattggcatcattttcttgttcatgtttgtagagagatggctttataccttccccacttaggttgtgggttttgctgtgggtttgtcatatatggccttaattattttgaggtatgctctttctgtgcctagtttttgasgtatgctcctatgctcctatattaaatgctttttctgcacttattgagatgatattatggtttttgtgtttatttcttataattgtacttttctgatttctccttgtcgagttttgtggtcaattatgctagtctcataaaaagaattgaaatgtttccgctttcattcattccctttccattgtcagggctaaaatgatggcaaactctaacaggcaactgtaggctataggccaaagatggagcagtaaggcttgataccaagaaggcagaggacaaagatgcagaggctgtgatggggcaaaaatgcagcaaagcaaaagagaaacagcataactagactaagaaggcagcagggccaaagacaagaaaggcagtagggctcaagggtaagtagcaaactggcagctaagaatgtataggggcaacaaggcaggagtggaag

SEQ ID NO: 339109 - DNA, 549 bp, Homo sapiens
aatgaggtggctatcctgcacagataactggtcaaacataagcaaattgagcaaacaaataaatgtagtgaagataaagggagataaaatttttactgttaaggatgggatctataaatgtgaaaagtgaaatcactagaaatatctctaaggagttggattagatctgtaggtttcagtgtgaaagcgttatgttttaatatakatagataaatggataaataaatggtatataactgtagcagtaataacatatctatcatatcatatcatatcatatcaatcatatattagtcctgtttgctgagaaggtctagagctaatgacacccagtagcaatgagcactctgaaacccaagatactctctcctactaaaattaccgacttcagactgagtcagataaaagtcaaagtgatcttaaatgattctatgtaccagaaattaagggagtattctaaatacaatagcaacaagaacaaataagccagcttaaatgagttcccacttaccataactgagatagcgtaagttttgaaattaatggtga

SEQ ID NO: 339110 - DNA, 549 bp, Homo sapiens
aatgaggtggctatcctgcacagataactggtcaaacataagcaaattgagcaaacaaataaatgtagtgaagataaagggagataaaatttttactgttaaggatgggatctataaatgtgaaaagtgaaatcactagaaatatctctaaggagttggattagatctgtaggtttcagtgtgaaagcgttatgttttaatatatatagataaatggataaataaatggtatataactgtagcagtaataacrtatctatcatatcatatcatatcatatcaatcatatattagtcctgtttgctgagaaggtctagagctaatgacacccagtagcaatgagcactctgaaacccaagatactctctcctactaaaattaccgacttcagactgagtcagataaaagtcaaagtgatcttaaatgattctatgtaccagaaattaagggagtattctaaatacaatagcaacaagaacaaataagccagcttaaatgagttcccacttaccataactgagatagcgtaagttttgaaattaatggtga

SEQ ID NO: 339111 - DNA, 325 bp, Homo sapiens
tgttagcccttcatattctacaactctatttgttatatgttactrttttttctcatttaatatgtggtccaactaaggcttagaagaaagttaaataattttcccaatatcacattgctgatatgtagtacagccaagataaaattacatttatctgatagccacaagtcaaggaaatattacacactactggctttactgtaaataaatgggtatattttgccattaatagtcatagcaataatttatgttttatggcatctagtcttttaataaaatattcatatacattctctttttgtatacttaacaaccttgtgaagga

SEQ ID NO: 339112 - DNA, 325 bp, Homo sapiens
tgttagcccttcatattctacaactctatttgttatatgttactatttyttctcatttaatatgtggtccaactaaggcttagaagaaagttaaataattttcccaatatcacattgctgatatgtagtacagccaagataaaattacatttatctgatagccacaagtcaaggaaatattacacactactggctttactgtaaataaatgggtatattttgccattaatagtcatagcaataatttatgttttatggcatctagtcttttaataaaatattcatatacattctctttttgtatacttaacaaccttgtgaagga

SEQ ID NO: 339113 - DNA, 548 bp, Homo sapiens
tgtaatcttcaaaaatatcaaggttatgaagccacacacacacaagggcttagaatgattgagggagactaaataatcttgacaaccaaaagcaaaatatagttctagtctggaacatttcacaataataaacattattgagacacrtgaaaagttgaataaagtccaagtttagctggtagcactgtatcaatgttgatttcttgattttgatgcttggattaaagttgagatcctcattagcatgttagcaaatctcaagtggctcaagagaaatacatatttcttttaatacttgttactttcctcaccctttaaagtctttcagtaggtaataacaaaaacacaagctattgacaaccttggaactgttcaagaatggttggtagaattatgtccttcaatgttcatccgatgtaatttcctctgtgtcctaccccctttccccagttctctgacatttctgacatatattagaatatatatggtaattatgtgccatattcaatattttttatactttccttttacaggaataaacatataaa

SEQ ID NO: 339114 - DNA, 548 bp, Homo sapiens
tgtaatcttcaaaaatatcaaggttatgaagccacacacacacaagggcttagaatgattgagggagactaaataatcttgacaaccaaaagcaaaatatagttctagtctggaacatttcacaataataaacattattgagacacatgaaaagttgaataaagtccaagtttagctggtagcactgtatcaatgttgatttcttgattttgatgcttggattaaagttgagatcctcattagcatgttagcaaatctcaagtggctcaagagaaatacatatttcttttaatacttgttactttcctcaccctttaaagtctttcagtaggtaataacaaaaacacaagctattgacaaccttggaactgttcaagaatggttggtagaattatgtccttcaatgttcatcygatgtaatttcctctgtgtcctaccccctttccccagttctctgacatttctgacatatattagaatatatatggtaattatgtgccatattcaatattttttatactttccttttacaggaataaacatataaa

SEQ ID NO: 339115 - DNA, 570 bp, Homo sapiens
gcaaaagaaatcaaaacccattttcataccaaaacatgtacatgaatattcatggtggcatttttcaaaatagcctaaaagtggaagcaaaccaaatgtccatcaactgataaataggcaagcaaaatgttgtttgtccataaaatgaaatactattcaacaattaaaaagaaaaaaagtagacatgctacaatayggatgaaccttgaaaacatgatccaagtgaaagaatccattcatataagaccatatttttcattactccattcatgtgaaatctccacagtaggcaagtgcatacacacaaaaagtatatttgaagtttccaaatactggggggaagggggaatatgaaatgactgctaatgaatacacagattttttggggggaagcggtgatagaacaattctaaaagtaaataatgatgaaaattatttaactgaaaatgtactaaaacctgctgaattgtactctttaaatggttaaacttcatattatataaattgcatctaaataaagctgttataaaaacacgtccccacagaaattggagaaaaacattcatgttc

SEQ ID NO: 339116 - DNA, 607 bp, Homo sapiens
tttattgcagatggaaatttaaagtggtgaggctgatttggagaatagttcctgtgttcctcaaaatgttaaatatagaatgaccataaggcccaacaactattattcctaaatatgtatgcaaaagaaatcaaaacccattttcataccaaaacatgtacatgaatattcatggtggcatttttcaaaatagcctaaaagtggaagcaaaccaaatgtccatcaactgataaataggcaagcaaaatgttgtttgtccataaaatgaaatactattcaacaattaaaaagaaaaaaagtagacatgctacaatacggatgaaccttgaaaacatgatccaagtgaaagaatccattcatataagaccatatttttcattactccattcatgtgaaatctccasagtaggcaagtgcatacacacaaaaagtatatttgaagtttccaaatactggggggaagggggaatatgaaatgactgctaatgaatacacagattttttggggggaagcggtgatagaacaattctaaaagtaaataatgatgaaaattatttaactgaaaatgtactaaaacctgctgaattgtactctttaaatggttaa

SEQ ID NO: 339117 - DNA, 607 bp, Homo sapiens
tttattgcagatggaaatttaaagtggtgaggctgatttggagaatagttcctgtgttcctcaaaatgttaaatatagaatgaccataaggcccaacaactattattcctaaatatgtatgcaaaagaaatcaaaacccattttcataccaaaacatgtacatgaatattcatggtggcatttttcaaaatagcctaaaagtggaagcaaaccaaatgtccatcaactgataaataggcaagcaaaatgttgtttgtccataaaatgaaatactattcaacaattaaaaagaaaaaaagtagacatgctacaatacggatgaaccttgaaaacatgatccaagtgaaagaatccattcatataagaccatatttttcattactccattcatgtgaaatctccacagtaggcaagtgcatacasacaaaaagtatatttgaagtttccaaatactggggggaagggggaatatgaaatgactgctaatgaatacacagattttttggggggaagcggtgatagaacaattctaaaagtaaataatgatgaaaattatttaactgaaaatgtactaaaacctgctgaattgtactctttaaatggttaa

SEQ ID NO: 339118 - DNA, 579 bp, Homo sapiens
tacacgtactatatatgagtgtatatatacatatacgtacatatgtgtatatatgtatgtatacatatatgtatgtgtatatacatgtatatatgcatatatatgtgtttatatatgtatatatggagagagtgtattaaatacatatatatgtatacacacacacatagagggagacagagagaaagaaaaagagagagactratgtgatgaactgtcaaataactgcggattattgtagctgcaatagaaataaaaggttatttgtctgcccttgataatatagtaattgtttcattgtttttctgttctctcatagactttggatatgtgtgatgtattcccagaagccatgaaagcctgggattttccttgtaaggtttcagttacagattcattctctttaatagacaactagactttaaaatattttatttcatttctttttctttgtttctatcagttttggtcagctgtcttttgagaaattgttctattttattttaaaaggtgaatgtattggcatactttttttcaaaatattttatttagtgaggtctttttcattattgttcttgg

SEQ ID NO: 339119 - DNA, 544 bp, Homo sapiens
acgtactatatatgagtgtatatatacatatacgtacatatgtgtatatatgtatgtatacatatatgtatgtgtatatacatgtatatatgcatatatatgtgtttatatatgtatatatggagagagtgtattaaatacatatatatgtatacacacacacatagagggagacagagagaaagaaaaagagagagactgatgtgatgaactgtyaaataactgcggattattgtagctgcaatagaaataaaaggttatttgtctgcccttgataatatagtaattgtttcattgtttttctgttctctcatagactttggatatgtgtgatgtattcccagaagccatgaaagcctgggattttccttgtaaggtttcagttacagattcattctctttaatagacaactagactttaaaatattttatttcatttctttttctttgtttctatcagttttggtcagctgtcttttgagaaattgttctattttattttaaaaggtgaatgtattggcatactttttttcaaaatatttta

SEQ ID NO: 339120 - DNA, 544 bp, Homo sapiens
acgtactatatatgagtgtatatatacatatacgtacatatgtgtatatatgtatgtatacatatatgtatgtgtatatacatgtatatatgcatatatatgtgtttatatatgtatatatggagagagtgtattaaatacatatatatgtatacacacacacatagagggagacagagagaaagaaaaagagagagactgatgtgatgaactgtcaaataactgcggattattgtagctgcaatagaaataaaaggttatttgtctgcccttgataatatagtaattgtttcattgtttttctgttctctcatagactttggrtatgtgtgatgtattcccagaagccatgaaagcctgggattttccttgtaaggtttcagttacagattcattctctttaatagacaactagactttaaaatattttatttcatttctttttctttgtttctatcagttttggtcagctgtcttttgagaaattgttctattttattttaaaaggtgaatgtattggcatactttttttcaaaatatttta

SEQ ID NO: 339121 - DNA, 607 bp, Homo sapiens
tttattgcagatggaaatttaaagtggtgaggctgatttggagaatagttcctgtgttcctcaaaatgttaaatatagaatgaccataaggcccaacaactattattcctaaatatgtatgcaaaagaaatcaaaacccattttcataccaaaacatgtacatgaatattcatggtggcatttttcaaaatagcctaaaagtggaagcaaaccaaatgtccatcaactgataaataggcaagcaaaatgttgtttgtccataaaatgaaatactattcaacaattaaaaagaaaaaaagtagacatgctacaatacggatgaaccttgaaaacatgatccaagtgaaagaatccattcatataagaccatatttttcattactccattcatgtgaaatctccacagtaggcaagtgcatacacacaaaaagtatatttgaagtttccaaatactggggggaagggggaatatgaaatgactgctaatgaatacasagattttttggggggaagcggtgatagaacaattctaaaagtaaataatgatgaaaattatttaactgaaaatgtactaaaacctgctgaattgtactctttaaatggttaa

SEQ ID NO: 339122 - DNA, 561 bp, Homo sapiens
tagactgttataaaatgtcttgcctttggctactggcataaaaaggctgagtattctgggaatattgtaaatactgatcacatctgggcctttcacgatatgctttcaatattctcaatgtgtcaagtgttctatgcctctgagaaagcacaggtttctttgtattcttcccagtcttattcacttggtgaattttcacttaaccacaaactcaggcattggcttcactagaaatcaatctgtacttcttttcatccttgtgagttttccctaatgctctgtgcatgcttccatcataacacgatgattcctgcgctgttttcattctgataccatctctgtgtcctactgggttgtgtataattttttttttttgctctcgtttccatcttctccatatgtaacacatcttctggaagaagagcttagatattgactttaaataccagctctgtcccttaactatctgtgcactcttagtttgttaacttttctctaattctgttttctcacctatgaaatgtgactaayagtcttcatgtgaaaattaaatacaaattg

SEQ ID NO: 339123 - DNA, 566 bp, Homo sapiens
aatttgtcattttataatacsaaaaacacaggggtcaaactgatcttagaagcttgaggaattgatggctctgccaagaacacaattttcccatttctgtatttgttaaacacagattcctagactatatttcaaatgacatttccgtttagggcacatataatagtaagtaacaaccaccatggtcaagcccagaaacacattaaaaactatttaaaaatgcatgtcaatccactcagaaaatcagatgactgctcctcttttactgctcggaaaatgagttctcatctcacctgaagattgactttaattccatcaagttctcttgatgtctttgtcagctgacgaagaatggtgcttcgctccttaaagacttctttcagctgcttttctagctcttcatagtcctgtctaacacagaaagaacaggcatgagagccccccaaatggttccacttggcatcagtcataatcactaacactcacagtttcagtgaaatctagagaagttaaaacctcaattactaagatggttttgttgtcatgatttcatataaaaggggaaa

SEQ ID NO: 339124 - DNA, 572 bp, Homo sapiens
accagcctgcaataagattttctaaggggaaactgctcaagtttctttyagaaacaaaatgacatctgcaaatttactgacacatttagtaacatacataaaacaacactttttttttgtaaaatagcaatcccatttgaaaaaggaaatgtggtagaaaaaggtgatcaaatattgcaatgtgcaaagcactatgctacaggcagagaggaacagaacacaaaaaaaactgctatccctcttcaacatatatagcagatttgtctgccaacatagtaggtaacatgataaacttaagaaagttgtttgggactttgaaaattcagaaagacttcatagaaattgtgacatttgtgctagactttgcaggattttaattagtgcagaagtgtagaatgggaggaagtggaaaaaatgtaatcatcaggcttgggaaatattcagattaatcagaaaatgagagagccaccgtaacaggagttcggtgggagatgagactggagataagactgaggccatgtggaggtaagcagcggctgctaacggcatccattccagtcttaaaagctgtt

SEQ ID NO: 339125 - DNA, 565 bp, Homo sapiens
gaaacagggtctcactgtttctaattctccttgtgtttgcttgtcaaggaacttgggacaagttcacagtagaaagttcctggcaatttgatgttttcatactcagaagttgttttcacacttacacttagagggaggaaaggcatcatttgtttctctacttacctatatcagtagttgtcaaactatggtgccaatgaatcaacttaagagttctttttaaaatgtaaatttggtccaatatttcctaatattacaacttatcagtactgatgtaaacatttggttgaatatcagtgttaaaaaccttggatgattttttaaaggtgttgtattttgagaaatacatatatagaatgtaagttttcttgttctgatccatgggcagcatcttcacagctctcattagaccttgttcagccatctcttgaacaaagcatttcttattgtacccttcctacacctctcagaccactgaagaaaaccggcatttttcacctcagaatatggcttrttgatgtaaatattgctaaggtgaagacaattaagaagcagtagaggaagg

SEQ ID NO: 339126 - DNA, 513 bp, Homo sapiens
gccacatttatacctctctgcctccaactcttgctatatacggactcatcccaagcacatttacataatccatatcaaagacaatcaggtattaaaaatcaggacttcctgatcaaagcttcttcctatatgtaaccagtaatatggaagagcaacaaaatagaattgtagagagagaacaagtagacttccaagaatattctcattgtaatgaatgtattttcgctatgtatcttttgcatctttgccaggmgtttttggaacttaccagcctcaaagaagggagagattttgcactctgtgacaaggtcttccttcaggagttttgagagccagtgggatgacttgagcagatacacaattaaaaacactctgcttgatacataccatcaaagcaagtgagaggacattttagatcacagaaagaaaagtggtattgatgctgaacaggaacaaataaattagacagagtatttgaagcagaagagtacagatacagcctcgttttattgc

SEQ ID NO: 339127 - DNA, 513 bp, Homo sapiens
gccacatttatacctctctgcctccaactcttgctatatacggactcatcccaagcacatttacataatccatatcaaagacaatcaggtattaaaaatcaggacttcctgatcaaagcttcttcctatatgtaaccagtaatatggaagagcaacaaaatagaattgtagagagagaacaagtagacttccaagaatattctcattgtaatgaatgtattttcgctatgtatcttttgcatctttgccaggartttttggaacttaccagcctcaaagaagggagagattttgcactctgtgacaaggtcttccttcaggagttttgagagccagtgggatgacttgagcagatacacaattaaaaacactctgcttgatacataccatcaaagcaagtgagaggacattttagatcacagaaagaaaagtggtattgatgctgaacaggaacaaataaattagacagagtatttgaagcagaagagtacagatacagcctcgttttattgc

SEQ ID NO: 339128 - DNA, 578 bp, Homo sapiens
tggtaagtcttttagcaccacttttccaacagcatttgctcactttatatccctgtgtcacattctgggaattctcatattatttcaaacttttccatcattattattattattatcattatttagatggagtctcsctctgtcgccgaggctggagtggagtggcatgaattcagctcattgtaacctctgccttcggggttcaagtgattctcctgcctcagcctcccaagtagctgggattacagggtccattattgttatatctgtcatactgatctgtgcttagtgaactttgatgatattattgtaaatgttttggggagccatgaattgtacacagagaagatggcaaacaataaataatgttgtctgtgatggccattgccccatctcgctccctctcatcaggggtccctattaccagagacacaacaatattgaaattaggccaattatagtaataccctacaatgaaagaaagagtcgcaagtctcttactttaaatcaaaagctaggaatgtttacgcttagtgggaaaatgaagacaaaagctgagataggctaagagctagact

SEQ ID NO: 339129 - DNA, 578 bp, Homo sapiens
tggtaagtcttttagcaccacttttccaacagcatttgctcactttatatccctgtgtcacattctgggaattctcatattatttcaaacttttccatcattattattattattatcattatttagatggagtctccctctgtcgccgaggctggagtggagtggcatgaattcagctcattgtaacctctgccttcggggttcaagtgattctcctgcctcagcctcccaagtagctgggattacagggtccattattgttatatctgtcatactgatctgtgcttagtgaactttgatgatattattgtaaatgttttggggagccatgaattgtacacagagaagatggcaaacaataaataatgttgtctgtgatggccattgccccatctcgctccctctcatcaggggtccctattaccagagacacaacaatattgaaattaggccaattatagtaataccctacaatgaaagaaagagtcgcaagtctcttactttaaatcaaaagctaggaatgtttacgcttagtgggaaaatgaasacaaaagctgagataggctaagagctagact

SEQ ID NO: 339130 - DNA, 527 bp, Homo sapiens
ttccatgagtcctacctgttttccaatcatagttstccagttattctgtatctattgaaatctatgagcacaccagttcctacacacacacacacacacagacacacacacacacacacacacttccttgtgatactgagagcattatttctattacttgtgactaagaaatctgtctcttaaatgtgtaattcccaggttttagagtaaggacttgagtaaagaaacttgcaataaatcctccaaaagtatcctaaagtctctgggcttttgatgctgctagcttgaaaattactgaagaaatttggtctatttttatttctgccacagactattacttatacaaaagccttaagggggtttctctcggctaaaaattttattgaaaacacaagattcattctattataatcttcatcctgatcatttcgttgtaagaagtccagtagctgttgttctctactgatgtccctgatcataggctaaatgtaaggagaaaaatgaggatataaaatgtccattggatg

SEQ ID NO: 339131 - DNA, 527 bp, Homo sapiens
ttccatgagtcctacctgttttccaatcatagttctccagttattctgtatctattgaaatctatgagcacaccagttcctacacacacacacacacacagacacacacacacacayacacacttccttgtgatactgagagcattatttctattacttgtgactaagaaatctgtctcttaaatgtgtaattcccaggttttagagtaaggacttgagtaaagaaacttgcaataaatcctccaaaagtatcctaaagtctctgggcttttgatgctgctagcttgaaaattactgaagaaatttggtctatttttatttctgccacagactattacttatacaaaagccttaagggggtttctctcggctaaaaattttattgaaaacacaagattcattctattataatcttcatcctgatcatttcgttgtaagaagtccagtagctgttgttctctactgatgtccctgatcataggctaaatgtaaggagaaaaatgaggatataaaatgtccattggatg

SEQ ID NO: 339132 - DNA, 527 bp, Homo sapiens
ttccatgagtcctacctgttttccaatcatagttctccagttattctgtatctattgaaatctatgagcacaccagttcctacacacacacacacacacagacacacacacacacacacacacttccttgtgatactgagagcattatttctattacttgtgactaagaaatctgtctcttaaatrtgtaattcccaggttttagagtaaggacttgagtaaagaaacttgcaataaatcctccaaaagtatcctaaagtctctgggcttttgatgctgctagcttgaaaattactgaagaaatttggtctatttttatttctgccacagactattacttatacaaaagccttaagggggtttctctcggctaaaaattttattgaaaacacaagattcattctattataatcttcatcctgatcatttcgttgtaagaagtccagtagctgttgttctctactgatgtccctgatcataggctaaatgtaaggagaaaaatgaggatataaaatgtccattggatg

SEQ ID NO: 339133 - DNA, 527 bp, Homo sapiens
ttccatgagtcctacctgttttccaatcatagttctccagttattctgtatctattgaaatctatgagcacaccagttcctacacacacacacacacacagacacacacacacacacacacacttccttgtgatactgagagcattatttctattacttgtgactaagaaatctgtctcttaaatgtgtaattcccaggttttagagtaaggacttgagtaaagaaacttgcaataaatcctccaaaagtatcctaaagtctctgggcttttgatgctgctagcttgaaaattactgaagaaatttggtctatttttatttctgccacagactattacttayacaaaagccttaagggggtttctctcggctaaaaattttattgaaaacacaagattcattctattataatcttcatcctgatcatttcgttgtaagaagtccagtagctgttgttctctactgatgtccctgatcataggctaaatgtaaggagaaaaatgaggatataaaatgtccattggatg

SEQ ID NO: 339134 - DNA, 319 bp, Homo sapiens
tttgcagaataaaaatatactgtatttcaaagcattttactgtraaaaggaacacaaaaaaaggcactagctgtgtgcaatgtaggctatagtgctgatatttcaaagatgagtgacacaacagcatatatttatgaaagagagagtgaaatttatgatacatgagagaaagaatgggtattagatattcttgcatacgagtggagtataaattcaaagcacacgtggaaagactacacttgagataagagcatgggtaactcattcagcataagttgagaaaacacagtaaatgggtagtgctatgggggaaatgtgt

SEQ ID NO: 339135 - DNA, 584 bp, Homo sapiens
aaccaattttccactgcaatattcactattttgattcactctaaacacttccctgcccacaaatggaaatgtctagagtttcactgaagatatactgcagtgaatagacccaactcttaaataattgaacagyaaaatcattctaaggcagtaaatgaaaaatcttttctgaaaagtttaccttgtttattttaaaattaaaggcaaaagaatacagcatgatttaaagtagaactacagaaagctgcagtattctcagtcatagaccaccaagatttctcatgctggtgtttaaatgaggagttaatatgcaacacagaacaattaaaaacatctggacataaaaaacctatcaacatctcatagaatccttttcaataaaattataatgtcattgggttttcaatttaaaaaataagacagatacaaatttccaataaggatacagctatgcaaaagaaatacatagtgtgggttttgttactttctaaaaccaattatgtataagattgaatggccaattttaaatctatgcagtatggcatattcagttgagggaccttggatttgtagcatttaattac

SEQ ID NO: 339136 - DNA, 584 bp, Homo sapiens
aaccaattttccactgcaatattcactattttgattcactctaaacacttccctgcccacaaatggaaatgtctagagtttcactgaagatatactgcagtgaatagacccaactcttaaataattgaacagtaaaatcattctaaggcagtaaatgaaaaatcttttctgaaaagtttaccttgtttattttaaaattaaaggcaaaagaatacagcatgatttaaagtagaactacagaaagctgcagtattctcagtcatagaccaccaagatttctcatgctggtgtttaaatgaggagttaatatgcaacacagaacaattaaaaacatctggacrtaaaaaacctatcaacatctcatagaatccttttcaataaaattataatgtcattgggttttcaatttaaaaaataagacagatacaaatttccaataaggatacagctatgcaaaagaaatacatagtgtgggttttgttactttctaaaaccaattatgtataagattgaatggccaattttaaatctatgcagtatggcatattcagttgagggaccttggatttgtagcatttaattac

SEQ ID NO: 339137 - DNA, 584 bp, Homo sapiens
aaccaattttccactgcaatattcactattttgattcactctaaacacttccctgcccacaaatggaaatgtctagagtttcactgaagatatactgcagtgaatagacccaactcttaaataattgaacagtaaaatcattctaaggcagtaaatgaaaaatcttttctgaaaagtttaccttgtttattttaaaattaaaggcaaaagaatacagcatgatttaaagtagaactacagaaagctgcagtattctcagtcatagaccaccaagatttctcatgctggtgtttaaatgaggagttaatatgcaacacagaacaattaaaaacatctggacataaaaaacctatcaacatctcatagaatccttttcaataaaattataatgkcattgggttttcaatttaaaaaataagacagatacaaatttccaataaggatacagctatgcaaaagaaatacatagtgtgggttttgttactttctaaaaccaattatgtataagattgaatggccaattttaaatctatgcagtatggcatattcagttgagggaccttggatttgtagcatttaattac

SEQ ID NO: 339138 - DNA, 563 bp, Homo sapiens
gaatagaacaaaatatgagaagagatttcatactggaaaatgttgatgttatcacttgacttgktctatatttattaaatgattacattatctcctgtaacagccctgatcatcaagcaagaaaaaaataaaataaaataatagtcttgcacgcttacaggggactgatatggttttaaggtaataaaatagatattattataactataacaggttttatttttccaagtggatgtgttttattttaaaaaaagttgctttataaacataaaatatattattacataccagaatgtagttttctataatatcttgttaatgatccattcttttgtcattctgaaacaatgaaatataacttaaaaatatgcaaaaattacaaatcatgcaaaaatcactagtatccttagtaactaaagtttgagacacactataacaaaattttatatatacatatatataaatgtagttagaaataaaaaaattagaatatctttgtgtctttaaaaatgccttactgtaagttctaaaagagaagttttcaaaatgttcacaataatatt

SEQ ID NO: 339139 - DNA, 563 bp, Homo sapiens
gaatagaacaaaatatgagaagagatttcatactggaaaatgttgatgttatcacttgacttgttctatatttattaaatgattacattatctcctgtaacagccctgatcatcaagcaagaaaaaaataaaataaaataatagtcttgcmcgcttacaggggactgatatggttttaaggtaataaaatagatattattataactataacaggttttatttttccaagtggatgtgttttattttaaaaaaagttgctttataaacataaaatatattattacataccagaatgtagttttctataatatcttgttaatgatccattcttttgtcattctgaaacaatgaaatataacttaaaaatatgcaaaaattacaaatcatgcaaaaatcactagtatccttagtaactaaagtttgagacacactataacaaaattttatatatacatatatataaatgtagttagaaataaaaaaattagaatatctttgtgtctttaaaaatgccttactgtaagttctaaaagagaagttttcaaaatgttcacaataatatt

SEQ ID NO: 339140 - DNA, 563 bp, Homo sapiens
gaatagaacaaaatatgagaagagatttcatactggaaaatgttgatgttatcacttgacttgttctatatttattaaatgattacattatctcctgtaacagccctgatcatcaagcaagaaaaaaataaaataaaataatagtcttgcacgcttacaggggactgatatggttttaaggtaataaaatagayattattataactataacaggttttatttttccaagtggatgtgttttattttaaaaaaagttgctttataaacataaaatatattattacataccagaatgtagttttctataatatcttgttaatgatccattcttttgtcattctgaaacaatgaaatataacttaaaaatatgcaaaaattacaaatcatgcaaaaatcactagtatccttagtaactaaagtttgagacacactataacaaaattttatatatacatatatataaatgtagttagaaataaaaaaattagaatatctttgtgtctttaaaaatgccttactgtaagttctaaaagagaagttttcaaaatgttcacaataatatt

SEQ ID NO: 339141 - DNA, 563 bp, Homo sapiens
gaatagaacaaaatatgagaagagatttcatactggaaaatgttgatgttatcacttgacttgttctatatttattaaatgattacattatctcctgtaacagccctgatcatcaagcaagaaaaaaataaaataaaataatagtcttgcacgcttacaggggactgatatggttttaaggtaataaaatagatattattataactataacaggttttatttttccaagtggatgtgttttatttwaaaaaaagttgctttataaacataaaatatattattacataccagaatgtagttttctataatatcttgttaatgatccattcttttgtcattctgaaacaatgaaatataacttaaaaatatgcaaaaattacaaatcatgcaaaaatcactagtatccttagtaactaaagtttgagacacactataacaaaattttatatatacatatatataaatgtagttagaaataaaaaaattagaatatctttgtgtctttaaaaatgccttactgtaagttctaaaagagaagttttcaaaatgttcacaataatatt

SEQ ID NO: 339142 - DNA, 599 bp, Homo sapiens
tcattttctcactctttctctcacataagtgcatacatgcaaacacactcctttctctgtttgtcttgctagaaagacactctactttctctccacatagttgtatgtggccacagcatagcccctgaatttacttacagcctagctccagctacacagaaagacttattagttgcctctacgttacagttccaaagggagacactaattgattggtttttgtttcggtggccacctctgaatcatcagctatgaccagtggtttcagagtcacataaaagaagcctggcttctagggatcactagtccagatgaagccagatgacaaggatctgaggacaaacagaaaacaaggtaataattgagagccrgggatgtgaccaaatggcaatggcaagcacactgcactctttcaaactcggagaagatgtttaaatttgcaataaatcagtatttttgataaccaaaggtgatattttttctcttttaatgtttactaataagtcagattttgaaatgagacacacagtctcttttaccataatatacacacaatttttatatttctctttttaggtaaacagcaaaaaacgaatgca

SEQ ID NO: 339143 - DNA, 609 bp, Homo sapiens
ttccctaaaagccaggaaataacacaatatttcccctaaaagatttctttaattatattatttcttatggagctacctaaaagggattccctatttattatcactgaaatccagtatatgccatcttttagccatttttatttttgtctttacatacagatttattttctaatcttctcaaactcactatatcttcctcagtctctcactgggtgctgcacatgtattgtgcagaaatcaatttttgtttttctatttttgtttattctccattcctaacctgagatactctataaaaataaagtaatcattttcagcatctcttggtctcttttcatggtttttttwaaatttttttttaaaaaatacagtttattattaactatagtcatcatgtactaatttcatctaagttattcctctttaccaactgaaatttaatattctttagccaacatctcaccaccaacactctccccagctacctctgaccctggtaatcaccactctaatctccagttcttttatatcaacttttttagattccgaataagagtgagattaggtggtatttgtctttctgtgcctggcttatttaccttaacataa

SEQ ID NO: 339144 - DNA, 609 bp, Homo sapiens
ttccctaaaagccaggaaataacacaatatttcccctaaaagatttctttaattatattatttcttatggagctacctaaaagggattccctatttattatcactgaaatccagtatatgccatcttttagccatttttatttttgtctttacatacagatttattttctaatcttctcaaactcactatatcttcctcagtctctcactgggtgctgcacatgtattgtgcagaaatcaatttttgtttttctatttttgtttattctccattcctaacctgagatactctataaaaataaagtaatcattttcagcatctcttggtctcttttcatggtttttttaaaatttttttttaaaaaatacagtttattattaactatagtcatcatgtactaatttcatctaasttattcctctttaccaactgaaatttaatattctttagccaacatctcaccaccaacactctccccagctacctctgaccctggtaatcaccactctaatctccagttcttttatatcaacttttttagattccgaataagagtgagattaggtggtatttgtctttctgtgcctggcttatttaccttaacataa

SEQ ID NO: 339145 - DNA, 459 bp, Homo sapiens
aatgattacacaggtaatgaaagatttgggaagccaagccagggatgatgacacaacccagagatttgccacagaagaaagctgctaccactgctagggctggagggaaaacaggggtatgtgttgcaatcaaaactcaagattcagagttgtccacagggagctagatccaccgctagggctgcctggccctggaagacatrgaagagaccttgtcactgccagggatgccactagagacaaataaagagaaagagaaatacctagactctcctcctcctcccatcctccagtctcgtgccagtgccttccattggctaaatctacccaaaagccagttggcaagggagcttggggataaagggcaggggaaggacagtgaatagatctgagagcaagcaagccaaagactgcagggtcaagatgcagcggcaagacagcaggaaacaagccagatgg

SEQ ID NO: 339146 - DNA, 459 bp, Homo sapiens
aatgattacacaggtaatgaaagatttgggaagccaagccagggatgatgacacaacccagagatttgccacagaagaaagctgctaccactgctagggctggagggaaaacaggggtatgtgttgcaatcaaaactcaagattcagagttgtccacagggagctagatccaccgctagggctgcctggccctggaagacatggaagagaccttgtcrctgccagggatgccactagagacaaataaagagaaagagaaatacctagactctcctcctcctcccatcctccagtctcgtgccagtgccttccattggctaaatctacccaaaagccagttggcaagggagcttggggataaagggcaggggaaggacagtgaatagatctgagagcaagcaagccaaagactgcagggtcaagatgcagcggcaagacagcaggaaacaagccagatgg

SEQ ID NO: 339147 - DNA, 596 bp, Homo sapiens
agcatctgctatgcttctggtgagggccatgtgctgggtcaaaacatagtggagaaggtcaaaagggaagtggacatgtgttaggagaccacacagaaagggcatcctccctttataataactctgtcttgggaacctatccattcttgcaagaactaattcagtctctcaagagtgagaactcactcactaccttgagagcacaccatgacacccaaaaaacgagaatcygcaaacccctcccatctcttaaagtttccacctcccaacgtcattgctttggcaattaaacttcaacatgaattttattgaggacaaaccacatccaaaccacagtagtaactaatgtgtgttgcagcttactaagtttcaggctctgtgtgaaggcctttattagctcattataccctttgatccttacattcatcttctgaaataagtgctactattattccagttttgcaaagaagaagctaatgctgaaaaaaaattaaaattttggtgaagtgaggatttgtcttcaggcctgaccccaaagacatgcacataccttaccattgttctcagtggcctctctcactgtcatcattcataat

SEQ ID NO: 339148 - DNA, 596 bp, Homo sapiens
agcatctgctatgcttctggtgagggccatgtgctgggtcaaaacatagtggagaaggtcaaaagggaagtggacatgtgttaggagaccacacagaaagggcatcctccctttataataactctgtcttgggaacctatccattcttgcaagaactaattcagtctctcaagagtgagaactcactcactaccttgagagcacaccatgacacccaaaaaacgagaatccgcaaacccctcccatctcttaaagtttccacctcccaaygtcattgctttggcaattaaacttcaacatgaattttattgaggacaaaccacatccaaaccacagtagtaactaatgtgtgttgcagcttactaagtttcaggctctgtgtgaaggcctttattagctcattataccctttgatccttacattcatcttctgaaataagtgctactattattccagttttgcaaagaagaagctaatgctgaaaaaaaattaaaattttggtgaagtgaggatttgtcttcaggcctgaccccaaagacatgcacataccttaccattgttctcagtggcctctctcactgtcatcattcataat

SEQ ID NO: 339149 - DNA, 648 bp, Homo sapiens
agcgctaggaaagaaaggcttatactggcggcagaaaacagtacactggaatgatatgttttgctggaaggtccaggggtaggcagtaatagcctatgttataactctgtaagatgtttgacttcattacccctgctttaaaccattctgtctagccttaataaaggggtaatcaccgccattcccgtcctcatctgatgcaatgmcttcgcagtgttatgttgacatgctgtgttatgttatgtggttactgtgagcttagcaggggggcgaacactgtcccataatagaaagtcacttgccttgcagagccttagagaccaggccccccagattcccagatgagtctgatgttcttgattgggcatacagaaccaagcatcctctttcctcctctccccacaagctagtcttgctctttcttcctggaacatttaaattcctcaagtcctctgctctcttgttcattctaagattagacagctaactgggtttcgatggcaagtcttggggggattaattgaaggggcgggattaacagacctcccctaagtcaaacctccagatctgagtcatcacaaatgatgcctttttaagtgcttccatcttcgctggcatcgctttgctgaccagaggaagaacagcaga

SEQ ID NO: 339150 - DNA, 571 bp, Homo sapiens
ctgggctttcataagaggattaggcttcattcattgagaatgataagaggtagtttattaaataatgaagatttggagatgtgcctggaggaatgggaagaatttggacaagaagtgaagtcattggggaggtggaaagtcagagaagaagagagaggagggcattccaggtgaggtgggrataatgcccaggtgtgtgtaggaattagcaaataacacatttggttggagtgggtataagagacagagagaaggggaaatgagatacaggaggtaggctaagttgggcctaaatgccaggcttgggaggggtgagcaccaggcatggtttaactagaagctgattcaatcagagcaaggagtgtgcatgctcaggcacaattttaggaaaggccaaattcctaagataagaaaattctccttgggtcttaacaaaactgccaacatgaccacatgcttagatgttccatttgtcaaattacatcctttggtttgacagcaaagctgaggccttgagttaggttcctggagagtgaggggtaggacattttattggactgtattgaatttt

SEQ ID NO: 339151 - DNA, 626 bp, Homo sapiens
actccatcggttgttataagtatgatggtgaatgtagaaagcatagtcctacgtctcttttaaggtcttttctccatttattccatctaggtgtcaaacttcatctccactacccactaaacatgtcaagcattcttacctctgagcctttgtccattgcccccacctagaatccccttccctgggttcccacccagcagagccctatccagctctaaggaccctcctccacaaagtctccatcatcatgtctagctagagggagctctgtcttatctctcygggtcatttccatgaaaggcagtgttgctaagtggttacaaacaaggggttcagactgagacaaatcaaacaactcttccatgtctcagatgtgtgatccagagcctcccagaggcctgccccacttcaaggaggaagaagacattctaggttgggaaatggtaaggaacacagaaggggctcagagctgtagttcccaggagaagagctctccagtgccaccccagagagtcatgtatggatgggagtaagaagctatagaagccaccctggctgtcttactccattttgtgctgctataacagaataccagagactggataatttataataaacagaaatgt

SEQ ID NO: 339152 - DNA, 513 bp, Homo sapiens
agataagtaaactaaagcagagagagagagggagagacttgctcaagtcttcatagccaatctggagccagaatcttgatctccagacatccaagacccagagcactttttccctgaatacttccagtggctctttccatgagcagcagaactccaagtgccagaggctttgcagtgcatgcttcctgcctcttctgccaattttcaagctgcttaattaaaaatcagctccctatgtctcgacatcagctcagcctggattttgcatgacaaagccccccacctagcagagagtaagaagcccttgctcaagaaagaatgagccactacctaagccagataggcacaggcatggctgaagaaggccygagaagagggcagatacgtgctaaaagctcaaaacagagagcagtgtgcagggggtccacacacccagggtctggttggtcataggtacacaccttcccatgatccaaagaggtacgtgcttatggtgcagcttgtgctgtgcat

SEQ ID NO: 339153 - DNA, 608 bp, Homo sapiens
cctgtagcctgtggagtctgaaactgtagactaagagtataatgaatcctttggtgccctggctagaatccttctataggctggggcatgcagccttcggtggctgtaagtattggctgctagtggctcacaggttttcctttttccagacaattgtcctgagaagattgtgagccctttttcctggggggttaaactccccaatccctgagaatgaccmgtagccaatgatcaactgacatgaggggatgaaagcctagacacctggcctctgaatggaaatccctctgagttgtgattcatgctctggggctcaccgggcatttaggctgaaactagacatcagctaagaccaagttccgggttagccctttcccttactctagcccacttctcttaatctctttctctggaaaaaaaaagaatcaactgtatccctgttctgggttctgcttctaaggatgaccgaaggtatctgagtaaaaccttggaaatcatctagtccaagaccccatttttatggagtcctgccctgttcccaagccaggatgggttgcctttctcattgaagcttatactgcattttcttgtaattgtttgcttatcta

SEQ ID NO: 339154 - DNA, 516 bp, Homo sapiens
aatgaaagcaatgaatgaaggcaggatgagggagaaggggggaaggacattgcaactttaaccaaaaatgtaaaagctttcccaaaactcccccagaaacttccacttaggtctcattggccagagcagggtcacagatctgtccctagctgcaatggaaacagggaagaccgagaataggattggcaggattagcttatgtccatgatgttctatcacctggaaggggttgtgttgccttctagaactaaaacaggatgcacttagcatggaagaatgggggtacgtgcatatggggtaacaagctgcttgggtctatcatacattcatttattcaaagtgtattccgcaaatgtccactgagcacacagcaccaggggctggaagaggtgttctttctatcatccaaggccaytctcacctccagtcaataccgcagtgaaactgccctcaccaaggctaccaggaagctcaagagagataaccccagagacatcttccagggctcttcctaga

SEQ ID NO: 339155 - DNA, 577 bp, Homo sapiens
catctggaaaatttgaggaaacacatggatattaggtgagctggaaattcctttgccccacacccctctctctccacatctcggaatcatcatcgtttctaggagaacgcatgagtgcttaacagggtatggagaagtcaattctgaacctattgttagagatggattgggatatgccagaaccctgaagcagagatggaagggacaccaccagaatagtaataatagctaatatttattaagtacttccaatatgtcaagcatgtgcttacccttttcatgcattgccttatttattcctctcaatgaccctgagcctcagagaagttaagtggttttccccagtctcttggtcaatactgggcagagccccctcttcacactgcagaggactaggtgaccctgggctgtgyatgcgtcaaacccaaggggtcattgtgcctccagagaggagctttcagctcctgccatagctgatggtttctggcctcagcagtcctcagaaagcacatcacctggagacactgtccctcaggggacctaacgtccctccagccatgccttctcagtgggccag

SEQ ID NO: 339156 - DNA, 563 bp, Homo sapiens
gatgaattttttcctctgaggaggtgagaattgagttgccacagacctgtacagattcgccactgataacaataccaaacatttatatcacactaactgtgtgccagacaccaggcttaaaattgatctatgctgtcrgacttaatcctcacatctgtaaaaaatgaggctcagagaggtaaaggaactaacccaaggtcacacagccagtaagtcattccctgccatggcctgcaaagtgctatgtgatctgaccccaaccaagaattttggcctcatctctttcttttctcctcctaccctgttctggccacactgacctggagggttctggagccagccctccttacccttgcctcacggcttttgcacctgctgttccctcatcctctgcttatcccaggactgacgaattcttatcctgcatgccccacgctcctggggagcccttcccaaactgctctctctctgaagagtctatggcagatatttcctgagatctgagccacaacccttcaggccacctaggattgtggctgcagctgtggctggtggacagttct

SEQ ID NO: 339157 - DNA, 685 bp, Homo sapiens
tattgtctgggattttcttctaagcaatgacaccctcaggcaaactttgctgcctatatcattggtaacaccaatgatatcagacttgctcctgggcaacatcaatcccaatttcaactctgttaaaatatttttttaaagtgyccatctcaaagttgatgatctatgataagtatctggtcttggataagaggacagttttttagccaggaaaggtgggacaaagacagagaccttgaagcaagctgtgtgaggaggaaagaggaaggaagctcaggcctaggattaacgtgttctccatgaagtagacgaacaggttggctgtgcagctgggtggacggggctgagctctgagttctggaagcttagagtcactctaagatggggaagatgactagagcttttgaacatcctgtctaattcctgcaacagtggaagcccaggaggaaattaggaggaagctgatgctgacagggccctagagttgaggacaagcatggcaaatgctacagaagaccaagagggaatgagagaaggctctatcaaaattggtggatgaggtttccactccagatgggtggatttcctggcctcagcatgctcattcccactcctgggcccctaacccatgttgtttatccttcttagatgtctttgcatgtcacctttttctaagtactgccat

SEQ ID NO: 339158 - DNA, 581 bp, Homo sapiens
aggacccctttgtgtaggggttttgtgggaaaacgagtgtgagcaggcgctagttcaacaaaaaggatggggaggaggtagtctgggttgttgttttttaatgaatgctgaaatgctttgtttcaagtggaatcctacataacactcctgataatgaaataggatgagaactgagcctgcacagaggaggctgggggcctgccactggcccctccagacttttcctctcctgaccctcctctctgaagccatccaggaaccccataccccacagaagacagtgtgagacccaccaaccaagaggctgagatttcagcaggactggtctgtgtctgagggccggtgaacactggctccttggacagaagtgtgtggagtgagcataccctgctggcttgagattggtgtgggggtacagccagcactgcgtttgtaggtytcccacagtgggaagcagtgagaacatgagaaggtgcacggaatagcaagacacaccgtttagtgtgtgctaatcacagttgctctgaaccagtgtcctaatttggccccactacttgagcttccctagatggatcccagca

SEQ ID NO: 339159 - DNA, 529 bp, Homo sapiens
tcctcagctttcctctgacatcctaaagctgggcatgtgaggttcatcggtgtgtctacatggtcccaggatgattgagtgaggggggtgagttcgtcctgcgatgggatggagtcctgtcgagggtgggttcccacctgctgtggggatgggctctgaccgggatgggctttggccaccttctactctgaactaaaataattggggtaaaaaattaccttatttgtttttattaatctttctcaaacctatgtatagctcccatttatttcattgtttaatattagaggtgtttggggtcttcatttagaagtccartgatgtttttataaccagaaatatgcctagaaacttcactcttgttagtatcaactggcctatggtcaaattgccctcattacatcgtttcacctaaaatcacagtttccaagaacctacagacattgttaagtgatgacctacttatatactttaacatgtacggtttattttatatcaattttacctcgataaaactgtttaaacatag

SEQ ID NO: 339160 - DNA, 606 bp, Homo sapiens
aatccaaaatccagtagggcagtcaaatcttaaagctccagaattatctcctttgctccatgtctcacacccaggtcatgctgatgcaaaaggtgggctccyatggccttgggaagctctgcccctgtggctttgcaggttacagcccccattctggctgctttcatgggttggcattgagtgtctgtagtttttccaggtgcacggtgcaagctgtcagtggatctaccattcttgggtctggaggacagtggccctcttctcacagctccactaggcaatgccccagtcaggactctgtgtaggggctctgaccccacatttcccttttgcactgccttggcagaggttctccatgaaggccccacccctacagcaaacttctgcctggacaaccaggcatttccatacatcctctgaaatctaggcaaaggttcccaaacctcaattcttgacttccgtgtagctgcaggctcaatgcctcatggaaactgccaaggcttgggacttgcaccccctgaagccacggctcatgctgtacgttggcccctttcagtcatggctggagcatctgtgactcagggcaccaagttcctaggctgcaca

SEQ ID NO: 339161 - DNA, 570 bp, Homo sapiens
tgcctgtctacagtaaaagacagtctggtgctgatgtacaggcaaacaaacaaacaaaaacagaaataaacctatttaaagaaattcagtgtgttaattgagggagctagagaagcctagctctgggtggaggagtgagcctagakagggggtcttataagccagagtaaagtgcacatcactggttggggatgtggggtcaacaccaaagtagccagcccccaactgcatgccctaaagtcagccccaatagactgagcaagcacagggtgagttgttttttgtctgtttttttttttttttgacattcaaaaatttctatttttatatagtgcaacctactaataatctttgtgttggagttcattccattggcttttattgttaaaaaaatcaatcctatccatgtaatcaatttaaatattgcttatcttttcaaagatattttcagttttaaacattttaaaccctttaattccttgagaacatattttctaaaatgtcctacaatctaccctaatacttcaaacatcaaccttctgaacattatttttggtgctttaaatactt

SEQ ID NO: 339162 - DNA, 601 bp, Homo sapiens
ggatgttaaattaactacacttaaatgtccagagagataaaatagatggtatagaaattttgagaaataatagaaaactatgaaaacaggcatatttttaaaaagaactaaataaaaataataaacaataaaatttataaacaaagaaatacacaaaccaacacctcaggaaacagaccaaagaatagactaaacacagctgaagagagaattagcgtattgaaagaggaagattgatgagtaaatctctcagacartagagagacgaaggatgagaatttgatacttatgaaggaaataataaaaacacctcaacataattttaataacatttcaagaaactgaccctagtttaaatccttggaaaggggcagaaccagaattaaaatttctgttctctttaaagtctacacttttatgccccatgtgatatctttcttgggtgctgaacaagtgcgttaaatttggaaagacagattctcacaggtcttgtcattgtttcgtggggcaaaatgttttggagatggctctcaaagaataacaatgatgatgacaattcacacatacgcatctttaaaatttataaaatttgtcttatttt

SEQ ID NO: 339163 - DNA, 223 bp, Homo sapiens
catatggaaataaaaacaaaaacaaaaaccatatgtagagatttaagggaagaaaatctagctatggaaaatagataatttcttaaggtcaaacaaaatttcaaactyttaaaatctaactcatgaaacatctcaaacacgggatttcaggaatttttaaatctacagaaaagtcaggtatttattttgattaataactgctgaaaactagataatacagcga

SEQ ID NO: 339164 - DNA, 553 bp, Homo sapiens
gctgttttaacatcagtaggaaccctttaaaaatgataggaaacctagcaatcgagacctatatttggtaggaaaataaatcataacaaatttccagctgttattaagcatgccttgctcttccaggctgccattcctttgctatcataatttctgattcctagaatgtgtgaaattctggaataaaaacctaatttctggtttccccattcttctcttccttgagactcaatttcaaaygtttcctgccctgataaatatttctaatctctacctcagggattcctctgcatacaaatgtattcaagatttactatattgtattagaactgttcatttgtgcttctgtaagccttcacttgacacagggttggaggttctgatcacattttcatctcaatatcccagacacatatggctttatccccttttcactgagtgaagaaatttctcaaatttagagtagtttagtaataattcagctaactaaggaaaagcctgccctcaaatgcctgattacagatttttaaatttgctttaattatcattgtag

SEQ ID NO: 339165 - DNA, 549 bp, Homo sapiens
taagcagcttgagtgggaatatgtagggaaaatagtgtttatcaaattctattttatttgttccctctagtgttcacgtgaaggctatgaaggctacatttatgagactccctcaaagttaagttgggatcatgcagctaggttccagccaacagaatgtggttggaaagaatatatgccatttccacgtttacatcacatctggatccctgagccagtttggaagagaacaagttgctgtacattgggtgtagcatgagtagaaatactttttttattatcactaatttttcaggcttattttttgtgaagtagaacttgtcctgtcctgactgaaatagatgcaccatcttggcagacatagacagtgttgraatgtagataattagatttatactttgaaaatgagaactggaatttgcctacctggttggaatagtttaaaaagcagcagtgggtaagctttcagagagagtgaatgaacagaaataaaagcataaaacacggggcatggatggaaattcagtaaagtaataggaaaaagaaaca

SEQ ID NO: 339166 - DNA, 658 bp, Homo sapiens
catgtatacatatgtaacaaacctgcacgttgtgcacatgtaccctagaacttaaaataaaaaagagagagagaaacagcacaaaacaggtatgaaatcatgagttgacagaactgcaagaggctgagagtggttgagtgcagggtcaataaagaatgccaccaaatatataagagatgagcaaaagaaagatgtgaaaggctttgacagccatacaaggagttggacaataggggagccactggaagaatttgcaaagactggacaggagggtaaaatagcccaactttcattttttgaggcttaatataattgcaaagcaaaaggctggcactgaattatggttgacctctggaaacagccttggaaagctgcttctgttagaatctcaaaggtgtcagattctcaggaagactacaagaacctctaagtaggcagaaaagagcaataagaaggcatcctctccctctatggctccaagaataggaatgtatttctgctgtgctgttgatrtcacctggagtaaggaatagtgagtttcatgaatgtcttatgtggaccaccaagtaaagttatacttattagttatccgtcttatcaatagaagactcagccctttcaggcttctccagcattccctgttcatcgttcaaagctt

SEQ ID NO: 339167 - DNA, 560 bp, Homo sapiens
tattaagcatagcttttaatctctcttcagtactcaccttgaaacatacccagttaaactcacctaaccaatgtcaactctagttgctcagtaaacaacataggctgtttcattgatcccccatcctaaggtaattgaaagttcattttttgttacagacttaattctttctttcacacttctacaccccctgcaggaatgatagagagaactttctttgaatcacgtggcttaattttccatgatgccctagagtaaacagaaggggtggttcagcaggtaaagagttaaactttgcaagattcacatatggagcagcttagccaaaagtccaagcttgggttctttgttggtaggaagaatgagggggraaaagacaggaacatagcaaatccatgtcttgtctaacaggatgctgagccttctgttctatttccaactctcatttcttgcacactcctcaattgaattcttgtcaggttttccttgcatttggctgaacccggaaatccagatatgcacatcataagttgatgagtccagacgtttagtggaaatta

SEQ ID NO: 339168 - DNA, 582 bp, Homo sapiens
attcatctatgaaagtttatgctcaggcatagagatatctaaggaggaggagtacacatgtatgtgtgtgtgtgtatgtacataaacatatatacaggaagcagagggattaccttttcctttgtttcaaaacatatttgaacacaatagaataatggtggttaggtggtcagttttatttattgtactgtgtgttgtttatagttttcaaaatgatttcatggctagtatttcattgattttacaataactctccaaattaggtaatgtagttgtttctgttttatagaaggagaacagagggtctcaatggctttcccaagttcattcttcaaggaagggatagaaagaactcaatgtatttctaaccagtgacacttactcacacttggatgcgagttgtgatattttttatttagtttagattaaacctagttcagttctccttccaccaaggttggcaggcagtacagcaayagtcatctttcaaggttgctttccctttctttggataaaacaaagactcctgagatagggtcatgacattttgccatagtggtcactaatgccattgccagttgc

SEQ ID NO: 339169 - DNA, 395 bp, Homo sapiens
tctgcacatgtatcccagaacttaaagtttaataaaataaaataaaataattaagaaaaaaaatgaatacctataagtgcccatcaagtaaaccatcttatgatgcatcttgaactgaccattaacaagtaatgagattgaagccataataaaaagttttcctgtaaaaaaaagcctgggatccagaggcttcattcytgaattctaccaaacatttaaataagaactaatgcaaatcctactcaaactattccaaaaaatagagaaggagggaatacttccaaactaattatatgaggccagtattaccctgataccaaaatcaaagacacatcaaaacaaaaaagaaaaaaagaaaactacaggccaatatctctgaagactattgatgcaaa

SEQ ID NO: 339170 - DNA, 594 bp, Homo sapiens
ataaaaaatctccaaacacacacacacacaaaagcccaggaccaggtggattcacagctaaattctacaaaacatacaaaaaagaattggcaccaatcctccttaaacgctttcaaaaaatggaggagagaatccttcctaacttttccttaaagccagtatcagcctaacaccaaatgattaccctaataccargcaaggacaaaacaagaaaagaaaactacagacaaatatccctgatgaacatatatgcaaaaatcctcaaaaaaaatagcaaaacaaatccaacagtacataaaaagataatataacaaaatcaagtgggttttatcccaaggatgcaaggatggttcaacctacataaatcaataaatgtgattcaccatttaaacagaattaaaaacaaaaaccatatgatcatctcaatagaggcagaaaccacatgatcatctcaatagatatggaaaaagcatttgataaaattcagcatcccttcatgaaaccctcaacaaagtatgtatagaagcaacatacttcaaaacaataaaagtcatatacaacaaacccccagccaacatcatactttacagggga

SEQ ID NO: 339171 - DNA, 594 bp, Homo sapiens
ataaaaaatctccaaacacacacacacacaaaagcccaggaccaggtggattcacagctaaattctacaaaacatacaaaaaagaattggcaccaatcctccttaaacgctttcaaaaaatggaggagagaatccttcctaacttttccttaaagccagtatcagcctaacaccaaatgattaccctaataccaagcaaggacaaaacaagaaaagaaaactacagacaaatatccctgatgaacatatatgcaaaaatcctcaaaaaaaatagcaaaacaaatccaacagtacataaaaagataatataacaaaatcaagtgggttttatcccaaggatgcaaggatggttcaacctacataaatcaataaatgtgattcaccatttaaacagaattaaaaacaaaaaccatatgatcatctcaatagaggcagaaascacatgatcatctcaatagatatggaaaaagcatttgataaaattcagcatcccttcatgaaaccctcaacaaagtatgtatagaagcaacatacttcaaaacaataaaagtcatatacaacaaacccccagccaacatcatactttacagggga

SEQ ID NO: 339172 - DNA, 574 bp, Homo sapiens
aactcaaactgcaactctctctctttgtctctccctcctcccttctctctttctctctctctctatatatatattctctctctctctctgtacatatatatataatatatatatacatatatgtaatatakagagagaatatatatgaaaatatattattcatatatgtataaaaattaaatatattatatataaattatgtgtatatctatatacacactatcttaacaaagtgatctgagaacaaacaatatattctgttgattctgtttccctaatgaacctcactaacacatctgacttatatactgcaattcttttctgaaataatattattacatgagaattcacactttatattgaatgaactttaaaatatgcaacacaagatagaaaattgaaattttaatatgaattaggtcattgattaaatattgactccagtctttgtaaaatgttctaggatccaaaccacacacatttatgtttttaagatccagtttttaggatgccagcttgtctcctctgctctgtggctatcatactgaaggctttgcaagccttgggtgcacca

SEQ ID NO: 339173 - DNA, 587 bp, Homo sapiens
atataagtcaccacaacactaatacaagattatagttttcaaatttaaaataaaattaatttaagcacactgacagaaatatcaagaatgaattttgtcttcaactacaaacatcactgcagatgtcattagaaagactattctaaaagatgtttagaaaactaccttcagaatcttgggccttattatcataatatttttcaggtgttgattaattgagtatctagtcttatgatccactgagtcacaaatagaaagacataagattggcaatggcttctacaatatttcatatttgttattttcagaacatatcaacaagagaaaatttattatagtattttttgttgatgtggccctaatttgcttttccctgctgttctacaggtctacaatggtgagaatctaagatggaatcctgaaaatcctatgcttttcaaaayacattttgagttccctttaacctaacacacagatgccaagtggcacatttagcagtagactgggtgtgtcctcaagcaaggatggagtggcacactagagagtttgaaaatggctcttaatattgtcagaactaagttaactga

SEQ ID NO: 339174 - DNA, 505 bp, Homo sapiens
gcatagcagcccaaacagactaagatagtaagtttcatgcagtcttttctcagaggggaagtactagtgacaaacatccttaatgccaagaaaggcttgagtcattgtgataacatagctcagggcataaactttgacattagatggtcttgggtttgaatcccaggtaggccatttgctgagagtgactttgggcaagttaggtaatctccctggaacttcatttttctaacctataaaatagagatgttgacattatctmcctcactaggttgtgaagattaaatgagataatgaatggaaacatctaacatggggcccagcacatagtaaaagatcaacacaggtgaactagcaatatgatttatgcattattcatggataagagttcctgtaatggggctgggtgcgatggctcatgcctgtaatcccagcactttgggaggctgaggcgggaggatcccctgaggtcaggagtttgagactaggctggccaaaatggtga

SEQ ID NO: 339175 - DNA, 615 bp, Homo sapiens
ttagatggggacctgaatttggccaggctgtaacaaaaacatttggacataaaattaaatttagaaagaggaattaccatttttaaacaaggcttgaaactgagctagttaaaatagtcacagtgcagacaaattgatgtagaagttaattgttcagttctataccaaactagttcgggtatcaagtaaaccaagaataggtttcctcaaagtaaaagataaaagagattgaagattcagggttaaatacatatagatttcactagtgatactgactttacatatgcattataaataatctgcctagggatgatgcatcattagagtcatgagttgccacttactcgctgcttctgccagtgaagaaaacaatagcagcttttttttcttagtactgaattctttttaattgccctgtagtccaaaagtgtgtttggtatgaatagcagctttttttctagcaaataagaaataaatgagtcttattttttattcttcttttccctgtgccagttcccaagaaatctcaacamaatacaacaggataaaatattttaaaaagccagatttgcctgagaactctttctgattatttccaagccctgggcaaaggaa

SEQ ID NO: 339176 - DNA, 626 bp, Homo sapiens
atatttatcagaaaagcacccctctatgaaataataaatcttttggccttcctggggggctttatattttataaaacaagacaaaaaaaggaattgcttgcagtagattttaagcgatacaaaatttccctctaagtttttgttggaatatttcttcctaaattttaaaaagaatagtaattaatgctatattttttcttcaaattccatcttaaactttacttcttttatctcactttcctacagtgtaaattatatagtatactttacagatatataattttaaaattacatacagtgtaaattttatgcatctgtatatatgtgtatacayacatgtttgcgtgtttataaaatatgtgcgtgtatgcatctgtacagtgtgaaagcctgtgtgcttagcttatgacatattgagccttgtattgttttttacattcattattcattcattaattcaatgaatcttcacagtgctctataacgtaagtagtattaatgtcctcattataaatatgaagaaattaatgtataaagagtttgaataacccaaggtcatacagtggcagtaatcaaaccccaaattgtgctcttaatcaaaatgccttatggctttttctaatttt

SEQ ID NO: 339177 - DNA, 402 bp, Homo sapiens
tgcaataaatttctttattatgaaatatacttcccttagctttaattgcacctctgacctgtgtctaatagcatcttttaaaaccatgaaagagaatactaagcattatacttctacagaacttgttttttctagctacattcttaagtaaatttagtaaatatgaaagggaattgtttttctcccaagtgaagtaaaattgcactacaaatcattttctgctaatgattgtattcttttaaaatagcaaagcatatttggtctctaatcactttgcctatcattgtaatgtaatgttaattttaaagagttctrttttggaatgaaaaactaatatactgaatctttattcgaaatgtacttatatattaaaatgctttgctaagcttttgttaaatctgc

SEQ ID NO: 339178 - DNA, 540 bp, Homo sapiens
tacttttaatatgtattgccctgaaatagatgaaaatattaaccataatgtcaactatggaaagattaaagtacgaccctgacaatatacaaaaatgtataaataaatatgcacaaattctgattcatcattcacctgagttcatttttctcattagagttctctttctgaagctaagggaaaaactgagcctaagacaagcagagaattaggtccatgggacacatcrgttgaatggaaagaatttcataacatatgtacataattttttcttcctcatgactggaactactccattctttttctttcttaaaatgtacattaaaaaacagactaaaaacaaaaaataagcaaatttttaaaagacttgaagtcatcttttctctgttgtgtgataataggctgtaattcagaaattagtatttgaaagttgttttcttcttctgtttttttaacctttttaagttccctcagggagcaattcagcaggtgataaattagagaatgtgtataatcttctttgttcagaaagtatctatt

SEQ ID NO: 339179 - DNA, 607 bp, Homo sapiens
atttttcctgtttttcaacacaggagctatctcttgttagcataggtatacaaaattaagagataagttgtcaaaaggagacagacaaactagagaaaggccaatctgaaaaaaactttatacttcctattgtggcaagatatgttttgccttcatatgaattacttctctagagatctagtcccttgccatcaacaagaaggaatggtatttcccatcctgccttaaattaaagattgcagcycttgattgtttcagagatagcaaattatattagtttgacattatgtattttatgatatttgcaactggatcatttattggaatattcattttcattgtttcatatgtccttgatgattttataaagtctgtattgctactgaaaatatgaaactctgggaaaatatgacaattgtgaatcatcatataaataaaacttcactagtttggaaaaatggaagtgataagtgcaaaaattctatatcagaaggtgttttaaaagacatgcaaacatgtacttcttcccaaagagactgtcagaaaagttcagccaggtttgccttaatgagcatagaagaattatttagtattgtataggaagggt

SEQ ID NO: 339180 - DNA, 343 bp, Homo sapiens
aaatattactgatttaggttcaattataataaaccaaatttccyggtaggcaaaatgatttatccagagaagaatgaggcacaatgcttcacaaaagacttacttttttcccaaaatttccatgaatattaagcatgttattaaggagtgcgtgaagtgcaggatatgatgacatttcctagttaattcagcactagggaacagcaattaagttcatccagggtacaatagatggaaatagttttaacatcatcccagaggctttcaaaagggaacatgttatggaactatcttacttgtatatctttgtgagtatccatatgtgcccatacatttaataatt

SEQ ID NO: 339181 - DNA, 515 bp, Homo sapiens
tttactggcctagttttatataagaaaaaaatactttcttacgttatttttttaaaaatacttttttcttatgttaactattaggatacttaatttactatatagattttattctttttatgctagtagtattttttcttatattacaatacattaaaatactaatgtaagaaaaatactgctagaagaaaaaaataaaatctatatagtaaaaaacttcaaaatttcataatttgagggtaaaaakttgatttggatgaatcaagatataaaattcagttaaaagatggctgctgtgaaaaccaaaaggatattttcaatttccacaatatttcttatatttgactacatttacatacatgaagatttttctttgaaaagtcattaatggaaagagctaaatgtttgcagattttttagaagaatgaaagttggaaatttatttggaaagctcaacctcttggttttaattgcaagtaactgaatccgactgtttccattgtagttaaaactta

SEQ ID NO: 339182 - DNA, 275 bp, Homo sapiens
atcaggggttcacaggggttcatagatctaagtctctccatgaactcctaccacagattcctagaaaaaagcttttatctagaaaattttatcccagaatggaaatcattatcctaaattatctratttttctccatttgcatattgaaaattaaacatataattgttcaaatagcactctactgacataattataaaataatgaatattatctaataagaagaatatgaatatcaatttcactgtacaaactgacctatctaggtaatctctca

SEQ ID NO: 339183 - DNA, 511 bp, Homo sapiens
atggcaggtctgttctgacccttctctccaggtctcagatgatttgaatcatgtaaggtgactgatatttttgagacttttcttgttactctggattttcaggtggctcactgcatttaaaagaaaaaagattttttaattttaatgtatttcacacaaataggaaaatgtatgcatatgcataaatatcaatgctttgaaactaaccatttcaaaactattgcaactgaataaataagcatataaatactattgacattaaagaaatacatytcagggttattaaactctttgacttgcttggtagttcctccatctttgacaataaagttgtaactactattatgtgtagatccatataatttctgacaatatatggcatattgtgtcttgatttgcattttgctggttcctaaagagcttgcaattctggttcttaaacatcttctcttcatttatcaagttatcggaatcttttctcaatttaactttagaaaatctgttggcaaaa

SEQ ID NO: 339184 - DNA, 649 bp, Homo sapiens
ttgcaattctggttcttaaacatcttctcttcatttatcaagttatcggaatcttttctcaatttaactttagaaaatctgttggcaaaagcgagggtagtccttgttttaatttcaaaattagatgtctaaaattgtagatgtgttagtccttgttttaacttcaaaagtagacrtgtaaaattgttaccttcatgggattccaagatatgacactgaagtctcttctattctcagtcagatggtgacagtttgagcaagctagacattcacaaatacttgagcttgtctagagggaaaggttagtaatgtttgtctgtaaagaaggtgtgaaactcttttgtttctactttcaaatcccagttcaccaattactggtggtgtgaccttagactagttaatcacatttttgcctcgttttctcgtttgtaaaatgagaatggtaaatagtatccatttcataaggtgctgatagaaataaactaattaacatatgtaaagccttggaagagtgcctgactataattattttaatcattaagctctgtcactaaagattcctcagtatttgtaagttaagagggcagcagcctatctaaagatatgcttcattataagcattcaaatagaatcactgtgagcaacttaa

SEQ ID NO: 339185 - DNA, 595 bp, Homo sapiens
gtaactactattatgtgtagatccatataatttctgacaatatatggcatattgtgtcttgatttgcattttgctggttcctaaagagcttgcaattctggttcttaaacatcttctcttcatttatcaagttatcggaatcttttctcaatttaactttagaaaatctgttggcaaaagcgagggtagtccttgttttaatttcaaaattagatgtctaaaattgtagatgtgttagtccttgttttaacttcaaaagtagacgtgtaaaattgttaccttcatgggattccaagatatgacactgaagtctcttctattctcagtcagatggtgacagtttgagcaagctagacattyacaaatacttgagcttgtctagagggaaaggttagtaatgtttgtctgtaaagaaggtgtgaaactcttttgtttctactttcaaatcccagttcaccaattactggtggtgtgaccttagactagttaatcacatttttgcctcgttttctcgtttgtaaaatgagaatggtaaatagtatccatttcataaggtgctgatagaaataaactaattaacatatgtaaagccttg

SEQ ID NO: 339186 - DNA, 649 bp, Homo sapiens
ttgcaattctggttcttaaacatcttctcttcatttatcaagttatcggaatcttttctcaatttaactttagaaaatctgttggcaaaagcgagggtagtccttgttttaatttcaaaattagatgtctaaaattgtagatgtgttagtccttgttttaacttcaaaagtagacgtgtaaaattgttaccttcatgggattccaagatatgacactgaagtctcttctattctcagtcagatggtgacagtttgagcaagctagacattcacaaatacttgagcttgtctagagggaaaggttagtaatgtttgtctgtaaagaaggtgtgaaactcttttgtttctactttcaaatcccagttcaccaattactggtggtgtgaccttagactagttaatcacatttttgcctcgttttctcgtttgtaaaatgagaatggtaaatagtatccatttcataaggtgctgatagaaataaactaattaacatatgtaaagccttggaagagtgcctgactataattattttaatcattaagctctgtcactaaagattcctcagtatttgtaagttaagagggcagcagcctatctaaagatatgcttcattatargcattcaaatagaatcactgtgagcaacttaa

SEQ ID NO: 339187 - DNA, 549 bp, Homo sapiens
ttttagatgaaatatctaataagctaactgtctataaattctaagaggagttaccctttaaaaacagtacactactttttggtacagattgaaaagctgtattagggccgatcatagtggctcatgcctgtaatctcagcactttgggaggctgaggtgggagaatcttttgaggycagaagttcaagactagcctggccaacatagcaagaccctgtatctacgaaaaaatttaaaaaattagccaagcatagtggagagaaagaaagaaaagaaaagaaacccatatcagaactattgatgaacataaactgaattacagggataagaactatcccactatctccaatccagagaggatgctaggatagttaagggtgcaggaaatacaaacatacatgaacaaatccacacattagaaacacaagagttataaagtcttttgataagaaaataaagaaatatataaaggtaatagctaaacttagatggatatttactgatgacattattacatcatagccatctgtagaggagtttaacttctag

SEQ ID NO: 339188 - DNA, 534 bp, Homo sapiens
acatccagcaatataaagagaaagagctatttgagatggagtatccacggaagacctctgaaaggtgacattggagcaaagaccagagcaaagtgagggacaaagacttgtgaaagtttgacaaggagtatcccgggcaggcagttggtttgtttgttgcctgtctggctccctcagaatataagcaccacaaattcaggaagcttcagttatcatgctaactgcaggtatcacagtatacagtgcctggtacggagtgaaaattccataagtattggattaaatcagttttcaaaatatttatcttttgaaaaattagtttggtgataagttagggatgaattataaaaatgcagcatacaaatatcttttaataytaaatctgccataatttttttctaaacaatgatatgaaaacaagtccaacaagtgttattaaggagtggaaaatatgcagggaaattttaagtggaatgttgattattaaatttacaaggaaacaaaagtagagagccaaacaaacaaaagaaaaag

SEQ ID NO: 339189 - DNA, 612 bp, Homo sapiens
gtacacagccacgttgatatacatacagtgtggaatgattgattttgaacctcccaccttaactagcttcctgtactggttctctctgtcactatttatgtctcctctggctctggctgatcctccaggttctggctctttgctttccctaacttctcattcctgccactttcttcacactctgatctctgcttccaggatctttgcttcctaggcctttttattacaagcgtgactttaaagctcagtggccaaactaatcttgccctcaaacagccatcctcctgtcactttccttccctaaccttcacttgtgttctttaggtggaactatgtcatgaacactggggattttctttgaaagtaatgatgcttgctaatgtgcaatgcttctctgggaacagagactgacargtatagcacaactaaagtaccctcacccaaggtacaaatgaaatgcagcgtggctttccattctctgtactttgaagatatgttgtcgttcagcagccatctgagcagctattttgagcatatcactaggccagtttctgtgaggaatacaaaaaagcaggttcctcactgttcagtggcctgcaggaagagtagtgt

SEQ ID NO: 339190 - DNA, 577 bp, Homo sapiens
tccaacaacttatactgcaaatattttcccctgtgttttccatacatatttcactttaaaataaaaatcaaagagatgaccttaaaatatattaccattgttatttttttaatatgcaaacatttgcacaacccagaccacaagtcatgtgaataattcacaatttatcttttttttttctattggagagagtattatcttccayactgcaaagaatttggctccttagtcaataatatttagcaaaggaagtggaggaatgtagagtgataatctgagatgtaaacgtgtttcagctgccacatctctgaagcaataattcctttcttctgagaaaatacaaaactttgtataggttacccactgttgtgtcacaaacaaccctaaactttagtggcctaaaagaacaactcatttttctgtctcatggttcatggattgacttagcagttcttattcagagtccgtcatgttgcagacagatgatggttgaggctagagtcatatgaaggctcaactgagttgaatatctaagatggctcattcataaggctggcagtgtgggcaggctgctggc

SEQ ID NO: 339191 - DNA, 577 bp, Homo sapiens
tccaacaacttatactgcaaatattttcccctgtgttttccatacatatttcactttaaaataaaaatcaaagagatgaccttaaaatatattaccattgttatttttttaatatgcaaacatttgcacaacccagaccacaagtcatgtgaataattcacaatttatcttttttttttctattggagagagtattatcttccacactgcaaagaatttggctccttagtcaataatatttagcaaaggaagtggaggaatgtagagtgataatctgagatgtaarcgtgtttcagctgccacatctctgaagcaataattcctttcttctgagaaaatacaaaactttgtataggttacccactgttgtgtcacaaacaaccctaaactttagtggcctaaaagaacaactcatttttctgtctcatggttcatggattgacttagcagttcttattcagagtccgtcatgttgcagacagatgatggttgaggctagagtcatatgaaggctcaactgagttgaatatctaagatggctcattcataaggctggcagtgtgggcaggctgctggc

SEQ ID NO: 339192 - DNA, 553 bp, Homo sapiens
tatgatgtagcctccaaggtcccaaaagtcattttcactatactttgttagtcaagtaagttaccgggaaagtccctattcacagggaagggcattaggctccacctcttgatatgagactcagcatgtgtatagggaccaagactatctaccagttggcctgtggctattacaattcatatctctcccatatacaaaatacgctcatctccatttcaagacacacatgttctcattccagtacaatattagctcaaagtccaggagctcatcatctaaatcaggtcctggtatgataaaggtttctcaagtgtagttactttcagcgaaagctgtgaactaaggagacaagttagctggtttcctcacacccaccacacaatgtggctgcaagaataggacaaatgcamtaaactcttcagtgaaaaaagttggagagtatggaatgggaataacgtagccgtcactagtctaaagcatttctgaattctagctaggcatattatgtctttttttgtttgtttgtttgtttttaatcaggccctgattctgt

SEQ ID NO: 339193 - DNA, 560 bp, Homo sapiens
tttatgcatggtgaggctggaaaaatacatggggctcagacagtaagtcatggtaatgattttgtttcttattctaaaagtcatgcaaaattaagtattttaaacagtttttattaagtataatttgcatatgataaaattcacccagttcaaatgtataattcagtgattttaataaatgtactgagctgtgcaagcatcaccacaatcyagtattagaacatttccataaccccataagatcccttctgcccatttacatgtattcccattctcacccctagacctaggcaaccacgaaactgctttgtgtctaaaattgtctgttctagacatgtcatataagcaggatcatacaatgtcgtctggcttctttcacctagcctaattttttgaggtacttctatgttgtactgtacagcctatccatccatttgtattgagcacttctatttctttgtatgtattctaccttatttgtttgctagtttatgaacctttatgttgtttccacttttgggctatatgaataatattgctgtgaacattcacatttaaat

SEQ ID NO: 339194 - DNA, 511 bp, Homo sapiens
atctacattcactaaatttgcatattaggcaactaaaagacaataataatattgtattgtattatattgtaatgtatatgcacgcatgcgtgatgtttgtgtcacctgagttatgcctaggtctttcgtttgagataaatacatgtaatacaaactatcatttttataaatgattataatgaggacaatcacagatcagtttgagtgaatcaagcttaagtatatatttatttacacttttgcaaatctcactgtgaagkcaaatcaaacaacttgattgacattttaagatttcaatgaagaatttcattgccagataaagttgaacacatgtatttattatacaccaaataagaactctctaatattgtatattatgaagtataatttttacaacttttattcataaatagcttgtgagaatcatatcaaggaagatttaaatttttatttatttaaatattgttttgatggagtttttatatgcttgagtttttacatttattccctt

SEQ ID NO: 339195 - DNA, 543 bp, Homo sapiens
tatgtattttgcttctttggttaccaggaaatatttctttctcacacaggctctttaggttggaattgcctgagtggcttttaatgtttatagaggaaatgtaggaggaatgatttcttttaaaaaatgatttataacccctatagggattcataatattattaagaaattttaattcactgaattctggatagcagaactgcttcagcctcttactttttttttttggacttttactttcataatttctcctttcactaataccatcttttacttttattttgrtcttttactgttcaccctgcttaatcaaatctttccccatcctataaggtctaactcatgctttccttccatgaacactttcagttgtgcattgattctacatacatatattttgtaccaggaagtaatagggaagctatagaaatagttgtggacaaaaaaaaacacataaaaattgctaatataaaagcttataaagcttacattctagtgaggtggggcagacaacaaaataaattaataatctacattgtattt

SEQ ID NO: 339196 - DNA, 592 bp, Homo sapiens
acattacaaatcaaagtaaagggaatactgacgcaaacctttattttggctgagaaattagatctgggcattgaaaaacacaggaaagtcggtcagtttaaaatatgcaaggctatttttaaagtttcttgaagaaagataataaaacagtaatgagaaggcaaatgctatatttagcaatgctatcccacaaagattacatttgttaatattctcaggaaataacacttcttagtaggtctccttttcacttaacagctcttatcactgaccattaaaccaatctgcaatttctygtgtaatggattatggagctacatttttaaagatagcactctatggtaagattgcataaacaataattttgaggtaagaagtgtatttgattgcaatcatttgggtcatcactatataatttaccgtgtgacctttgtaaagtcattcgaaccctcaaaattttacttttaaaatgatatcagttcttgtcttaacaactccacaaatttagttcaaattttaatataatctgagtgagtgtcatatagatcattcatccacacacaacaaaattgatgatggggataaaatataa

SEQ ID NO: 339197 - DNA, 555 bp, Homo sapiens
actctttgaatccttattagcttcttattgtggtatgagtaacaataaattacattatttttctttgtattttgtgaaaatttaaatagacaaatggaaaattttctatttagaaagagatcattaaaattcaaatcacacatagtgaaattatctaattcatttcttgatataatccagaaatggctggatagagatctgaacatgtatccagtatatgagagrcatataatgaatctttcttgctataacctacaagagaggcacaagtactatccttggtacccaaaacatattggataatgtttcattataattgatgtacctttaaaagcctttttaaagtagtgtttaaaaaatagttcatgtagtacattgagcactaaaactttcaagcctactgctaccctactactagaataaaagtattttaatacaagaaagaaaaataatatataatcatcacataacttatattttaaggttgcccaataaaatatttctcacaacctcttcaatgagtttagcatcagaaaacgaggcaaatgcaaggta

SEQ ID NO: 339198 - DNA, 576 bp, Homo sapiens
aatttttttttaaagatcgatttgctctcatgtctcaatttttgctttcttttgcattcccagcctgtggccgtgggttctacaagtcttcctctcaagatcttcagtgctctcgttgtccaactcacagtttttctgataaagaaggctcctccagatgtgaatgtgaagatgggtattacagggctccatctgacccaccatacgttgcrtgcacaagtgagttgtattatgaaagtaaaggactttccaatcccttccactcatttgtactgttgtgacatcaatgaaatagatattgaatttgtgatacattcttaattatacttaaatattaaaattattttaaaatattaagataaaattttctttcataagcagataggtttagtaatataaatatatcttacatcaactttggtgttatttccgtgtctgcaaaattaagatgcattttaatatttttcacatgtatctcataagaatcataagtaaaattaaaagttattagggtcagtcaggcagggtggctcatgcctgtaatcccagcactttgggaggccaaggcgggtggat

SEQ ID NO: 339199 - DNA, 538 bp, Homo sapiens
aggacaacactcttagaatttttaaaagtccttttgtctagcagagtgttctaaaaagcatgtcctttgtctgcatttgaatatccagtttacccagcgctatttattgaaggaagatactgtcctttccctgatgtgttcttggtgactttgccaaaaatgagttgaccataaatgtgtggaattatttctggcttctctatttttctccattggtcagtgtcagtttttatgccagtatcatgctgggtttatttatttatttctagatgggtctcactatattgctcaggctggttgcaacctcctgagctcctgcttcagcctctcaagtatctaggactataggcacatgccaccacacctagctaccatgctgtttttgttactayagctttgtagcataatttgaagtcaggtaatgtgatgtctccagctttgttctttttgctcaggatttatttgtctattctgggtcgtttgtggttccatacaaattttaggggtttttttctatttctgtgaataatgtcattga

SEQ ID NO: 339200 - DNA, 538 bp, Homo sapiens
aggacaacactcttagaatttttaaaagtccttttgtctagcagagtgttctaaaaagcatgtcctttgtctgcatttgaatatccagtttacccagcgctatttattgaaggaagatactgtcctttccctgatgtgttcttggtgactttgccaaaaatgagttgaccataaatgtgtggaattatttctggcttctctatttttctccattggtcagtgtcagtttttatgccagtatcatgctgggtttatttatttatttctagatgggtctcactatattgctcaggctggttgcaacctcctgagctcctgcttcagcctctcaagtatctaggactataggcacatgccaccacacctagctaccatgctgtttttgttactacagctttgtagcataatttgaagtcaggtaatgtgatgyctccagctttgttctttttgctcaggatttatttgtctattctgggtcgtttgtggttccatacaaattttaggggtttttttctatttctgtgaataatgtcattga

SEQ ID NO: 339201 - DNA, 538 bp, Homo sapiens
aggacaacactcttagaatttttaaaagtccttttgtctagcagagtgttctaaaaagcatgtcctttgtctgcatttgaatatccagtttacccagcgctatttattgaaggaagatactgtcctttccctgatgtgttcttggtgactttgccaaaaatgagttgaccataaatgtgtggaattatttctggcttctctatttttctccattggtcagtgtcagtttttatgccagtatcatgctgggtttatttatttatttctagatgggtctcactatattgctcaggctggttgcaacctcctgagctcctgcttcagcctctcaagtatctaggactataggcacatgccaccacacctagctaccatgctgtttttgttactacagctttgtagcataatttgaagtcaggtaatgtgatgtctccagctttgttctttttgctcaggatttatttgtctattctgggtygtttgtggttccatacaaattttaggggtttttttctatttctgtgaataatgtcattga

SEQ ID NO: 339202 - DNA, 565 bp, Homo sapiens
agatgctgaactgataccagaaatagtgtttgtcaaattggccactttggggatgtcttttcatgttcctaaaatgtctattgtttgatttctcaagttaatactatacaggctaaatatattatcaaatttctgtaagtttctggaatcaaatatttcgcagttgttatgtaaaatggctttggatgttgaytcccttctggttaagaacaaactaggttggctggagggttttttttttttttttgctttatttgtgggggaggttgatttaaatgtacaataaatatattgtgatgattgtacaacaatcctgtaaatatactaaaaatacttaatcgtatattaaaatgagtacattttatgctatttaaattatacctcgatgaaaagaaaaaatgataaaaagaatacctatacatttattaaataacataaacataaataaaggttaaaaaactaggtttgcagttttgtattaaaatactaattcatgattgcctagtctgactacatctcaaatgctaaaactcatgaatttacagttaactttttctaacagaga

SEQ ID NO: 339203 - DNA, 574 bp, Homo sapiens
ccatttgttatttttgctaatcctctccctctggccaccctccaccccacagtaggccccagtgtgtgttgttcccttctgtgtgtccctgtgttctcatcatttagctcccacttataagtaagaacatgtggtatttggttttctcttcctgtgttagtttgctaaggataatgcccacccacttcatccatgtcactgcaaaggacacgatcttgttcttttttgtggctgtgtagtattccatagttttccattcttaagcactatttwagtgctgctttttaatattagtttgtccaactacactaagtacctagtgcatgtcaagcactatgggggatgctaaggataggaaggtaaagaatggttctcttcttaagtatctaacaatagaacactttattataatgttgtagaacaacattgggaacaaaatacaaaactctgaagaatgattcattcagagaacaaatgaaagcccttccataaaagatgttagtcagtctagagtttcagaatggatgtgattttgctagatgtaagagtataaaagtaaatcctattctaggcc

SEQ ID NO: 339204 - DNA, 607 bp, Homo sapiens
aattcaaaaatactaaagcgtgaaaactgacactccctcccaacctgtccccatgtaactaaggtacttttccctgaagcaaccactcttagcaatttatttggtatccttccagaaattgtctaggtaaacacaaatatgtgcatgttttacatgaatgatattttttgatttatgctgtattttataacatatcatttaacacatatagatctgcatcactcttttatcagctctgttgtattccattatacatatgcaccatgatttatttgaccagacacttatcaataagcatggtcctttcccacytctttttcttactaattatgatccaatgaaactgctggcaaactggtatctaattaattaatcctataagaagagtaaaatatttcaaagtggtctagtgcccacaggtgaaaagaggtaggcaaagttacatggactgaataggcaaaatgtggcaattgttaaaactcctttagaggttttgctttagaaaagaaaatgagcaatttatttggttattattatttaaaatattctagagcagtgccactcaaagtgcaggctggctactcaaaacacagctgcaagttgttgg

SEQ ID NO: 339205 - DNA, 623 bp, Homo sapiens
cctctttctccctattatttaagatatgtgcttagagggagcacattgattatgtagggcttctatgagaattcgctaatgagaatatattattacccagattgaatagtgcccctttgatgcattaaaattgccatgactcaggaaccaatgtcctaggagaaatcttggtatccaagataataaagtcaggtaagaaagaccagattacctctattttgggtgaggaaagatgattaaagtatgacttatgatgcactttagaaaagtgtggattccatcatgccaaaacatttcccagctggctaatacttgaaaagtcaccagtgaaatgttttcccttaaaactctcatatattgttgtatcattcaaagatatttwttcagcatttcacatgtttcatacattactctagatgctgggaaaagctatagacaaaaaaagaaatctctgtctttaaaaagtttctagtagaagtggagtgcaagtagaacagacagaaatatactaaatgtgtaaaatataaaaaattagatgatgttgttcaaacaaaatacataggaaagccatgaatggagtgtcaagggattacagtttttaaaaatttccaggaaaggcttta

SEQ ID NO: 339206 - DNA, 517 bp, Homo sapiens
agtacatcctattatttagggtcatctgaagctatctcctttcactattgatggtaaaattagacctaccaatgccctttgcagtacgaacttgggagatttgcatatttttactatcgtggcaggatatatcaaatactgctgtggataatgacctctaagctagataacatgttaaggatttgggggagaaatttcattataattgcttggacaaatttaattcccaaacaaatgaccttgcttataacaagaatggttgaaaattatgtattagctttagaagttttagcacctggctgtgtcgacctagctaggccacttcttatgttcattctgaataacaggyggtagaaaactttattcaaacaaatttgattgattgtaattaggaaatacataatgtgggatgtttctagaatgagaaatataagaaatttgactatttcagcagcaatgaattttctaacgacagatgctgatacttatagggcagtcattgagaactttccccaag

SEQ ID NO: 339207 - DNA, 498 bp, Homo sapiens
tagaaatctaataaataatttgaattcataaaatgcatttacttataacttttaggtttaaagcaaatatagaaatgggaatgtgtaaatatgatatatcaaaagttgagagatacatctatatttcactgaaagaaaatgtagagccatacatgtgtacattaaaaagaagaaagctggaacattaataatccaagactatactaaaggtcatcagaaaaatcacagcaaattatgcctgayaataacaaaatatagaaagctttatgggaacaaacagatatgtttaaagcagaaaataaacctataagtagaggtgtaactaagtcagaaggtagttctttgcaaaaaccaatacaactgacaaacacttcaaacagctaggaagactaataaagaacgagtaactaataattaagtaatataataaatttgaaaatatataaacaaagatacatctaattttagagaaaaaaatagcatgtattatgaaaaagc

SEQ ID NO: 339208 - DNA, 532 bp, Homo sapiens
tatatgtaaagaaatgtagacatgaatatcaataggatcagcaatataatgtaatgagatttaatgaattcatattcaatgtgacctgggaatttggctgcttatatgccatcttagccagaattagtagaagcatggtgacaaaattgagagaggcaatatttccattccacggtgatccatgttggtcagataacagataggattatactttttwaaaaaaatacagggcctcactctgtcacccaggctggagtgtaggggcctattcgtggctcactgcagcctccacctcttgggttcaagagatgcctccacctcagccttccaagttgctgggactactacccacctatctgtatgccaacatgcccagctaatttttgtagtttttgtagagacaggggttcaccatgttgcccaggctagtctcaactcttgcgctccagctttcctcctgcttcggcctcccaaagtgctgggattacaggagtgagtcactatgcactgcaatgcttcatttttaatacca

SEQ ID NO: 339209 - DNA, 598 bp, Homo sapiens
agcacaaatgacagaagaaaaaatacgtatattgggctttaacaaaattaaaaactttagtgctgtaaacattcaatcaaaaatataatggaacatatatttgaataaaatacttgcaaattatgtatctgataatggtttttctttctttctttctttyttttttttttgagacagtgtctcactttactacccaggctggagtgcagtggcgtgatcatggctcgctgcagcctcaacctcccaggctcaaactatcctcctgcttcagcttcctgagtagctgggactataggcatgtgccaccagctaattctttgtagagacagggtctccctatattgcccaggctgttctcaaattcctgatctcaagcaatcctcctgcctcatccttctaaaaatgctgggattacaggtgtgagtgaacatgtggggcctgataatagatttttttaaaaaatactgaagaaactctacaaggaaaggataagaagataaccaaatttttaagaaggcaaaggatctgacaagataattcttcagtgaagatacacagttgttcaaaaagcaaaagaaaaggggctcatatcattagc

SEQ ID NO: 339210 - DNA, 626 bp, Homo sapiens
gctttaatttccccatctgtaaaattagtacattaacaattcctaccctaggaattgagaaaatgaaatggggtaaagaacatgaagcaatttcaatcaaggggaaacttaatttggccagagtaaacggagaatgaggtggaagaatcasaagataatctgtgctaactctttctagcttgggaatttgcttccctaacagtgattacctagagagtgcttgagatacaccaggtatatgaggaagagtgctttggagttaagagttgcacctctgtctgtctgacatcacggatgctcaacctctttgctaattacctatgcacagggcagatacctagatagagacttagaaatagatatacgaatacatatctactgtactgttggttgcctgggagactctcccttctctgccactatctcctagaactccataattataatggtgctggccaacttccagagggctttctttgatctgaaactgttctgcttgtggagggcaagttggaagtgctgagaaatcgataagccagccatcatccctaggagcccccagtccatggctggctaggttggtatataaatactctagctctcttgctccttgtgtggaataactc

SEQ ID NO: 339211 - DNA, 626 bp, Homo sapiens
gctttaatttccccatctgtaaaattagtacattaacaattcctaccctaggaattgagaaaatgaaatggggtaaagaacatgaagcaatttcaatcaaggggaaacttaatttggccagagtaaacggagaatgaggtggaagaatcacaagataatctgtgctaactctttctagcttgggaatttgcttccctaacagtgattacctagagagtgcttgagatacaccaggtatatgaggaagagtgctttggagttaagagttgcacctctgtctgtctgacatcacggatgctcaacctctttgctaattacctatgcacagggcagatacctagatagagacttagaaatagatatacgaatrcatatctactgtactgttggttgcctgggagactctcccttctctgccactatctcctagaactccataattataatggtgctggccaacttccagagggctttctttgatctgaaactgttctgcttgtggagggcaagttggaagtgctgagaaatcgataagccagccatcatccctaggagcccccagtccatggctggctaggttggtatataaatactctagctctcttgctccttgtgtggaataactc

SEQ ID NO: 339212 - DNA, 626 bp, Homo sapiens
gctttaatttccccatctgtaaaattagtacattaacaattcctaccctaggaattgagaaaatgaaatggggtaaagaacatgaagcaatttcaatcaaggggaaacttaatttggccagagtaaacggagaatgaggtggaagaatcacaagataatctgtgctaactctttctagcttgggaatttgcttccctaacagtgattacctagagagtgcttgagatacaccaggtatatgaggaagagtgctttggagttaagagttgcacctctgtctgtctgacatcacggatgctcaacctctttgctaattacctatgcacagggcagatacctagatagagacttagaaatagatatacgaatacatatctactgtactgttggttgcctgggagactctcccttctctgccactatctcctagaactccataattataatggtgctggccaacttccagagggctttctttgatctgaaactgttcygcttgtggagggcaagttggaagtgctgagaaatcgataagccagccatcatccctaggagcccccagtccatggctggctaggttggtatataaatactctagctctcttgctccttgtgtggaataactc

SEQ ID NO: 339213 - DNA, 495 bp, Homo sapiens
tggtgtcaggataggtttctccttctccctccctctcagacgacgtcctcctccccccggaaagtgtctccggttcgcgatttaggatcttggttaggacatggttatcggggtcctggggaacctacgagcgcccagaaagccactctgttctgaaaaaccatgacgggctgcagtagtgaagagagaacatcaaactccacagagctggagaaagatccttttttgggagctcacactttggatggttgcggggggcasgggcggcggtgggtggagggtgaaagatgtctgtctttgtttaaatgcttgacattcctgtcgtcgtgcttgcttgcgggggtagaccgtgtgtgcgcgcctggggaataaacacatgttggaaacctcgatattattttctgagcacaaacctgcagcctttagtaactggcaaagtgtagcgtcacctatctggataaaagggaaataaactttaatggcaactctgtgtac

SEQ ID NO: 339214 - DNA, 550 bp, Homo sapiens
tgcctccatgattcgattactwcccaccaggtccctcccacagcatgttggaattcaagatgagatttgcgtggagacacagccaaaccatatcactatgtcactaacccatcttcctattggtcatttgtgggacaatgtttcaaataaattactttcattcaaatcttttgtttcagggtctgtttctgggggatgctgaactaacgttgaatctgtgagactatgacttcttgtgaaaagctggtagagtttcaggtcttgacatcttgcaaatatgtgtacatttgtttcctcttccattcattgattcattttttttttaagtaaatgttcagtgtatttcttcaaggtccacacagtctctcaaacaacagccctccacgtttagtgagagaagcagaaccctgagaactccaactgcctgtaagtgtaaaattttcttgtgacctcactagctctggccacccactggctcagaatcaggaagtgcaaaagtttttatgaaaaagttttccttataaagatctttcttctctcagcatgtact

SEQ ID NO: 339215 - DNA, 644 bp, Homo sapiens
tgtatttcttcaaggtccacacagtctctcaaacaacagccctccacgtttagtgagagaagcagaaccctgagaactccaactgcctgtaagtgtaaaattttcttgtgacctcactagctctggccacccactggctcagaatcagraagtgcaaaagtttttatgaaaaagttttccttataaagatctttcttctctcagcatgtactgcttccttctccacaccctactgttagtggcctcatgaagtggttcttaactagaaataattttattccccagaggacattttgcaatgtctggagatatttttcactatcacaactgggaggggatgctactgacatctggtgagtagtggccagggatgctgcagttttagactattcaggctgctataacaaaccaccatatgtgaagcatgtttattaattaccaatgccaagagaagactcccactgagtggagaaaagcaaagttcatcaccgcaccaaccaccagaaacagaagtccatatacctatggccactgcatcctgggctactgtttcggttcaccatacactggttacatatttgtctgagtctggtgagatataataaattacacaaagcaggtttattacttacagataggcagtg

SEQ ID NO: 339216 - DNA, 644 bp, Homo sapiens
tgtatttcttcaaggtccacacagtctctcaaacaacagccctccacgtttagtgagagaagcagaaccctgagaactccaactgcctgtaagtgtaaaattttcttgtgacctcactagctctggccacccactggctcagaatcaggaagtgcaaaagtttttatgaaaaagttttccttataaagatctttcttctctcagcatgtactgcttccttctccacaccctactgttagtggcctcatgaagtggttcttaactagaaataattttattccccagaggacattttgcaatgtctggagatatttttcactatcacaactgggaggggatgctactgacatctggtgagtagtggccagggatgctgcagttttagactattcaggctgctataacaaaccaccatatgtgaagcatgtttattaattaccaatgccaagagaagactcccactgagtggagaaaagcaaagttcatcaccgcaccaaccaccagaaacagaagtccatatacctatggccactgcatcctgggctactgtttyggttcaccatacactggttacatatttgtctgagtctggtgagatataataaattacacaaagcaggtttattacttacagataggcagtg

SEQ ID NO: 339217 - DNA, 385 bp, Homo sapiens
acatttttttaaatgttatgtagagtctaaatccaatcatccttatatattttatgtcctatcttgtctctcaatcttctactcctatcattctctatttgtccttcttggcattttggtgttataactaagggttatttctgctcatggtggcatttttcagatgatgtccaggtgcatatcgactgttgtcactttattccttgtttaggaaagaataaatcaccactacttctaaacatatttttctctaaatatatcatgtttgatttttggaaactttttcatttatacttaaatatattgataaataaatgtatatgaatatataagrataacattgaacaaaaccttcacaaaaatgttaacatttatataattagat

SEQ ID NO: 339218 - DNA, 615 bp, Homo sapiens
tgttgggcacttcatatacttgagttcattaaatcctcacaatcacttccttggcaggtagccccactattctttctgtaccataccgactcctaaggaaagagtatagctaatgatcacagagaaattctgtttttcccttcacttgccctccaaggcaagcccgtaatagtgtttttcattttgccccattcagaaaactttagagatgcataaaagacctcttactaatcttgtccatttttgtacctcgtggcggatactatagtaaaacaaacaaacaaacaaaacaaaaaacctgtaaatatccttctatcttttttttctaatttccagagaaagaaaacttcttgtttaacatgtacattagttcagtgaatgcagctcagtgtctcaggctcacctmtaggttgctttctatatatttatgtcttggctcaagttaaatcaaaatgcttccaaaatggaaataacaccttttataacttttcgcaaattataaaacaatgaatgaagctctctcatatacacacatatatgcacacaacatatataatatattcactcatatgcctacacacaattaaatcaaacattgggtgaagggcctcatta

SEQ ID NO: 339219 - DNA, 620 bp, Homo sapiens
gcctgtaatcccagctactcatgaggctgaggcagggagaactgcttgaacttgggaggtgaaagttgcagtgagctgagatcgtgccactgcactccatcctataggacagagggagactctgtctcaaataaataaataaataaataaataaataaataaataaataaataaataatatatatacacacacacacacatatgatctcattttacttttttgaagcacatattgttaaggataaagtgattatcataatgcattgtttgaattatgaaaatgtaatctcaatcttakgtgctactacttacaggaggaacccagggatggaaagggctacaatttattttggaggtgccactatgatttattaacatcaagcattcatcattttctgagattttaatatgtgctgctttaactatctatcttctcagaaaatgaagcagatcaggggttacgttttcatcactattctatcccatctatgcacaagaacccctgacacttagaaagaattaaaaaatactgtgacatgcatacatgaatccgtagtcacatcagctgactgtttttatccctgataacatagttaatccttgtccacagagactttggg

SEQ ID NO: 339220 - DNA, 512 bp, Homo sapiens
atgaacaaattaaacctgttttctttgtatattacagaatctcaggcatttagcagtgtgagaagtgactaatgcaagctggattgccatgctcttgcctgctccgacatcctattacttcactttaatagcaatatctcaaatctatgctgcctagtccttgtggtaaggactcatttagctttattctttgccccttcaactccacatcttttcaaggctgacactggaggcatattttctgtcctggagggtgattcaaagtccaaattctagagaattcgtgtctcactttacatgactaggagctccaaaacttggcaatatggcccaatcagaataacaaacatagataagcctgtaaaaaaatcttttgttttrgatatcatttaaaaaacatatagattaactatgaatttgtaaaacctgcatgtctgtctttcccatagctatgttctgtcagttttcaatgaagaagagtatgatcttcaaaactactgaacttaaaaaat

SEQ ID NO: 339221 - DNA, 563 bp, Homo sapiens
tgtaatatttttaaaactttcaaatcattttttggttgtattatttaagcgggtgatttagggttcctggtacaatcttaacttatcacacagtcaaatcatattatactactcagattgtatacaagtcttagagcygtacatttccatttctatctctttccaccacctgccttctcagacaaaacaaagcaaaacaaacacaaaaatcaaacaaatccttacttttttggtagagtacttgactttcattcattgatggtggttttgaacttctcagctcaagaactataaaagaataaatttgtgttgttttaagctataacttttggagtaatttattaaagcagaaataggaagctaatacacttctcaaatttcagggctcatcatcttttgttggctaatgacttaaaaaaaattgtattatatatagtgtttgtttgcttttggctattccaggttggaagataagtctgatctctgttactccatctgaactaaaactaaaaatcctaatatgattttttaaaaaaaaaattggggggaactgtaaagaaaca

SEQ ID NO: 339222 - DNA, 573 bp, Homo sapiens
ttgctttggacagtggcttttgggctttttggcttgaagatgggcttttgccaggaacctgctcctgtctgcctcctgcctctagcatttgttttgttgttgttgttgttgagttgtttgagttctttgtgtgtatagcagtctcctgttggatgctagtttgcaaatattttctcccattctataggttttctgttcactctgttgattatttctttttctatgcagaagcttttcagcttgagccccatttgtctatttttgtttctgttgcttgtgcttttgaggtcttagtcgtgaattctttgacttagaccaatgtcaaaaaagtttatctaggttttcttatactatttctawtttttcaagtcttacttttaagtctttaatccactttccgttgatttttttgtatatggtgagagataggggtccagttccttcttctgcatatggctatccagttttctcagcatcatttattgaaaaggatgttttttcttcatcatatgtttctgttgactttgtcaaagatcagttggctataagcatgtggctttatttctgggttct

SEQ ID NO: 339223 - DNA, 590 bp, Homo sapiens
ctagctttaatcaaatgatgacaacatagtttgccagaaracaaagctacaattatgtgctgtaagcaatagcaggattgtaatattcatgtattaaataaaaattattaattgaaagagtatatgatattactacaggtccttacacttatgaagagctcagtgaatgcaatttgtattcaaaaatgcataataacaaaccaccagcctacagtcaatgggcactttctatgttgctggcgctgttctttacatgcagagattcatttaatcctcataacaaccctatgaaggaggtaagttttacaaatgaaaaataaagcaaaacaaacaagcaaataaactacaacacagagaaaccgagtacatgcctaagttcacccagcttctaagtccaggcactttccatgattgcctttgcatacccttgctttttccgtatcctctgagctggctaaagtatcccagagtagatcaaaaattagatggtcatactttaggagtaaatattaggaaactccaatgctgaatgcaaacataaattagttttgccatatggctgttattaacattaattaacattggtaagg

SEQ ID NO: 339224 - DNA, 592 bp, Homo sapiens
atgatttctaaactgctaaatgccagatattttactccgggaagatttgttgctgcaataaagcagcaagcataaagaccttaaatataaaataatgttttttagttattaacacrgcctttaaaaataatattttattactataacctggagctaggtggctttgagggactataaaaccaataaagcattcagcatagcataatatgaaagtcaagataatgttattttaataaacatttaagtccatctgaagtcatgtgcatttttaattgctttcacctctttaccagaccttgctaacttgaaagagagattgctataggatgtcactactgtttatgcatattattgaacagttggcttctgaaatgtgtggaatctatttccaaagtgaaggctgaaattttaatgtgacccccttagcatcctgtttctgctagacccataagccctgtaagtgcagagttaacagtgcatttcactctgacttcatcatttactagtaaacctaaatagcatttgagaagagtacataataaatgcattcagacattgcagctgttttttgtctgttttccaaacacataat

SEQ ID NO: 339225 - DNA, 620 bp, Homo sapiens
gcctgtaatcccagctactcatgaggctgaggcagggagaactgcttgaacttgggaggtgaaagttgcagtgagctgagatcgtgccactgcactccatcctataggacagagggagactctgtctcaaataaataaataaataaataaataaataaataaataaataaataaataatatatatacacacacacacacatatgatctcattttacttttttgaagcacatattgttaaggataaagtgattatcataatgcattgtttgaattatgaaaatgtaatctcaatcttatgtgctactacttacaggaggaacccagggatggaaagggctacaatttattttggaggtgccactatgatttattaacatcaagcattcatcattttctgagattttaatatgtgctgctttaactatctatcttctcagaaaatgaagcagatcaggggttacgttttcatcactattctatcccatctatgcacaagaacccctgacacttagaaagaattaaaaaatactgtgacatgcatacatgaatccgtagtcacatcagctgactgtttttatccctgataacatagttaatccttgtccasagagactttggg

SEQ ID NO: 339226 - DNA, 587 bp, Homo sapiens
aatgcatgccatttacagcacacatcatttgatttgttttcaatacttattttaaaatatatatatgttttttatttctgtatctgatttctgaaagtcatagattaaattttcacaaaatttatttgctattttatcactatttgattcctgtttaaatattgctcctcaaagcactcaaattagaggtatcattaatcatcaaaagcctgctgaaaaacaagaaagtttaaagttagtttgaacattactttactcaagaaacagatgaatacatcttgcagaaatgcagcaattgactattcattctatataactccatacagcttagattctcattttgcatttttattttattttagagatcttctttctttccttttattaatccaaatcccttgccattagctytaaaacactcatataatacacatttggcaatgccttttaagtggacttgaaaatccctcaatgactaaagggtaaagtaaaaccctgacttaggactttttaaagtcaatatccttagaattaactggctaatgctccacgatctatttctctatccttttttcaacatagcaaga

SEQ ID NO: 339227 - DNA, 626 bp, Homo sapiens
catgatggggcaaaaactcatttttgtgtaaatgttaatgtgttttgtttatctgctaagtatcacttatgtgatggatggttctagctcaatattatgcacatgtgcactttttgagaaactakattttgtggcgtgtaaaataaaacaaaagaggtacacaggcctttaaaagtaaatggaaacttgaaatctgcctgaacttgatgagaaaccaacaaagcattcatattccactaacaaaatctgagagagaggatctctggactggctaaacttaatgtaaacatccctgtcacctttcagaacacattctgcatgttgaaacaaaatatacctgtacattgtcagcaggtaacaattatttcttatacataactgggtacacaaggccaccaaaatccagaggaaaaaaaaactatatatatatatatatatatatatatatatatatatatatatatccagaggaaaatataaaacacagggagggagaaaataataaatatccaaatattatagtcagttctctgtacctgcagttgtggctaattttataaaccaccttttagaactttgatcaaaaatataaaaaaataagattttaaaaatcttaatgtaaactc

SEQ ID NO: 339228 - DNA, 626 bp, Homo sapiens
catgatggggcaaaaactcatttttgtgtaaatgttaatgtgttttgtttatctgctaagtatcacttatgtgatggatggttctagctcaatattatgcacatgtgcactttttgagaaactatattttgtggcgtgtaaaataaaacaaaagaggtacacaggcctttaaaagtaaatggaaacttgaaatctgcctgaacttgatgagaaaccaacaaagcattcatattccactaacaaaatctgagagagaggatctctggactggctaaacttaatgtaaacatccctgtcacctttcagaacacattctgcatgttgaaacaaaatatacctgtacattgtcagcaggtarcaattatttcttatacataactgggtacacaaggccaccaaaatccagaggaaaaaaaaactatatatatatatatatatatatatatatatatatatatatatatccagaggaaaatataaaacacagggagggagaaaataataaatatccaaatattatagtcagttctctgtacctgcagttgtggctaattttataaaccaccttttagaactttgatcaaaaatataaaaaaataagattttaaaaatcttaatgtaaactc

SEQ ID NO: 339229 - DNA, 623 bp, Homo sapiens
tctgctttttcttcacttgcctctagacttttaagttgtgtctctagacgaactggcaggcattcatttcatttttattcaactgggtgctacctcttcttccagttcaagktcatgtcattttatattaagaatatatcttctgtgaagtctctcactaggttcagcacattctgtttcttaatttttctttactaccattgtatttcaaattagcatatgacattttatatttttagtgtcaaaaattaattgaatcattattgttcttactctttacttgttctagtgtttttatttttttcacctcaactgaacttgcaaactcactgaagcagagtctatttgattcatttggtatcagctaataatcagttatctcacctcgttgccattggatacaatgggttttgtttccaatgctatcaccttgaggcattatttttccaaagtaccatgtttgcatttgtatgcaaacattcttatattgtcatctatggaaatgtaaattggcttctctaacaatttttaacatttgagagttaaataagaatactcttacatatggttaatattaaatattattagcctaaatactaatacttctactgctgctattaagt

SEQ ID NO: 339230 - DNA, 542 bp, Homo sapiens
gtgacccaagttttgctttttccactctgctttctctttttttccattgatcatgacttctaagtaaaagtttatgttggtcatttcttcaaatccataaatgaatagaatccatgcttgaatggagatctttctttgtttgtttttattttgaatctccctggratgtgaagaaatggacattctgcatgcagacagaacagaaggtgatacatttgttcagaaatttgatggcccatgagggaatcgttgaaagcacagacatgaggacattaaatgggactccagtggcagaaggaattgttgtgtctcactgcacaccacagatttactaatggggagagaataaagaatgaggtatgaacggaggctaacatttaggagggaaaacccgtttcttttttgcttacctgacacatcatgtgcctaacatgttgtgtttctccaataacagttggtagcatttgcgtacattgtagagaatgcagatggttttctgctgagaatgcagcaagcccaggaggtcacactgggaattacta

SEQ ID NO: 339231 - DNA, 542 bp, Homo sapiens
gtgacccaagttttgctttttccactctgctttctctttttttccattgatcatgacttctaagtaaaagtttatgttggtcatttcttcaaatccataaatgaatagaatccatgcttgaatggagatctttctttgtttgtttttattttgaatctccctgggatgtgaagaaatggacattctgcatgcagacagaacagaaggtgatacatttgttcagaaatttgatggcccatgagggaatcgttgaaagcacagacatgaggacattaaatgggactccagtggcagaaggaattgttgtgtctcactgcacaccacagatttactaatggggagagaataargaatgaggtatgaacggaggctaacatttaggagggaaaacccgtttcttttttgcttacctgacacatcatgtgcctaacatgttgtgtttctccaataacagttggtagcatttgcgtacattgtagagaatgcagatggttttctgctgagaatgcagcaagcccaggaggtcacactgggaattacta

SEQ ID NO: 339232 - DNA, 589 bp, Homo sapiens
aagctgtcatcaaccagtcacttaagcaggattatctgaaagccagctgataacaagtaccagtgttaataggacacatgataagtgctccagtgaaaaggagagcactatataaatgaaagccacctaaaaataattagaaattgtaaaagaaaaaaagtcattataattgttctccagatatcccagggctagaacaccctctacaacyaattcataaaaaaaaaaaacaagatgtaaaaatatgagattacgtgactgtttttaggaaaatataatttatgactcacatgaattgtactcttcaaagaagttgccatgggagggtgtaaacattccagaaatgtttccatgattaaaagtgtctatatatcttctttatataaactccttgtttttttggaaatcgcttcacagcatctgtccctctattttcaatctcctcgatgatggcaaaagttccatctgaaggtgatttgacatctaaaaataactaaaagtcatttagagccaagagtgaagaattcagggtgaacagttacagtgaataagttcagttttggtcaaaatcatagaatgactaaaatac

SEQ ID NO: 339233 - DNA, 618 bp, Homo sapiens
taagtgctccagtgaaaaggagagcactatataaatgaaagccacctaaaaataattagaaattgtaaaagaaaaaaagtcattataattgttctccagatatcccagggctagaacaccctctacaaccaattcataaaaaaaaaaaacaagatgtaaaaatatgagattacgtgactgtttttaggaaaatataatttatgactcacatgaattgtactcttcaaagaagttgccatgggagggtgtaaacattccagaaatgtttccatgattaaaagtgtctatatatcttctttatataaactccttgtttttttggaaatcgcttcacagcatctgtccctctattttcaatctcctcgatgatggcaaaagttccatctgaaggtgatttgacatctaaaaataactaaaagtcatttagagccaagagtgaagaattcagggtgaacagttacagtgaataagttcagttttggtcaaaatcatagaatgactaaaatacagtgaagctaatgggaattgctcattaactggttctaggattgacarttaaagaattaatccattagcaatctgttaaaagcaaaaacttgttgaaatgtaaaggaggaa

SEQ ID NO: 339234 - DNA, 555 bp, Homo sapiens
ctttgatcttctgacacactattcctttttaaaaaaattaaagattagcctctaacagaaggcaaggaagtttcttgtctagattgagttgtggagactgtatttagaatataagctcttagaaatagcaaaatactaacgcagagtatgtcatgggaactcagaaaatgtgaattaaaatctagagacagaaagaaagaaccatgcttaaaaaagatagtgggttggtcagtgatttcttacggctgctctcacagattacatgcagtagccgtgtccttttctgtatttagattttcctaccaaaaggrgactatgtggacatttcagagtcccagtataagaagggtgagtaacttgagctgaagtttaggatgaaaggagcaggagaaatctggctccttgctgggatgcacggggctctggagtaccttccaggagagtctgagatgcccccctacccacattccttccagacctaattgcttacatttccttgagcactctgtgtgcttcagctcctctgtgcctgaagcatctctcctttgcactcac

SEQ ID NO: 339235 - DNA, 555 bp, Homo sapiens
ctttgatcttctgacacactattcctttttaaaaaaattaaagattagcctctaacagaaggcaaggaagtttcttgtctagattgagttgtggagactgtatttagaatataagctcttagaaatagcaaaatactaacgcagagtatgtcatgggaactcagaaaatgtgaattaaaatctagagacagaaagaaagaaccatgcttaaaaaagatagtgggttggtcagtgatttcttacggctgctctcacagattacatgcagtagccgtgtccttttctgtatttagattttcctaccaaaaggggactatgtggacatttcagagtcccagtataagaagggtgagtaacttgagctgaagtttaggatgaaaggagcaggagaaayctggctccttgctgggatgcacggggctctggagtaccttccaggagagtctgagatgcccccctacccacattccttccagacctaattgcttacatttccttgagcactctgtgtgcttcagctcctctgtgcctgaagcatctctcctttgcactcac

SEQ ID NO: 339236 - DNA, 521 bp, Homo sapiens
ttaacattaattaaaagaaagcaagaatagctatatattaatttcagacagaatagactacagatcaaggaaagttatcagggataaagagaggaattacgtactgataaaagggycgagtctccaagacagggcaatcctcagtgagtatgtgcctaacaacagggaattgaaatatgtgagaaaaagctaatagaaccgtgcaggaggattatggcaggatggcactgtagaaagcaccaggaatgtgtcttctcacctaaacaccaatggcactagcagaatctggctaatgtaatggttttggaactcaggagtctattgaagacttaaaattttcaggggaaggcttggatggtaaatgctggttaatttcaatcaatttctgctgttagcacagtagcagttacccatcccccatccctcagctctgggacaagtagctgtgcacatgttcctggaacagcctgcaaacaacttgcagaagccaggttgggtgaaaaggattctgttctcaaata

SEQ ID NO: 339237 - DNA, 521 bp, Homo sapiens
ttaacattaattaaaagaaagcaagaatagctatatattaatttcagacagaatagactacagatcaaggaaagttatcagggataaagagaggaattacgtactgataaaagggtcgagtctccaagacagggcaatcctcagtgagtatgtgcctaacaacagggaattgaaatatgtgagaaaaagctaatagaaccgtgcaggaggattatggcaggatggcactgtagaaagcaccaggaatgtgtcttctcacctaaacaccaatggcactagcagaatctggctaatgtaatggttttggaactcakgagtctattgaagacttaaaattttcaggggaaggcttggatggtaaatgctggttaatttcaatcaatttctgctgttagcacagtagcagttacccatcccccatccctcagctctgggacaagtagctgtgcacatgttcctggaacagcctgcaaacaacttgcagaagccaggttgggtgaaaaggattctgttctcaaata

SEQ ID NO: 339238 - DNA, 553 bp, Homo sapiens
cctaacaatatagaatccagcatactttggttctctcatttgacattttgcatgatgacagttgcagaatttgacttctgggcattttggtttctccccaatttaggagaatgcccagaatgcagaaacatgagaagaatgaacaaaacaaagatgactttataggtctcctttgaagagctttgcatttcttccaattgctttctcccagactaaaaaaaaaaaaaaattacctcagtaatatattctckggtaaaaatataaacaatatagaagcaaactgagcagaaagtgaaagtccttctttgccatcctccaatcccacttccctccccagaagttaagaatctttccagaccctttttctatgtgtttatatatgtgcatgtatatagatgcacaaaaatacatgaccgcaagcaagatgcatatatttctttacataaatgggaacgtatacactatatatattttcctatgacttgcttttttatttactaatatttcttggatatctctctacatataaagctatcttattttttttttaaaa

SEQ ID NO: 339239 - DNA, 528 bp, Homo sapiens
tctgagatatttctaagctcagaaattctttcctcagctgtgttcagtctactaatgagcccatcaaagatattctttgctgtgtgtgtgagacagggtctctctctgtcacccaggctggagtgcagtggtgtgataatagctcactgcagcctcaacctccccaagctcaagtgatcctgccacctcagcctcccgagtagcctggaccacaggtgtgtaccaccacatycagctaacttttgtatatttttgtagagaatgaggtttcatcatgttgcccaggctggtctcaaattcctgggctcaagcaatccacccacctcagcctccaaaagtgctgggattataggcacgagccaccacacccagccccatgaaagatattctttgtttctgttagtgtttggttctccagcatttttcttatactttcttagaaatttcatctctctgtttacattattcatctgtttgtctgtgttatcagctttcctattagagcccctagcatattaatcacagttg

SEQ ID NO: 339240 - DNA, 524 bp, Homo sapiens
tgctctgtctcttccaattgtgggggtttttcccccctctagtatgtcttgtaatttttttcttgatagatagacatgatatcataggtmaaaggaacctggggttggtttccatggaagtttctgcttgtgggtttttgctctggtaaattttaattttctgtatttacctaattgtctctacaactttgagggcggtggcttgccctgtggcctcacttctctgacagatataaaaagagttactgacttttcagtttgttcaattttttagctgttgttaggacaagtgactatttccaagctactagatgccaatctggaaattggaagtacaattatttttaaaggtaatttaataatgttttttcactcaaaaatgtattcatgtatatagttattgtaattgacagacatacatgattttattgctgttactgtttgtaccattttttccctcatataatccattttttttacttcattcagattgattctgtattctcagtagtttacctaagttt

SEQ ID NO: 339241 - DNA, 591 bp, Homo sapiens
attttaaaaaccttcatctcctgcagctggaaggcagatcaggaaaaaaaaacaggttcaggccctctttttcagagtgttctagtaacaaaggaagttgaattcacagccytggtgtatctcctatgggaagtgaggtccctgataagaaagatatagggccctgatacccaagatggggagcctggggtgatgttcctgagaacatgaacccccagattcccaggaaccactggactggcagaagttagcccctcttaattgctagaggagatgattagacaaagacctcccctgagtcaggtaccttcccagacaatgtttgctgtcctgaagatctgctcctgcctctcccctttgctgtagatcaattatggtcaagtctcagtaaggttcaggcagcgaagcagcatccctgcaagggaggaaagccacaggacctgggtaataaatactggcagggactgggagaacatgaatgggaatggatcttgacagtgttgagtcagggttggcagggacagaaaataaggctggataaggaagagcttagtgactgaggattaatatcctggtaaaaagcaaagagaa

SEQ ID NO: 339242 - DNA, 507 bp, Homo sapiens
gaatacaaattaaaacaatgagataccaccacatgcagttagaatggcctaaatccaaaacactgacaacaccaaatgctggtgagaatgtggagcaacaggaattttcatttaktgctggtggtaattcagaatggtacagccacattggaagacaatttggcagcttcttacaaaactaaacatactcttaccatatgatccagcaattgcattccttggtatttacccaaaggagttgaaaccttatgcctacacaaaaacctgcacacaaatgtttatagcagctttattcataattgctaaaacttggaagcaaccaagatgtctctcagtaagttaatggataaactgtggtacatccagatgatggaatattattcagcgctaaacagaaatgacttaaaccataaaaagacatgaaggaatcttaaatgcatattgttaagttaaagaagctgatctgtatgattccaactgtagaacattctggaaaaggcaaaatta

SEQ ID NO: 339243 - DNA, 425 bp, Homo sapiens
tgtaatgatatatcaatgtaggctcatcaattataaaaaatagcattctggtgggggatgttgatagttgggaaggttgggggcagggagtaggggtatgtaggacatctctgcaccttccactcaattttgctatgaatgtaaaattgctctaaaagtattctattaaaaatatttacagaagcayaaaatataaaatacctagaaataaatctgacaaaagatgtccaagacccctatgtgaaaatcatgaagcattattgagagaaattaaagacttatataaatagaaagacatgcgatattcatatattgtatacttaatattataaagatgataatttttctcctgtagtctacagatttaatgcaaacctgtgattctaaattttatatgaaaatacaaaggtttaaggatggccaag

SEQ ID NO: 339244 - DNA, 592 bp, Homo sapiens
ttatcttctagaatttttatagcttcaggtcttaggtttaagtccttaatccaggaaatgatgaatttatatttcaagcaggaaagaataagaaattgggtcaatgtacttcaaaagagaaaatatatgtaaaagcttagaagagggtaggatgtggaaaatatttcaaggataggtaagtgagggataagggaggggagttgaacatcacaacatatttttcctttgagaagaccatctgctgaaattctgaacatgagaacaaagtgggatttgaaggatctggaataaatgaagtgaaagaaatgctgagaaatctttagactgagcaatttctagacaagtgaagggaagtcatgtgacttgtcctgctggtccatccaaccaaagtatgtgagttcttagacagcaaactatgctgagagctytctgactgaaagggtgtgattcaaggaacacagtaacagagagccccacagcaaggggcttggaaggatgttgaggagtgcaggcatttggcacataggaaccgaaataggaacaaggagtgtggattatattacacagaatgaaacagcattttagatgagga

SEQ ID NO: 339245 - DNA, 592 bp, Homo sapiens
ttatcttctagaatttttatagcttcaggtcttaggtttaagtccttaatccaggaaatgatgaatttatatttcaagcaggaaagaataagaaattgggtcaatgtacttcaaaagagaaaatatatgtaaaagcttagaagagggtaggatgtggaaaatatttcaaggataggtaagtgagggataagggaggggagttgaacatcacaacatatttttcctttgagaagaccatctgctgaaattctgaacatgagaacaaagtgggatttgaaggatctggaataaatgaagtgaaagaaatgctgagaaatctttagactgagcaatttctagacaagtgaagggaagtcatgtgacttgtcctgctggtccatccaaccaaagtatgtgagttcttagacagcaaactatgctgagagctctctgactgaaagggtgtgattcaaggamcacagtaacagagagccccacagcaaggggcttggaaggatgttgaggagtgcaggcatttggcacataggaaccgaaataggaacaaggagtgtggattatattacacagaatgaaacagcattttagatgagga

SEQ ID NO: 339246 - DNA, 608 bp, Homo sapiens
gaatgaagggtgtcagggactctgtcaaccagagaggaagaactgcctgccactagtagctagatcttgctgcttcttccattttcctttcttcactgaggctgaatatgccaagattccccagtccccttcagcagccaggaggagggtgaggagaggggagcctttgttcctcctccagatggctgaagctgggatggagcccagcagctgtgtttgggtggaaggcgagagggcagatggcctggtgtctgtctgcagacagcctgagaggctatagccctggtgcaaggcactctttgtggtgaactccacagggcagtggtggcatagagcaaacgccagggcagggcactgtgctagcattcaccartcaacactggctggtgtgatcttgagacagcaaaaagagaatcctttatgcatgagaccctcgtgtttctggtggtggcttttaacgtttcaatctaaacaaagccttttctatatgaaaactctcttaattactatcatttaaacattggtttaacacaagcaagcctcattaggtttcagttttgttttctgcaaattttggcagccattgaattattcacccaaccaatgct

SEQ ID NO: 339247 - DNA, 590 bp, Homo sapiens
ccatttgtctgcagtcacctaaatgtcagtggacagatgtgtttgtcatagtgtgtgataagtgcaaataacccttgttagtagtgtcattagagrtgaaatagatgcataggaactaagaggtcataagctgtcaggttttactctaaggaaatatagaatgtcatttgcacctgaaaatgtgcagaagtaaatggacaattcttcaccccaatctgtttttcaaagctttgcatgtttacatttgttcatccactaccttagtcacagcatagtgaaataaaccataaattaaaaatagctcagcgtaccactgaagaatcaatagatctgaatatagtagcgtagaaaaagcttcggtttactggatgtaccttcaaggtggaccataccctttaggtagaggattagtggagaacagaaatctctgcctctctatggctagaagtggatctatgtcattgacctacctacagtggcacttttccttacttgaaagttgggtatacagtgacctcacctactcatagaacctgcaaaagtgggaattaatagaaaaaggcttttgagtagccaaaaaggatttgata

SEQ ID NO: 339248 - DNA, 555 bp, Homo sapiens
gccttcagtaatcaactatatttgcccatatggtgttgctgtgttctcaactcccttttatgtattgtttctgtattgtttaggatattttggattgcagaaacagaaactaactttagttaatctaaggaaaaagataatttgtgtacagatatagagagtgtcataagccacaagggcagggatgcagttagtcaattggaagataaccaggaagcagaacatttacagaatccctctctgtccatgtctttgtatttaccccattctctctctttctctgcagaatgattttctctgcttctctattcaacatgccaacgtttccaaatacagcttttgataggattttcagtccaatccttgattctcaggagagtaatacaactggcctgtcttgaggaatatgtcaggcataggtccagtgggctgtggctagtgaggggygttatcatgcaaatgtagctgttgaggaccatctgaaaagtggggggggggtgagtttctgaagagatggggcatcagacaattggggcggatcaataatttaaaaaa

SEQ ID NO: 339249 - DNA, 555 bp, Homo sapiens
gccttcagtaatcaactatatttgcccatatggtgttgctgtgttctcaactcccttttatgtattgtttctgtattgtttaggatattttggattgcagaaacagaaactaactttagttaatctaaggaaaaagataatttgtgtacagatatagagagtgtcataagccacaagggcagggatgcagttagtcaattggaagataaccaggaagcagaacatttacagaatccctctctgtccatgtctttgtatttaccccattctctctctttctctgcagaatgattttctctgcttctctattcaacatgccaacgtttccaaatacagcttttgataggattttcagtccaatccttgattctcaggagagtaatacaactggcctgtcttgaggaatatgtcaggcataggtccagtgggctgtggctagtgaggggtgttatcatgcaaaygtagctgttgaggaccatctgaaaagtggggggggggtgagtttctgaagagatggggcatcagacaattggggcggatcaataatttaaaaaa

SEQ ID NO: 339250 - DNA, 614 bp, Homo sapiens
tgtaccaagtatctactgtgtatccaaattgatttaaatcaatttggacccagagatggcagtttaattttcagtttacaaaacaaatgaggaacaagtaggagagacgaaggtattcttgtttgcagggtactgagaaggatgatccagcaaagttcctttatgaatggatttccagagggcgttaattatgatcagtaggctggagcttggggagacacacactgctcaaatcagcaatcaatagctgtcttgtttatgtacttctgtatgcctggcttgcatttgcctctatagaagttaaacatttgatctgcactcttggtggggggtggtggtaagaagtgccttgtttttataaatcaaatttatcctgactttaattctccagtgggtgagaaattagatctcagccttttttggaagaccactccatttccatgcaggtacagaaggatcagggaagtgggaatggcagaaaggcctctkgtctgtggagcatcattgtgatggttaagattcttgtggttcaagcttatgtggtccatttggaggtggttggcttcactgctttcctgtcgagcattggcatggcatcttgggctgctgtcccc

SEQ ID NO: 339251 - DNA, 491 bp, Homo sapiens
acttttttctcatcacaaaaggtatcgcatgctcattgcaaaaaaaaaaaaaagttttggcaaataagaaaagcaaaacacaaactctaagaacatataaaatcatttatacttctgcaacccagaggaaactatatattaatgtcatatcactgtacaaaatgagcatcgtgctgtgcattctattttgtaacctgatttttctcatttaacatttcaagatgaattttccatgttaataaacactcatttgaaataccacaaatgcttttcaagaagragtattgttagcatagagacaattttttttttctggtaagaaggtctctctgtcccctccttttttttggaggccaaacctatttgactaaaaaaatttacaagtttgaagatgcgacaagtatctctcatcaaggtgatgtagagattggtgctaaaaataataactaaaaagtaaaagggcaacatgtttaatgtggagatgtagctta

SEQ ID NO: 339252 - DNA, 602 bp, Homo sapiens
ctgaggtgggggtggggggatcaactgaggtcgggagttcgagaccagcctggccaatgtggtgaaaccccatctctactaaaaatacaaaaattagccaggcatggtggcgtgtgcctgtaatctaatcccagctacttgggaggctgaggcaggagaatcgcttgaacctgagaggtggaggttgcagtgagcygagattgtgccaccgcactctagcgtgggtgacagaaaaaaaaagtctttttattttaaagtcacagttgacaaaaatggcccatcacaagtaatgcttctggctttccctcagcctccctgaagcccaacacaggcatttgtgagacagctggtagagattagcagtgcagactctgcaaattgtgcgaagatcttcttcatagaaagacaacagaaatgaaacagcaaccttggccttataagctccagtctcctatccactgtaccagttgtgcagccatctgatgcggattccagccaaatcctgcctcactcttggccctgggcatggccctgcagtcttgcaatgagagaaaacattgtttttctctaggaatctctgggaagatagtggaaagctgagc

SEQ ID NO: 339253 - DNA, 602 bp, Homo sapiens
ctgaggtgggggtggggggatcaactgaggtcgggagttcgagaccagcctggccaatgtggtgaaaccccatctctactaaaaatacaaaaattagccaggcatggtggcgtgtgcctgtaatctaatcccagctacttgggaggctgaggcaggagaatcgcttgaacctgagaggtggaggttgcagtgagctgagattgtgccacygcactctagcgtgggtgacagaaaaaaaaagtctttttattttaaagtcacagttgacaaaaatggcccatcacaagtaatgcttctggctttccctcagcctccctgaagcccaacacaggcatttgtgagacagctggtagagattagcagtgcagactctgcaaattgtgcgaagatcttcttcatagaaagacaacagaaatgaaacagcaaccttggccttataagctccagtctcctatccactgtaccagttgtgcagccatctgatgcggattccagccaaatcctgcctcactcttggccctgggcatggccctgcagtcttgcaatgagagaaaacattgtttttctctaggaatctctgggaagatagtggaaagctgagc

SEQ ID NO: 339254 - DNA, 602 bp, Homo sapiens
ctgaggtgggggtggggggatcaactgaggtcgggagttcgagaccagcctggccaatgtggtgaaaccccatctctactaaaaatacaaaaattagccaggcatggtggcgtgtgcctgtaatctaatcccagctacttgggaggctgaggcaggagaatcgcttgaacctgagaggtggaggttgcagtgagctgagattgtgccaccgcactctagcgtgggtgacagaaaaaaaaagtctttttattttaaagtcacagttgacaaaaatggcccatcacaagtaatgcttctggctttccctcagcctccctgaagcccaacacaggcatttktgagacagctggtagagattagcagtgcagactctgcaaattgtgcgaagatcttcttcatagaaagacaacagaaatgaaacagcaaccttggccttataagctccagtctcctatccactgtaccagttgtgcagccatctgatgcggattccagccaaatcctgcctcactcttggccctgggcatggccctgcagtcttgcaatgagagaaaacattgtttttctctaggaatctctgggaagatagtggaaagctgagc

SEQ ID NO: 339255 - DNA, 602 bp, Homo sapiens
ctgaggtgggggtggggggatcaactgaggtcgggagttcgagaccagcctggccaatgtggtgaaaccccatctctactaaaaatacaaaaattagccaggcatggtggcgtgtgcctgtaatctaatcccagctacttgggaggctgaggcaggagaatcgcttgaacctgagaggtggaggttgcagtgagctgagattgtgccaccgcactctagcgtgggtgacagaaaaaaaaagtctttttattttaaagtcacagttgacaaaaatggcccatcacaagtaatgcttctggctttccctcagcctccctgaagcccaacacaggcatttgtgagacagctggtagagattagcagtgcagactctgcaaattgtgcgaagatcttcttcatagaaagayaacagaaatgaaacagcaaccttggccttataagctccagtctcctatccactgtaccagttgtgcagccatctgatgcggattccagccaaatcctgcctcactcttggccctgggcatggccctgcagtcttgcaatgagagaaaacattgtttttctctaggaatctctgggaagatagtggaaagctgagc

SEQ ID NO: 339256 - DNA, 629 bp, Homo sapiens
aagttctgttaaaactggtaatttagtcatcagaaggtccttgtttgttctgtttaagtatttaaaaacattaaggtaaaagttaagcttcattgcatagaaagtatgatgttttacactgaataaagggaattattctaagaatcctgtccccaaattaaaatgtctttaaagccccctaaaaaggtgttctagtgttctaataccattaacctaggaagtattggtgctttgttctggtagtgcatgcaatattaaaatgaaggagcttttatctgaattattgaataactgtacaactttggatttaaaaccatttccaacataagaggtgaaagttattttyttcctcaattttagtcttcttcaattgggccatataacctagttgagtttgtgactttgccttgagaaatgaggtaacacagcatggaacagtctatcttttccagaccttgaatgaggaaggcaaatgatctagacatttcttagaactagacgaaaaatagtcatagcatgactaggagtagttttatctgtagttaggcgaatgccgcttctttacattattggtgcaatgaaagtatgggaaagtctcaacagaacagactggacatttgagaaccttc

SEQ ID NO: 339257 - DNA, 529 bp, Homo sapiens
gctcatgggcattatggtttatactgacaaatttctccctaaaggagcctgctgtcacccccaggttccgttaagctagttaccaaaagattgcttgagcactaaatgcctttttaagagaaaacgtcttaacaagtcttgactctttgttttccagctcactaaaatgtttaggtgatctctactctttcaaacgtgcctctacatttatgccctatatcacctatggtacctaatagactacgattttcctgtttagacccttggaaccaccttggttatcgcttaattataayagcaaatatgtacatagtgcttgctatgtgtcagacaatgctctaacagctttgatgatgccgtgtaatgttcaccacaatcttccgagttgaaccctgttgttatctccatattatagacagaaaagttaagtaacttcctccaggttacagagttagtaagtcgcacacttgggggatgtaacaggtcttttaactaatatattcatactaataccctctacctaaaagcg

SEQ ID NO: 339258 - DNA, 500 bp, Homo sapiens
actttctcaacttgaaaaatgtcattgattgaaaaaaaacacagctaacatcttatggttaaaaattgaatgtttccccttttaagatcaggaataagacaaagtagcacgttgccactcaaattaaacaaagtagtggtggagctaactagggaaacttgagaagaaagagaagtaaaaggaatccatatagaaaagagaagtaaaattatctctatttgtagatggccatgatcttgtatattgaaaatcctaaaaaatatacatayactcacacacaagcaagtcattcgaactagagctaataatcaatttcaacaaggttgcagatacaaaatcaatatcaatattttactcttcttgatgccattgtaaataaagaataaaatacttcagaataaatttaaacaagatctgaaataatactctaaaaactacaatacatggttgaaaaaaataagaaggaaacataaatgaaaagacataacatattcatggaa

SEQ ID NO: 339259 - DNA, 490 bp, Homo sapiens
agtaattcataatacacaatttgtttttgctataagattctgaaaagagaagaagyagtactgcatatactcatcaaaaaagtactgaatttatttattcactcatgaatttatctagtatttgctaagcctctcctgtctctctcaggaactctgcaaggttactgtgattacagaatgctataaatgggcttagttgctctgtacctgcttttaaaggggctttcatgaaattgttatttgtttgaaaatcaacaattcccatttttctcagcatggaaaaatgatctaaataataataaaggaaactctggtaactttaccttggtaccacttatatcattctctattctgatgattgggcaaattagctaagcttccttaaccagggctcctcttttgtttatgcttcttgaaaccattttaaatatctgaaatatgccaggcacaaggttaagcacaagtttatatgaattatctcatgtcatat

SEQ ID NO: 339260 - DNA, 595 bp, Homo sapiens
tgggttcaagaaatagtcacttatatctgtaggtttgtgtcttttcctaattttgggaagtttccagccatcatgtattcaaatactctttcaaaaacacacttttcctctccttctaagactctgatagtataaatgctggatgttttgcattgttccacaggtctctgaggctttgatcattttatcttttcagtctattttctctatrtttcagactgaatgtattctactgttctttctttaagttcactgattctatcttctgtttgcactctagcccatcctatgagtattttttaatgttgtcattgtattttgtaattctgtaactttgatttgtatgtttcttattttgctaagattttctttttacatttttttgaagataatacgtatttgattgttgaagcatttttaatgagagctgatttttttttttttaaattatactttaagttttagggtacatgggcacaatgtgcaggtttgtaacatatgtatacaggtgccatgttggtgtgctgcactgattaacttgtcatttaacattaggtatatctcctaatgctatccttcccccctgcccccaccc

SEQ ID NO: 339261 - DNA, 595 bp, Homo sapiens
tgggttcaagaaatagtcacttatatctgtaggtttgtgtcttttcctaattttgggaagtttccagccatcatgtattcaaatactctttcaaaaacacacttttcctctccttctaagactctgatagtataaatgctggatgttttgcattgttccacaggtctctgaggctttgatcattttatcttttcagtctattttctctatgtttcagactgaatgtattctactgttctttctttaagttcactgattctatcttctgtttgcrctctagcccatcctatgagtattttttaatgttgtcattgtattttgtaattctgtaactttgatttgtatgtttcttattttgctaagattttctttttacatttttttgaagataatacgtatttgattgttgaagcatttttaatgagagctgatttttttttttttaaattatactttaagttttagggtacatgggcacaatgtgcaggtttgtaacatatgtatacaggtgccatgttggtgtgctgcactgattaacttgtcatttaacattaggtatatctcctaatgctatccttcccccctgcccccaccc

SEQ ID NO: 339262 - DNA, 595 bp, Homo sapiens
tgggttcaagaaatagtcacttatatctgtaggtttgtgtcttttcctaattttgggaagtttccagccatcatgtattcaaatactctttcaaaaacacacttttcctctccttctaagactctgatagtataaatgctggatgttttgcattgttccacaggtctctgaggctttgatcattttatcttttcagtctattttctctatgtttcagactgaatgtattctactgttctttctttaagttcactgattctatcttctgtttgcactctagcccatcctatgagtattttttaatgttgtcattgtattttgtaattctgtaactttgatttgtatgtttcttattttgctaagattttctttttacatttttttgaagataatacgtatttgattgttgaagcatttttaatgagagctgatttttttttttttaaattatactttaagttttagggtacatgggcacaaygtgcaggtttgtaacatatgtatacaggtgccatgttggtgtgctgcactgattaacttgtcatttaacattaggtatatctcctaatgctatccttcccccctgcccccaccc

SEQ ID NO: 339263 - DNA, 538 bp, Homo sapiens
agaagagatgtacccttcactayattaataatagcaagtcacactatggaaacttgagatattgccttacccgtttttcttgaaataggcagtggagtgtgtctattatacatagaaagagttccctttaaaacataactgtggaagcatttttcttattttgtatttgcaagagacatctattttttcttgaacaccacttttcatgtaggaatcagaaaaagggttactgaagtaatgtatttaagcttttggtctggttatgcgtaatctaatttttatacagtctgcacaaattgtagccactttgtcaatgtcttattatttttttctcttaacaatgcagtgacagtgattaatttctaaacagtggtaaacaaaaaaaccttaccttggaagtgattaaaacagagttgcaaaccatatgagggctgacacatatataaattatggacataataatacactacacacaccctatgaatggaatgaatggtacatctaaatattcccatagaaataatagaaaataggataa

SEQ ID NO: 339264 - DNA, 577 bp, Homo sapiens
tataccaacatttacataatgagaattcctaaaaaggagagaaagaaagcgagagagagagagagaaaggggaagagaaatatctaaagaatgaatgcccataagcttccctaatttaatgaaaacgctaaacaacacaatccaaaagctcactgaactctaaataagacacaaagacattcactcctagatatattataactaaactgttgaatkacaaagatggagaaaataataaaaacagaagaagcaacttattgcattaacaagattctctcaataagcttaacagctgacatctctgcaaaaattatgaaagccagaagacagtagtgtcatatattcaaagttctgaaagtaaaggaccttcaagaaaaaattctatatccagatatggaatctagatattgttcaaaaattaagaagaaattaaggcattcccaggtaatcaaaaattgagagggtatgtcagtaacttcattgattacaagaaatataaaagagagtccccaagggtgatatgaaagcacactagaaataaatcaaatctgtacaaagagaatcagtaactgtaacc

SEQ ID NO: 339265 - DNA, 577 bp, Homo sapiens
tataccaacatttacataatgagaattcctaaaaaggagagaaagaaagcgagagagagagagagaaaggggaagagaaatatctaaagaatgaatgcccataagcttccctaatttaatgaaaacgctaaacaacacaatccaaaagctcactgaactctaaataagacacaaagacattcactcctagatatattataactaaactgttgaattacaaagatggagaaaataataaaaacagaagaagcaacttattgcattaacaagattctctcaataagcttaacagctgacatctctgcaaaaattatgaaagccagaagacagtagtgkcatatattcaaagttctgaaagtaaaggaccttcaagaaaaaattctatatccagatatggaatctagatattgttcaaaaattaagaagaaattaaggcattcccaggtaatcaaaaattgagagggtatgtcagtaacttcattgattacaagaaatataaaagagagtccccaagggtgatatgaaagcacactagaaataaatcaaatctgtacaaagagaatcagtaactgtaacc

SEQ ID NO: 339266 - DNA, 594 bp, Homo sapiens
gggggttctcttctggaaattaggcaacaaattraggtgtccttttcattttaatttaaactgttagttgaaataaaatgtaaagagctgatagtataaaggaaagggaaaaatgaaagatgggactatagattgaaattcccatgatttgtagccttgagaaaatttgtctcttcaatgtattgaaaattctaaaaggaagtcaacagtcacttctcttgaaaaatacaaagaaggaaagaaatataaccaagttgaaaataaacagtcttcctctgcctcaaaagtaagtgaacgagggctgatgtgttagtctacccaatttgatctgctagacagagcagtcccgaaagtaaccttggacatatttaagatatatttgtaactacaatgttataaatccatgcatttatagtcaattgctttttgacaaaggtgccaagaacacaatggggaaaggacagtctttttcataaatggtgttgggaatactggctattcacatgcagaataaattggatctttatctgacatcatatacaaaagtcaattcaaaagagattaaagacttaaatttaaaacctgaaacttaaa

SEQ ID NO: 339267 - DNA, 591 bp, Homo sapiens
agccacattctaagtatcctgaatttaggatccatagttttatattttatctaaaatttaatctggcttccaagaagccttaactgacatyacacaatccatgtgttttatctgatttctaccaattgctagccttgctattccatcaggcagaagtctgatcacacttaatgatcgaatatcttatacctattgaaataaaatagtcattacaaatccagccaatgctttgcttccaggaactggattttctttcatgctccctatgaatggacaaccgtccacgctttctttttcacaaaaagtttgtacagccatgctacattgtaaacagatatcaataattaagttctatgcaccctggttttctgccattttctgtagtatagactgggtacttggacttgaaaacttctagaaccaagagacctgggaatgtttcatcttgggaactcccattcttcagcgtgttaattgtgtagtttctttaatcaggttttaacttacttagtcttaagtttaatcaatttcacaactttttatttctcctaagtgagacaccgcttattcatattaggacatctgaataaa

SEQ ID NO: 339268 - DNA, 545 bp, Homo sapiens
agtattagaaattgtgatatagtaatacctgtgtctttattaaatgattatgtatcataccttgctctctgtctaaaaactgtcatactttttagaatgataaacataaaggatagttcaaaatatttacagttgtaaatatgatacaaaatacctgtaaattctgttagtgacaagccatgatattgctaatatttgttgcctatactcataattgaaagcaacagtacatttcaattagaccttagtgagaatgaaaatgtaacatattctcattcaagtttatgaatccctaaactctattcaagtgtccctttgtgctcatgtactcctggttaagaaaatatgatccacaraggcaaaagtacctaaggttcaggaacgacataatgtggaattacaggcttacctgggattgaaagatttcccatatataacattttcagtgctgaaacagagacagtcacaggcaaacttgaatagttggtctctctagggagctcccaccactgaaagacaccttgtgaaagtcatttttttttttt

SEQ ID NO: 339269 - DNA, 545 bp, Homo sapiens
agtattagaaattgtgatatagtaatacctgtgtctttattaaatgattatgtatcataccttgctctctgtctaaaaactgtcatactttttagaatgataaacataaaggatagttcaaaatatttacagttgtaaatatgatacaaaatacctgtaaattctgttagtgacaagccatgatattgctaatatttgttgcctatactcataattgaaagcaacagtacatttcaattagaccttagtgagaatgaaaatgtaacatattctcattcaagtttatgaatccctaaactctattcaagtgtccctttgtgctcatgtactcctggttaagaaaatatgatccacagaggcaaaagtacctaaggttcaggaamgacataatgtggaattacaggcttacctgggattgaaagatttcccatatataacattttcagtgctgaaacagagacagtcacaggcaaacttgaatagttggtctctctagggagctcccaccactgaaagacaccttgtgaaagtcatttttttttttt

SEQ ID NO: 339270 - DNA, 596 bp, Homo sapiens
tccatattttcatttgagatttttatgaatttaatctaacttttttatatgtaatgagaaagagtgtataaagtgagataatgaattgattttgttttccagttgaaaycaattgctgatgctttctccactaaattctagcaccacattgatcatacaccagagcccaacgtgtggctatgtcagttccaagttatttattccaatattatctctgtgcatggagatcaaaatatttaaattcttgtagctttataataagatttatttttagtagaaactccccaattcctgcccttattttcctgtttaatactggctcatgtacgctttaactttattctgctatataggtttttgagttatctttgattaataccatagaacatcctttaacaattttaattggaatacatttatgagtaaatttggaaagaatggatatctttccattcataaatattgtatacatattatatatgttgatatatattctggtaatattttaaaagcttattcataaaagtgcatactttgaatacatatttcttaatatattttatcattatcaataatatatatttgctaaagttagt

SEQ ID NO: 339271 - DNA, 506 bp, Homo sapiens
gtagctttataataagatttatttttagtagaaactccccaattcctgcccttattttcctgtttaatactggctcatgtacgctttaactttattctgctatataggtttttgagttatctttgattaataccatagaacatcctttaacaattttaattggaatacatttatgagtaaatttggaaagaatggatatctttccattcataaatattgtatacatattatatatgttgatatatattctggtaatattttwaaagcttattcataaaagtgcatactttgaatacatatttcttaatatattttatcattatcaataatatatatttgctaaagttagtaatgctattgatttttgcaagggggttgtgtatttagtagcagaatatttttcaatgccatgaaattatgcatttttggggcaaggctgggattttctattaagatacctttatcaccaacaataaagaaaatgtccctgccttcatataggcatg

SEQ ID NO: 339272 - DNA, 631 bp, Homo sapiens
aatgtaaaaactttcttatgctttagaaaataaactctatatgcaaactttcattatccatttttcttaatatgataaaattaccctttgtatatctaatattcatttgaattttccaaaaattattaaaccatttttatgtaaacattgctccttccatgccaatattttcttctgcrttaagttcttcttgggaaagtatgtatgtcaacagttctttcaaagattataatcataagctctctcaatgtttctttcacagtagtctaactgaatagaattttggattaactaccaaccactttatattttgaaaagattcattgtcttcagacaccttttgttattgatgaggagactagtctcagttgggtccttcccttttatcctttaatatttttctttctttcatttataatttaactttaatataactcagtgaagattgatgttgttggtttatccttcatggaactaatgtcctttaatctgaactctcatgttcttcctcaatcttaacacttactgacattatttttctccaatactctcctgttggaattcttagtggatatactctggtagttcttacatcttcatctcttttatgttgtctgtgtcttttccatgc

SEQ ID NO: 339273 - DNA, 631 bp, Homo sapiens
aatgtaaaaactttcttatgctttagaaaataaactctatatgcaaactttcattatccatttttcttaatatgataaaattaccctttgtatatctaatattcatttgaattttccaaaaattattaaaccatttttatgtaaacattgctccttccatgccaatattttcttctgcgttaagttcttcttgggaaagtatgtatgtcaacagttctttcaaagattataatcataagctctctcaatgtttctttcacartagtctaactgaatagaattttggattaactaccaaccactttatattttgaaaagattcattgtcttcagacaccttttgttattgatgaggagactagtctcagttgggtccttcccttttatcctttaatatttttctttctttcatttataatttaactttaatataactcagtgaagattgatgttgttggtttatccttcatggaactaatgtcctttaatctgaactctcatgttcttcctcaatcttaacacttactgacattatttttctccaatactctcctgttggaattcttagtggatatactctggtagttcttacatcttcatctcttttatgttgtctgtgtcttttccatgc

SEQ ID NO: 339274 - DNA, 631 bp, Homo sapiens
aatgtaaaaactttcttatgctttagaaaataaactctatatgcaaactttcattatccatttttcttaatatgataaaattaccctttgtatatctaatattcatttgaattttccaaaaattattaaaccatttttatgtaaacattgctccttccatgccaatattttcttctgcgttaagttcttcttgggaaagtatgtatgtcaacagttctttcaaagattataatcataagctctctcaatgtttctttcacagtagtctaactgaatagaattttggattaactaccaaccactttatattttgaaragattcattgtcttcagacaccttttgttattgatgaggagactagtctcagttgggtccttcccttttatcctttaatatttttctttctttcatttataatttaactttaatataactcagtgaagattgatgttgttggtttatccttcatggaactaatgtcctttaatctgaactctcatgttcttcctcaatcttaacacttactgacattatttttctccaatactctcctgttggaattcttagtggatatactctggtagttcttacatcttcatctcttttatgttgtctgtgtcttttccatgc

SEQ ID NO: 339275 - DNA, 631 bp, Homo sapiens
aatgtaaaaactttcttatgctttagaaaataaactctatatgcaaactttcattatccatttttcttaatatgataaaattaccctttgtatatctaatattcatttgaattttccaaaaattattaaaccatttttatgtaaacattgctccttccatgccaatattttcttctgcgttaagttcttcttgggaaagtatgtatgtcaacagttctttcaaagattataatcataagctctctcaatgtttctttcacagtagtctaactgaatagaattttggattaactaccaaccactttatattttgaaaagattcattgtcttcagacaccttttgttattgatgaggagactagtctcagttgggtccttcccttttatcctttaatatttttctttctttcatttataatttaactttaatataactcagtgaagattgatgttgttggtttatccttcatggaactaatgtcctttaatctgaactctcatgttcttcctcaatcttaacacttactgacattatttttctccaatactctcctgttggaattcttagtggatatactctggtagttcttayatcttcatctcttttatgttgtctgtgtcttttccatgc

SEQ ID NO: 339276 - DNA, 624 bp, Homo sapiens
tctattatattgtcattttctgctagggtgtaaactcttgcttcagcctatgaagaaawaaaaagcacaatgtcatactatttattctatcccagcacattgtgtgatagattgaaacattcagtaaaaatccaataaattccctatttctttttccttgtcttctcacaacaaaaaggaaaaaaaaacatcagaatatactgttccctaattatccagattatatttaatacctaaaaaatgaacaaaataaaggttggagaatgacaactgaggtaaattagaatatgtctttgcaacctttgtaaccttgggagagataaaggatagatttattatgattagcataaattatctcaggctacataacaatatgtattaggaaaagtattcaccactttgttgtgtttaattaattttgtaaaattatctaaagcttatatttcctcattatccaaattactttgtgtctccaaagccagagcataattattagaaggttctgtttaactgaaattaagaagtctcatgtatccaaacatatattcagtaaacatatcaaatatctactctatatgggcactgtgctgggaaataaaagtatagaaatgaaagtgcattttt

SEQ ID NO: 339277 - DNA, 624 bp, Homo sapiens
tctattatattgtcattttctgctagggtgtaaactcttgcttcagcctatgaagaaataaaaagcacaatgtcatactatttattctatcccagcacattgtgtgatagattgaaacattcagtaaaaatccaataaattccctatttctttttccttgtcttctcacaacaaaaaggaaaaaaaaacatcagaatatactgttccctaattatccagattatatttaatacctaaaaaatgaacaaaataaaggttggagaatgacaactgaggtaaattagaatatgtctttgcaacctttgtaaccttgggagagataaaggatagatttattatgattagcrtaaattatctcaggctacataacaatatgtattaggaaaagtattcaccactttgttgtgtttaattaattttgtaaaattatctaaagcttatatttcctcattatccaaattactttgtgtctccaaagccagagcataattattagaaggttctgtttaactgaaattaagaagtctcatgtatccaaacatatattcagtaaacatatcaaatatctactctatatgggcactgtgctgggaaataaaagtatagaaatgaaagtgcattttt

SEQ ID NO: 339278 - DNA, 658 bp, Homo sapiens
cttcagcaaacttaaatgttcctgcctgttggctctgaagagagcagcggatgtcccaacacagctctcgagctctgctaagggacagactgcctactcaagtgggtccctaacccctgtgcctcctgactgggagacacctcscagcaggtgtcgatagacacctcatacaggagagttccagctggcatctggcaggtgtccctctgtgatgaaacttccagaggaaggagcaggcagcaacttttgctgttctgcaacctctgctggtaatagccaggcaaacagggtctggagtggacctctagcaaactcttgcagacctgcggaacaggagcctgactgttagaaggaaaactaacaaacagaaaacaataacatcaacgtcaataaaaaggatgcccatgcaaaaaccctatccaaaggtcatcagcatcaaagatcaaaggtagagaaatccacaaagatgaggaaaaacaagcgcaaaaatgctgacaattctgaaaaccagaaggcctcttctcctccaaatgattgcaacgcctctctagcagggataaaactggatggagaacaagtttgatgaattgacagaaggaggcttcagaaggtggataataacaaactcctctgagctaaaggagcaagttcaaaccca

SEQ ID NO: 339279 - DNA, 658 bp, Homo sapiens
cttcagcaaacttaaatgttcctgcctgttggctctgaagagagcagcggatgtcccaacacagctctcgagctctgctaagggacagactgcctactcaagtgggtccctaacccctgtgcctcctgactgggagacacctcccagcaggtgtcgatagacacctcatacaggagagytccagctggcatctggcaggtgtccctctgtgatgaaacttccagaggaaggagcaggcagcaacttttgctgttctgcaacctctgctggtaatagccaggcaaacagggtctggagtggacctctagcaaactcttgcagacctgcggaacaggagcctgactgttagaaggaaaactaacaaacagaaaacaataacatcaacgtcaataaaaaggatgcccatgcaaaaaccctatccaaaggtcatcagcatcaaagatcaaaggtagagaaatccacaaagatgaggaaaaacaagcgcaaaaatgctgacaattctgaaaaccagaaggcctcttctcctccaaatgattgcaacgcctctctagcagggataaaactggatggagaacaagtttgatgaattgacagaaggaggcttcagaaggtggataataacaaactcctctgagctaaaggagcaagttcaaaccca

SEQ ID NO: 339280 - DNA, 658 bp, Homo sapiens
cttcagcaaacttaaatgttcctgcctgttggctctgaagagagcagcggatgtcccaacacagctctcgagctctgctaagggacagactgcctactcaagtgggtccctaacccctgtgcctcctgactgggagacacctcccagcaggtgtcgatagacacctcatacaggagagttccagctggcatctggcaggtgtccctctgtgatgaaacttccagaggaaggagcaggcagcaacttttgctgttctgcaacctctgctggtaatagccaggcaaacagggtctggagtggacctctagcaaactcttgcagacctgcggaacaggagcctgactgttagaaggaaaactaacaaacagaaaacaataacatcaacrtcaataaaaaggatgcccatgcaaaaaccctatccaaaggtcatcagcatcaaagatcaaaggtagagaaatccacaaagatgaggaaaaacaagcgcaaaaatgctgacaattctgaaaaccagaaggcctcttctcctccaaatgattgcaacgcctctctagcagggataaaactggatggagaacaagtttgatgaattgacagaaggaggcttcagaaggtggataataacaaactcctctgagctaaaggagcaagttcaaaccca

SEQ ID NO: 339281 - DNA, 616 bp, Homo sapiens
gagttcatgtcctttgtggggacatggatgaagctggaatccatcattctcagcaaactatcacaggaacagaaaaccaaacactacatgttctcactcataaatgggagttgaacaatgagaatatatggacatgggggaacatcacacaccggggcctgtaggggggtgggggraaaggggagggaaagcattaggataaatccctaatgcatgtggggcttaaaacctaaatgacacgttgatgggtgcagcaaatcaccatggcatatgtatacctatgtaacaaacctgcactttatgcacatgtatcccagaacttagagtataattttttaaaagtcttgtttacatagaaaaaaagaatttacaaagctgtactacatgatatctcttataatctgttttaacatcattgtgcaccatttttgtgagtattaataaatatatgcacccatgaaaccacaataaaatcaacatacagaacatttccataatacacaaatactccttttgcactattgtactcagtcactttctacatgtttagcttcaaataatcaacaatgtgctttctgtttcagtaattcaatttcattttgtagaaatttaatgc

SEQ ID NO: 339282 - DNA, 539 bp, Homo sapiens
ataaattataaattaaatgaattatagggattcctattacatagcatgttttcctttttggtttcctgtatttgacctacttttcattaccatttcagcagtattgcttccttgcaactcttaagtagtcatgacatttttaaacactcacagcatttcttatatttcttcatttaatgacattttaggtttaagyggaaataaactatgatttccagatcgtgcatatttgaaagccatgaaacccattttagtatgattatgtcagctttatttaggtccatctacttttgtattttgagcatttcacccaaattagggtatacgtgtgtgtgtgtgtgtgtgtgtgtgtgtgtgtgtgtgtaatgggcatacactattatgaacatttctatttgaacacaggaattttgatattttatatgtttttttctgaaattgtgtcttagtgattaattattgcattatgttttagcccaataccctgcttagcaattgtaagtatattcatcagaattgtgggatatgatttggaaaga

SEQ ID NO: 339283 - DNA, 539 bp, Homo sapiens
ataaattataaattaaatgaattatagggattcctattacatagcatgttttcctttttggtttcctgtatttgacctacttttcattaccatttcagcagtattgcttccttgcaactcttaagtagtcatgacatttttaaacactcacagcatttcttatatttcttcatttaatgacattttaggtttaagtggaaataaactatgatttccagatcgtgcatatttgaaagccatgaaacccattttartatgattatgtcagctttatttaggtccatctacttttgtattttgagcatttcacccaaattagggtatacgtgtgtgtgtgtgtgtgtgtgtgtgtgtgtgtgtgtgtaatgggcatacactattatgaacatttctatttgaacacaggaattttgatattttatatgtttttttctgaaattgtgtcttagtgattaattattgcattatgttttagcccaataccctgcttagcaattgtaagtatattcatcagaattgtgggatatgatttggaaaga

SEQ ID NO: 339284 - DNA, 539 bp, Homo sapiens
ataaattataaattaaatgaattatagggattcctattacatagcatgttttcctttttggtttcctgtatttgacctacttttcattaccatttcagcagtattgcttccttgcaactcttaagtagtcatgacatttttaaacactcacagcatttcttatatttcttcatttaatgacattttaggtttaagtggaaataaactatgatttccagatcgtgcatatttgaaagccatgaaacccattttagtatgattatgtcagctttatttaggtccatctacttttgtattttgagcatttcacccaaattagggtatacgtgtgtgtgtgtgtgtgtgtgtgtgtgtgtgtgtgtgtaatgggcrtacactattatgaacatttctatttgaacacaggaattttgatattttatatgtttttttctgaaattgtgtcttagtgattaattattgcattatgttttagcccaataccctgcttagcaattgtaagtatattcatcagaattgtgggatatgatttggaaaga

SEQ ID NO: 339285 - DNA, 590 bp, Homo sapiens
cagtagaattctatttttataaagacaaaatacaaaataaaaaagatatacaattaacagaaataatagtgatctcatgcctaatgaagataaatgcaatgcacaagggcaaaatgggactttcaaagtataagcaatattttsttaacgtgtcacatagtttgactgtttgtcccctccagatttcatgttgaaatgtagtccccaaacacctctgttgagaggtgcttggtaattgggacggaacccttgtgaatggcttggtataatgagtgaattctccttcccttagcatgagaactggttgtttaaaagagcctggcatctctcttgctccctctctctccatgtggcacgcctgctcttgcttcaccttctgccaggaataaaagcctctgaggtctcaccagaagctgagcagatgctggtaccatgcttgtacagcctgcagaaccatgagtcaaaaaaatctcttttcttcataaattacccagtctcaggtattagtttatagcaatgcaaaatggactaacacaatatggttgttgggaacatgaatattcataccttttgtattctgtatatttagt

SEQ ID NO: 339286 - DNA, 590 bp, Homo sapiens
cagtagaattctatttttataaagacaaaatacaaaataaaaaagatatacaattaacagaaataatagtgatctcatgcctaatgaagataaatgcaatgcacaagggcaaaatgggactttcaaagtataagcaatattttcttaacgtgtcacatagtttgamtgtttgtcccctccagatttcatgttgaaatgtagtccccaaacacctctgttgagaggtgcttggtaattgggacggaacccttgtgaatggcttggtataatgagtgaattctccttcccttagcatgagaactggttgtttaaaagagcctggcatctctcttgctccctctctctccatgtggcacgcctgctcttgcttcaccttctgccaggaataaaagcctctgaggtctcaccagaagctgagcagatgctggtaccatgcttgtacagcctgcagaaccatgagtcaaaaaaatctcttttcttcataaattacccagtctcaggtattagtttatagcaatgcaaaatggactaacacaatatggttgttgggaacatgaatattcataccttttgtattctgtatatttagt

SEQ ID NO: 339287 - DNA, 586 bp, Homo sapiens
atcaagacaggagggtattcagcatctgtcatgcatttgtcatcaggttccagaatggtggtctcgccagagggtgggaacagttgcttcctcattagtacttccagccccaaaattaaacataagcttaccgtggatatgaagtattagtttgatggctgtgtgtgtgtgtgtgtgtgtgtgtgcgcgcgcgtgtgtgtgcaggaaaattacaggaaaaaataaagcatctgaattttgaatcaaaattgccatgctgtttttgtaaaatgtgattcagaagacctaaaaaagattakatataagataagttccactattatgacttttagcaatagagccaactggcaggtgcgagcctccattttggcaggattctacggaagcctctggtcaagagaggccctggtgtgctgtgctgggcttatgagacagtcatgtgatctgtcccagtttcgtggaagagactgcatgtcctttttgtttctcctttacataaccagtctgccacctctgggttccaacagacagaccctctgtggagttgtccacctgctttccacctggaaggtgccagtgacctctt

SEQ ID NO: 339288 - DNA, 586 bp, Homo sapiens
atcaagacaggagggtattcagcatctgtcatgcatttgtcatcaggttccagaatggtggtctcgccagagggtgggaacagttgcttcctcattagtacttccagccccaaaattaaacataagcttaccgtggatatgaagtattagtttgatggctgtgtgtgtgtgtgtgtgtgtgtgtgcgcgcgcgtgtgtgtgcaggaaaattacaggaaaaaataaagcatctgaattttgaatcaaaattgccatgctgtttttgtaaaatgtgattcagaagacctaaaaaagattagatataagataagttccactattatgacttttagcaatagagccaactggcaggtgcgagcctccattttggcaggattctacggaagcctctggtcaagagaggccctggtgtgctgtgctgggcttatgagacagtcatgtgatctgtcccagtttcgtggaagagactgcaygtcctttttgtttctcctttacataaccagtctgccacctctgggttccaacagacagaccctctgtggagttgtccacctgctttccacctggaaggtgccagtgacctctt

SEQ ID NO: 339289 - DNA, 608 bp, Homo sapiens
taataaatataatatcaagttcccataggaagaagtataaaatttaagtctagggaacatcattttttgagacaggataaaatataaaatacatgcaattttgtaaagaacacatgttraaattctaatttggggagataacggttctcttctaaatacctaaattcagtggtcatattcataatttttttatttccacttacaaacgacggcagtgaagttcctgggaagagtacacacaacaataccttaaattaacattggctatcacaagtgcttataaacattgacagaaacaaattagttgttacttatttcatcaaatctatacaaaacaaatctatactaactaaatttgttaatgaatatttatttaaaactggaataattccaaagaggaattcttatcccaggaatatgggttttgttagcacctgagttaaacacaacattttgagataaaaggactgtatctgtcagtatgctttcacagttatttgatctccctgtggaacatgctctaaagttaatatgccttactgcaaatttctctttagactgtctcacaggttattttaagacagtgaataatttcttttatcattcaa

SEQ ID NO: 339290 - DNA, 608 bp, Homo sapiens
taataaatataatatcaagttcccataggaagaagtataaaatttaagtctagggaacatcattttttgagacaggataaaatataaaatacatgcaattttgtaaagaacacatgttaaaattctaatttggggagataacggttctcttctaaatacctaaattcagtggtcatattcataatttttttatttccacttacaaaygacggcagtgaagttcctgggaagagtacacacaacaataccttaaattaacattggctatcacaagtgcttataaacattgacagaaacaaattagttgttacttatttcatcaaatctatacaaaacaaatctatactaactaaatttgttaatgaatatttatttaaaactggaataattccaaagaggaattcttatcccaggaatatgggttttgttagcacctgagttaaacacaacattttgagataaaaggactgtatctgtcagtatgctttcacagttatttgatctccctgtggaacatgctctaaagttaatatgccttactgcaaatttctctttagactgtctcacaggttattttaagacagtgaataatttcttttatcattcaa

SEQ ID NO: 339291 - DNA, 608 bp, Homo sapiens
taataaatataatatcaagttcccataggaagaagtataaaatttaagtctagggaacatcattttttgagacaggataaaatataaaatacatgcaattttgtaaagaacacatgttaaaattctaatttggggagataacggttctcttctaaatacctaaattcagtggtcatattcataatttttttatttccacttacaaacgasggcagtgaagttcctgggaagagtacacacaacaataccttaaattaacattggctatcacaagtgcttataaacattgacagaaacaaattagttgttacttatttcatcaaatctatacaaaacaaatctatactaactaaatttgttaatgaatatttatttaaaactggaataattccaaagaggaattcttatcccaggaatatgggttttgttagcacctgagttaaacacaacattttgagataaaaggactgtatctgtcagtatgctttcacagttatttgatctccctgtggaacatgctctaaagttaatatgccttactgcaaatttctctttagactgtctcacaggttattttaagacagtgaataatttcttttatcattcaa

SEQ ID NO: 339292 - DNA, 617 bp, Homo sapiens
ataagttaattttatatcttggctattgtgagtaattctgcaataaacatgagagtgcagacatccctttgatatatttattttattttatttgaatgtatacatagcagtgggattactggatcatacggcagttctatttttaattttttgaggaatctccatattgctttccayaatggctgcattaatttacattcccacaaagaaagtataaggatttccttttctccatgttctggctaatacttgttgtctttgtctttttaatactagccatattagcctatatgatatcttattgtggtttttatttgcatttctccgatgatgagtgatgttgagtactttttcatacacctgttggccatttgtatgtagtttttttctgagaaatatctattcacatcctttgctcatttttagtatggttatttgttttcttattattgagtagtttgagtttgttatatatattgactattagcctcttagcagatatgtgatttagaaatattttctcccaatctctaggttctctcttcactctatgaattttttctttgtggcaacaggagattgtaagtttgatttcattacatttgcctatgtttgct

SEQ ID NO: 339293 - DNA, 617 bp, Homo sapiens
ataagttaattttatatcttggctattgtgagtaattctgcaataaacatgagagtgcagacatccctttgatatatttattttattttatttgaatgtatacatagcagtgggattactggatcatacggcagttctatttttaattttttgaggaatctccatattgctttccacaatggctgcattaatttacattcccacaaagaaagyataaggatttccttttctccatgttctggctaatacttgttgtctttgtctttttaatactagccatattagcctatatgatatcttattgtggtttttatttgcatttctccgatgatgagtgatgttgagtactttttcatacacctgttggccatttgtatgtagtttttttctgagaaatatctattcacatcctttgctcatttttagtatggttatttgttttcttattattgagtagtttgagtttgttatatatattgactattagcctcttagcagatatgtgatttagaaatattttctcccaatctctaggttctctcttcactctatgaattttttctttgtggcaacaggagattgtaagtttgatttcattacatttgcctatgtttgct

SEQ ID NO: 339294 - DNA, 617 bp, Homo sapiens
ataagttaattttatatcttggctattgtgagtaattctgcaataaacatgagagtgcagacatccctttgatatatttattttattttatttgaatgtatacatagcagtgggattactggatcatacggcagttctatttttaattttttgaggaatctccatattgctttccacaatggctgcattaatttacattcccacaaagaaagtataaggatttccttttctccatgttctggctaatacttgttgtctttgtctttttaatactagccatattagcctatatgatatcttattgtggtttttatttgcatttctccgatgatgagtgatgttgagtactttttcatacacctgttggccatttgtatgtagtttttttctgagaaatatctattcacatcctttgctcatttttagtatggttatttgttttcttrttattgagtagtttgagtttgttatatatattgactattagcctcttagcagatatgtgatttagaaatattttctcccaatctctaggttctctcttcactctatgaattttttctttgtggcaacaggagattgtaagtttgatttcattacatttgcctatgtttgct

SEQ ID NO: 339295 - DNA, 561 bp, Homo sapiens
ttaaaaccatacatagtttcaccaaccagacatattttggcatatttggcatattttggaacataaagttttgctatattttctaatatgcttgaaatcactacacatatacatatacacaaactttttcttttcaagacatcatacaatttaaattctatgattagaaaatacgtacatttttttgaaagcacaatatttcagtttggkgtttatatgatttaacgggagagtacattttattttaagtatagatcttataataatctgtactatatatctatatcacagcatatttatttcttaggagttataatattttaaaagttttctaagagtcatgaaaataaaagttatttaaatatattcatttttaaaaattttcttaatgacaatattaaaaatgctatatttatgtttttactactttagtgttaggtgctatctcagtagttatacagtaataataaagccacagctttgttaagaatgccaaagccataagtaaagagtaatgtttatttttcacttaaactgttactgattttattcttataggtg

SEQ ID NO: 339296 - DNA, 546 bp, Homo sapiens
ttaccctgaagattagtgcttttgagcattttcaaatatactcgttggccatttgtatgttgtcttttgagatatgtctctagtttatttgcttgttttttaaatttggattatttattttattttcgttgttgttgagttgagttccttatatatttttatatcaatcccttgtccaatgaatagtttagaaataatttatcctattctaaaggatttctccttattcygttgattatttgctttgttgtacagagacattttagtttaaaatttcccatttgtctaattttgcttatgttgcctgtgttttgaggtcttatttgtaaaatctttgaaaaggccagtgtccaaagtgtttcccctgggttttcttttattagttttatagttttaggtcttacatttacatctttaccaattttgaatttatttgtgtctatggtgagagataggagcctaattctttttccatatatagatattcagttttcccagtaccatttattgaaggtactatcctttcctcaatgaatgttattggtg

SEQ ID NO: 339297 - DNA, 549 bp, Homo sapiens
ggtttaaatgaatgtagctttaaataaaaattagaattgattgcatatttagatggagctattttaataacgctataaatataactccatatgayacaaatcacacctccgtaagtgtttggtggtgtcatgtctgacacttgataaattaggaggaaggctgcctaatagaatgttagagaagatcagcaaattgtcatcttacacatagtgcaaagatggtagtctctccattgccaccaatcagaaggaaaattcatttcccttccatcagtcttcctgtataaaattatgtgaatattattttttaaatagtcaaatttctcagattaaagcgacagctgtttactttcccaaaaaatttaaataaatattctgcttttaaaatatattcttggaaacgtaaaacattgacaaatgaaaaacagtcattgagtacttaacctatatagagcaaaaatgtaaatggaatgtcttaaaaacactttcagcaaatgagctcaattgaggctatttgcttctctccatgtaaaaggaaaaggcgtttta

SEQ ID NO: 339298 - DNA, 549 bp, Homo sapiens
ggtttaaatgaatgtagctttaaataaaaattagaattgattgcatatttagatggagctattttaataacgctataaatataactccatatgacasaaatcacacctccgtaagtgtttggtggtgtcatgtctgacacttgataaattaggaggaaggctgcctaatagaatgttagagaagatcagcaaattgtcatcttacacatagtgcaaagatggtagtctctccattgccaccaatcagaaggaaaattcatttcccttccatcagtcttcctgtataaaattatgtgaatattattttttaaatagtcaaatttctcagattaaagcgacagctgtttactttcccaaaaaatttaaataaatattctgcttttaaaatatattcttggaaacgtaaaacattgacaaatgaaaaacagtcattgagtacttaacctatatagagcaaaaatgtaaatggaatgtcttaaaaacactttcagcaaatgagctcaattgaggctatttgcttctctccatgtaaaaggaaaaggcgtttta

SEQ ID NO: 339299 - DNA, 549 bp, Homo sapiens
ggtttaaatgaatgtagctttaaataaaaattagaattgattgcatatttagatggagctattttaataacgctataaatataactccatatgacacaaatcacacctccgtaagtgtttggtggtgtcatgtctgacacttgataaattaggaggaaggctgcctaatagaatgttagagaagatcagcaaattgtcatcttacacatagtgcaaagatggtagtctctccattgccaccaatcagaaggaaaattcatttcccttccatcagtcttcctgtataaaattatgtgaatattattttttaaatagtcaaatttctcagattaaagcgacagctgtttactttcccaaaaaatttaaataaatattctgcttttaaaatatattcttggaaacgtaaaacattgacaaatgaaaaacagtcattgagtacttaacctatatagagcaaaaatgtaaatggaatgtcttaaraacactttcagcaaatgagctcaattgaggctatttgcttctctccatgtaaaaggaaaaggcgtttta

SEQ ID NO: 339300 - DNA, 514 bp, Homo sapiens
actcaatatgacgccattagtattagtgtggttttagtctcaccccccaccccatggatttcgtttaggcaataatgggtaacacccaagatggagtctatatggcccaccccaggcatgtgcagatgcgacgaccccaggggaaagctttccctttcccaataaggtaaaacccacagaaggcgtttttgtttstgccacatgaaagacccagaactcaaccccatttttggcacccctctgtggttcctctctcactgctgagagctttctttcacttaataaatcctactctgccttactcattccccagttttctcatgccttattcatcttggttgtgggacaaaacttggaccttactaaactaaggagactgcacacacaagaattgagttatactagatttatgaattaatgaccacgggtaggtgctcaattataaattatttccagaaacacacattatgtacctattttgtaagatttaaaaattcttttgatggtgggatac

SEQ ID NO: 339301 - DNA, 557 bp, Homo sapiens
ttttctttgttgattctttttatttattctataaatctgctttgattgatataatctgtttggtaatgaaataaaatatattttctaggaaggttgaatttgctagtctaaaaatactatagttctgaacaaaaagataaataaacaagaaaaacaaatatgctgcaaagttttaaaaagagcagataattctaaggtacaatggaatttaaagctgtgatgaacagcatgataatctgtttctgcttggccgctgtattagtgttttcacactgctatcaaaaactacctgagactgggtaatttataaagaaaagagstttaattgactcacagttccatgtggctggggaggcctcaagaaatttacattcatggccaaaggtgaagggaaagcaaggcacatcttacatggtggcaggagagaaagagagagagagagagaaagtgccacacattttcaaaccatcagatcctcgtgagaatgctatcatgagaacagcaagggagaagtcttgcccccatgactgaatcatctcccaccaggccccttcccc

SEQ ID NO: 339302 - DNA, 563 bp, Homo sapiens
tccagttaatgttctgattttctgtattgtgttatgttggaaaatttccttgtttttttgaaatacagactaagtatttggaggtaatgaggcatcctgtcagaaacttagttctcaaatggctcaggaaataaaagttctggccagttgcagtgggaggtagaggcaggtggatcacctgagatcaggaggtcaagaccagcctcgccaacctggtgaaaccctgtctctactaaaagtacaaaaattagccgggcatggtggcaggcgyctgtaatcccaactactcgggaagctgaggcaggaggatcgcttgaactgtacttcaaagatttcatacattaatattttttaaaaatattatgataatacattaaaatattctagaatagtactggacacacaatagatgctcaataaatatctattgaatcccatctcaaatagaggattttacatagacacaaatataattaagacaagatattaattatagaaaactacgttacacaactttatgtctgttttcaatccttcacatttcctccaattaaaattgcccc

SEQ ID NO: 339303 - DNA, 620 bp, Homo sapiens
ctggatatgggactgaacaaaaatacattttgtgacccttaccacytgtatgaactgatcttagacactatatcattatcctacatcattttgggaaagcatcagaagacataatccacctcctttctgagatgaggaaactcagttctttcaaggtcaactctgaggtcatatcactaaatctaagatcatacaactcagtaatgtcatttttttctgtaagaagcctttttgtagctccacagaaatgtacttactgggttctctcatatttctttgatttcatggttatcctaatattgatttcaaccagttagaatgtgttaacttatactttttgctaaactcaatactcattccaagatttggtgtcctctctaagattttttgcttatttgtttttaactcctcatggtggtactgaaatttgaatgatatgaattaatgctgtctgttctatcaaaacttattctgggtttcaagatccatgttatatagttaaaggaaaacattggagcatatgttaaagatcagacattttgtagttaagtgtctttaatcctactgctgccattttccagtgctgggatcttgagtagttgttttaaaaaaagctagca

SEQ ID NO: 339304 - DNA, 502 bp, Homo sapiens
ccttacgggagttagaatctttatcttgggtattaaactagaaatcaagaccattttttgtaagaggtgtcgtctcactgtattgcccccgctggctggcctctgactcctgggctccagaaatcctgcctcaccctcccgagtagcttgaacaagaagccatatttttaaaccttaaarcacaaataattgaaccactagtttccctaaatcataggtatagtacttcacttctaaaggtggctgtcttaaaatctgaaatgccctttctgaagataggcatctttaatttctataatggctcccaaatgaagtttttttttagtgtccctaaggtgaaggaggcaggggacacaagttcttgtttatttttcagtaaaccattctatttatgtataatgcagggacttttcattttaaggattttaatttttaacacactgagaatagatacaaaattagttttaataaaactatttcaaaatagaagtaattttgcaaa

SEQ ID NO: 339305 - DNA, 502 bp, Homo sapiens
ccttacgggagttagaatctttatcttgggtattaaactagaaatcaagaccattttttgtaagaggtgtcgtctcactgtattgcccccgctggctggcctctgactcctgggctccagaaatcctgcctcaccctcccgagtagcttgaacaagaagccatatttttaaaccttaaaacacaaataattgaaccactagtttccctaaatcataggtatagtacttcasttctaaaggtggctgtcttaaaatctgaaatgccctttctgaagataggcatctttaatttctataatggctcccaaatgaagtttttttttagtgtccctaaggtgaaggaggcaggggacacaagttcttgtttatttttcagtaaaccattctatttatgtataatgcagggacttttcattttaaggattttaatttttaacacactgagaatagatacaaaattagttttaataaaactatttcaaaatagaagtaattttgcaaa

SEQ ID NO: 339306 - DNA, 502 bp, Homo sapiens
ccttacgggagttagaatctttatcttgggtattaaactagaaatcaagaccattttttgtaagaggtgtcgtctcactgtattgcccccgctggctggcctctgactcctgggctccagaaatcctgcctcaccctcccgagtagcttgaacaagaagccatatttttaaaccttaaaacacaaataattgaaccactagtttccctaaatcataggtatagtacttcacttctaaaggtggctgtcttaaaatctgaaatgccctttctraagataggcatctttaatttctataatggctcccaaatgaagtttttttttagtgtccctaaggtgaaggaggcaggggacacaagttcttgtttatttttcagtaaaccattctatttatgtataatgcagggacttttcattttaaggattttaatttttaacacactgagaatagatacaaaattagttttaataaaactatttcaaaatagaagtaattttgcaaa

SEQ ID NO: 339307 - DNA, 522 bp, Homo sapiens
gaatctttatcttgggtattaaactagaaatcaagaccattttttgtaagaggtgtcgtctcactgtattgcccccgctggctggcctctgactcctgggctccagaaatcctgcctcaccctcccgagtagcttgaacaagaagccatatttttaaaccttaaaacacaaataattgaaccactagtttccctaaatcataggtatagtacttcacttctaaaggtggctgtcttaaaatctgaaatgccctttctgaagataggcatctttaatttctataatggctcccaaatgaagtttttttttagtgtccctaaggtgaaggaggcaggggacacaagttcttgtttatttttcagtaaaccattctatttatgtataatgcagggacttttcattttaaggattttaatttttaacacamtgagaatagatacaaaattagttttaataaaactatttcaaaatagaagtaattttgcaaatatctacaaatcatagcttcaggtatatcgttat

SEQ ID NO: 339308 - DNA, 525 bp, Homo sapiens
gtgttccctgccatatatattgattcctccaatagaactgggaaaagtaaattgaaaaccttctggaaagaagtttctagacgccattgagatcattagtgatttattgcaagtggtaaaaatatgaacgttaacagaaatttagaaaaagttgattccagcyttcatggatgactttgagggattcaagacttcagtggagtaagttactgagatgtgacagcaatatcaacagaactacaattaaaattgaagcctgaagatgtgactgagtatggcaatctcatgataaaacttgaactaatgaagagatacttcttatgaatgagcaaaggaaatgatttcttgagatgaaatctacttctggtgaaaatgctatgaacattgttgaaatgacaacaaaagatttataatactatgtatacttagttgataaagcagtggtaggatttgagaggattgactaattttgaaattttatagtgggcaaaatggtatcaatcagtgttgcatgctacaacaaaa

SEQ ID NO: 339309 - DNA, 525 bp, Homo sapiens
gtgttccctgccatatatattgattcctccaatagaactgggaaaagtaaattgaaaaccttctggaaagaagtttctagacgccattgagatcattagtgatttattgcaagtggtaaaaatatgaacgttaacagaaatttagaaaaagttgattccagccttcatggatgactttgagggattcaagacttcagtggagtaagttactgagatgtgacagcaatatcaacagaactacaattaaaattgaagcytgaagatgtgactgagtatggcaatctcatgataaaacttgaactaatgaagagatacttcttatgaatgagcaaaggaaatgatttcttgagatgaaatctacttctggtgaaaatgctatgaacattgttgaaatgacaacaaaagatttataatactatgtatacttagttgataaagcagtggtaggatttgagaggattgactaattttgaaattttatagtgggcaaaatggtatcaatcagtgttgcatgctacaacaaaa

SEQ ID NO: 339310 - DNA, 515 bp, Homo sapiens
cagggggctgggttggggaaggtgagttgtctatattakcctgggctccagatagaagaaaattcccctcttgcaattcatacctttgacacaatgcactggacacaatttatgtacaatctcatatttggctgatctttctcacctctggagcctggtggctgcttcctcgtgggactcctggctgctgcctctgtaccaggcacagctgccaccaccttatctgccagcctctgttataattactacactttccatgggagccgtagcagctctggagaccaggcccaaccaattgcacccagggagacttggctcccttaaccacttctggattcaaataaaacactatgacaaattgtttgggaaattcaagttaaaataattaacataattttgttcataacactctggcaagcctgatgaaagcaaagaacaaatctcttttaagagaacccagataaattcaaaacccaaatcttgcaagagtctcataaataaattatgcaaaacat

SEQ ID NO: 339311 - DNA, 515 bp, Homo sapiens
cagggggctgggttggggaaggtgagttgtctatattagcctgggctccagatagaagaaaattcccctcttgcaattcatacctttgacacaatgcactggacacaatttatgtacaatctcatatttggctgatctttctcacctctggagcctggtggctgcttcctcgtgggactcctggctgctgcctctgtaccaggcacagctgccaccaccttatctgccagcctctgttatrattactacactttccatgggagccgtagcagctctggagaccaggcccaaccaattgcacccagggagacttggctcccttaaccacttctggattcaaataaaacactatgacaaattgtttgggaaattcaagttaaaataattaacataattttgttcataacactctggcaagcctgatgaaagcaaagaacaaatctcttttaagagaacccagataaattcaaaacccaaatcttgcaagagtctcataaataaattatgcaaaacat

SEQ ID NO: 339312 - DNA, 515 bp, Homo sapiens
cagggggctgggttggggaaggtgagttgtctatattagcctgggctccagatagaagaaaattcccctcttgcaattcatacctttgacacaatgcactggacacaatttatgtacaatctcatatttggctgatctttctcacctctggagcctggtggctgcttcctcgtgggactcctggctgctgcctctgtaccaggcacagctgccaccaccttatctgccagcctctgttataattactacactttccatgggagccgtagcagctctggagaccaggcccaaccaattgcacccagggagacttggctcccttaaccacttctggattcaaataaaacactatgacaaattgtttgggaaattcaagttaaaataattaacataattttgttcataacactctggcaagcctgatgaaagcaaagaacaaatctcttttaagagaacccagataaattcaaaacccaaatcttgyaagagtctcataaataaattatgcaaaacat

SEQ ID NO: 339313 - DNA, 538 bp, Homo sapiens
taggttgggaacgttctcatggataatatcctaaaatacgttttccaaattggtccccttctccccttctctttcagagataccaatcagtcatagatttggtctctttacataatcccatatttctcggaggtatgttagttgattttcattcttttttttctctattcttgtctgtttgtcttatttcagaaggcaatcttcaaactctgagattatttcctccacttggtctatcctgctattaatacttgcaattgcattatgaaattcttatagtgtatttttcagctctatyatcaggttgtttatattcttttctatatgggttattttgtctgtcagtttctgcactgttttatcatgatttttagcttcgttgcattgggtttcaatatatctttgtagctcaatgatcttcctttctatccatattctgaattctattgctctcatttcagccagttcatcccagtttccaaacccttgctggagaggtgatttgctggtttgcatgatagaagacaccccagctttt

SEQ ID NO: 339314 - DNA, 546 bp, Homo sapiens
aagcaataattagcaggattttaaatatctctctaaaatatagtacaaagattttcctcccttaggaggtctataactaaagacggacataaaactggaggaaaattctgtttccaagtgtctgagtggcagtctgagtaatttaccaggtttctgagaagaaaaagagaaactatccaaaatttcagtcaatatttatctcttaggttaataaatcttgctcttgacctcaaaagaagtcaatatctcctgattattatatgcaagtgcctcctgggcctttctatttgtccagactcattatggaatgagtcaccagtttcccragagcccctatctgaggcatgggtgtagactgaagaatcgctcgcatttcaaaggtgtgggcaggctgccaataattggtgctatcgctcaacatttacttgaatctctaattctgacatgtttgctttttcattttaggctttcgggctggtgctcagagatgaagtggggctgagatatatttgtgaagcattcaaaggctgtaaaagagacagtagc

SEQ ID NO: 339315 - DNA, 546 bp, Homo sapiens
aagcaataattagcaggattttaaatatctctctaaaatatagtacaaagattttcctcccttaggaggtctataactaaagacggacataaaactggaggaaaattctgtttccaagtgtctgagtggcagtctgagtaatttaccaggtttctgagaagaaaaagagaaactatccaaaatttcagtcaatatttatctcttaggttaataaatcttgctcttgacctcaaaagaagtcaatatctcctgattattatatgcaagtgcctcctgggcctttctatttgtccagactcattatggaatgagtcaccagtttcccgagagcccctrtctgaggcatgggtgtagactgaagaatcgctcgcatttcaaaggtgtgggcaggctgccaataattggtgctatcgctcaacatttacttgaatctctaattctgacatgtttgctttttcattttaggctttcgggctggtgctcagagatgaagtggggctgagatatatttgtgaagcattcaaaggctgtaaaagagacagtagc

SEQ ID NO: 339316 - DNA, 546 bp, Homo sapiens
aagcaataattagcaggattttaaatatctctctaaaatatagtacaaagattttcctcccttaggaggtctataactaaagacggacataaaactggaggaaaattctgtttccaagtgtctgagtggcagtctgagtaatttaccaggtttctgagaagaaaaagagaaactatccaaaatttcagtcaatatttatctcttaggttaataaatcttgctcttgacctcaaaagaagtcaatatctcctgattattatatgcaagtgcctcctgggcctttctatttgtccagactcattatggaatgagtcaccagtttcccgagagcccctatctgaggcatgggtgtagactgaagaatcgctcgcatttcaaaggtgtgggcrggctgccaataattggtgctatcgctcaacatttacttgaatctctaattctgacatgtttgctttttcattttaggctttcgggctggtgctcagagatgaagtggggctgagatatatttgtgaagcattcaaaggctgtaaaagagacagtagc

SEQ ID NO: 339317 - DNA, 525 bp, Homo sapiens
atgtagtatgtatacatacatactgagagaatattgtgcagaaaaagttctttatcactacataattcagtacgttttcactaaaaacaaggacattgtcttaactacagcactattatcaaactcagaaaatttacaatggtataatattaccatgtagtctayagctattattcaaatattgcaaattgttctgctagagcattatataacaaaagaaaaaaaattgctgtgatcaagaattaattttatttctttgtcatgttcctttagtatcctttaatctaaaatagtacttcctttctttgtctttcatgaccctacatttttgaagaccagttattttttggtagaaaaagcacagacttgcacccgccagggccatgcctccatgctaataacatcaccagtgtgaccatgtgcagtcaccaacgagggctccctttccctgcaaactgtgctatctcccccgctgccgtaaatgcccacacaaaagcaggcaccctggcccttgctgtcacctgc

SEQ ID NO: 339318 - DNA, 525 bp, Homo sapiens
atgtagtatgtatacatacatactgagagaatattgtgcagaaaaagttctttatcactacataattcagtacgttttcactaaaaacaaggacattgtcttaactacagcactattatcaaactcagaaaatttacaatggtataatattaccatgtagtctacagctattattcaaatattgcaaattgttctgctagagcattatataacaaaagaaaaaaaattgctgtgatcaagaattaattttatttctttgtcatgttcctttagtatcctttaatctaaaatagtacttcctttctttgtctttcatgaccctacatttttgaagaccagttattttttggtagaaaaagcacagacttgcacccgccagggccatgcctccatgctaataacatcaccagtgtgaccatgtgcagtcaccaacgagggctccctttccctgcaaactgtgctayctcccccgctgccgtaaatgcccacacaaaagcaggcaccctggcccttgctgtcacctgc

SEQ ID NO: 339319 - DNA, 556 bp, Homo sapiens
tttcaggtttaagtgagatcatgcagtatttgcctttatatacctggcttatttaacttaccataatatactccgggttcatccaggttgttgcagttacaagatatacttcttgtgtgaatattttttcatgtggtagaatatatatgtgtgtgtgtacatatgtatatatgtgtgtatatacatgcatatgtatatatgtatatacatgcatatgtatatatgtatatatytatatacatatatgccattttcttcattcattcacccatctatggacacttaagttgattccatatcttgactactgtgaataatgatgcagtgaacacagtagtggagacgtctcttcaacatactgattttatttcctttggatatatactcaaaagtgagattgctgaattatatgatagttttgttgtgtataattttttgaggcacctccatgctgtttttgataatggctgtactaatttaccttcccactaatagtgtgcaagggttttcttttctacacatcttcaccaacacttatcatcttttgtcttttgat

SEQ ID NO: 339320 - DNA, 554 bp, Homo sapiens
tacttcttgtgtgaatattttttcatgtggtagaatatatatgtgtgtgtgtacatatgtatatatgtgtgtatatacatgcatatgtatatatgtatatacatgcatatgtatatatgtatatatttatatacatatatgccattttcttcattcattcacccatctatggacacttaagttgattccatatcttgactactgtgaataatgatgcagtgaacacagtagtggagacgtctcttcaacatactgattttatttcctttggatatatactcaaaagtgrgattgctgaattatatgatagttttgttgtgtataattttttgaggcacctccatgctgtttttgataatggctgtactaatttaccttcccactaatagtgtgcaagggttttcttttctacacatcttcaccaacacttatcatcttttgtcttttgattaatagccattctaacctgtgtgaggtggtatcttattatggttttaatttgcatttccctgatgattagttatattgagcatgttttcatatactgtattagt

SEQ ID NO: 339321 - DNA, 593 bp, Homo sapiens
aatcttcatttttcataacatttgccaaggtctcatggattttattttctgtgttgccttcccagttgttctttgatgaagagaagaaaatgttcaaagactctatctggacagcagagcagtgcacagctgtgatgtttcttttttctctgccttgaccttactctgaagaaagtactcctttaggctcaaactcctgaaattgactgaagtatctcttagggaatgctttggtcataacagattttttwaaaaacttatttaaattccattccaggtgcagcctccctttactttataggttaaagcgggaaatatcactgggaaagggaaaaggatcatgaatatttaaagtttatcataaataagaagtctgtgaacaaagcctgcccatgagcctgagttttgtgttacatcatctcttgaaatccctctgaaaaaagagtatgcactagacaattgcaccaacatagggaaagcaaaggcatgtctcattatcaccctgagaaatgccaacacctatggtcttgatcatttttcgacatttttcctttaagtcacataggccttatggttcacacaacagagaaatt

SEQ ID NO: 339322 - DNA, 543 bp, Homo sapiens
cattcatgaattcaattctacctgctagtattctttggtacaaccacagcttttatctggtactcgaccacagaactagtttgtattaatgctggagcaaaatcagtcttctttggacttcttgagaaatttgtatctgtatagggttgatatacaaaggtttctgctttagatggacaatttggaagattttcaaggataatttttgattactaaaattttgccktaccttttttttaattctagaaactaggctggcacaaaagtaattgcagtttttgccattacttttaattgcttattgtccaattccacattgaaagtaatggcaaaaactgcaattagttttgcagcaacctaatagctcactaatatgacacttcatcattttacatatatctttctcaaatcacacaaatattactcattaaataaataaattctagttttttcaactctatcctgatgatattactgtaatcacaaaaggagatgccacagaagtctgaaagtgaaagggaatgcagatgacagcagcatctt

SEQ ID NO: 339323 - DNA, 619 bp, Homo sapiens
ttaatttctaaatatttggggattttagatgtagctttctgttattaatttctaaattaatttcattgtgataagagaacctactctgtattagtttattcctttaaaatttaaggcttgttttatgttccagcatatgccctatcttggggaatattccacatgcacttaataaaaccctgtattttacagttgttggggcagtgttctatgaaygttagttaggtaagatggtgataatgttttaaatcattattactattgattttctattttttaaaaatcaacatctgggagaggaatgttgaaatgtccaactacaattgtggatttatttatttcttctttcaattttgttaggttttcttttaggcatttgaagctctttattgggaggtgcatatatattttatatttatatatataatataatgtatatataatatatatgattgttatattttctttatgattatgaaatgtctctctttattcctaattttatttctctttctgaaggctactttgtctaatattaatatagctactttagctttctcattatgagtattttcatagtatagctttttgcatcaatgtctgtctacacatatatata

SEQ ID NO: 339324 - DNA, 501 bp, Homo sapiens
ttcttgatgtgcaagcaaaaattagattaaaaaaaaaaaacatcctgactgcatttggtatagttaaaaaacaagcacacacacactaaactggaagccagaagatggactctgcaactagtgcgtagtcatacatctcagcctcatttttttccatccttaaaatcaggcaaattggatgtcataatctctaaacttccactaacaacacagttttcaccaacaccaggaatataagcaaatctcaaactgtgaacaggtttctaaaaagaactaagacattgcttttgttgttttcaaaagaatttcagtttaaagaaaaaggaagccaaaaatacttgttttcattatgacaccaaatcctaaagggaaagaaatagatttaatgccaaaaagatgtcagaataaccagctcaaaagctagaggtcayccaatacagagtaggaactaacctaggcagcaagtgtgatggaagttttaaatagcaaatgaaaagatta

SEQ ID NO: 339325 - DNA, 550 bp, Homo sapiens
aaatacagtggtacaagtaggcctttgttaaatgactaacctgaaacctcttgtgaatgacaaactcctctctactscaaatactggcccatccctgcttaaatactgctcaatgaagttactcatgctagttcttgagggagtaactctagaatgattccatctaggaagacataagataaaatggtaagtattctaagttctataggtagtttagtcatgccatattataaacctccactccaaaaatagtgtgaggtcatttctggccagagtgaaataaaaaatgtataatgcctgaacagtctattattctgacaatgaaaaagattaatgcagttccctttatcacttgcatgagtaaaaaaatatatatatatattggctgggcgcggtggctcacgcctgtaatctcagcactgtgggaggccaaggtgggtggatcacctgaggtcaggcatttaagaccagcctggccaacatggtgaaaccccgtctctactaaaaaacacaaaaattagcagggcatgatggagcatgcctgtaatcc

SEQ ID NO: 339326 - DNA, 625 bp, Homo sapiens
acaggtggcatgatcacagctcactgcakccttgacctcctgggctcaatcaatcctcccgcctcagcctcccaagaagctgggactacaggtgtgtgccaccactcccagctaatttcttcttttgtattttttttttatcgtagagacagggctttgcagtattgccaaggctggtctcaaactcctgtgctcaagacatccactcaccttggcctcgtaaaatcttgggattgcaggtatgagccaccatgcctggccccatatgaggtcttgattactgtgaaaggaatttggattttattttaagatacagggaaaggtatttgtaaaagagtaattgatttgtaagagagtaactatcaatgttgggtagaaaattgattgcaagaatgcttgagtcaacagcaaagggtacaaaagataagataatgactccaatgattgatctagaaccttgatcagggcataatggaagggagtagaggtggcatgttagatggcatgcatgggtcgggagagatgagccacaatattgtcatgtcttcaaaattggaggctactcgagaattttggtatgctgatagaaataatcaaacagagaaataaaaatgataaagcagga

SEQ ID NO: 339327 - DNA, 569 bp, Homo sapiens
aagaaatgtttttttcacccctagtcagtaatctcaccctagcattgcatagtttcctttaccttaagagatgagtcaatacctcagtaggcatagaagtgagtttttgtctttctaaagatcttattaatagcaccccttttcactcagagaattgcctcagttttgatgatacgttttatgatcacctatgaaattctcatctcttgacatgtactcttagattttataggttcatcttctcaaatgtctgctttcaggtacagcatggctatcagaaggccataatcawattttgttcactatattttatattttctgtactattggtgcaactaaggtgttgctgcctacagtcccagagttttttctctgtatttgtccattctcacaccgctataaagacatacctgagattgggtaatttataaagaaaagaggtttaatcagctcacagctctgcaggttgtacagatttctgcttctggggaggcatcaggaaacttcgtcatgatggaaggcaaaagaaagcaagcacaccttcacatgactgacaggagagagaaaga

SEQ ID NO: 339328 - DNA, 544 bp, Homo sapiens
acttgtgtttatcccattgtctgacttcctctggaacacacagaggggcaggaaacttactaccaattccatgtactgttctgtttctcataacgtcctcacatttattaaaaaatctgtcaccttgctgctgctggagagccacacaaaataaatcatattcctgtctatgtatgagagatcaatatcttggacatcatagatcttctaaatctcatctctcctttaaatttagacatttctccagccaatttttctcctgcagtccttacccaagcttcaagtctccctctaagaargctctcttcgtaatcctcgcccccagtctcttctcctagagagatgtaatttctttcctgtcctcacctaatgagtatggtactccattttagggacctcttcctatgcttattactttctacctatatttatagaaacattttacaaaacatttccatgccacaatattctcacaagttgtcaatagcagttagttgcagggagtgggggtgggggatagcccataaaacaacatacatttatt

SEQ ID NO: 339329 - DNA, 577 bp, Homo sapiens
ctatttgaatagaaagtcattaatggcctcagcacatgtttcatatagctttgcaactgccacagtgacttcccattgccaartacttggtaaatataaaaaatgtttgaataatcaagtgattaatgtattattgggcaacagatgagttttccatctttgttgagttttcacggaggtcagattttctttattgttacaaatatatttatgaaaataaaactaatccttctcttttaaccttctcttgctgttttcttcttcctcattctcattgtactacccttctagacacaacaaatatctgagtacctgctagatgccagatgatgtagtcagtatttcacatgcattgtgccccttaacacttttgattcttctatgacatagggattattatcctaatttacagatgagcaaaattagattcagggaaattaagtgaatttcctaaggtactacaactagtaaatatcatgaccagaattcaaaccacagaatatctaaatccaaatttcaggcacctgcttgccaaatcattccactaaagtatgtaactattctctttttgtatgtg

SEQ ID NO: 339330 - DNA, 563 bp, Homo sapiens
ctttcctctaatttatggaacaatatattgtatacttacagtagatgttttattatcccttgtctactaattttattatgtgagttatttgggggtcatcagctttattgatttattttacttttatttacatttcrtattttttgtagttctttctatgcttggcaatttttgattggttgctgtattaatttccaagagtagttgtagcaaagttccatgaactggctagtttaaaataacagaaatttattctgcatgtaagaaaaatccccatgtaagggcttctttatttttctctgtaacaataagtctggagatgtagctgttctatcttccactgggtggttctgacatacgtgcatataatggctcaaaggacctaggcaacagaaagcttcagtatcagttcaatccaccagcttaagctgaatttcagggcccaagtttctaaaattctcttgaccttcccatcatggacacagaatggctgctgaaaatcagccctcatatcattatgtaaactgaaagaatgatattgagcgggactatcaagcaccagc

SEQ ID NO: 339331 - DNA, 566 bp, Homo sapiens
caattcacgctttggggtaagcatctttccttggcattttgttctctgcagtaattccattaaaggagcacaatttattgcacatctgtctttgcagattttatcaatgctgaaaccttttaaactgagaatgggattaaataaaccccatttaccaatgtggtaaaatataatagacacccagcccattaaatgtccagccaaatcaatatatgcacttggcagcaatttccagaagataaggtgaaaccctcctgttctatttgatagatgagtaaacttaaagggaagaatttacagtagattcagcgtgtaccttgaaggagtgttcattattctcaaattaccttttcatgtcagcagatttgtgcttagtaaacagagaggccatttgtactcccccttctatgtagtgatagaggttgctttgcagcaagtgactgatgtagasagcagagaagtgtttagatctatttaacaaagaggaggtttcagatgcatttaaaagatatttataaatttgaattgtggaagtcatactgcccaaaatcacctaaattatgtgg

SEQ ID NO: 339332 - DNA, 563 bp, Homo sapiens
tgaatgtgaatccaggagagtgtgaagggtgcagaaagctaaagaaatcagtaagaacagtaataacgtgtaatgtgccaggcactgcctatgttttatataattataaatttaatagaaattggccaaaggagggaaactattatgcttatttataatctgtcaggaactattgttagcacttttatatgcactaatatttgtacctaaccttcacagaaaacttttcaggtaggtatcactgtggatttggaaacagagaatcaaagttaactgcccccaaatcacaataaaaatactgaagctagtattttaatttaggcttttagcttccgagacctaytgatctgtacgataacgtagtaaaaatggaaaaagtcagatttttttatagacctagggtaaagctgaggatttcaaacagaaatttactctttagatgataattcggaaaacagaagccagtgactgaagttaaggtcaaatgttggaatcagaaaaagcagaaggtgatggtcaatatcccaaaaaatattcagggtcaaaaacaggagctgaagcag

SEQ ID NO: 339333 - DNA, 355 bp, Homo sapiens
tgtgtggtttattgaatcccagtaccaaggagaagattctcaggaaaaaggcagagttcaaatattataattgaggcatatgaaataagagttatataattataagcatgagtgagcgctaaatgataggatgaccaggaacgggactggaggaatgtacataagagtgacttacgtgaccaytgatgaggcatgtcccttctaggtgtttcttagtcaatttacactgttatttaaatgcaaggacattataatatcctgccttacttgtcaatgtttgacgtcttagtaaataaagtcagcttcaaactgctaaaaaatgtttttaaaatctattctgtatatgctagagact

SEQ ID NO: 339334 - DNA, 608 bp, Homo sapiens
  misc_feature (1)...(608): n = A,T,C or G
cttttaccttgttatttgctaagagttaaatttttacattgataaattgagatgctctagaaataactgaagtaatggaaaccacttaaatgttatgaattcaacaaaatttatgttttctcagcctgcttttcaatgttaatatttcaacatttagcaatttttaaaattattaaataaagttaaataaaaatattttagggtgcaagtttttatagatcatcatgttaataaaagattggagagtttggatcaataagctagaggaaatagccccagaattccaggtcctcttctcttcattccaatactgtaatgttcaaaccttagtgcacattgtgaaggaattaagagatgtgtttgttaaaatcacagaattataggtaccactctcaaatattcttatttagtaggtcaaagaganaccaaggagctggatttaatcagtttctcaagtgattctgatgcaagagactgctttgattactctcccatcaagacttcctcttctataatctgtgatacttggaaaaattttacttgttttctgacctcacgtgtttttatttactataattgacsatgaaccaattcagaggttattataa

SEQ ID NO: 339335 - DNA, 576 bp, Homo sapiens
gaattgactttaaaataacaaaaatgataataattattataattattgaaataaaracaagagatattttaactagattttgactatttaaaaattctcagttctggattatatcccataaaactcagttgtgtcaagtttaaatataggttttttgacaaaaatcaaaatatgtctcctgggggtgatggctcattcctgtaatcccagcactttacgaggccagctcctcgcttgagcccaggagatcgagaccaacctgggcaacatgataaaaccctgtctctacaaaaagggaatatttaaaaaattatctgggcatggtcttatgcacctgtgatcccagctactagagaggctgaggtgggaggattgattgggcctcaggagattgaggctgcagtgagccatgatcttgccactgcaatccagactgggtaatagaaagagactctgtcttaaaaaaaaaaaaatcatacatgcactaaaattttgtgtacaaataggcagtgtaggaaattcccagggatgttcttaaaacactgatttcatttttagacttagcataactaatac

SEQ ID NO: 339336 - DNA, 576 bp, Homo sapiens
gaattgactttaaaataacaaaaatgataataattattataattattgaaataaaaacaagagatattttaactagattttgactatttaaaaattctcagttctggattatatcccataaaactcagttgtgtcaagtttaaatataggttttttgacaaaaatcaaaatatgtctcctgggggtgatggctcattcctgtaatcccagcactttacgaggccagctcctcgcttgagcccaggagatcgagaccaacctgggcaacatgataaaaccctgtctctacaaaaagggaatatttaaaaaattatctgggcatggtcttatgcacctgtgatcccagctactagagaggctgaggtgggaggaytgattgggcctcaggagattgaggctgcagtgagccatgatcttgccactgcaatccagactgggtaatagaaagagactctgtcttaaaaaaaaaaaaatcatacatgcactaaaattttgtgtacaaataggcagtgtaggaaattcccagggatgttcttaaaacactgatttcatttttagacttagcataactaatac

SEQ ID NO: 339337 - DNA, 527 bp, Homo sapiens
aatcatcttacattctttcactttatatgttggatgaccaaaaaaagagaaagctttgacttggttgttgaatatatgctctcacttctcagacattggtactcaacttcattctgactgaggtgcattcctgccaaaattagtatatgtaaaytccattccccaaaattctgactttacaggaattatgtaaagccagaaatttaccattctagtaataaccctggggcatattttgagatatactgctcagaggaaatctcaggatttcaccattcctttatcattttacccatccaataagaagaatctataataaggttcagcaaaaaatggttgtcctcaaatgtgtctggaagactaatctctcttcaaagatgctcacatcctaatacctgaaactttatttggcacatgagactttgcagatgtgattaacttgaggattttgtgatggagaggtagagaaaatgtaagggaaatgtagagaaaatattctgaagtcaattgcatcttaacagtccttt

SEQ ID NO: 339338 - DNA, 558 bp, Homo sapiens
aggcatgtgccaccacgctggctaattttgtattttcagtagagacgggatttctccgtgttggtcaggctcccaaagtgctgggattacaggcatgagccaccgtgcctggcctgtagtagagacttttataaaggagtctgctttaatccagggcatttgcagctgtattgtcaagatcatatrttttaagttctcattctgtttgaatacaagggttaagtagggaagttttccagggctgtgggtctgactgcaagaatttataattcatcgagtcagtttctcgttctccaggggattgcctccatcagcattgtaaatccagtcctgggcagtaagagcttaaatactacgcagtgactcatttatgattcctcttgggagttatttcctctcagggaagtctctctgagggggccaaagctcccttatagcaggaagaattcactgcagaaacaaacaagaaaactgggacctttgccatcatctctgaatggatttaaggttggcttgatagactgcaggagggactgagtgctaagatgtcccagctgt

SEQ ID NO: 339339 - DNA, 534 bp, Homo sapiens
gattctctcaaactctttccccatcctcaaacatatgaggctgcccatttctgttagaatctggacaaaactatttcacatgacctacaagacccggtgagggctcaccttggcccacctcttcagtttcacctatcaccatgctcccttcttctatgttccagctatgccagtgccctccagytccctttgctttgtgtttcccccttctgaggccctttgcatgtgtttatgcctttggctggaatgttcttcccaccctcttcattaaggtaaggccagcatctttcagatctcaacctaaatccaagcatcactgtgtcaccttcctgattatcacattttatcctgtcaatgatgcaagtttcttcatactttaggagctttggaattacaacatgtcttgtaagtaaatggagtctcacagtcactgttagcctagatcaaagtcaaattattctagcaagattttggaagccagcaatggggccagcaacaggtctgtacctccctgggacaaagctcccagagaaa

SEQ ID NO: 339340 - DNA, 617 bp, Homo sapiens
tgtccagccatctaaaacatgagtgttaagaaggaaacactcatgcaatgaattcccacgagggtcatccttcttgaactgggaaatgttttgtgtggaagatggtgaaccagaccaaggaaamcctaattcaatgaggaacacaaagtcagaaaatgaagaggcaagcgtggaggccacatcccacccacatcaatccatcccactcccatttggccctgggtatgaaaaccctcaaagtgcaaagccccagtttgcactccatatgttaatggcaggttggagaatacccacttgaacacagggccatggtgtgggctgcttgtgcaatcaacggaatgtggggatgcaggtggatgcaacttctgtgtcatctgtcttcacctttttttcaggtgcaggtgtgggacacaatccacacctcaccagattgtatccttttccttatcggaccttattgctgctcacactctctgtcccagaatgaaatcccaagatgatgaagcagtgccccctcatgacgttaagcacctgcctggctggtctgacatattgattaatcatacttataattgtttacattcattgttaaacacaatgtttcatttttcttcctt

SEQ ID NO: 339341 - DNA, 535 bp, Homo sapiens
gatgagtaatgtctggctacagttgatgcttactcaaggtccaagggatctttagtaaggaggtcatgaattccaccaggactgggttcttcccttcaaggcagcaggttcccttctggmccaggtgtatctaaaaatgttgtctgagagctagggcctcaggattctgtctgctgccctattctactgtggctgaacttgtatccaagttgcaagatgaagtcctttttactccttcctcacttctactcaagtggaaggaagggatctctcccagagctgcaagctgcactgcctgcggttgggggaggagtggcagaagcactcccttgaccacgccagctggcttctcactatgtcacctgcactccagatccactggctccaagcccagcacatcaccaaggcttactcaggaattacagtccttctggcccagactgcctttcaagttcattaaggaccctggagtgctttagcccacagtggtgggctagccagaactcaggttttgaccactgggttgagttatttc

SEQ ID NO: 339342 - DNA, 249 bp, Homo sapiens
tagcattgcaaacgcattgattttttttttcttaatcagccatggtactgtggggtcaattagatgcaatgttttcacatgaatacctgttggaggagmcataaagtattgtttgcataaatataaatatcccagtgttgattcagaatagcttatcactgtatgttggtctaagtagtaaatgcaagaacagtggagtcttggttttattatttttttcaggaggccttcaagatcatgatctagtcc

SEQ ID NO: 339343 - DNA, 568 bp, Homo sapiens
aaagaaaacaaatcagcccatctatggcttgaaattctactcaaagtacacaaacgatgtgtacttctccttctagagaaaatcatccatctaaagatataaaattccctagtgtgtgttctttcattaaaggtaatctattttattctgccatttcctattctagtttttaaaaactktattctgggttatggttgttgcataacttattcttggataggttaaaaagtcactgacatttatttattctgcacaaaccatatgcatataaaattcaataccttacatgaaagtttacaaaacaaaccttctatatcctaaatggaaggaattatattgttgtattgaggattgctcttgtaagataagtcatctagtaacagaaagaagcataacacatgccaaataatcacaatgaatcaacctttagggcttgatcctccaatattacattgcaccaactgcagccacaagtgagcttcagtttttggaaatttgctatcattatgttagcttaatctaacataactttctccagaacttaaatgatagtaaattgccaagaacg

SEQ ID NO: 339344 - DNA, 568 bp, Homo sapiens
aaagaaaacaaatcagcccatctatggcttgaaattctactcaaagtacacaaacgatgtgtacttctccttctagagaaaatcatccatctaaagatataaaattccctagtgtgtgttctttcattaaaggtaatctattttattctgccatttcctattctagtttttaaaaactttattctgggttatggttgttgcataacttattcttggataggttaaaaagtcactgacatttatttattctgcacaaaccatatgcatataaaattcaataccttacatgaaagtttacaaaacaaaccttctatatcctaaatggaaggaattatattgttgtattgaggattgctcttgtaagrtaagtcatctagtaacagaaagaagcataacacatgccaaataatcacaatgaatcaacctttagggcttgatcctccaatattacattgcaccaactgcagccacaagtgagcttcagtttttggaaatttgctatcattatgttagcttaatctaacataactttctccagaacttaaatgatagtaaattgccaagaacg

SEQ ID NO: 339345 - DNA, 364 bp, Homo sapiens
ctgagcccattagtttgtcagaaagatgaggaggaaaataaaagtactgagaagtgggggtgagtgacagtaacaccagaaaagcatgtgttttcatgaagtgacagtgaagaaagtacttcaggatacagaagagatcaacttcctcattatgtttactgggctcactctttcaccgcctttccatcactgctcraaagatacatgtttagcaagatcctatgtgctccttacccctgcctccatctccaaataagtctctatccttcttgatttccctccatatttatttataagctgaaaatcttttttttttatttgaatacaactagtctctgggtagattgtttttccccttgttttc

SEQ ID NO: 339346 - DNA, 595 bp, Homo sapiens
ttaaagaaacagtttgaattggttagaaaacaaatctatgtcaatgtggctatggagactgaatgacatgaatctccaagagttaggacaaggtaggacaaggtatcttttgtgaaagcaatggcaagaatttcaaattcaagaaaataaaaacagatttattaatgctctgaaaaataacagtggctactttttatcatakactgtagaaagttgaaaacaatttataaaaaaaattatttgtcaacttggacaaagatggaaagatagaagatgatggaaaaaagtgtacaacatactgttatatatgaaatgaaattcatagacttcttgttgcagtggcattagtaaagcaattaaatcacaggtgactccatttccacacgtgtttgacctactatttaattgataggcccctttactgaggtggataaaaagagctggggaaaggtagtttgggaaaaattaatgattatgccttaaatgcccattagatacccatgtggaataaaaagcaaaagtcaaatatgggtatggaattcaattgtcctttctaaataggaaatataactttgagatgatatatcagcataaa

SEQ ID NO: 339347 - DNA, 573 bp, Homo sapiens
tttggttactctaagaaaatcagcttctgtatctgaaatttggaggattcaaatttggaacttattattcagcttcaaagttgcctgcagcaactatcagaaaagctcagattgtagtgctatagatccctatgaaatatggcagagcatgtctcattttagaarttagatcaccttacaactgtcagtctggaagaaaataggttttgttttgttttgttttctgaaaatatgtagtcttttttcgccagagcaatctcctcttttttagccacttcacactgggctttctaacataagtgctaatatcagtggcttaatatttttagagttaaacattttaatttatatagttttaaattatgtttatatattagaaaaatggcaagcatactgctaggcatgcatctttagactcatgttatttgcttctgagtttcctaagctatctagctctctagggaaatcaacatcctaagggttagattgtgggcgatgcttggatccaaagagtcttattcatgaagttgcaattgaattttgactcaagtagaactaaatagttctgcctaa

SEQ ID NO: 339348 - DNA, 573 bp, Homo sapiens
tttggttactctaagaaaatcagcttctgtatctgaaatttggaggattcaaatttggaacttattattcagcttcaaagttgcctgcagcaactatcagaaaagctcagattgtagtgctatagatccctatgaaatatggcagagcatgtctcattttagaaattagatcaccttacaactgtcagtctggaagaaaataggttttgttttgttttgttttctgaaaatatgtagtcttttttcgccagagcaatctcctcttttttagccacttcacactgggctttctaacataagtgctaatatcagtggcttaatatttttagagttaaacattttaatttatatagttttaaattatgtttatatattagaaaaatggyaagcatactgctaggcatgcatctttagactcatgttatttgcttctgagtttcctaagctatctagctctctagggaaatcaacatcctaagggttagattgtgggcgatgcttggatccaaagagtcttattcatgaagttgcaattgaattttgactcaagtagaactaaatagttctgcctaa

SEQ ID NO: 339349 - DNA, 573 bp, Homo sapiens
tttggttactctaagaaaatcagcttctgtatctgaaatttggaggattcaaatttggaacttattattcagcttcaaagttgcctgcagcaactatcagaaaagctcagattgtagtgctatagatccctatgaaatatggcagagcatgtctcattttagaaattagatcaccttacaactgtcagtctggaagaaaataggttttgttttgttttgttttctgaaaatatgtagtcttttttcgccagagcaatctcctcttttttagccacttcacactgggctttctaacataagtgctaatatcagtggcttaatatttttagagttaaacattttaatttatatagttttaaattatgtttatatattagaaaaatggcaagcatactgctaggcatgcatctttagactcatgttatttgcttcygagtttcctaagctatctagctctctagggaaatcaacatcctaagggttagattgtgggcgatgcttggatccaaagagtcttattcatgaagttgcaattgaattttgactcaagtagaactaaatagttctgcctaa

SEQ ID NO: 339350 - DNA, 573 bp, Homo sapiens
tttggttactctaagaaaatcagcttctgtatctgaaatttggaggattcaaatttggaacttattattcagcttcaaagttgcctgcagcaactatcagaaaagctcagattgtagtgctatagatccctatgaaatatggcagagcatgtctcattttagaaattagatcaccttacaactgtcagtctggaagaaaataggttttgttttgttttgttttctgaaaatatgtagtcttttttcgccagagcaatctcctcttttttagccacttcacactgggctttctaacataagtgctaatatcagtggcttaatatttttagagttaaacattttaatttatatagttttaaattatgtttatatattagaaaaatggcaagcatactgctaggcatgcatctttagactcatgttatttgcttctgagtttcctaagctatctagctctctagggaaatcaacatcctaagggttagattgtgggcgatgcttggatccaaagagtcttattcaygaagttgcaattgaattttgactcaagtagaactaaatagttctgcctaa

SEQ ID NO: 339351 - DNA, 601 bp, Homo sapiens
taagatgtctcctagttatagattagagaaagtacaattaagttactgacagctcaaatttgctcagtggtctttattagccctctaactggacaagtcccataggcaaaccttaactaatttcacactgacagataaatggatccattcatgcctcacccagtacaggagatcttgccaagttcccaatataacttataaatactggctataattttttatttctacaccrctctttgttctatcattcaacttctgtaccatttcaaatctctagtaaatatgttttaaagcaatgatgaaagtaaaaagaaaatgcattatattgaagtgagatgaaaatttattattcaaattagtacttcagggaccaaaaaacagacagaaaatttatgaccatagtaaaaattcaatctcaataatgattacctttactcaaatattttcttccacagaaactactttaaacaaaccatgcaggtcatcatttggaactcagcttccctttgattaggtatacattcgtgataatcaatactcatattaaagtgtattagaaatgttatttttcatttcaataacagctcttcagtcctcagtg

SEQ ID NO: 339352 - DNA, 601 bp, Homo sapiens
taagatgtctcctagttatagattagagaaagtacaattaagttactgacagctcaaatttgctcagtggtctttattagccctctaactggacaagtcccataggcaaaccttaactaatttcacactgacagataaatggatccattcatgcctcacccagtacaggagatcttgccaagttcccaatataacttataaatactggctataattttttatttctacaccgctctttgttctatcattcaacttctgtaccatttcawatctctagtaaatatgttttaaagcaatgatgaaagtaaaaagaaaatgcattatattgaagtgagatgaaaatttattattcaaattagtacttcagggaccaaaaaacagacagaaaatttatgaccatagtaaaaattcaatctcaataatgattacctttactcaaatattttcttccacagaaactactttaaacaaaccatgcaggtcatcatttggaactcagcttccctttgattaggtatacattcgtgataatcaatactcatattaaagtgtattagaaatgttatttttcatttcaataacagctcttcagtcctcagtg

SEQ ID NO: 339353 - DNA, 601 bp, Homo sapiens
taagatgtctcctagttatagattagagaaagtacaattaagttactgacagctcaaatttgctcagtggtctttattagccctctaactggacaagtcccataggcaaaccttaactaatttcacactgacagataaatggatccattcatgcctcacccagtacaggagatcttgccaagttcccaatataacttataaatactggctataattttttatttctacaccgctctttgttctatcattcaacttctgtaccatttcaaatctctagtaaatatgttttaaagcaatgatgaaagtaaaaagaaaatgcattatattgaagtgagatgaaaatttattattsaaattagtacttcagggaccaaaaaacagacagaaaatttatgaccatagtaaaaattcaatctcaataatgattacctttactcaaatattttcttccacagaaactactttaaacaaaccatgcaggtcatcatttggaactcagcttccctttgattaggtatacattcgtgataatcaatactcatattaaagtgtattagaaatgttatttttcatttcaataacagctcttcagtcctcagtg

SEQ ID NO: 339354 - DNA, 568 bp, Homo sapiens
gagaccagctgtttgggctgtgggctgcatgggaacaaggtaaggcctggggctgccggctcttcccccacttccctggtgagctatgtgatgcagcagagaaagccataatcccctgggaatataactccattggcctgggaaccacatccccatcctccacagcagccacagcaagacctgccaaagtctgagctcagaaaagcctaacagtgyccccatctgatggtctttctgtacctaccctggtagcccaggacaaagtacataatctcttgggagccgtatggctctgttgactgcctgatcctccctatacaatcgcaactgatgtgctcttgaaagcaccacctcctggctggaggccaaccaacacaaaaccagcacacttaacaaaaatgcaaccaaggaccctcacagagtctacttcactcccctgctacctataatggagtaggtgctggtatccacagctgagagacctgaagatgggttacatgacaggactttttgaagacactccccagtatcagcccagagcctggtagctccactgggtggctagagc

SEQ ID NO: 339355 - DNA, 568 bp, Homo sapiens
gagaccagctgtttgggctgtgggctgcatgggaacaaggtaaggcctggggctgccggctcttcccccacttccctggtgagctatgtgatgcagcagagaaagccataatcccctgggaatataactccattggcctgggaaccacatccccatcctccacagcagccacagcaagacctgccaaagtctgagctcagaaaagcctaacagtgtccccatctgatggtctttctgtacctaccctggtagcccaggacaaagtacataatctcttgggagccgtatggctctgttgactgcctgatcctccctatacaatcgcaactgatgtgctcttgaaagcaccacctcctggctggaggycaaccaacacaaaaccagcacacttaacaaaaatgcaaccaaggaccctcacagagtctacttcactcccctgctacctataatggagtaggtgctggtatccacagctgagagacctgaagatgggttacatgacaggactttttgaagacactccccagtatcagcccagagcctggtagctccactgggtggctagagc

SEQ ID NO: 339356 - DNA, 595 bp, Homo sapiens
tggagagaccaggtggaggtaattggatcatgagggtggctttcccctatgctgttctcctgwtagtgagttctcaggagatctgattttttttttttttttctgagaccaagttttgctcttgttgcctaggctggagtgcagtggtgcaatttcagctcactacaacttacgcctcctgggttcaagcgattctcctgcctcagcctcccgagtagctgggattacaagcacctgccaccatgcctagctaattttttgtattttgaaagagatggggttttgccatgttgggcaggctggtcttgaactcctgacctcagatgatctgcctgccttagcctcccaaagtactgggattacaggcatgagccaatgcacccagccgatctgatggttttataagcagctcatcccccatctctcagcacttctctttcatgcaggcttctgaagaaggtgacttgcttccccttggctttcccccgtgattgtaagtttcctgaggcttccctagccatgctgaactgtgagtcaattaaacctctttcctttatacattaccatgtctcaagcagttcttaatagcagtatg

SEQ ID NO: 339357 - DNA, 603 bp, Homo sapiens
atatacagggtctgtatgtagaagagtatcttatttgaagaaaataaattgatttcaaagctatatcttatttatgtctgtaaataacaatgaaggcttccaaaatgtgctggaacacattaatgacttgtgatttcatatcatatccgattatttgtggccagtgaaactcaaagtcaacgtacaaactcttggctmaccacactctaagggaactattttctaacgctgataaaactagagattttaaagtaagatattgagtgttcaatgactctggtcaatttgcacagcatttatatgttgttgctgttttttgactcaaagaagcaaaacaaaaaatatgagaagcaatccatacttatgatataattgcttagttttagagtttacataaaaataatacttggaatgctttcattaattttttttaatctacatggactacagatgctccattttgcattattatttagatttgatataagggagcttagaagcacacattaaaagttattttaatgtgtgattaaaagaagatagatctgaagtgcttagctttacaaaatcagagaaatattttggtattcagatccatgcaga

SEQ ID NO: 339358 - DNA, 595 bp, Homo sapiens
tggagagaccaggtggaggtaattggatcatgagggtggctttcccctatgctgttctcctgatagtgagttctcaggagatctgattttttttttttttttctgagaccaagttttgctcttgttgcctaggctggagtgcagtggtgcaatttcagctcactacaacttacgcctcctgggttcaagcgattctcctgcctcagcctcccgagtagctgggattacaagcacctgccaccatgcctagctaattttttgtattttgaaagagatggggttttgccatgttgggcaggctggtcttgaactcctgacctcagatgatctgcctgccttagcctcccaaagtactgggattacaggcatgagccaatgcacccagccgatctgatggttttataagcagctcatcccccatctctcagcacttctctttcatgcaggcttctgaagaaggtgmcttgcttccccttggctttcccccgtgattgtaagtttcctgaggcttccctagccatgctgaactgtgagtcaattaaacctctttcctttatacattaccatgtctcaagcagttcttaatagcagtatg

SEQ ID NO: 339359 - DNA, 569 bp, Homo sapiens
gcctcttccctttaagtacactatgaaaaaaacaaaaaaaaaaaagaaagaaaactaagccaacaaagagaaaatttcaagaccattttaaaatacacaatcaagaatcaacaatcttttcagataaggcactgcttattttagaattaaatgcaaacataatagagattatgaaaattttaagtgattatttaaatctcaataggaaaactaaacatttataatagatgcatattaaaagtatataaatgagctataaaataaaaatagatatcacaatagctgtaacaccaaagaattaatagataaaattcacaatatacaacctgagacatttattctacataacccaaatccttctaatagaagtatttgtaggtttaaagcattctgttatattgactacattataacaagagaccccactgagaaaactaggatggctttgcatactayatcaaattagttgacaaaagctggatggcaatggaaagaaaaaaatgtaattttctcttgaggactaactgggttacactcaacaaagacattccataaaccactaaactggt

SEQ ID NO: 339360 - DNA, 564 bp, Homo sapiens
tttttattattcttaggtataatcccccaaagcccacagtgtaattttgtactcagtggaaataatttcataaagctttattttaagtaccagaataatttttggagaatcaaagcaattgaattttctttggatccgaaatgtaactcagaaaaatgaattcattcatgaatgctgcacaaattataccaataaaatgatattgaatgctttatgtccaaccctactttaagtgaggaggaaatagcaaacgtttctctcttaatgaggttgatggacttgattgtgtcagagggactagctctattttggaggatctgcaggagtgacacaggaatgatgattgagtgatgctgatgctaaacgatgattcaattttagaaacatgaagagtatatatgtattaatagggtggtgagagtgaagatggatctggatcatggggcaagaggctggatgtcatgtgcatctagtyaaagaagcatggcaatttggaaggctggttgcctatagcaaatagagcaagtaggagactgaaaggggttgtgcatttgtttttctgct

SEQ ID NO: 339361 - DNA, 579 bp, Homo sapiens
atacattaataataagactagtaaaaaagatacaacaatattgggaaaaagggaataaatacttatagagaagttattcatgatagtaagaaaatagatgggttaaaaagtgtcttaagtagctctaaaataaatagaaaatctaagtagtgctgtattaaagtaactagagaaaataaatttttcagtaaaaagttaatttttgcaaagagagaaaaaaatttgtcccagattttttacttaaagtaacaggtaattacagtctacacatttttyccctagaaaatataagaaagaggaaatatttcaaaatttttatttatttatttatttattttgcttgtgaaactttggaaccaatactagacactaccactcacgacacatattaagtgtcaactgcctaaacaaaataatagtaaacacactccactgagttgttcttgataattcttgatcagttttgtcccaggaatgtttgtttagctcaacaaaaaaagacggaagaggtacagaaaagaagtaaattttcataaagatacaataaaagttattcacaagttagtgaattaaatgaaa

SEQ ID NO: 339362 - DNA, 427 bp, Homo sapiens
agccaggtgtgtttgtgcatgcctgtactcccaactactggggaggytgaggcaggagaatcacttgaacctgggaggcggaggctgcagcgagctgagctcacgccactgcactgcagcctgagtgacagagtgagactccttctcaaaaaaaaaaaaaaaaaaaaggagagttgctgtaccatttatcaaggcttactacacttaacaccctatgactatgtcacagggatagacaaacagaacagaaacacaaaacagaacccagccaaagacccactatacatagaaatttaatatatggtgatgacggcattacagatcaatggtgaacgtacgggttaatcaataaatagtacaacttgttattcacataataataatagtagtagtaacaataagaataatgacattgatcttatgttac

SEQ ID NO: 339363 - DNA, 492 bp, Homo sapiens
gatgataaataataatttgatgtgaggctagagtggtacatgctggacagatagcttaaaatgtcagcccgagggaattggggtgtgtgtgtgtgtgtgtgtgtgtgtgtgtgtgtaaagcrtttgtcttcattttgaattaggtccaataagtgaatatattcatattgacaatatgcaaagtgtatttaatagacatttcataagaaatcctatattttcaatcaatttatcattgtttttatatgtgattatattcaacacttcattgtttctggtaaatgtttaatcacattagtttagagaaagtttattttacacttcacctttgaaaaatgtttattcttatttcatcttattttcatttggcaataatagctccaacagttacatagtcaatattgaaaaatcccttattgtaactttttgccaaatgaattttattataaataatacagttgttgttttctgtaacattcagtattttgaaat

SEQ ID NO: 339364 - DNA, 492 bp, Homo sapiens
gatgataaataataatttgatgtgaggctagagtggtacatgctggacagatagcttaaaatgtcagcccgagggaattggggtgtgtgtgtgtgtgtgtgtgtgtgtgtgtgtgtaaagcgtttgtcttcattttgaattaggtccaataagtgaatatattcatattgacaatatgcaaagtgtatttaatagacatttcataagaaatcctatattttcaatcaatttatcattgtttttatatgtgatyatattcaacacttcattgtttctggtaaatgtttaatcacattagtttagagaaagtttattttacacttcacctttgaaaaatgtttattcttatttcatcttattttcatttggcaataatagctccaacagttacatagtcaatattgaaaaatcccttattgtaactttttgccaaatgaattttattataaataatacagttgttgttttctgtaacattcagtattttgaaat

SEQ ID NO: 339365 - DNA, 467 bp, Homo sapiens
tctaacccaatttaattaaatttgaaagagcaaatatctgtagcattcaaaggaatatccaggcagcaatcatcttcatgataattagactatcattgaacrgcatcctttctctgaaactccatttatgtcccaattacttaatgaaacttttctcaaacaaatggttcttcatttataaaatgtaggtctaggtaaaatacgcagtttttgatcgacaaattctcccactaaaaacaaagagagaagcttaaaatatcaataaaatctcagccgggagctgtggttcacacctgtaatcccagcactttgggaggccgagatgggcagatcacctgaggtcgggagattgagaccagcctgatcaacatggagaaaccccgtctctactaaaaatacaaaattagccgggcgtggtggcacatgcctgtaatcccagctactcggcttgaacccaggaggctgag

SEQ ID NO: 339366 - DNA, 557 bp, Homo sapiens
gtcctaaccttagcttcctttgggctttgggtcttaatcttagacttcttgttattcacccagctgtcataatgttccttttaaaacataagtgatactacatactactaagtcaaatcaaatacttccaaataaatgaaaatatgacactcataatgaatgaaccaagatacaaacccaggcactcacacatatacamatatcttgtcgaaagttaaagataaggaatgtcttctgttttcaccttagttctgggtaaaggaaatgaaaatataaaaatgttaatcatcagaaattatgtataaggtacttcttaactattgcttcagatcatcttggtgtcaacaacccagtgacaagcataaatgcggaatattttcaataatttataatatttagtatttcaatagaagcaatacattgataaagtttatgttgttactaaaagttcattggaaagaactttgttagaatgatgcattagaaaaatgttgtcaaatggaagtctaacatttaaaaaaaaagacccaaaaaaatacattggctacaaatttaat

SEQ ID NO: 339367 - DNA, 557 bp, Homo sapiens
gtcctaaccttagcttcctttgggctttgggtcttaatcttagacttcttgttattcacccagctgtcataatgttccttttaaaacataagtgatactacatactactaagtcaaatcaaatacttccaaataaatgaaaatatgacactcataatgaatgaaccaagatacaaacccaggcactcacacatatacacatatcttgtcgaaagttaaagataaggaatgtcttctgttttcaccttagttctgggtaaaggaaatgaaaatawaaaaatgttaatcatcagaaattatgtataaggtacttcttaactattgcttcagatcatcttggtgtcaacaacccagtgacaagcataaatgcggaatattttcaataatttataatatttagtatttcaatagaagcaatacattgataaagtttatgttgttactaaaagttcattggaaagaactttgttagaatgatgcattagaaaaatgttgtcaaatggaagtctaacatttaaaaaaaaagacccaaaaaaatacattggctacaaatttaat

SEQ ID NO: 339368 - DNA, 548 bp, Homo sapiens
tctgttttcaccttagttctgggtaaaggaaatgaaaatataaaaatgttaatcatcagaaattatgtataaggtacttcttaactattgcttcagatcatcttggtgtcaacaacccagtgacaagcataaatgcggaatattttcaataatttataatatttagtatttcaatagaagcaatacattgataaagtttatgttgttactamaagttcattggaaagaactttgttagaatgatgcattagaaaaatgttgtcaaatggaagtctaacatttaaaaaaaaagacccaaaaaaatacattggctacaaatttaatgcctcagaatacatcactcttgttaacaagtcagctttcatggagagcaatttacatagtaaaattaccattttaatgtgtaaagtataatgaattttgcagagacatctagtcactttccacaaccttcgtccacaaaagttaaagggatttctcttctctcacctccaagtcctggtaactacctatagttttgcctttttcaaatgtaatgagaatgacaa

SEQ ID NO: 339369 - DNA, 548 bp, Homo sapiens
tctgttttcaccttagttctgggtaaaggaaatgaaaatataaaaatgttaatcatcagaaattatgtataaggtacttcttaactattgcttcagatcatcttggtgtcaacaacccagtgacaagcataaatgcggaatattttcaataatttataatatttagtatttcaatagaagcaatacattgataaagtttatgttgttactaaaagttcattggaaagaactttgttagaatgatgcattagaaaaatgttgtcaaatggaagtctaacatttaaaaaaaaagacccaaaaaaatacattggctacaaatttaatgcctcagaatacatcactcttgttaacaagtcagctttcatggagagcaatttacatagtaaaattaccattttaatgtgtaaagtataatgaattttgcagagrcatctagtcactttccacaaccttcgtccacaaaagttaaagggatttctcttctctcacctccaagtcctggtaactacctatagttttgcctttttcaaatgtaatgagaatgacaa

SEQ ID NO: 339370 - DNA, 537 bp, Homo sapiens
taaacatttctcaaagcaacatatgtagaattcagcatacaaacatttcacgtatttgttttcatgtttattcatgttatataagttagatgttaaaatcttcctttactttcattctgatagaaatatatgtaaataccgaacttgtatcctgtgatactgctagactgttttaataattctatttttttgtatattatatggtattttcttcataatcataataaatcttcatagataataaatcttcatagataataaatttgtttattttgcaatttacatcacttttatttcttttactatttactctaactataaccctaaagatagtgttcaggagaagttctgagagcatatatccttacatttctgtttatttctgatccttgggataaagcattcagtattcactgataagggtgatcatagttacagttttgttcaggttgagaaagttccttctatttgtaacttgctaagtgttctttatttcttgttaaaaatgtcrtatttgttaacttttattatgtgtgt

SEQ ID NO: 339371 - DNA, 584 bp, Homo sapiens
tctactataaaaatactctacttcagtatttcaaagacatgaaataataaactgagtgtccaactggacatgtgccttaggatagctcttgctaaatatggtggatttgtctttatttccaataatgctgcaaacattagaagatgtgatagaaatgtgtcttgggaactttgctttggccatttatcaatattttcaactgtttctatttgatgaaattaaactgttactaaatagaaatagttccctcacatcaaatttgttataggctgtgttactaggctgagtattatttacttcagctctatagactgctcttttcctgctcagctgatattctaggctttatgatggtgataatgatgcccattaatatttttaacattctttacttcataataatcagrgaggtacattcgattgacatttaaggttgttatatttagcaaacaaaaataaatggcaggattctcaattaaacgtgaatttgagatcaataacagcacacacacacacacacacacacacatgcttctcaacctacagtaagcttacattcttataaacccatttgaagttgaaaa

SEQ ID NO: 339372 - DNA, 549 bp, Homo sapiens
atattatttgctagtattcagtgattcctaggcttgttacatacttatttaataaaaggagatatatatatatatttatatatatatatgtataaaatcaaaatctgagacatttttgagtgaaaggggatgttgttcataattatgtcaggacatcagggcamatgcagacataggatccctctagttaaagataaattcaaatcaactcagaaaaatgttgtacattgtgttcctgatgaacttattttcattcctgttggttccacagatatttctggagcagatggcaccaggtagatactccataaacaattatcatgtggacaaacaaaaaaaaaatctctgtgaaaatggtaatgtgacattgtgttaagtgaattaccctgaacagtaatagcctcactaggaaaataattttaagatattttttaaaaattagcttatggttactaataacatcaaactcctaattgtactggagaatatttcttaatgtttgaaaaacaaatgaaatgtttccaaaaaaaatcctaagaccaaagtata

SEQ ID NO: 339373 - DNA, 390 bp, Homo sapiens
ataaaagacacagatagggtaaaatatttgcaaaatatatacctgataaagatttgtatttgaaacattgaaaagatcttttaaaactcaacaacaagaaaacaacatcccaattgtaaaaatgggcagaaaatttggacagatattttactaatgaatatataagatgaaaatgaaagracatgcagaaagtatatgaaaagatactcaatgtcattgtcattagggaaatatacattgaaacaacaagagaccattagatacctataaggacagccaaaaatcaatcagtaaataaaatacacaattctgtccaggatcaggagtcagggacctctcatttattgctggtcagaatgcaaattgacgcagccactttagaagataatg

SEQ ID NO: 339374 - DNA, 386 bp, Homo sapiens
ctctcctcttttataatgacactagtctcatcctgggggatctacctgcattaactcscaaatgcgtcatctccagatacatcacactggggcttagggcttcagcatataaatttgtggaggatacaacattccgtttatagcaacaggagaaccagaatgtgagatatatgagaaccctccataatatttccacaattttcctataaatctaaaaagtgttctaaaaatagtttatttaaataagaatgataaatcaactgtgagaatattgtaaaataatttttgaaataaacaatatagtaatacaaatgagaactcaaaggatggctttcagagagggtaaacaaaagtggttaccctcacacataagttgacattaatga

SEQ ID NO: 339375 - DNA, 386 bp, Homo sapiens
ctctcctcttttataatgacactagtctcatcctgggggatctacctgcattaactcccaaatgcgtcatctccagatacatcacactggggcttagggcttcagcatataaatttgtggaggatacaacattccgtttatagcaacaggagaaccagartgtgagatatatgagaaccctccataatatttccacaattttcctataaatctaaaaagtgttctaaaaatagtttatttaaataagaatgataaatcaactgtgagaatattgtaaaataatttttgaaataaacaatatagtaatacaaatgagaactcaaaggatggctttcagagagggtaaacaaaagtggttaccctcacacataagttgacattaatga

SEQ ID NO: 339376 - DNA, 583 bp, Homo sapiens
  misc_feature (1)...(583): n = A,T,C or G
ggaagaaatttntaatagcaaagagcaccctggtgttcttaaaatcattcagttttatgcatttcaaagggatggtttgaatttggaacttaggttttaaagggaagcagagcataaaagtttggaaaatttgaagcctgacaatgaaataaaaaagacaaaaccattttctgaggagaaattcaagttgtgtaagtatygaggagccaaatgttaatcaccaagacaatggagaaaatgtctccagggcatgtcagaggtgtcctcggcagcccctcccatcaccaacctagaggcctaggaggaaaaactgtttttgtgggccagcccaggaccatgctgctttgtgcaggacttggtgccctgcatccaagccatagctaaaaggggccaatacacagctcagcccattgcttcagagaaaataagtatcaattaagccaagagcaagggctgggtgttattggcctagatttgcagcagactacataggtagcatgggactagcaaccattgttgtgccatattatgagaatatactttaaccttaaagctttgaaatgatcttgaaatttaaaaatac

SEQ ID NO: 339377 - DNA, 591 bp, Homo sapiens
gatggtttgaatttggaacttaggttttaaagggaagcagagcataaaagtttggaaaatttgaagcctgacaatgaaataaaaaagacaaaaccattttctgaggagaaattcaagttgtgtaagtattgaggagccaaatgttaatcaccaagacaatggagaaaatgtctccagggyatgtcagaggtgtcctcggcagcccctcccatcaccaacctagaggcctaggaggaaaaactgtttttgtgggccagcccaggaccatgctgctttgtgcaggacttggtgccctgcatccaagccatagctaaaaggggccaatacacagctcagcccattgcttcagagaaaataagtatcaattaagccaagagcaagggctgggtgttattggcctagatttgcagcagactacataggtagcatgggactagcaaccattgttgtgccatattatgagaatatactttaaccttaaagctttgaaatgatcttgaaatttaaaaatacaatctatatgcttatttaaatgaatttttaaaattataattagtccgaaaacaatgtctgatgcaaacataagcccat

SEQ ID NO: 339378 - DNA, 583 bp, Homo sapiens
  misc_feature (1)...(583): n = A,T,C or G
ggaagaaatttntaatagcaaagagcaccctggtgttcttaaaatcattcagttttatgcatttcaaagggatggtttgaatttggaacttaggttttaaagggaagcagagcataaaagtttggaaaatttgaagcctgacaatgaaataaaaaagacaaaaccattttctgaggagaaattcaagttgtgtaagtattgaggagccaaatgttaatcaccaagacaatggagaaaatgtctccagggcatgtcagaggtgtcctcggcagcccctcccatcaccaacctagaggcctaggaggaaaaactgtttttgtgggccagcccaggaccatgctgctttgtgcaggacttggtgccctgcatccaagycatagctaaaaggggccaatacacagctcagcccattgcttcagagaaaataagtatcaattaagccaagagcaagggctgggtgttattggcctagatttgcagcagactacataggtagcatgggactagcaaccattgttgtgccatattatgagaatatactttaaccttaaagctttgaaatgatcttgaaatttaaaaatac

SEQ ID NO: 339379 - DNA, 581 bp, Homo sapiens
tttcaaagagcaaaactgttaaagtttgatgaaattcaatttatcactgtttccttttatggatcatgctttttggggtcaagtcaaagaatgctttgctttatcttaggtcctgtgattttgattgtggtatcacctatcttttttctcttgctgcttttacttttgctaatattttactttagtgcactgaggcaaatttacctttgtaggcagtatgcttggtggttttgtttctcttgtttcttgagtgtttggcttgatatttccatcaatttggaataactttcagctataatcatcttaaatattatttcagtcccattctctctcatatgcctctcagaattgaaaaacttttatattacacttgcatgtcccatatgtctctcatactcttatttatattttctttttctttccatgcttcaacatggatttttttattctgacttactttccagttcccttatttttcttgcactatgtctaagctgctgttattaccagyaattgagatactgtattttcttaaatttaaattttccattagaatgtttaatattttttcatcaactgtg

SEQ ID NO: 339380 - DNA, 341 bp, Homo sapiens
ttaaaactctctaaggatttatgcttacaatttttttttagtgtttataaatctagtgactccaaacatagtttttttttctgttttaactcattcattctctactaaaaaaatactgtttataaaaggtttgtgataaataacrggtagaagttttctcttggagttcagactcctatatttgttttaaaaaaacagctgttcttatctctacttctgcagttattatattatagttgtatgtttatgaattattttacattttggcttggactttattttaaaagctcactttttcttcatttccctcctctttaaattaacacttcaacaaatttgtg

SEQ ID NO: 339381 - DNA, 559 bp, Homo sapiens
aatttctgtaattatttaaaaaaacaggaagtgcaaccattagtttaatttattttttattaatacaaaaaagttgtacatttggtgggatacacgtgataatttgacatattcatatgatcaaatcagggtagttgtgaaattcatcaccttaaatatgtatcgtttctttacactgagaacattcaaatcattatcttctagctgttttaaaatgtacaatccagtgggtaccaatatgtacatttaggtggaagaaatagaacctagtgtttgatagatcagtagggtgactatagcaatcactcttagactatgttttaatcacttgtaacgtgcgatattatagtagtcctcatgataaagaattatacatgtgcacacacacayagacacacatacacacagcatcttgaactccagggaagaaatagacttggaaaaaatatgcattgtgtatcatgcataattctccacagaaagagaatgaaatacctgggccctgtggcccagccaagttgacatgtacaattaaccatcacactgtgtttagtgtaat

SEQ ID NO: 339382 - DNA, 557 bp, Homo sapiens
agccacagtgcccagccatgagttgtactttttaaagaagttggtttagatatagaactaatctaatccttttgtaatgcctagtgggatgttcatgattaaggaccaggtttttgtttttattgktttttttttctcccctccttccctttttaatagtaacatttggaaaatatttctaaatgttttggattactgtggccaactcttgcatggggcctgaacattttcagtatcataaatactctttagctttacttttttctcataagggatattttcttaaaaatattttgtttctccaatgttgcctaataataaacccatgttatctgtaaatattttttaagatagaactttaaagaactttactttccagttttggaagttatttcatgaacaaaattcttggatgttcaaacattaaatccaaattgatattttatttgtagtggaagagatggttggtttaagaactttttctgtactcctctatgggacaccagccaagactacagaatatttgaatttccttaaacaatagtctctgtgggaca

SEQ ID NO: 339383 - DNA, 549 bp, Homo sapiens
ttactgtggccaactcttgcatggggcctgaacattttcagtatcataaatactctttagctttacttttttctcataagggatattttcttaaaaatattttgtttctccaatgttgcctaataataaacccatgttatctgtaaatattttttaagatagaactttaaagaactttactttccagttttggaagttatttcatgaacaaaattcttggatgttcaaacattaaatccaaattgatattttatttgtagtggaagagatggttggyttaagaactttttctgtactcctctatgggacaccagccaagactacagaatatttgaatttccttaaacaatagtctctgtgggacaattgctatgtaatcggccctatgagatgctcaacagcattactctgaaaggcaaaaacaaagaaacaacaataaaaaaacccaacattttattcttgtggctttttttctcctagctttaacattttagaactatatattgaatgcatctatatgttatttgcctttttcattaacagaggaaa

SEQ ID NO: 339384 - DNA, 608 bp, Homo sapiens
aatacctcatcttgataatttttttttaaaagacagctgtgttaaactttgacaagttttttatgtaagggaagaaaatagaaaatttccaaatgaaaacctatgccatacttagtatttaaataagtcttaagaagtgagaggatgataatttctcatgttttaaaatatttcataattcagaaattgacaccttacttgtgtaatctatatggaaagaagctttgcccaaagaactttaggcaattttcctggaaattgaaactggtattagacaccataaacttctatgatgtgagtgtatttgaagagggggaatgtatttgttgactagggctgccataacaaagtaccacaggctagggggcttagacaacagaaatttatttcttcagttctggaggctagaattagrgatcaaggtgttggcagcattggtttcttccgaggcctctctccttgacttgcggatgagatggccaccttcttcctgcgtcttcacctggtcttccccctgtgcctgtctgtgccccaatctctctttatatcagtgatattggattagggcccaccataatgacctcaattaactttattctttaaagctg

SEQ ID NO: 339385 - DNA, 608 bp, Homo sapiens
aatacctcatcttgataatttttttttaaaagacagctgtgttaaactttgacaagttttttatgtaagggaagaaaatagaaaatttccaaatgaaaacctatgccatacttagtatttaaataagtcttaagaagtgagaggatgataatttctcatgttttaaaatatttcataattcagaaattgacaccttacttgtgtaatctatatggaaagaagctttgcccaaagaactttaggcaattttcctggaaattgaaactggtattagacaccataaacttctatgatgtgagtgtatttgaagagggggaatgtatttgttgactagggctgccataacaaagtaccacaggctagggggcttagacaacagaaatttatttcttcagttctggaggctagaattagagatcaaggtgttggcagcrttggtttcttccgaggcctctctccttgacttgcggatgagatggccaccttcttcctgcgtcttcacctggtcttccccctgtgcctgtctgtgccccaatctctctttatatcagtgatattggattagggcccaccataatgacctcaattaactttattctttaaagctg

SEQ ID NO: 339386 - DNA, 590 bp, Homo sapiens
taccatgacatcaagcatgggtggccagttcaacatcaatgaaacactttcttaaactctttttttcttctgctaaatcctacttaacagttcagtgcatctccccaggcaaaaacaattagtatttgtttagttaaatatgctcctagaatgtgaaccaatttccctggcatggccttctagktatcagccttaaaatgttgcctgaaacatcaaatatttattatagcaaacttaaaatgaagtgtggttgaatcttaagaaatagatccctttgctttaccccagactgactgaaacatacttgtgttcttagtgggtcacttttcagacacagctaaggaggaagagttgttctgctcagacctttgaccagatgataaataagcctgggccttagttttgatctgtggagatgttaatttgccacgataaatcactgttgagtttccttgaataaggggccacagtatccattctctttctggataagatattaattcagtttaatttgaaatgttaatgcttggtttgaagatttacctaaggaaaaatgtaggcttccaaagggtgtagttatgcaggatagg

SEQ ID NO: 339387 - DNA, 590 bp, Homo sapiens
taccatgacatcaagcatgggtggccagttcaacatcaatgaaacactttcttaaactctttttttcttctgctaaatcctacttaacagttcagtgcatctccccaggcaaaaacaattagtatttgtttagttaaatatgctcctagaatgtgaaccaatttccctggcatggccttctagttatcagccttaaaatgttgcctgaaacatcaaatatttattatagcaaacttaaaatgaagtgtggttgaatcttaagaaatagatccctttgctttaccccakactgactgaaacatacttgtgttcttagtgggtcacttttcagacacagctaaggaggaagagttgttctgctcagacctttgaccagatgataaataagcctgggccttagttttgatctgtggagatgttaatttgccacgataaatcactgttgagtttccttgaataaggggccacagtatccattctctttctggataagatattaattcagtttaatttgaaatgttaatgcttggtttgaagatttacctaaggaaaaatgtaggcttccaaagggtgtagttatgcaggatagg

SEQ ID NO: 339388 - DNA, 576 bp, Homo sapiens
tgtgtatattgtgttgtctttattcattttcatatggttctgtttttggaatgttcttataacaagaacatggaagtttaatatatattccatctgactaaaactgaaccctctttaaagaaactaaaggttttcaaagctgttttacttccaatgagtagtttaaacttctagttcatgatggatttattcctatcaaaaagttgtactatttttgattacttgttaatgtatccagattggcatgttagacacaagtagagcacatcctgtatttttagatgcttgatgcttctgttcagcataagccctgaaaaataccaagttttgcaaatgcaaagtacttttcattggcatggaaattggagggaaaaaacacaatgaatattttggccaaaatgtgatggtctgttagtcagcatctggtaatgcggccatattttgcattcaggctccagtatgacaaagtgcagttgtacgttgacatctccccygggactgtggactggaaccacatctactttgaaaggtaatactgcaaggggggtgcttagccttcttttagggtactccact

SEQ ID NO: 339389 - DNA, 564 bp, Homo sapiens
accctagaaagttcccatatgcccctttccagtcaacccctccccttcaaagcagcgactcctctgcaatccatcaccatgggtgaatttcgctgattctagaatggaatggaatggaacactttgtgccttttggggcctagcttttttcactcagcatattatttttgagaggcaaccatgttgttgcatgagcccatagttggttcccttgtattatgtttcattgatgaatattccaaagtttacttatcccttccttgttgatggacatctggcttatttctaatttttggccagtctgaataaagctgctrtaaacattcttgtacaggattttgtgaattatgtttatatttctcttggattaatacttaggagaattgctgctaggataggtgtctgtttaactttcaagaaactgtgcaacagctttatactgtgaaatagtgattgtcctgactacaaacctccatggtgctgagaccaggttttgttcaacgtgattttcctggtgtccagcccagggcagggcacatgctagacattcagtgtttattgaag

SEQ ID NO: 339390 - DNA, 527 bp, Homo sapiens
acaggctgagggaagggagggtggggtgagcagtgcaggcgatgagtccagggttcactaggtctcaggttgcatggcgggagagaaggacttggaatttcatcctgagtgggatgggaagcattagagaattttgagtggaggagggacttgacttgtggtttgaaaggtacctcctgactgctgtgtggagaatagacttaagagggtgaagtgcagatgttggtaataacaatgggagatggtggccgaggttgggtgaagggcaaggtcattggagatgagaaagtccagaggatgagaggccagggtggtggaaggactaagtttatagaattgaaaatactgagaattttgacaggattagcgctagtgggagggggagaacttgtgctgtgtgstaactcattcagggaaggcaaacgagtggctgaaggtctatagaggaaaggcaacaatgagcggtagtgagtggttgtaacctgagggcagcggcttcaaggcagaaaggagttgaagggagagat

SEQ ID NO: 339391 - DNA, 537 bp, Homo sapiens
ctttttacatatcatcaacattgtatatatcttttttttagggtggtaaaggtgttctttgattcttgaattgtaggtacacaacactatgcctttatcmaaatccacagaacattagagtgcaccgagtaaaccttaatgtatgcaaatttaagaaaaccttgaggttggggatgggatgcagaatgtgacaaaacaatctagctgtattaaaaatgtaagaaataaccttaccaaagggaattttgggtgtggtggagagaggtgcagatctattaactttgcaaatgagtggagtctataagaataaaggcaaaagaaactacaataaccactgtcctttggttgatacagtttttctcgcaggcaaaaagataaagaattttaataccactctacatgtattgcacaaataagtaaatggattgtggctagtagctgccacgtttctccctgttggagtgggtgcttacagataagcagggggaagaggctagagtgatccatgtggtaacagattagagttgtagatatcag

SEQ ID NO: 339392 - DNA, 552 bp, Homo sapiens
actttctataatggagcttacttatggaatatgtcaaatgaataacacaggacacgaattatcttgttttcatgatcacagctacgtaaaaaagaaatgcatgcatgagaaaaaatgctggtaggaaatatacccaaatttaatagtaactgcctttgggtggggatattatagggatttctttttctactctttctaaaattcycaatttttctattgtgaacatttattatttctataattatagaagactaacataatttttttccaagaggcttactttgcaagatactatgcttaatatcttctcttgcacttgcgccaagcccactctctaccagccagacctggaagagtagatgaggcagcgcttcatgcctagagcttcaaagtactgagactctccaagcagaaaggaggatgccagccagtgctatcctcatgtcccctatcacctatagggagtgtctctatctccctatcaccttccctcatagggaaagtcaaaacatgctcacacagttcttgttttgacatgtcagtttcaccaac

SEQ ID NO: 339393 - DNA, 552 bp, Homo sapiens
actttctataatggagcttacttatggaatatgtcaaatgaataacacaggacacgaattatcttgttttcatgatcacagctacgtaaaaaagaaatgcatgcatgagaaaaaatgctggtaggaaatatacccaaatttaatagtaactgcctttgggtggggatattatagggatttctttttctactctttctaaaattcccaatttttctattgtgaacatttattatttctataattatagaagactaacataatttttttccaagaggcttactttgcaagatactatgcttaatatcttctcttgcacttgcgccaagcccactctctaccagccagacctggaagagtagrtgaggcagcgcttcatgcctagagcttcaaagtactgagactctccaagcagaaaggaggatgccagccagtgctatcctcatgtcccctatcacctatagggagtgtctctatctccctatcaccttccctcatagggaaagtcaaaacatgctcacacagttcttgttttgacatgtcagtttcaccaac

SEQ ID NO: 339394 - DNA, 600 bp, Homo sapiens
caactctactcccaactcccctgttacagaagactatataaaaaacgacagtttccacattgattaaaaacttacaaatgcacaatttatcatatatccttcatacttctacaacacgacactttaacttttttttytttttgagatggagttttgctctcgttgcctaggctggagtgcaatggcgtgatcttggctcactgcaacctcaggctcccaggttcaagtgattcacctgcctcagcctcctgagtagctggaattacaggcgcccaccaccaggcccagctgattttcatatttttagtagagatggggttttgccatgttggccaggctggtctggaactcctgacctctggtgattcacccacctcggcctcccaaagtgctgggattaaaaacgtgagccaccacgcccagccgatacttcaactttttaagctgaggttgataagacctgagatataacagtgtaaacataaaaatgctttttttaaaatattattaattatgaaatatgaaaacttaaaccatcacccaacctggtagaaatgtgaatatcatagtcataatccactatcagattatgaagatggg

SEQ ID NO: 339395 - DNA, 617 bp, Homo sapiens
catcctggctaacacggtgaaactacatctctactaaaaatacaaaaaattagccggctgttgtggcaggcacctgtaatcccagctacttgggatgctraggcaggaaaatggcgtgaacccaggaggcagagcttgcagtgagccaagatcacaccactgcactccagcctgggcaaaagagcaagactccgtctcaaaaaaaaaaaaaaaaaaaaaaatgattcctttgaaaactctaccttagaaccaggtagtaatgctgcttgacaacaacttttttcctcatttaactttaataaaccatgaaattaaaaggaaagaatttgaccctctacatcccaggtctattccataacattacgttttaaacgactcaaacttggaggccaacagctttcctgggtgcatgttaatgcacgaagcatttcaaatgtgtgttttgtggtttttttttttttttttggttgttacagttctggagttataattttaataacaaaacaatgaaactgtcttgattttgaaatacaagaaccagaaaatgaaactttgaattaacctgtttaggttatttaaaaaaaaaaaaaacataggcttttttttttattttgaaa

SEQ ID NO: 339396 - DNA, 524 bp, Homo sapiens
atgttgtctgaatggtgagcaatggaagacagaagatactaacatggtagaaattatcctgagtggggagakagaaggccctggggtgctgcgagtgtcctgggcaggcagcagggagcccctttagccctgactagcttggttgcatttctgatgggtttgacatcaacaggctctgctgagtcccaatttggctaggtaccaccacttgtaccacagggcagatcactccaatgcctgcagcattcatttctcaattttcaaataaaactagctttgtttgaaggacaaagtgagatgatttttgacagcactgggtagatgcaataacactttgcacttttcatttaaacagatactttaaatgtgaaggtagagaggagagaaaaaagattagctgtgggtggagagggggagatgctgttgatgagaagcaagcactatccatgagatattattatgagcctttgcagaagaacacaatccaatcctggagccttagacgtcactccagaatgccattg

SEQ ID NO: 339397 - DNA, 585 bp, Homo sapiens
aatggagaaaagagctcagtgattggcaatgagagggtcacattgttagtttccaagggcaaaagctgaacaaaatggattaggaatcatgcctgattcaatttctggctcaacaacttagctataaaattgggcagagtctcctcgagcctctgttttctcagttctaaggtggagataacaacaatcttgtaaggtatttgaagtgattaaattaggcagtgctatggttttgctctttgccccttccaaaacgcatgttgaaacttaatcccaatgtggcagtagtgagaggtagggcctttaggaggtractgggctatgagagctctgccctcatttgtggatcaatgtattcccgggttaatgggttatcatgagagtgggacttgtggctttgtaagaagaagaagagacacctgagcaaagatgcttagcccccttgccatgtgatgtcctgcacctcctcgggactctgcagagagcccccgccagcaagaaggctctcaccagatgaagtcattcaaccttgaacttctcaacctccataactctaagaaatacatttctttttctttttaaata

SEQ ID NO: 339398 - DNA, 616 bp, Homo sapiens
ttgtttttaaaagtcttgatcatttcctcagaacctagctttcttgtccttatattttattcaaatttacaaacaaattctgtgtctgctcccacatgttccttcagtccctactggactggacacatccacatccttggcaggttttcttttaggaggactatgagaagagtgttttcttttagggggactatgagaagagtattttcttgtttcgtatcagtgataattgcccataaattaacgctcatgtgtacagcaacaaaggtaagcacttctagcataatttttgcttggtcagactttttatgaggttctgattctgcaggttcatgatagacagaaacccaaagatatgtgagaggcaggtgttgtgtgctagaaacattgaaagtgtctctcttttcttctttcattttcatttctgcacttctaacacatgaaatttasctgttctaaaatagtcgaggaggaaactggcaaatgatgcttttatattttgggaatttgctttaaaaagggagaatatgaaaacacaaacatcaaagagcaaagtggaaatcatgatagttttcaagtaattccaagacagaaggaagtctgaagtttgaagaac

SEQ ID NO: 339399 - DNA, 572 bp, Homo sapiens
ttttttgttgttgtgctgtttgtttgtttattgttttgtatatttgtgtgggaaggtttttaaatacacatttagtatctttaagagatatatgactacttcgattatccatatcttttttagttaacttattgtaaattttgtctaatttgtcaaatttattggtatgaagttgctcataactgtcccctacttttttatgtctataggattttaggaatgtccagtctcacattcttgataytggcaatttctgtcttctcagttttgctcatcagtgtgatgcaaagtttaggaattaattgtctcaaaataaaaattttttgctcttttgttatgttaattattttctgttttattttctgttttctatttcattgattttgtctctcattacttctttctgcttagttggggtataatcataaagtgatgatgctcatttttttccttctttctgcttagttggggtataatcataaaatgattaggtcattgattttaaatgtttttcttcttttaggtagtttgtaatgctatgaattttcttctaatcaacttttagccatata

SEQ ID NO: 339400 - DNA, 575 bp, Homo sapiens
ttttttttcttttggacacaaactattcctaactctgtgtaagctctgggggtttttctgcccactcgtttctcgtgatatcttctcctgctttggtagtttccacaagtgcatgtgcaaattagtactcagctaaaacctcatgagaacccccctgcagatcttctgacctctctccttgagcagctccccyttctgcctcacatattctagctgcagaggcttccccaaactccaaattctgtctcttcattttagctagaccaccaggctctgttcatgctcctcccctctctgctgtgtcctttcaagtagtaaactaggacagtcattgggtacctctcattggtttctctcctcttagtgattcttgtcctatgctgcctattttccaaaggctgaaaacaactgcttcatatattttatacagctttctatttgcttatggccagagggtaaatgtagtacctattattccatcacggttagaagcagaatattcatgcactggtttttaaaagcttctccctgagagtgacaagggtcactgatattgtcttatagctcactattaa

SEQ ID NO: 339401 - DNA, 575 bp, Homo sapiens
ttttttttcttttggacacaaactattcctaactctgtgtaagctctgggggtttttctgcccactcgtttctcgtgatatcttctcctgctttggtagtttccacaagtgcatgtgcaaattagtactcagctaaaacctcatgagaacccccctgcagatcttctgacctctctccttgagcagctcccccttctgcctcacatattctagctgcagaggcttccccaaactccaaattctgtctcttcattttagctagaccaccaggctctgttcatgctcctccccwctctgctgtgtcctttcaagtagtaaactaggacagtcattgggtacctctcattggtttctctcctcttagtgattcttgtcctatgctgcctattttccaaaggctgaaaacaactgcttcatatattttatacagctttctatttgcttatggccagagggtaaatgtagtacctattattccatcacggttagaagcagaatattcatgcactggtttttaaaagcttctccctgagagtgacaagggtcactgatattgtcttatagctcactattaa

SEQ ID NO: 339402 - DNA, 483 bp, Homo sapiens
aagaagaaagcttgtgtagggaaactcccccttataaaaccagcagatctcatgagacttattcactattatgagaacagcatggaaaagacctgcccccatgattcaattacctcctaccaggtccctcccacaatatgtgggaattcaagatragatttgggtggggacacagccaaaccatatcagacccctacctatcaccatctacaaaaattaactcaggatggattaacaacttaagtgtgacccctcaaactataaaaattttataagaaaactcaggaactatccttcttgacatcagccctggcaaagcatttatggctaagacctcaaaagcaatttcaataaaacaaaaactgagaaatgggacctaattaagctgaagagcttcttcacagtaagagagactatcaagggagtaaacagaccacctacagaatggaagaagatatttgcaaactatgcatccaacaaagg

SEQ ID NO: 339403 - DNA, 446 bp, Homo sapiens
ttacatcatcatgtagagatgatcctttccatctctaataattttttcttaaaaatctatctgttaatgtagatatgctaagtttattttgactagtrttagtttcataagtcttttttcatttttttatctttctttcttcatattttacaggtgttccttataaacagcatatgtctcaattttaaagacgtgacttgtaaatagaataagcccgatagttgaatttattatagtaattgacacctggatgtgtttctttaatcttaaattatttttgtttattctaattttactatgctttttaaaataatttcttacttttaaaaaataaattgatatttaaatcttatccctgcccccaataaaacagatacttagaaagcacccacatcccttggttcttcccctgatccctttccttactcttgcccgccctgccccca

SEQ ID NO: 339404 - DNA, 591 bp, Homo sapiens
catgtgtggaaaagactatccttttctcccatgtaattgtcttggaaccctcatcaaaaatcagttgagcacatgtacaagggtttatttctggactttctattcttttccattggtcattggcttgtagatgctaccttcttgctgtgtcctcacatggcagagaaagagagaacactgtttctatacaaactatacaactatataaacactatgtttgtatagttgccattcttgtttcattttctggtgttcatgcttgaatgtcagatactctctcagatctgtattctctgttttctcmgtacctggaattatggtggtgtcccatcaaagtgacaggacatctgaggcccaagagtatcccttctctgggaaagggacacagttcttgagccttcaattctactaaaaactgtcaagttcactttccctttttcgttattcttcttaggaaccgttgccatcatatgaattctggctcactatgctgcattttctacttccaccccagaatcttgtttctttctcaatgacaagtacttttttaagtttatggcattgggttggctgtaaatctttctttgttgc

SEQ ID NO: 339405 - DNA, 591 bp, Homo sapiens
catgtgtggaaaagactatccttttctcccatgtaattgtcttggaaccctcatcaaaaatcagttgagcacatgtacaagggtttatttctggactttctattcttttccattggtcattggcttgtagatgctaccttcttgctgtgtcctcacatggcagagaaagagagaacactgtttctatacaaactatacaactatataaacactatgtttgtatagttgccattcttgtttcattttctggtgttcatgcttgaatgtcagatactctctcagatctgtattctctgttttctccgtacctggaattatggtggtgtcccatcaaagtgacaggacatctgaggcccaagagtatcccttctctgggaaagggacacagttcttgagccttcaattctactaaaaactgycaagttcactttccctttttcgttattcttcttaggaaccgttgccatcatatgaattctggctcactatgctgcattttctacttccaccccagaatcttgtttctttctcaatgacaagtacttttttaagtttatggcattgggttggctgtaaatctttctttgttgc

SEQ ID NO: 339406 - DNA, 602 bp, Homo sapiens
ttttacatctgttggcctcaccccttgcaaccaagtgattactaagtcaaagcttacacaccttcagcaagaaaaaataattgttctcctttcactttcaagtaatcctaattgttagaaagttcttagacttagcccaaatctatctttatctaacttctrtccatggattacagctctccctcctgggaccatgaagaccagtctctcttcactaacatacccctttcaatagataaaggctaatattcccattgagttttctcttctttggatcaagaatgccttgctaccccgaatatattagatcctgagtgcattcatacttgcaataattttttcattggccagagacatttttagacccgtcttttcctaatcataatagtaattatcatccatttcataccttctttatgtcactcactgtgccaggcagtttgcaaaccttaactctaacctttgaaacaactccacaaagctgatgttttaacctagagtccctgagcatgatctaacttcatgtcctggtaacctagcctccaggacaggtcacgtcatggcctaaatcttaagtgagcagtttaatatgtgaatgacaa

SEQ ID NO: 339407 - DNA, 578 bp, Homo sapiens
ttagacttagcccaaatctatctttatctaacttctatccatggattacagctctccctcctgggaccatgaagaccagtctctcttcactaacatacccctttcaatagataaaggctaatattcccattgagttttctcttctttggatcaagaatgccttgctaccccgaatatattagatcctgagtgcattcatacttgcaataattttttcattggccagagacatttttagayccgtcttttcctaatcataatagtaattatcatccatttcataccttctttatgtcactcactgtgccaggcagtttgcaaaccttaactctaacctttgaaacaactccacaaagctgatgttttaacctagagtccctgagcatgatctaacttcatgtcctggtaacctagcctccaggacaggtcacgtcatggcctaaatcttaagtgagcagtttaatatgtgaatgacaataaatttaagttctatgacatgccacatgccatgttaagcattttacatgcatttccttgcataatccctttaacaagcctaaaaggtagttataattata

SEQ ID NO: 339408 - DNA, 578 bp, Homo sapiens
ttagacttagcccaaatctatctttatctaacttctatccatggattacagctctccctcctgggaccatgaagaccagtctctcttcactaacatacccctttcaatagataaaggctaatattcccattgagttttctcttctttggatcaagaatgccttgctaccccgaatatattagatcctgagtgcattcatacttgcaataattttttcattggccagagacatttttagacycgtcttttcctaatcataatagtaattatcatccatttcataccttctttatgtcactcactgtgccaggcagtttgcaaaccttaactctaacctttgaaacaactccacaaagctgatgttttaacctagagtccctgagcatgatctaacttcatgtcctggtaacctagcctccaggacaggtcacgtcatggcctaaatcttaagtgagcagtttaatatgtgaatgacaataaatttaagttctatgacatgccacatgccatgttaagcattttacatgcatttccttgcataatccctttaacaagcctaaaaggtagttataattata

SEQ ID NO: 339409 - DNA, 562 bp, Homo sapiens
ttgcatttttttcacatgtcaaaatcttctttccacttttccttttctccagccccttacccttattaaaagtgtgatgttgggtttcataatgggggtcattatagaacagaaatctgtatctttaaactatgtacttaaatatgrctacttttcaattctaccttaatattttaattttgttttagtttgtctggtattttattcatcagaatttttattagaaaataccctatacttcatgtaaattataagtaagattttttactagcttgttcagtcggtaccaccagtgcctaaaatagtgttttgtagagtgtctgcactcaataaatattgttgaatgaacagatgagtatatgaattaatgaataagtcactaaagaaatctctgaatcatgaaagaaatattccatattatgatattgataattattctaagtatattttattgctttctaataccttgaaaaattggtgatctggggatgtcatatttgacaaatataactgcccaatatttaattattcttaaactaataactggaatatgccatccaaa

SEQ ID NO: 339410 - DNA, 592 bp, Homo sapiens
aatataactgcccaatatttaattattcttaaactaataactggaatatgccatccaaattccttaccaggaatttactaactataaaccacaggatggccaagtttttgaattatctctttaagtgtgtgtgtgtgtgtgtgtgtgtgtgtgtgtgtgtatgtatttttgtaaacacttgatggacatttacagggaatttaatactcaggtgtgttcatttctcttttaggttgggtaaccggtaatggaaaaggactcatctacctcacagatccccagattcactccgttgatcagaaagttttcactaccaattttggaaagagaggaattttttacttctttaataaccagcatgtggaatgtaatgaaatctgccatcgtctttctttgactagaccttcaatggagaaaccatgtaagtcataggctgtatggattggtaatgtgacagaccttagtgatgctctcaratatctggtgatgctcgcaaatatctggttctctccttccaggcacatagaatacggcacagtctggtcctttggggcttgggcagggccgtgacacaggttctggccaatgattt

SEQ ID NO: 339411 - DNA, 541 bp, Homo sapiens
tctgccatcgtctttctttgactagaccttcaatggagaaaccatgtaagtcataggctgtatggattggtaatgtgacagaccttagtgatgctctcaaatatctggtgatgctcgcaaatatctggttctctccttccaggcacatagaatacggcacagtctggtcctttggggcttgggcagggccgtgacacaggttctggccaatgatttgcaagaggaattgatcagtatcactttaagtcctgcatttaattggcagcacaagatcctgcagagcctctttccctctgccacagttatcaagaatgggtcaggagaccgctgcttctgggcataagtcctgcaaggaaagcaacatggaaaacagccccaactcacccatgagggatgaaaagcactsttgagaaaggcatgtgttgtttaagccattgagattttagagctttttgtcactatctgtcaagactgatactactggggcttttcctattgatttgggagttctttacatattaaaaaaatgtgagcctttgtg

SEQ ID NO: 339412 - DNA, 585 bp, Homo sapiens
aatatacagatgtcctctgcctgaacagttcagtagaaactaggtataaagtacaagaagcaagcaagagagggtaagagaaaaaaaaataaatctctttattatggtgcataaaccttcagtgtgagggagctttgcagctgcacaaggagaaaaatgcattcaaaaatataatgcaagtgtgaataatcctttctcgaatgctgcttgcagactgctccagctttgtcaggtgaacttgaaccgggccatcagatttgcccccattcccattgcacactctgtctatcaccccagggcattcaccatcttgactgttgtttaaagagaacaagcaatccatcattgagccagggagtcactttctcatagaaaagtaaaatcagcatgtgacactactcagccctagtgttttgcagattaaaatgatacatggcgactcacgtgttactaggaggattaagtyggttatcttgttccattgcccagacaaaagaattcccctcaagcagtaagtgggagctttacagaagctaaaatcgttgggctcaactatacagtggtaagacagagaatttaacaaga

SEQ ID NO: 339413 - DNA, 678 bp, Homo sapiens
tgtttaaggaaagttaaataggatacacatgatacaagaagtggtctcacagttccgagtccagtggggcggtgggagcgatgacagtctgagatggtaggagcagttgtgtgaagatggagtctcccggaggaaatgacaattacctgacaatcacagggccktcacacctcttcctgtcaggggccgagacattccatacaccaagcttaggtgatgaagaatttgaaatcccacctatctctttggattctgatccctcattggctgtctcagatgtggttgaccactttgatgacctggcagacccttcctcttcacaggatggcagtgcttcagcccagtatggggtccagacattggacatgctctgtgggcatgacccatggcttgatggagcaaggtgggggctcctcagtggaggcttgatcatggacttaaaccactctataggaactcagtatagtgccaacccacctgttacaattgatgtactaatgatagacatgacatctgacttgatggggcatagccagttgaccaccactgatcagtcagaactgagtttccaactgggtttgagcttacggggtggcaccatcctgccacctgcccagtcacctgaagatcgtatttcaaccaccccttcacctactagttcacttcacgaggttggtg

SEQ ID NO: 339414 - DNA, 512 bp, Homo sapiens
gcccatacagtggaggcaacttctcctgagaccatctgtgagatgatcacagatgtagttcytgaggttgagtcttcttctcagatggatgttgaattggtgagtgggtctcctgtggcactgtcaccccagcctcgatgtgtgatgtctggttgtgagaatcctcccattgtgagtaaggactgggacaatgaatgctgcagcaatgagtgtgtggtgaagcactgcagggatgtattcttggcctgggtagcctctagaaattcaaacacagtggtgtttgtgaaatagtccttcctgttctccaagccagtgaagagttatctgctgggaacatgtctaagagcctgttttggaaacacaagctgggcttctggtagtgcctgatcacagcccatgatgtccgttcatgtttccccccttttctcccttcagcagaggccaggctatggagcagggccgctgaacttgctgtaatctggagatgctttttacacaaccacaagcagaaa

SEQ ID NO: 339415 - DNA, 476 bp, Homo sapiens
tgcagcaggcctggcagcagcaggtcaccatcagcaccaccctcactggacttgtggggccgtgcaccccacaccctgggagcagacactttgcagcctactcagaagccaccccaactaactgctgtggcctgaatttgtctcccaaaattcacatgtggaagctctcaccccagtgtgaccgtatttggagaygaagcttttaactggtaatgaaagttaactgaggtcacaagggctgggcctaatagtgctgtggccttataagagaaagggacaccgggactctgtccatctctgccagcaggagcacacagcaaggaggccacctgcagcctggcagaggccctcaccaggaactgaccatgatggcattctgagcttcccgctcccagaactgagaaataagctcatagcagttcagtccacggtgctccgctatgacagctatgacggcctgtcccagtcccttccgc

SEQ ID NO: 339416 - DNA, 476 bp, Homo sapiens
tgcagcaggcctggcagcagcaggtcaccatcagcaccaccctcactggacttgtggggccgtgcaccccacaccctgggagcagacactttgcagcctactcagaagccaccccaactaactgctgtggcctgaatttgtctcccaaaattcacatgtggaagctctcaccccagtgtgaccgtatttggagatgaagcttttaactggtaatgaaagttaactgaggtcacaagggctgggcctaatagkgctgtggccttataagagaaagggacaccgggactctgtccatctctgccagcaggagcacacagcaaggaggccacctgcagcctggcagaggccctcaccaggaactgaccatgatggcattctgagcttcccgctcccagaactgagaaataagctcatagcagttcagtccacggtgctccgctatgacagctatgacggcctgtcccagtcccttccgc

SEQ ID NO: 339417 - DNA, 619 bp, Homo sapiens
ttgaggtcacatttcaatatgagatttaaagggtgcaaaatatctgaaccatgtcaaagaatatgttatgtatatgggtttaactagtgtatatatataaaacatatattttctaatatataaatatatattcactttagatatggtaaattaatataagtaccctaatcatgatacacccttcaaaagaaaatagttaacatttgaaagactctattcagaagcctacttcagaggtagtataaaaatgaataaagtttgggaaaagatgcctagagacatgagagttcattctaagatacataagatcacacaagaaggcaaggctttctttcccacagccaggcttcataaagtgtggaaaaattctgtatcaagatgatcatatctggtgatgcctgctctagggcttcattgtcacgatggttgaccacataattttgtttcccttgttccaagcacaactaattaaccatctttctctgtatatttctcaagatkattatactccttcagagaaaatctgattggcttattgagaaagcatacagattggtgagtccccgtgtgtccatatggccagagttttcacactaggcaacttcacagacttttggat

SEQ ID NO: 339418 - DNA, 599 bp, Homo sapiens
tgctccaaagccaccctcttttccttagttttaaattccaaagggaaaccttgcaaacatttctcctttgccagtaggcacaatgtaaagccttgtcagtagagggtgctagtgagatcctgcaggagggaggggattctcttaccagagtcagtgctttttttctggcttctatggtgtgctgccagaagacaagtgtccttccttaccagcagccagctttcttgccagaaggtgtcgtcagtgagggtggaagacctagcggtccacaacccccagtgagtttcagtgatttcccagagagtggtttcctgatcatctgccctggcatgaggcacctaactgaacttttcccctatctggtgggctttggsaacactttctccaacaaagtctgaatctcaacttgaagcaaggggtgggaagttggggaggatctgccaagttttttccctctttggatgcgctccctcagccatagaagtggcggcttttcccggcatttgctattcctggattctttagcgttctctttaaccaatccttcttaattgatctccttttactagttattttcttacgttaaatgtcccttattc

SEQ ID NO: 339419 - DNA, 587 bp, Homo sapiens
tgattctcatctttcggtggaggaaggcacatacaactaaccatcagaggtcctggttacttgtcagttttttaattagctcttcagaacatctgtcttgcggcaaagtatttaatctttgacccccagcaccagagagccaaaaaaaaaaaaaaaatcctagcagaaaattttcacatctgcctagttagaagctggcaaagaattcatcctcccataatctttccaaatacatcaacctcaaacaaaacaccaactgtacccgagactccaaggttagggcactaaattccccagccctgtgaaattttaattagagcagatggcctactggataataacaccactgtacaaaaagtattacacaaaacaggggtttaaaaatcctttctctgagaagatttagcacttgtttattgagcacataagtggcaaagattttgctagctttctattaatcatcattaayacctaacatgggtgctagtgtagtggacacctgtctgttaagcacttctgtcctcccttgtccctcatatcaacctcccatttcctttggatacctgctttcctccactgcaatcatt

SEQ ID NO: 339420 - DNA, 562 bp, Homo sapiens
gatatccattacaccgaatctctttatactcaggacagcttaggacagggaattaggagacttgagtcttagccctgatgttgctacaaactatcttggtcactatgagcagattaagtcctctttctggcatccgtttcaccagctgtgaagggagataatttatactctcccttttttccagatagaattgaaggtgactcctgagactatctcaagctcttgtctaatgtagttaaacttgtgggagagctgagaataatgctcccttaatgggaaagatttctcaaattgagaatttaaatataaggcatttgttaagcaatcatcatctacagcaagtgaactctgtcaacttgattagccgtaagttactggttgcaaaaatcagaaacccattgaatcacctaggccatctggagggtagctcccaggagtaacagaattgctgaaagactcaggytactccaggaactttagaaaataaaattaatctctcaaataccatcagatcaccttaatttttcctacctgccctcaggtttttgcaaataaagaagtt

SEQ ID NO: 339421 - DNA, 562 bp, Homo sapiens
gatatccattacaccgaatctctttatactcaggacagcttaggacagggaattaggagacttgagtcttagccctgatgttgctacaaactatcttggtcactatgagcagattaagtcctctttctggcatccgtttcaccagctgtgaagggagataatttatactctcccttttttccagatagaattgaaggtgactcctgagactatctcaagctcttgtctaatgtagttaaacttgtgggagagctgagaataatgctcccttaatgggaaagatttctcaaattgagaatttaaatataaggcatttgttaagcaatcatcatctacagcaagtgaactctgtcaacttgattagccgtaagttactggttgcaaaaatcagaaacccattgaatcacctaggccatctggagggtagctcccaggagtaacagaattgctgaaagactcaggttactccaggaactttagaaaataaaattaatctctcaaataccatcagatcaccttaatttttcctayctgccctcaggtttttgcaaataaagaagtt

SEQ ID NO: 339422 - DNA, 600 bp, Homo sapiens
cgaataaatgagttaacaaattccaacacaatgcatcttaaccagggtgcaagtaaaaatcaccaaaggagtgttttccaaaaacatatattctaagcccctctagacttctctgagaatagggccaaggcatctgcaatcttaccaagctctttacatgtccctgatgcacaacttttacaagaatcattgtcatggaatagatagagtgctagactggatctgaagtctaggcctggtctcaccaatgaaaataattgaaaatcctccccagaattctgtttctttcttagtaaaaaagacaaatttgacagccattgcaggtggctcaaatgacagtagctaaaactcaaatgagagatacatgtaaaacaggattataagaatttcagtgaagaaaattgctatattctggtcctggagtgtgaaggaggaatgacttgcataattyggtgcacaagctaatgtcagattcttatggaatgttatgtggcattgccaagcaaagaatttgcaaatctcagttgagggcccaaggcaaggcattaaggtagggggtgcagcttccctcaccttcatttttcttctttacttctccat

SEQ ID NO: 339423 - DNA, 557 bp, Homo sapiens
ctttaaatatatgataaagagttattttaagaccatacaaaaagcaatacataggctataacttcatagagaatcaaaaaggaaaatatgtgtgtgtgtgtatatatatatgtgtgtgtgtttgagtttgtgaatgtatgtgtgtcagatcagaaataagaagacagcttgtttctagaaagaaaagatgtttatatgttcaggtcactgagccaggccacttggaaagtttatatttttggcattccagcaagaggwcacacttagatcagagcatttctagcactcacattttctccttcctttgtcagctgacagtcctctttgctctttcttattcaaagaatgagaaccatgtgactcagagtgagtgcctacttttgggcaaagtagagacctgatgaattcatcatagttaaatttactttttaaaaaaatgactataattcaaaaacttcccttgattttagatcacttattcaacacacatttatggaatagctaatgtggctaaagctctatactttgtgctggaaatatacagtttttgcccagga

SEQ ID NO: 339424 - DNA, 593 bp, Homo sapiens
cctgccattagggcacctgtagatgaacctacctggtctggccccacccattgtggaccccaatccccttggctaagcagggagctcagaccactgtgcgttccaagaatcagcccattgcctgaggcaacagagagcttccgccagtaaacaaggatcaagtatacacctagccacattgaccacagcctgctatcatgcataagcactatctactgacttacaggtcaaactgcacagcccaataaaaaacctgcagaaagaagtacataaggctacagaagcaaaaccaaaagaccccatggagcagggcaaaggaaaaggaaaaaggaaagaaaaaaatagcaatagtatgatagagaaataaagaaaaagaaaaaagtcctacaaacatgaaaataattacaaaaattagaagtgccaaaatttccaaatgaaaaggaamaagcacaaaaatcctgatactatgaaaaatatgaatgcagtgacaccatcaaaggattgcactagctttccagcaaaggtccctaatgaaaatagaaactcagaagtgacagataaagaattcaaatcatggattgcaaggcagctca

SEQ ID NO: 339425 - DNA, 564 bp, Homo sapiens
acttgcttttgaatgactttcggataaacaataaaataaaggataatttttaaaaaatcttttaaataaacaaaaacagggacacagcataccaaaatctctggtatgctgttaacaggaaagtttatggtgttaaatggctaatttaaaaaagttagaaagatcttaaattgacaatctaacatcagaacaaaaaaacactaaaatcagagcagaacagaatgaaattgagactcaaaaaatacatacaaagtatcaatgaaagcaaatgtcggttctttgaaagaatgaacaagatcaatagacaacaagctaaattaacaaagaaaaaaagggagaagatccaaaaaagcccaatcagaaatgacaaaggtgacattacaactgatcccacagaaatacaaaagattatcagagactgttattaacacttctttgcaaacacactagaaaatttagaggaaatgaataaattcctggaaacacacaatctgccaakattgaatcagaaaggaattaaaaccctgaatagaccaataatgacttccaaaattgaatgagtaa

SEQ ID NO: 339426 - DNA, 511 bp, Homo sapiens
ggtgcacttgttaaagacaacatagtacatattcatcatggaatattacacagccaaaaaagagaataaaatcatatcctttgcagcaacatagatgtrgctggaggccattaccctaagtgaattaatgcaggaacagaaaactaaatactgcatgtcctcacctataagtgggagctatacatcaggtaaccatggacatgaagataatgacaacagaaaccaggcactactggagtgagaagaaaagaaggggcaaaggttgaaaaactattgggtactatactcactccctgagtaaggggatcatttgtaccccaaagctcaacatcatgcaatatacctacgtctatgtcataaacctgcatatgtatccccctgaatctataataaaagtttagagaaaagaaaagaaaacctctatctccattagaatccactatcaaaaggtaaatcttaccattactctctgctgttttagctattcagtgactcttatatgcccaagaaa

SEQ ID NO: 339427 - DNA, 511 bp, Homo sapiens
ggtgcacttgttaaagacaacatagtacatattcatcatggaatattacacagccaaaaaagagaataaaatcatatcctttgcagcaacatagatgtagctggaggccattaccctaagtgaattaatgcaggaacagaaaactaaatactgcatgtcctcacytataagtgggagctatacatcaggtaaccatggacatgaagataatgacaacagaaaccaggcactactggagtgagaagaaaagaaggggcaaaggttgaaaaactattgggtactatactcactccctgagtaaggggatcatttgtaccccaaagctcaacatcatgcaatatacctacgtctatgtcataaacctgcatatgtatccccctgaatctataataaaagtttagagaaaagaaaagaaaacctctatctccattagaatccactatcaaaaggtaaatcttaccattactctctgctgttttagctattcagtgactcttatatgcccaagaaa

SEQ ID NO: 339428 - DNA, 595 bp, Homo sapiens
ctaaccatggcactgaaaatcctggagagcagattgaccatctttcgatattgcaaaacccgaggcttatttctccacctttaggatacaataagagctcaagattttatggtggaaataaattcaaattaaggctccttcttcctctaaaatgccttatcatgtattwgtgaattagtgctgcatactgatgaacttactctatactcaactccaacttccagtaaataatcaatagattgttattggaggagaaaattaacattattgtgcatatctgttgtaacaagtttcagcctggattattatgctttcataatcattctcattttcttaagaaatactaccttggaatcaatttactctatctaaatgatacatgtgttggggtcacagaaccatcagtagacctaagagtgacaccaagatgttctctatatttctagggagtaacagtgtggaaaacataaagtaaatatataatcaacagtaaatatggaccttgcacaataatctagaagaaaaaaatcaaactataattgctgcaatggtcaaaaggacactgacatcataatggcttgtgctggttttgaaa

SEQ ID NO: 339429 - DNA, 588 bp, Homo sapiens
taaataatacatcagaataacacaaactacaaaaagtagagactcagagcaaaaagtcataacacatttgaaactattaactatccttttattaaattatctacctcttgcttccaaaagcctgcccttgctaggttctcctcattcttggtgtttcttcttctctacttctttgctgactctayagtaatttcattaaattatgcagcaaataactcacagcaggatttactaaaaatcatgaaggaaatttggatagatagaaaataactgtaacacaaagcttaactagagaagtgctacaaacaagggaaagaaaagttgtatgggactcaagggaggaagaagttactactgacagagagaactaggaaagtctctgtagaggagctgccttttcagataggtcttagacatcaggtaggatttggatgtgcttccaaagggaaggacacatgaaccagcagacatgaaccagcagggcaagcaggagcaaaggctcagaggcaataagcatggaaatgaaccaggaatagcaaggagttcaaatggttgaaatttagacctcatcatggagggagggagaaa

SEQ ID NO: 339430 - DNA, 665 bp, Homo sapiens
tttcaagcctaagtaactgggggtaaggtattttggttaacacaaactagaaagtccactgaatgtggacaaatgtctagtttagacttacaaatagcatcatttactacttatcattaagtgggggcaaatatgcatacattgtttgtatttctttcttgtttttcttttctgttttccagctttgctacactgagcacatattactttattaatagaaaaaacaatcctgttttcacacaaactttgttatgcacatgttcacaggcagtataggtgagatattgtagaggagatgttcagcaggaagatggaattgtaagcctgagctcatgagtagtcaaggatataggcatagttttaaagtcatctgcatagagttaaagccctgggaatgcatgagatcctcaagcaaaggagaytgaattagagggccagatgatgaaattctgtctcaagttgtgcagccctgacgcactcacagggaatgactggtgctaggtaagagcacaagaaacatcacactagccttgaggttttgtcaacttcctcagatttagtctcagagagtaggagaacgaggtgtggacaacatctctgcaccatgagagtgttctgaagttatgtctatcaatgctctttacttattgttacagtgatttgtt

SEQ ID NO: 339431 - DNA, 568 bp, Homo sapiens
aactgcccgcgcccagaaaacgagctggagtggagaacagaatgcaattgcagacaatcttcctctggttccctggggaggcctgctctgggcagagagatcccaggggactgtgcgggaaggagctaaagcaatagcccaaaagcgccagggaatgcacttgaagtttcagacgtttttcttttctttgaaactaagtttccagcccaccaggaaaaactgcctcgcgacctagtgattttaatctcacgcttggccgcaagccgctgcctcgagactggaaaccggccgcgaggcgctctatccccctgaccccctccccccgcgctcacctgcgatatcccagagctgcaggcgcaccacagtctccgggtcccagtggagcaccttgagcgcgaagtccacgccgattgtggcccggtagtgcgargagaagttctggtgcacgtagcgcttgatgatactggtcttccccacgcccaggtcgccaatcaccagcaacttgtacaggtgctccttgtgcggggcctgcatcctggcggccggccagacgtgccgtgcctgacca

SEQ ID NO: 339432 - DNA, 438 bp, Homo sapiens
gggtttgttgtacagagtattttgtcacactcagttattaagcctaacacccattagttctttttcctgatcctctccttcctctcactctataccctccaaaaggcccagtgtgtgttgtgcccctctgtgcrtccctgtgttctcatcacttaactcccacttataagtgaggacatgaagtatttgtttttctgttctccccaaaatataaatcattgtattataaagacacatgcatgcatatgttcattgcagcactgttcacaatagtaaagacatggaatcaacctaaatgcccatcaactatagactgggtaaagaaaatgtggtacacatacaccatggaatactgtatggctataaaaaagaatgatatcatgttctttgcagggagatgagtggagctggaggccattatccttagcaaactttact

SEQ ID NO: 339433 - DNA, 438 bp, Homo sapiens
gggtttgttgtacagagtattttgtcacactcagttattaagcctaacacccattagttctttttcctgatcctctccttcctctcactctataccctccaaaaggcccagtgtgtgttgtgcccctctgtgcgtccctgtgttctcatcacttaactcccacttataagtgaggacatgaagtatttgtttttctgttcyccccaaaatataaatcattgtattataaagacacatgcatgcatatgttcattgcagcactgttcacaatagtaaagacatggaatcaacctaaatgcccatcaactatagactgggtaaagaaaatgtggtacacatacaccatggaatactgtatggctataaaaaagaatgatatcatgttctttgcagggagatgagtggagctggaggccattatccttagcaaactttact

SEQ ID NO: 339434 - DNA, 504 bp, Homo sapiens
gataataacaggtctagcagtaagtgtatacgggtacagactggctcagtgaaataagaagcagggttattagctggcagaaaaaagttgataggggaaggtgaaggtctgtgcattactccgtttttacgctgctggtaaagatataccgaagactaggcaatttacaaaagaaagaggtgyaatggactcacagttctttgtggctggggaggccacacaatcgtggaggaaggtgaaaggcatgtctcatacggcagcagacaagagaagagagcttgtgcagggaaactcccctttacaaaaccatcagatctcatgagacttattcactgtgacaagaatagcatgggaaagacatgtccccatgtttcaattacctcctaccaggtccctcccacaagtgggaattaccagggctatgattcaagatgagatttggatggggacatagccaaaccatatcagtctgaaaaagaggaaatcacagggaattgcggtgac

SEQ ID NO: 339435 - DNA, 534 bp, Homo sapiens
aatacagtaaatattgattttatatgttttgaacaaagtactttttaaattatctgaaaccctccctgaccaccctggcagtcagttattcatacatctggcaaccacatcaccttgaacttctctttcctcttgattacatttgttatttgtcctctcttatagaacttgagctggaattctagtgctttaagaaactcattaaatgactgttgaaagaacaaataaatattttgaactgagaatgaaatatgttgccaattatttggtagacaacatacagcataagtcaagtgtgtattacatataaagcatccctagtctaaaaatttgaaatccatactgcaccaaaattcaaaactctttgatggcaacatgatgtcacaagtggataatttcacacctaaccttatgtgatgagttacagtcaaaacacagtcagaaccttgtttcatacacaaarttattaaaaatattatataaaattaccttcaggctgtctgtataaggtgtatttgaaacattaatgaatcc

SEQ ID NO: 339436 - DNA, 622 bp, Homo sapiens
tacataatagtggtttgttcatttggtagttttacccaaagagccctaattgtattactttgactttttaatatattttmttaatttataatttgagtacaataaagtgtacccattctaagtgtacagtttgagcactcttggaagtgcacttttataaacacatcataatcaagacatagaacattctcacctccacaaaaactcttttaggcacatttgtaataaatcgccactaccatttctgtcattaatctaaagaaaactactaatctgctttctatcacaacaggtttgttttgctattctagaatatcatataaataaaatgatacagtatgggtcttttgtgtctgccttctttcacttaatataatgcttttgacattcatcaggttgctctatcagttcatatcttattattaatagctcagtattccattgtaaagatataataacttgcatatacttttactgtgtatcttatatatcttctttgggaagtatctgtttcaatcttctgttattgttattgagttgtttgccttcttattaatgtaagaatactcattccaaaaggtataaacaatcataaagatatataaaatatatggtgagagta

SEQ ID NO: 339437 - DNA, 578 bp, Homo sapiens
aaacgattcagagttttacccaaatgattcagagtaccttgaatgtaacgagtaaactttttataggtcaatgtctagagtttggcatatagaatgttattagctcaactaaagctagtttaaaaaatgattaatgcatagawcagttggttgttgatgctgcttggcagcacatgcctagcccgtgaaattgagaaaaattttaattacttactaaatctgaaaatcatgtgtctcagagtctctgcttcaacaacagaaaaagcacctagataaggggaaaatataaatacattttctaaaagttgtttctcccactgagacttgcataccactgctgacttccctctgcgactgtggtatgtatgactgacaggcttcaggatacctaagcacagcccacatttgaaacctggcagctcagcctcccctcatcctgctgggagctgttacaagctatgaggtgccagtgggttttattcctgccttattaaaatggagaactagaccccaaaaattaaagctcccaaaacccacaactcagaaaaggaaattggggtttagggaggcatataata

SEQ ID NO: 339438 - DNA, 578 bp, Homo sapiens
aaacgattcagagttttacccaaatgattcagagtaccttgaatgtaacgagtaaactttttataggtcaatgtctagagtttggcatatagaatgttattagctcaactaaagctagtttaaaaaatgattaatgcatagatcagttggttgttgatgctgcttggcagcacatgcctagcccgtgaaattgagaaaaattttaattacttactaaatctgaaaatcatgtgtctcagagtctctgcttcaacaacagaaaaagcacctagataaggggaaaatataaatacattttctaaaagttgtttctcccactgagacttgcataccactgctgacttccctctgcgactgtggtatgtatgactgacaggcttcaggatacctaagcrcagcccacatttgaaacctggcagctcagcctcccctcatcctgctgggagctgttacaagctatgaggtgccagtgggttttattcctgccttattaaaatggagaactagaccccaaaaattaaagctcccaaaacccacaactcagaaaaggaaattggggtttagggaggcatataata

SEQ ID NO: 339439 - DNA, 623 bp, Homo sapiens
taggtatgagtcctaaacaagactgacctgatcccttccttcatccagtttaaatgcagctgatctaaaaacttcactgtaccactggagagacacttacactaagaggaacactgatcaaaagttagaagtggagacgttttcttccctgagacaagcatgcacagaaagtgagctaaaaacatcctgagaaatcattttgctctttcctctgcctgcacaaaggacacaggcattcaaccagatattcgtgggtggaatttgccctcccaattcccagaaccatgcatcctcatttgaaggcctcattagacctgaatagtcctaatacatgaaggcaagagcatggttgaagacaagcagatctaggttgaaatcccagccctgaagctccatacctgtgccatcctgaataaatgcttgattttcctgggccttactttcattagtctatcaaaaaaaaaaaaatgagggaaaatgcacctatcttgtgaagttgcygtgattcaattagctaatcgaaataaagaagcacacagcatgtagtgttcaataaatgttgtttccttatgctgcaaggtcctgtccaaatgttaactcctgtattaaagcattcttaattt

SEQ ID NO: 339440 - DNA, 586 bp, Homo sapiens
acacagcatgtagtgttcaataaatgttgtttccttatgctgcaaggtcctgtccaaatgttaactcctgtattaaagcattcttaatttccctcggcagagtagggagctcggaggtcttgtctagtgttctcatcttcacatgaatacaatttttaaaaactrtgttacaaaagtttttagcctgtgtgtttcctccattaagctacaaactctttgagggtggggaatttgttatctgtacctgtgcagccccagccctagttcattgcttaggatcttttatctgttcttcttcatctctaccccctgcaaaattaccctgactttccccattaacaggaggtaaaaataacagggggttagggaattccttggagcatcctcacaaatgaaaaaaaattgcttggaaaatccctgcatcagctagaggtacttacccgcagcgcaagttcctataaatctgcaggtgagtggccatgtatttttgacagccaaaacaagaaggaaatgtgaatatttacatgacctgatgtgcaaaaggaaaagataaaccagaggcattagggaagcataattatctttg

SEQ ID NO: 339441 - DNA, 554 bp, Homo sapiens
tgcaggtaagtacctctagctgagacagagattttccaagcaattttttccatttgtgaggatgctccaagggattccctaagagtattgcttaatgtttaagaactcaggatctggactcatactgaccttaactactattaattctgtgaccttgggaaaatcacttaacctctctaagcctcagcgttcttgtctgtagaatgtggataacaacagaaactatatcataaagtgttgtgggcataaaataagaacatgtgtgaaaagtgcttagttcagtggatgggaagyggcaagcattcaataaaatgctaattattaacacacgttttgaatggcaaactcattaactctcctaagtagtgatttctttcaattgaattatattatacttccctctggcttataatctctattcattcttaataggggtataattcaatacctcttgctaatgtgagggatgggatccactggattctgcagttatgccttttatgtaaggttttatgcctccctctttagagaaggtattattcttcaggaatgtt

SEQ ID NO: 339442 - DNA, 489 bp, Homo sapiens
ttgctgacgtatttgacttgaaatttaaatgtatgctttgtaacagaaggttagataacaagtttacttggttgtcaaaactttgtcttaaaaatactcctaactccttggtggttcattgcatggcagacattggtarggattttgctaccagaggacttattgaggtactgtttgtatatgctgcctgaggttattgcagctgaaacatgatctccaaatatttccagtgttcttggaaatgcacagtggttccaaggatagaatatatcctgggtctcatcaccctagctaaacattttgggatagatacgttttctgcgtagagttttgtccaaaatacacaactctatctccaatgaaataagaatatttcaataatgtaaagataatataaacaataatataaatgtaaatatgctgctctgcctcaatctatgtgatatagttactaaggataaaataacaaagtataaatatgaaaacatg

SEQ ID NO: 339443 - DNA, 521 bp, Homo sapiens
tacataacaaacctacagctaatattgtaccgaatggaaaaaatttaatggcatttcctctaagacctgaaacaagacaaagatacctactttcaccattgttattcagtgtaatactaggagtcctggccagagcaactagtcaagagaaataaataaagggcatccaaattggaaaagaagtcaaattagctatgttcacagatgacatgatcttaaacttagaaaaacttaaagactccatcagaaaactgatagaactgataaatgaattctgtaacattgcaggatayaaaatcaacatacatgcatgccaacagcaaacaatatttttaaaagcaagaaataaattctatttataatagctataaagaatataggctgggtgcagtggctcacgcctgcaatcccagcaatttgggaggctgaggtgggtggatcacctgagatcagtagttcaagactggccaacatggtgaaaccccatctctacttaaaatacaaaaaaaaaaaaaaattta

SEQ ID NO: 339444 - DNA, 628 bp, Homo sapiens
gatagaagaaataagacttcgtgtttgatatagcagtagggcaactataatttacaaggatctattgtatattttaaaatagccagaaggaaataaataaaatacttctagcataaagaaaagataaatatttaaggtaatgaatttcatagttacattgattttatctttccattttatatgaacatgttaaattatcacatgtaccctgaaaatatgtacatctaytatgtatcaattaaaaaacttagaaagtaggaaaaaaatagagcaaacgaaacctaaagtgggccaatgggaagaattaatcaagataaaaattcaatgaaatagtcaactaaaaaacaatagagaaaacaaatgagaccaaaacttctttgaaaatatcaataaaatagataaatctctggttaaactggaagagagaagaaacaaaacagtaatatctgaaccaaaggaggaaacagcattataagtccaacagacattatcagaataataagcaattattatttaaaaatgtcaaaaagatgatagctagatgaaatggacagattgcttgaatcacacaaagtatcatagctcgtgtaaggaaaatgatattctcaatagttctatattatttatg

SEQ ID NO: 339445 - DNA, 590 bp, Homo sapiens
ctgtcattatgctgcccaagctggtcttgaattcctgagttcaactgatcccccgaccttggcctcccaaagtgctaggattacaccgtgcccggccastatgcttttttttttttaattttttgacctgagtctcactctgttgcccaggctggagtgcagtgatgtgatctcagcccactgcaacatccgcctcccgggaagttcaagcgactctcctgcctcagcctcctgagtagctgggattacaggcgtgagccactgcgcccagccactgtgcttcttgtacagcctgcgaaaccataagccaaataaacctttttttttttttaataaatcatccagcctcaggtattcctttaacaacatgaaacagaccaagatagaagccaagagaaatctatacaaacaaactttattaaactaacccttatcttcctagttgttgccacagttactactctttgttcaacctagtgtgtaagtattttgacttagtcatttcttcaccccattaactatcctcactcaagccccgtggccgtatcaaatctcacaacttaatagtgtttgtccacctctgtatataa

SEQ ID NO: 339446 - DNA, 562 bp, Homo sapiens
agtgcttgtacttaatcggacgagaaaaagtcaaacagggcccagacaagggcctggtgaaagaagtcctgaagcggaaaatcgagatagaacggatcttgtctgtgtccctcaggtgagtagtggaggtgcagaggcaggactgccccttctcgcctcagcatcacggtccgctgttccaaacagccaggaggaaggccgggctgggcttcccagctgtcaaaatcatgatcaagagaatggaatttccctttgtcccaaagggaagactccctagtctcagcaagtcttgatatgtcaggaagaaggtaccaagaaaaggttgcctccggacagctcctctaatcaagggggacccagatctcttgtaaccgaaacrtgttagaaatgaacccggtatatggaacacctcagagaataatttctcttgttgcagtagagccaaggattcagagccctgtcccccagtccacctcacccaggttggaggcctcacccatttccctgagcagagggtcctgaaagggaagtttctttgggacttccttagggagtgcaagtt

SEQ ID NO: 339447 - DNA, 593 bp, Homo sapiens
taagaaaacagtagtacttacgatgaatttagttaagttttcatttactttcaccacattcttggccatgtgctgcatgacttccaatacttcattctctgtgtatcctgtgtaatactgctgctttaagttctgaaacacaagaagcagacagacagacatgactgaggggcaagagaaaacctctgcttctttagaagaacacatcttgtacatgatgacattacttatgtaaaagctgtacaagaatattcttaccttctggaaattcaatcaaagccctaaccactctcacagtaccagcaacactaaagcagctggtaaatgcaagatgattctggccctgagaccagactaaatcaagtgccaaaggtcccatasgatctttcaaagacgttgcacaggtaagagtccttcaagtaacaacactgaaaggggatggaaaaggagacacttaaaacaaagtgcccctttacagtgctggccacatctcacacaaccctgcatcaaagccctgcccagctgtccctgttatgagctcaagagcccaaacagacatactgtcagtcagggaaagatgttcggaaataaga

SEQ ID NO: 339448 - DNA, 339 bp, Homo sapiens
ttaaactatattttattactgatttctaattttaaaaattattttgtagttagataatatactactctgtatgacttcaattcttttaggtytattgagatgtattttatgtcctagaatatgttatatcttcttaaatataccatatgcacttgaaaaacatgtttattctgcagttgttggatgtagcgtgctctagtgtcaattagaccaaggtgattgaaggtgtggctcagatctgtatttactgttatatttcctattttatctgttttttttaaatcaattgatgagaggtaggtgccaaaatctccaactgtaattttacaaatgtccatt

SEQ ID NO: 339449 - DNA, 686 bp, Homo sapiens
tctaacaaacactataattgtttacaatgtgctagtgcaagaataggcacgaagttaaataacagaatagcattaagaaatagagctatgcttataatggcatataaaataagataaatgtgttatttaattgaatagagagaaacatggactatgaaatatcaaagtatgggaatattgattagctatttaaaaagaaaaaaagaatcagctctagtctttactgtattttttataccaaaataagtttagatgaatacaaattgatttttttaaagaatgagtatyacttttattaagcattttttcctctccttactgatttggaagagaaattatgccaaataagaacaaagttacctttgattcaggatttcctttggatacattaaaagctgtctataaacctaatattgtaaatggatcactttttgttatatttatcaaagggcagagaacttttcttagcctaaattttaataatttgctgattaagaaaatgtaacaaaagaggtggaaaataatcctcagatagaactttcccctgtttgaaattacaacataaaacaagtaaaatgattccttttttaatcttcctaatttctgagggctctctacctttttcttttcttattatttcacaaagaaactagcagtgtcaaaatggaactccttcaatatcccga

SEQ ID NO: 339450 - DNA, 597 bp, Homo sapiens
tgatatattatgaattttaagctgtgtcacttggcaagtgaggacataagggtgaaaagggacagtgtattgatggtagaatcaataggttatgtgtactggatggagagttgaaaaatagtaggagcgaggtattagtgagagtaatgagctaagagaaagataggaggtaaaagtcaaagaacagtaagcttagaacagagattatggaatgggtgcagtaattggtagtgacacattcaagagtgtgactgtgggagtggttagctaaggtataatggagatcaagatatttggagaaaaggaaggaggtcaagttaccaagaaaccaggatgctggaagaattatttgtgtggatatctaaataatgaaaaaataagactggtgtcataataagaaagtagttaaaatctataatgcttgtaatatgttctttgttaaataaatatttattgagtatttcaatagcataatattgtagaycctggagacaggatacatatgatttcttcccttatggtgttttccagcccaagaagtgcaaggtggtattaaaacaaattaaattgtaattgcattttcattactggttgaaa

SEQ ID NO: 339451 - DNA, 585 bp, Homo sapiens
aacgtgtagttttgtttctgtgttagtttgctcagtgttccctttttcccawatccactgcagcatttatttatttatttattttcacttttaaataatggcaattcttgcaggagtaacgtggtatctcattgtgatttcaatttgcattttcctgatacctaatgatgttgagtattttttcatatgtttgttggccatttgtatatattcttttgagaattgtgtattcatgtccttaacccactttttgatgggattgtttgtttttttcttgttgatttgtttgtttgagttccttctagattctggttattagtcctttgtcagatgcatagtttgcaaatattttctcccactctgtggattgtctatttcttctgccaactaattcttttgctgtgcagaagctttttagtttaattaagtctcatctatttatctttgtttttgttgcatttgcttttcttgatcattaagtctttgcctaagtcaatgcctagaagagtttttctgatcttatcgtctaggctttttatggtttcaggtcctagatttaagtctttgatccatcttgagttgatt

SEQ ID NO: 339452 - DNA, 494 bp, Homo sapiens
gaataattctgaaattttagtccacctatcacccaagtacattgtacattgtgtacattgtactaacgtgtagttttgtttctgtgttagtttgctcagtgttccctttttcccatatccactgcagcatttatttatttatttattttcacttttaaataatggcaattcttgcaggagtaacgtggtatctcattgtgatttcaatttgcattttcctgatacctaatgatgttgagtattttttcatatgtttgtyggccatttgtatatattcttttgagaattgtgtattcatgtccttaacccactttttgatgggattgtttgtttttttcttgttgatttgtttgtttgagttccttctagattctggttattagtcctttgtcagatgcatagtttgcaaatattttctcccactctgtggattgtctatttcttctgccaactaattcttttgctgtgcagaagctttttagtttaattaagtc

SEQ ID NO: 339453 - DNA, 618 bp, Homo sapiens
aattttctttaaatatctgataagtccatttgttctagrgtatactttaaatccattgttttgttgtggttgttgttgactttctgtcctgatgacttgtctagtgctgtccgtggagtattgaagtcccccactattattgtattgctgtctatctcatttcccaggtctagaagtaactgtttatacatttgggaactccagtgttaggtgcatatatatttaggattgttatattttcctgttggactagtccttttaccattatataatatgctcttttgtcttttttaactattgctgttttaaaccttgttttgtctgactttaaaagctactcctgcttgcctttggtctccatttgcatggaatatcttcttccacccctttaccttaagtttataacagtacacataattctgtcagaaactaccaaactgtcttccaaaacatctgtatcattttccattcccacctttaatgaatgagtgtttgctggcatttggtattttcagtgttttggagattgctctctttaataggtgtgcatctcaatgatgttttaatttataattccctaatgacatatgatgttgaacatcttttcatatgcttcct

SEQ ID NO: 339454 - DNA, 618 bp, Homo sapiens
aattttctttaaatatctgataagtccatttgttctagagtatactttaaatccattgttttgttgtggttgttgttgactttctgtcctgatgacttgtctagtgctgtccgtggagtattgaagtcycccactattattgtattgctgtctatctcatttcccaggtctagaagtaactgtttatacatttgggaactccagtgttaggtgcatatatatttaggattgttatattttcctgttggactagtccttttaccattatataatatgctcttttgtcttttttaactattgctgttttaaaccttgttttgtctgactttaaaagctactcctgcttgcctttggtctccatttgcatggaatatcttcttccacccctttaccttaagtttataacagtacacataattctgtcagaaactaccaaactgtcttccaaaacatctgtatcattttccattcccacctttaatgaatgagtgtttgctggcatttggtattttcagtgttttggagattgctctctttaataggtgtgcatctcaatgatgttttaatttataattccctaatgacatatgatgttgaacatcttttcatatgcttcct

SEQ ID NO: 339455 - DNA, 618 bp, Homo sapiens
aattttctttaaatatctgataagtccatttgttctagagtatactttaaatccattgttttgttgtggttgttgttgactttctgtcctgatgacttgtctagtgctgtccgtggagtattgaagtcccccactattattgtattgctgtctatctcatttcccaggtctagaagtaactgtttatacatttgggaactccagtgttaggtgcatatatatttaggattgttatattttcctgttggactagtccttttaccattatataatatsctcttttgtcttttttaactattgctgttttaaaccttgttttgtctgactttaaaagctactcctgcttgcctttggtctccatttgcatggaatatcttcttccacccctttaccttaagtttataacagtacacataattctgtcagaaactaccaaactgtcttccaaaacatctgtatcattttccattcccacctttaatgaatgagtgtttgctggcatttggtattttcagtgttttggagattgctctctttaataggtgtgcatctcaatgatgttttaatttataattccctaatgacatatgatgttgaacatcttttcatatgcttcct

SEQ ID NO: 339456 - DNA, 618 bp, Homo sapiens
aattttctttaaatatctgataagtccatttgttctagagtatactttaaatccattgttttgttgtggttgttgttgactttctgtcctgatgacttgtctagtgctgtccgtggagtattgaagtcccccactattattgtattgctgtctatctcatttcccaggtctagaagtaactgtttatacatttgggaactccagtgttaggtgcatatatatttaggattgttatattttcctgttggactagtccttttaccattatataatatgctcttttgtctttkttaactattgctgttttaaaccttgttttgtctgactttaaaagctactcctgcttgcctttggtctccatttgcatggaatatcttcttccacccctttaccttaagtttataacagtacacataattctgtcagaaactaccaaactgtcttccaaaacatctgtatcattttccattcccacctttaatgaatgagtgtttgctggcatttggtattttcagtgttttggagattgctctctttaataggtgtgcatctcaatgatgttttaatttataattccctaatgacatatgatgttgaacatcttttcatatgcttcct

SEQ ID NO: 339457 - DNA, 412 bp, Homo sapiens
gcagtgccccagtggactctgtgtgggggctctgaccccacatttccsttctacactcccctagcagaggttctacatgagggcctgtccctgcagcaaacttctacctggacatccaggcatttctatacatcctctgaaatctaggcagaggttcccaaacctcaattattgacttctgtgcacccaccagctcaacaccacatgaaaaccaccaaagcttaggacttgccccctctgaagccatagcctgagctgtaccttggctccttttagctatggctacagcagctgggtcataggacatcaagtccctagacagcacacagcaggggagcccttggcccagcccatgaaaccattctttcctcctaggcttctggacctgtgattataggggatgctgcaaatg

SEQ ID NO: 339458 - DNA, 556 bp, Homo sapiens
atgccttacatcactgcagacaagagagaataagagccaagagaaaagggaaacctcttatgaaaccatcagatgtcataagacttattcactaccgtgagaatagtatgggggaaactgcccccatgattcaattctctctccctaggtcattcccacaacatatgggaattatgggagctacaatcaagatgagatttgggtggggacacagccaaaccatatcacaggctgaagggactactgttgtctcagataagattttggactttggagttttgagtttatgttggaataaattaagacttccaggactattgagtagtgatgattatactttacaatgtgagaacatgagatttgataggggccagggrtgtaatgatatagtttggatcttttccctgtgtgtcatgtcgaattgtaatccccagtgttggaggtggggcctggtgggtggtgattggatcatgggggcagtttctaatgctttagtaccatccccctagtgacattttgtgataaagttctcatgatatattgttatttaaaagtg

SEQ ID NO: 339459 - DNA, 605 bp, Homo sapiens
tgttgcagctattatttattattggttcctcatttagtctttctacttatttagtttttctatgtaagtcaagagaagtttacataccacagttacagtgcagaatattttatgcttttctgtgtgcttattatgactggtgagttttctaccttcaggtaatttcttcttgctcattaacatccttgtatttcagattaaagaactccctttcacattccctgtgaataggtctggtgttgatgaaatccctcagcttttgtttgtctgggaaggtctttagttcttctttatgtttaaatcatattttcaccagatatgctattctaaggtaaaagtttttcattcagcactttaaatatgtcatgctgttctcttctggcctggaaggtttccactgaaaagtctgctgccagacctattgaagctcgattgtatgttatttactccttttctcttgctgctttcaagatcctttctttacrcttgatatttgtgtgtttgattattaaatgccttgagatagtcttatttgggttaaatctgcttaatgttctataaacttcttgtattttaatggtaatatcatcctctgggtttgggaa

SEQ ID NO: 339460 - DNA, 596 bp, Homo sapiens
ttaaacatatcacagggaagaaaatatggttaatgagataccatagattttactggaaaaataaagacttygacaaaatattttcattgtttcttattggtgacttggtttatagcaagaaacatatggcttcaaatcccccacatgctgctaactagttagatctaaacggattgttttatctcctgaatctgttagccctggaaaactggataatgacatctaacttctggggttgctgtggaattaatgtcaccctatttatcatataggagacattcataaatgatgcctattattgttttagtagcaatgatataatcgctctaaaataatcatttctttcaagaagcagtgcagggcttggagttgccaagtttatttaattcagataacaactactaagtccaacttctcaagtcaatttcccaacatgccaatcatttttgcttgatttactgaccaacaatcaacataaccctgagtagccaacctgaaaatgtaagctacagtgctaagtaagagaagtgatcagaatcagatggagcagaggaagtgtatcaaacccagggcaatagcagctcagaagtaagcta

SEQ ID NO: 339461 - DNA, 316 bp, Homo sapiens
cctacgagtgagcaaatttacacattcttaaacgttaagttgctcatatctatttatctttaactgtcattagtctattcatatcaggcagcagtatcttctcttcactaataactattggttaattttaaacrttttgtttataccctacgtatattgcaccttattgtacctattttctttagtcgtaatgttatcattaaaattgagaaatggtaaaaataagtttatgccccatcttacagaatgtcaagatgggtttcatgtgtttgctcttcatgatgtcatatccagcactataaagtagggactgata

SEQ ID NO: 339462 - DNA, 612 bp, Homo sapiens
agctatgtgggccagcttagatagtgatgggtgtaaaagctgaagagactgagagccctaaagagccctgaatagagaggaaattgataggcttactggtggcacatcaatggaaggaagcagactaagcattcaggcacaaaccagatgtgtagatcttttggtacatctacaaagatgccttgtagtayggctaagaggtcacagcatgttaatttaacaatttatttgatgttcattattttcaaaatatggttcagaatcaggaaatcaaaatggcttgctttagacaaagtttaaacatctgaattgggattttctggattatgactgcaaaacagaagcttggtccctaaggtatagagccaaccactacagagacactgtagagagcttcatcaaattatataatacaaaacaagtaataatttgttaaatatcctttgaatattcaatagacatttcaaagctttacatggtcaaaatcctgatctacgtggtgccttctcaacctagatttttcatttttaaaattattctgtcttgcttcttaaaaaattatgtatctccactaccactgtaacactttcagtgcctacttgtggcaggatt

SEQ ID NO: 339463 - DNA, 612 bp, Homo sapiens
agctatgtgggccagcttagatagtgatgggtgtaaaagctgaagagactgagagccctaaagagccctgaatagagaggaaattgataggcttactggtggcacatcaatggaaggaagcagactaagcattcaggcacaaaccagatgtgtagatcttttggtacatctacaaagatgccttgtagtacggctaagaggtcacagcatgttaatttaacaatttatttgatgttcattattttcaaaatatggttcagaatcaggaaatcaaaatggcttgctttagacaaagtttaaacatctgaattgggattttctggattwtgactgcaaaacagaagcttggtccctaaggtatagagccaaccactacagagacactgtagagagcttcatcaaattatataatacaaaacaagtaataatttgttaaatatcctttgaatattcaatagacatttcaaagctttacatggtcaaaatcctgatctacgtggtgccttctcaacctagatttttcatttttaaaattattctgtcttgcttcttaaaaaattatgtatctccactaccactgtaacactttcagtgcctacttgtggcaggatt

SEQ ID NO: 339464 - DNA, 566 bp, Homo sapiens
tgctttctgtttgttagttttccttctaacagacaggcctctcagctgcagatctgttggagtttgctggaggtccactccagaacctgtttgcctgggtatcaccagtggaggctgcagaacagcaaatattgctgcctgatccttcctctggaagcttcatcccagaggggcacctacctgtatgaggtgtctgttggcccccactgtgagrtgtctcccagtcagactacatgggagtcagggacccacttggggaggcaggctgtccactattggagctcgaatgccatgctgggagaaccactgctcccttcagagctgtcaggcagggatgttgatgtctacagaggctgtctgctgccttttgttcagatatgccctgccccaagaagtgaaatctagagaggcagtaggccttgctgagctgcagtgggctctgcccagtttgagatttcctgccactttgtttacactgtgagcatagaatggcctactcaagcctcagcaatggtggacgcccctccccctgccaagctccagcttcccaggtcaatctcagactg

SEQ ID NO: 339465 - DNA, 566 bp, Homo sapiens
tgctttctgtttgttagttttccttctaacagacaggcctctcagctgcagatctgttggagtttgctggaggtccactccagaacctgtttgcctgggtatcaccagtggaggctgcagaacagcaaatattgctgcctgatccttcctctggaagcttcatcccagaggggcacctacctgtatgaggtgtctgttggcccccactgtgagatgtctcccagtcagrctacatgggagtcagggacccacttggggaggcaggctgtccactattggagctcgaatgccatgctgggagaaccactgctcccttcagagctgtcaggcagggatgttgatgtctacagaggctgtctgctgccttttgttcagatatgccctgccccaagaagtgaaatctagagaggcagtaggccttgctgagctgcagtgggctctgcccagtttgagatttcctgccactttgtttacactgtgagcatagaatggcctactcaagcctcagcaatggtggacgcccctccccctgccaagctccagcttcccaggtcaatctcagactg

SEQ ID NO: 339466 - DNA, 341 bp, Homo sapiens
cttcctctgtcactgtgccagtggtgacaattcccgcaggaaactttagaatattatataggtaaacataggatacaaaacctaaaatccagtgcacagactcatcagaagtcctccagatttatcactagtatatttcycccattcttctactctttctcctctgccttctacaactctaagactagtggctttatttacattttacagtggacaagaggaacttaataaggagaaatggtcccttcactgaagttaccatagttgggtccagagttctcatctcgtgttcatacatcacctccacactaaatagtatctttaaatgtgtagcaattttc

SEQ ID NO: 339467 - DNA, 653 bp, Homo sapiens
tggattagagaatatgcgttggatttaaggccaaatggactttctacaattttacttcctaaactaaaccctctcagagatacagctctcatccctgcagggacagagtctttccaggaaacttacataaagaaaaaggtgaggaaaggagattctagggagaggagctacaaggttttatctctgctcaatagaaaagtaagggacaatgaaggccagtctcactatctaaccatgcagctaaatgattataagtaatgggtgaaagggggactgaaagtgttattctggagaaagctacctgtgagaacaaaagggtgtgcatttcttctcaaagcaatcatttaatcctatttttaaaaacctgatgaaaaaaatcatagttacttagtttgaatcagttgttttcagcttcaatcagtgagggcctgaggtagatgtactatacaggacaaatttcactgccagaaacaaccttcgttggaactgggggcaggacrccaaagaaaagcaaaagtttgagctcactagaccccttcaaaatgtctaatacatgcctctactacccgcaaatgaataaaacacttctttggtcacttggtgtattcatataatttgttacttatagaaaaaatgcaaatataatacaacaa

SEQ ID NO: 339468 - DNA, 445 bp, Homo sapiens
gaaaatcaaaattatatcaagtatctcagaccacagtggaataaaactggaaatcaactccaaaaacaaccctcaatagtacacaaacacatgaaaattatataatgtgcccttgaatgatttttaggttaacaatgaaatcaagatggaaattatctatttttttgaagagaaaataagatgcgcagaaacaagaaggtatgagagagcattgtgttatacctagtgcattttattttcatttttagttgagtaattgcaggatgacccatctcatatagctggttttagcgctgggtagcrtgactttctgagacacctgagaaatttcttctgttctacttccactgcactgcatttatgtatctatataaagcaagctgtattatcctgaagagtctgaatgtgatattggtgctggaatgtactgcgtcctgcaccatat

SEQ ID NO: 339469 - DNA, 530 bp, Homo sapiens
cttatgcaagcactatagactttcatttgtttgaatttttacgtttaacatggtcaattaataaaaatatgcataattaacaaagtaatgtagtgatttgtttggcagaagaaagaatcccttgaggacaaatcaagcctcatcttgtaattattcattcaacctgatgaaatccgtagagtagcctcttttctttttgcttacatagttctttaagctgttcctcacagtcggataaagtttttaaagcagttcagctcttcattttatctcaagtgccttctcattaatacycacagagggacaagacagtaatgttaaaacacccagaaagaagaataagttcaagagacaattacatccacaacatctcctctttactagtgactttatttcacaaaattatagttttggaagagcactagaggatatcttgttaagccttaaaaatctgtcataagtggtctctatatcctctctaaaaatctccattaagcaaaaaggaatgtcttttctcccaagatgactca

SEQ ID NO: 339470 - DNA, 482 bp, Homo sapiens
attcaaatttttgtgcaaccaatgccaacatccatctctagaaacttttaatcatcccaaactgaaactctatactcattaaacaataactccccattccccccttccccaatgcctgatgccctctmctctactttctgactctatgaatttgctgattttaggtaggtcctgtcagttggattacataatgtttgtttttttatatctggcttatttcacttagtataatgcttttatccatgttatagcatgcagcagaatttccttcatttttaaggcagaattttatatatatatatatatatatatatatatataacaatatataacaaatatatatacaacaaatatataacaaatatatgtacaatacataacaaatatatatactatatataaacatatatatgtatatatatatatatatatatatatatatatatatacacatatatataacattttgtttatccattcat

SEQ ID NO: 339471 - DNA, 545 bp, Homo sapiens
aatacacaatgcaccaaaacatactgaatgcagcaaaagcagtactaagagtaaagtttagtttatagtaatgaatgcctatgttaaaagtaagagagcgttcaaataaataactacatttcaagggaatagaaaagatgaagaaactcaacccaaaattattagaaagaatgaaataataaatattagaagaaataaatgaaacagaggctagaaaaacaaataagaaaaaccaacaaacctgtttakttttcaaaaagatacacaaaattgtactgacagaatattagctagactaaaaaaaaagggaaagagtcaaataaaattagatatgaaagaggggacttaacaacagaaatacaaaggatcataagggactacatgagtgaattggacaacctagaaaaaacaaatttctagaaacttacaacctaccaagactgaatcaaaaagaaagaaaagcaataatgaacaataatcagtaaggtgattgaagaagtaataattataataaagaaaagctaagaactaaatggcttcactgc

SEQ ID NO: 339472 - DNA, 474 bp, Homo sapiens
tctttgctgtagttgtctctggctttctctctctttgtctttgtgtgtgtgcattgtgtgtgtgcttgaatagccaaatgtctatctttttttctatgatctctgagttttgtttctttctaaagaaagacctgtgattctacaaataatctaaattatctcctagttcagtcataatttgggtccacttatagattattaaaacaactggaatttattttagaaaacatttttattttcttctaagccattgtctactgttattatgattttcctgaggtccagatatcataaagaaaagaaagaaagtttgcctgtartgagacgacatatatgtacaggcatatctgacaaatggtggggaatatgaagtgactgtatgaaaggcagattgccaaaaggtatgacaaaataccttgagagacaatcaccagaatgagagttcacatgtagtgagtgcttgttttgtacgag

SEQ ID NO: 339473 - DNA, 596 bp, Homo sapiens
actacaggcgggtaccaccacacccagctaattttttgtatttttagtaaagacagggtttcaccgtgttagccatgatggtctcaatcttctgaccttgtgatctgcctgcctyggcttcccaaagtgctgggattgcaggcatgacccactgtgcctggccaaaattatatttattttatagaagccaagtttatatattcaaggactttgttttgactgttatatatcttgaaaattgagtaaaacataaccatttgagagagtcatcatatcaatgtaatactgaggtaatactctgtatctggtcttgactctggtgcccagtttagtcacctattcacattcctctttctaaaaaaaaaaaaaaagtccattttattcaattaaagatatttgataaggttttagggttaaataggttaagtttaaattatttctctgccacacatgtctgggttaacacttaatctaataactttggtctcaattttctttctataaaaaggagagtcttcacacaacacaatccccttgaaattttaatgttaaatattctgtagaatagaagcattttgtaatatggttattagaaa

SEQ ID NO: 339474 - DNA, 521 bp, Homo sapiens
acacacacagaggaatattatttagcctttaaaaaaagggggtccttccatttgcaatgacttggatgaaactggagaatcatatgctaagcaaaacaagaaatgcatggaaaaacaaatactacatgatcttactgatatgtggaatcaaaaaatgttgcaactggggctctctcacctgtgctgartaagaagaaactcagatttaactccaataagaaaactgaagtcacagggctgacggatcctctttatgctgccaaggagtggggacaataagagagatggtagctgaattaagaattaagagaagtagtgtctgaggtagccttaattcccaccactgaggctggcaaagacactggtgtttctggtggatgaagaacatgtcagtttatgtggttcgggttaaaccatcttgaaggcatccctacaaagctgcacatcagagtttgaggcttaggcggaggagtctgtgggtggagggccagataatacactatgggttagtgtagggcaga

SEQ ID NO: 339475 - DNA, 521 bp, Homo sapiens
acacacacagaggaatattatttagcctttaaaaaaagggggtccttccatttgcaatgacttggatgaaactggagaatcatatgctaagcaaaacaagaaatgcatggaaaaacaaatactacatgatcttactgatatgtggaatcaaaaaatgttgcaactggggctctctcacctgtgctgaataagaagaaactcagatttaactccaataagaaaactgaagtcacagggctgacggatcctctttatgctgccaaggagtggggacaataagagagatggtagctgaattaagaattaagagaagtagtgtctgaggtagccttaattcccaccactgaggctggcaaagacactggtgtttctggtggatgaagaacatgtcagtttaygtggttcgggttaaaccatcttgaaggcatccctacaaagctgcacatcagagtttgaggcttaggcggaggagtctgtgggtggagggccagataatacactatgggttagtgtagggcaga

SEQ ID NO: 339476 - DNA, 552 bp, Homo sapiens
tctgtgggttgtctgtttactctgctgattgtttcttttgctgtgaagaacctttttagtttaagtcccatctatttgtttttgttgcatttgctttgggttcttggtcataaagtctttgcctaagccaatgtctagaagggtttttccactgttgtcttctaaaatttttagaattctaraagctctggtgaattttgaaacacattataacattcatgcttcttcatgccaatttttctacctttagttagaaaaatcccaaaactatttacatatatataccaaatgatgcataaacatttaaaccaccaaccagatggtggtttagaattttagaaattttagaattcaggtattagacttaagactttgatgcatcttgagttgttttttgtataaggtgagagatgaggatccagtttcattcttctatacgtggcttgccaattatcccagcaccatttgttgaatagggtgtcctctcccaactttatgtttttgtttgctttggcaaaaatcagttgacccttagtatttggctttatttct

SEQ ID NO: 339477 - DNA, 588 bp, Homo sapiens
atttgaaggtgattttcaatgaacaagcacttgtttccgttttgatgactatcaaatgaagtcatcaaatggttgaagatgggttaatttccataaatgattatcatcaatgcaggtggcagagccagcctatgccacaggcaacgttgaattcctgcctgaattgagatattcatcactgtgttctgcctgttcatgtctctgtcaacaaatgaaggtcatgatartccctccaatttgtactaacagaaaatgtgcatacaacaagcaatctgaaagataaatatgaaatgtgaggaagcacgtcaggtgcactattgcaggattgaaatctaattctgccacttttatctctggttaatttatggaaaagagagtgaagggaaggaaggtggttggagactctcttttattgaatacttactatggccagattccttaaataataatttcacatatattttcttactaattcatcacaacatcccttaaataaggcaatattttttataatgcaagtgttttttatttcaatagttttgggggtacaggtggttttcagttacatagataagctgtttagtggtg

SEQ ID NO: 339478 - DNA, 588 bp, Homo sapiens
atttgaaggtgattttcaatgaacaagcacttgtttccgttttgatgactatcaaatgaagtcatcaaatggttgaagatgggttaatttccataaatgattatcatcaatgcaggtggcagagccagcctatgccacaggcaacgttgaattcctgcctgaattgagatattcatcactgtgttctgcctgttcatgtctctgtcaacaaatgaaggtcatgataatccctccaatttgtactaacagaaaatgtgcatacaacaagcaatctgaaagataaataygaaatgtgaggaagcacgtcaggtgcactattgcaggattgaaatctaattctgccacttttatctctggttaatttatggaaaagagagtgaagggaaggaaggtggttggagactctcttttattgaatacttactatggccagattccttaaataataatttcacatatattttcttactaattcatcacaacatcccttaaataaggcaatattttttataatgcaagtgttttttatttcaatagttttgggggtacaggtggttttcagttacatagataagctgtttagtggtg

SEQ ID NO: 339479 - DNA, 588 bp, Homo sapiens
atttgaaggtgattttcaatgaacaagcacttgtttccgttttgatgactatcaaatgaagtcatcaaatggttgaagatgggttaatttccataaatgattatcatcaatgcaggtggcagagccagcctatgccacaggcaacgttgaattcctgcctgaattgagatattcatcactgtgttctgcctgttcatgtctctgtcaacaaatgaaggtcatgataatccctccaatttgtactaacagaaaatgtgcatacaacaagcaatctgaaagataaatatgaaatgtgaggaagcacgtcaggtgcactattgcaggatygaaatctaattctgccacttttatctctggttaatttatggaaaagagagtgaagggaaggaaggtggttggagactctcttttattgaatacttactatggccagattccttaaataataatttcacatatattttcttactaattcatcacaacatcccttaaataaggcaatattttttataatgcaagtgttttttatttcaatagttttgggggtacaggtggttttcagttacatagataagctgtttagtggtg

SEQ ID NO: 339480 - DNA, 576 bp, Homo sapiens
actatattgctggctggagatcattcattcattcattcgttaagcatttaatcagtcagtatgtgaaaggtactctgttataccttgaatcccgatctaaaagcactctccctgtcatccctactgccatcaacatgccagggacagggactaacctgggagccttgcacaaaagctgcacaaaatctgcacaaaagctgcttagcaaagcctagggttgctttgctgattcccaggaatttagagaacaaggtgacaagatgttggtgtttggtgtatctcctttaaaaaatcatatcaataaagggttttattaattttccatgtcaccaatcatttttctcccaaacataccttgaaagcagrtggactttatctctctctacagagtggaacctcaagtatagatatgcattggtctgctcaggatcatccagcgagttactgacagatttggggatgccaagcaccagtaaagaaaggaatgtcctctccttttatgacaccttccttcaccttcccagtcagtcctgatctctctcaccacctctctcttacagaactcactctccaggc

SEQ ID NO: 339481 - DNA, 569 bp, Homo sapiens
taccaatttcttcttttctttcacaggtgaacacgctcatttacctgatgtaataggccgaatgagagagtagggtctccacttacaacatggcaaaagtgcttcaacccatctcatttatattcactcgataaaagccacacatttgcattctcctgtttttgacatttgttttaactaatcagggggaacattagataaaatatctaaataattgcatagacaaacatatttacagctagagattgaaactgttaagatgctggcaggcaacatcaaaattttgaaagttcctattggctcttgtaagaaagcccaaatttgacccacaaaagatagtttaggggtatcaactacaatgtgcagaagtgagagattgcaaaagctgggactcactgatgctgttygcccaacattcaggctcatgtcctgatgcctcggtaattccactgcagaagcgaagtggaagcagctcaagatctcacacatggtagttctgggttttcacagaactgagaaataatacttaaaatggtgcttcacttgtattgtttcaactacataagggg

SEQ ID NO: 339482 - DNA, 567 bp, Homo sapiens
aacttcacacttacttactggtcaaaaatattaaagttcttaaaacttattgtttctgcaatgcttaaacaattgtaatacacttcctttgatcattagtttcatgtaattttattttgtctccttcaggacattgtaaacctcttcatgagaggaaagccatgtcatagtcctcctttgtatgtcctgcatcatctagaacgataccttctatagtgcatactcaattatttcttcatttcttggtacttggtcaactcatcatagaaactwtttaatatagttggcttgatttgtactttgttttttaggtacaaatcccaaatcgtgttagtactatattgggtattttttgctaaatttctacagacataagctccccaaggacaaggatatgtttcatgtatctgtgtctctgctcttcatacagcatggaccccagaggagccactgacacagaaccaattgttggcttctgaactagatatacaggcacagagcccaaaagtgaagaagttgcctaccaagcctataggtatgcccactgaccagcacaagctacaccaa

SEQ ID NO: 339483 - DNA, 567 bp, Homo sapiens
aacttcacacttacttactggtcaaaaatattaaagttcttaaaacttattgtttctgcaatgcttaaacaattgtaatacacttcctttgatcattagtttcatgtaattttattttgtctccttcaggacattgtaaacctcttcatgagaggaaagccatgtcatagtcctcctttgtatgtcctgcatcatctagaacgataccttctatagtgcatactcaattatttcttcatttcttggtacttggtcaactcatcatagaaactatttaatatagttggcttgatttgtactttgttttttaggtacaaatcccaaatcgtgttagtactatattrggtattttttgctaaatttctacagacataagctccccaaggacaaggatatgtttcatgtatctgtgtctctgctcttcatacagcatggaccccagaggagccactgacacagaaccaattgttggcttctgaactagatatacaggcacagagcccaaaagtgaagaagttgcctaccaagcctataggtatgcccactgaccagcacaagctacaccaa

SEQ ID NO: 339484 - DNA, 567 bp, Homo sapiens
aacttcacacttacttactggtcaaaaatattaaagttcttaaaacttattgtttctgcaatgcttaaacaattgtaatacacttcctttgatcattagtttcatgtaattttattttgtctccttcaggacattgtaaacctcttcatgagaggaaagccatgtcatagtcctcctttgtatgtcctgcatcatctagaacgataccttctatagtgcatactcaattatttcttcatttcttggtacttggtcaactcatcatagaaactatttaatatagttggcttgatttgtactttgttttttaggtacaaatcccaaatcgtgttagtactatattgggtattttttgctaaatttctacagacataagctccccaaggacaaggatatgtttcatgtatctgtgtctctgctcttcatacagcatggaccccagaggagccactgacacagaaccaattgttggcttctgaactagatatacaggcacagagcccaaaagtgaagaarttgcctaccaagcctataggtatgcccactgaccagcacaagctacaccaa

SEQ ID NO: 339485 - DNA, 577 bp, Homo sapiens
tcatcttgaaaaacctttactttaagataagaaattgactcttctttcatccccttgactcaatttgtccataaatccacttgtcacatcctccttcaaaatgtctaccacatttcctcctgcctctccatccagatgaaccccacacccagtgcatgctcacttactyattctgggattgttgaaagaacctttgaagaaggttctccccctcccacattttgagccatcttgtgcacaactgacagaagaatctctaagcaagtacttttaacaagtcatcccaaccgtcccaaagaagtctttacaatttccaattggcttcatttctttaaagccaagctcccatactaccactgtggccttctagagctcagtcatctgggccatcctcttagcccaactcttcccacactcccagacacacgtaccatgccccaggcacctcctggtgtcagaaaatatggcggtgcttactccttcctctggccttctgcttacattccaagactctacctgggtgtcccccagcttgcctctgctcactaaaaacctagtcctttttcacagcaccacc

SEQ ID NO: 339486 - DNA, 510 bp, Homo sapiens
tttgtttcaggctggcatggtaagcttatttctcttgaaattcagtcaacctaagactaaaccagccagcctggggctcagagactaatcaaggtgaagctcaggaatcctgtttgagtctcctaggaggggactttcccctttcccagatttagacaaggaagcaggkggctccagtcatggctctctactcttttgctgtcaagataggaaccacctgaaaatgaactgagaatgatacccaatcctcacacaaaaaaagagagtggaggaaaccttagacaaagaaagtcagagccctgcctgagccatatactgaagctgtacttctaagaatgtgcagcaatttatctctgtattgtttaggaacacttaagctgagttttctttttcttgaaagtaaaagaattctaactggcaccctgaattttctagagcacttgaagaatgtagtaggcaacatctagcactaagtcactagtgtccactcagtaaatagtgttgcatcgt

SEQ ID NO: 339487 - DNA, 583 bp, Homo sapiens
ccccctcagcctcctaggagtagctgagaccacaggcacatgccactatgcccagctaattttttaattttctgtagagatggggtctcacttatgatgttgcctaggctggtctcaagaaatcctcttgcctcggcctcccaaagtgctgagattacaggcatgagccaacacacagggccagtaaatgaaatttaataccatgataatatgccaatggtttaatatgccattttaaacccaccaggttagccaaaattaagaggtctgataacaccaagtgttagcaaagayaggaatcaaagagagctctttcatatacctggaagaactggaaattggtacaatgaattttagaaaataatctgacatcttgttagggctgaaaatgtacataacttacaacccagcaattctaatccttagtataaccttgaatcagccagagtcctaccagaaaatctgcaaacacctaagtatttgtgacataggttaatgaatgaaggaaactgtgatgtgatgaaacacctgagaaaccaaacaggttaatgaagcaatggaaacattagcaacagcaggcagc

SEQ ID NO: 339488 - DNA, 515 bp, Homo sapiens
ctagtacttggggaggccaaggtgggaggatcacttgagggctggagttcaaaaccagcctgggcaatatagtgagactctgtctctatgagagacacctgtctctctctagagagagagcaaggtgtggaggcatggtggtgcatgcctctagtcccagctactcaggaagctgaggcaagaggattgcttgagcccaggaggtcaaggctgcagtgagctatgatcacgccactgcactctagcctgggaaacagagcaagactctatytccaaatccataataaaccacaagacccatggttttcagtgtagttgccccgacagcagcagctgcatcatctgagaacttgatagaaatccagattctccaactcacctcagacctactgaatcagaaactctagaggtggggcccagtaatctgtctcagcaaaccctccaagtgattctgattcattctaaagtttgaagacattgcactgtacagatgaattgctttttgtaagatttct

SEQ ID NO: 339489 - DNA, 516 bp, Homo sapiens
accccatctctattaaaaaattagctgggcatagtggaacatacctgtagtcccatctatttgggaggctgagcacaccactgcactccagcctgagtgacagagcaagactgtctctaaaaaaactagaacaaataaataaataaaatagaacactaaactcaacaaccacagaatatacattgttttctaaccacgctgaaattaaattagaaatcaataacaaaaagatatctattacagccccccaaatatttgaaaattaaacaacacattttcaaataacctgtgcatcaaagaaatcacttttcgtctgacatctcagcaaggctgcagcgattgccgctgctctgcaagcttcacaatgccatccraggacaacaagaggaaagaccccgggaagttggccaaaaaagacaaaaacccagtgaacaaatccaggggcaaagccaaaaaggagtggtccaaaggcaaaatttgggataagctcaataaccaagtcttgtttgacaatgc

SEQ ID NO: 339490 - DNA, 614 bp, Homo sapiens
taaattattcacgggctttaaaaaaagtttactatctcaaaattctaaacattttcattaattaagaattcccattaggttagaatacagccaattaatgttttactactgtaatacaattctcccatataactagttgatacattgcaagtttcttgtgaagctattttttaaatatcctaatacattaaaagagactaacatttacaaagtactatgttcctggtattataccaggaattttacataacttttcrcacctgatccatgcaacaatgatatcaggtacattctagtcccatttaacaaaaaacgaagaagcaaaacacattgtgagcccacccagatatattaagaaatcagctcaagaacaaacagctagtaagtagatccacctgactccaagtggaaagactccctgctgtctccataatgatcgatggtggcagtcttgttgagccacatggcctagatttgaatcccatctctgatgcaaactatgtgatcttggccaagtcacctaatttttctcagcttcaatttcttcatctgccaaatggggataaagcagcatatacacctactaggtaagcactcagtaaattttagctatt

SEQ ID NO: 339491 - DNA, 614 bp, Homo sapiens
taaattattcacgggctttaaaaaaagtttactatctcaaaattctaaacattttcattaattaagaattcccattaggttagaatacagccaattaatgttttactactgtaatacaattctcccatataactagttgatacattgcaagtttcttgtgaagctattttttaaatatcctaatacattaaaagagactaacatttacaaagtactatgttcctggtattataccaggaattttacataacttttcgcacctgatccatgcaacaatgatatcaggtacattctagtcccatttaacaaaaaacgaagaagcaaaacacattgtgagcccacccagatatattaagaaatcagctcaagaacaaacagctagtaagtagatccacctgactccaagtggaaagactccctgctgtctccataatgatcgatggtggcagtcttgttgagccacatggcctagatttgaatcccatctctgatgcaaactatgtgatcttggccaagtcacctaatttttctcagcttcaatttcttcatctgccaaatggggataaagcagyatatacacctactaggtaagcactcagtaaattttagctatt

SEQ ID NO: 339492 - DNA, 580 bp, Homo sapiens
tcctatgatgtctccaatgctattttccatccttctttctgcttgcctccttagtaatacaaaagttacatttctaggaaaagttgaggagggaaaaagtcaacactcatcactccttacagcaatagtccttggctagtcagtgtcctggcctggctaaagacctaggaccagggatgaattagtaatgatcttccacacacacttttatgaaattatttttggtggagggaactgaaaattgtgacaaaattataatgaaggaaatcttgctttgcagtagatcaatagaatatttcaagcaaatagtaaaaaatgtataattggaggatatactcctacagccttgtgataggccctggtactttcttcctaatatccatttttcccttcttccttatgagcmaagttctgattttgttcagggtggcacttagaccatctaaaaacacttatcttcctagacttgcatatgaccccacagcatagttgtagataatgagaagtaagaaaagtctactggatagtactgccatgaaagctattcttttcaaaattaaaaaacaacagtcttggttgg

SEQ ID NO: 339493 - DNA, 452 bp, Homo sapiens
aagacatagaaggtcattatataatgataaagaggtcaattcagtaaaaggatataacaattgtaaatatatatgcatccaatgctggagaactcagatatataagccaaatattattagagctaaagaaagagatcaacmccaatacaacaatagctggagattctaacacccaactgtcaacactggacagatcatccaggcagaaaatgaacaaggaaacattggacttaatctgcactatagaccaaattgacctaatagatatttatagaactttttatccaatggctgcagaatacacattattctcctcagcatatggataattcttaagaacagaccatatgttagtccacaaaacaagtcttaaaacattccaaaaattgaaattatatcaagtatcttctctgaccacaatggaataaaattagaaatcaataaaaaggaat

SEQ ID NO: 339494 - DNA, 452 bp, Homo sapiens
aagacatagaaggtcattatataatgataaagaggtcaattcagtaaaaggatataacaattgtaaatatatatgcatccaatgctggagaactcagatatataagccaaatattattagagctaaagaaagagatcaaccccaatacaacaatagctggagattctaacacccaactgtcaacactggacagatcatccaggcagaaaatgaacaaggaaacattggacttaatctgcactatagaccaaattgacctaatagatatttatagaactttttatccaatggytgcagaatacacattattctcctcagcatatggataattcttaagaacagaccatatgttagtccacaaaacaagtcttaaaacattccaaaaattgaaattatatcaagtatcttctctgaccacaatggaataaaattagaaatcaataaaaaggaat

SEQ ID NO: 339495 - DNA, 513 bp, Homo sapiens
gcaaggaaaggagaattttcacctccaagaaagttaaaaatgttaaataatagattatctgatagatgcatgtagaaaattgaactgagtggaatttatagaactatgacaagatgtgggaatatttatcaggagattccagaaagttaaaaagtgaaaataaatgaggtattagttttagaaaagcgagttgttcaagaaggaaataaaataatacattcttaactcaggaatgagtgttattaaggcagtatactaaaaayagtaagcatggacttcactatagtttttttgtgctttgattatattgcaaggaaggagagatagcaagtggtgatagagatttaacattcttcatcttcccataataaacactgtctaaaagtagctagagagagcagtatatccatattgtttagatatatggaggtaaatatcagaagaaaaaagattaaaagctaaaagtgattcttctggagagatagagaaggctgttaagcagggaaaagttga

SEQ ID NO: 339496 - DNA, 581 bp, Homo sapiens
ccaacattgaaataaaagatgcacatatccattgactaagcaattctacttttaagaatttatcctgaaaatatacttacatgtgtacccaaaaacattttcaaggatatttattacattattgatagtagcaaggtagaagacaatctgtgggtaactgacartactacttaagtatccagcaatgttcttttggtttctcctttaacagcagaactcctgcattttagccaattacatagctagatttcccaaccatctttgtaagtgggaatggccatgtgatgactttctggccaacaggatatatgccagaacttctgggtgacatgtaataggagtagcatgcactgttcttcctgtttcctgctggctggcatatagctgaatgaagctgctatggccattttgtattcagagacagaagctgtgtaataaaggactgcagagttccctaccagctaccactttcctctcaactgtttaataaacagaaacaaatttgtttgtttaaagcaaaacatataggagggtatttttttatttccagaagcttaaactatactctaacacacaaccta

SEQ ID NO: 339497 - DNA, 609 bp, Homo sapiens
ggaagcagctttaaagctgggtagtaggcacaggttggaatagtttggagggctcagaagatgacaggaagacaaagaaagtttggaacttcttagagtctgtttaaatgattgtaaccaaaatgctaatagaaatatggagagtgaatgctggactgatgaagtctcagatggaaatgaggaacttactgggaactggagcraagattgctcttgtaatgccctagcaatgaacatcgctgcatttgccaatgccctatgactttgcagaagactgaacttgagtgatgacttagggtatctggtggaagaatttctaagcagcaaagcatgcaagatttggtgtgctagcttctcatggccagtgatcagatatgggagcacagaaagaacttacagttggaacttatcattaaaagggaagtagagcataacaatttgggtaatctataccctggccatgtggtagagaaggaaagagcatttccaggtgaggaatttgagcaagcaaccattgctagagatattagcatgaataaatgggagtcatgtcctaatagccaagacgattttaaaaaaggtctcaaggcattacagaaatatctgagg

SEQ ID NO: 339498 - DNA, 609 bp, Homo sapiens
ggaagcagctttaaagctgggtagtaggcacaggttggaatagtttggagggctcagaagatgacaggaagacaaagaaagtttggaacttcttagagtctgtttaaatgattgtaaccaaaatgctaatagaaatatggagagtgaatgctggactgatgaagtctcagatggaaatgaggaacttactgggaactggagcaaagattgctcttgtaatgccctagcaatgaacatcgctgcatttgccaatgccctatgactttgcagaagactgaacttgagtgatgacttagggtatctggtggaagaatttctaagcagcaaagcatgcaagatttggtgtgctagcttctcatggccagtgatcagatatgggagcacagaaagaacttacagttggaacttatcattaaaagggaagtagagcataacaatttgggtaatctayaccctggccatgtggtagagaaggaaagagcatttccaggtgaggaatttgagcaagcaaccattgctagagatattagcatgaataaatgggagtcatgtcctaatagccaagacgattttaaaaaaggtctcaaggcattacagaaatatctgagg

SEQ ID NO: 339499 - DNA, 583 bp, Homo sapiens
ttgtcaggatcataaaagattaaatatgtgaaagaattttgcacagtgcagtagactttgcaaatatattatatctcattaattgatgctgtttatttgttatgatttttgaagacttaggtgatattgttattcatttccaagtcaataataatgtccccaaatatctttaaataacattttctgctgtcatttaaaaataccatcgcaaaaatgacactctagactacttcaatcagaatctctggatgggggttgtcaagcatttgcatttttaagaagctcccccacccccacattctgactcacatccaatactgagaaaaagacaaaaggcattattttaaaartaaggttagttggacattataaacatcttcatcaacacatcccacctcaacttccatcagttggtggcattttcactgttcccgatttaacgaagtagctcatatttttctttctcaaactacatgtatcaccttttggggagtaccttactgtctttgacatacatttgatgcataatactaaactaacacattgattctgtatatatgtcacaatcaagaataaagtacta

SEQ ID NO: 339500 - DNA, 604 bp, Homo sapiens
ttatctgcagggaaaacattctaagcagaggggacattaggagcaaaggccatgaggtagaggcatgcttggcagttttgaagaagagcagggctgcgtggatggagcagagtaggcagagaagataatgcagtctcagagctgagtgggagccagctgatgagtgttaggcctttattggagatgttgtctggaaattraggagaatggagagtgagccatgtaaaccattcttcagaacaagcattgcctgtgaaccaggcaaaataatttactcaagtgctaacttaaaaaaaaaaaaagtgtcaaagagaaatgtgcttggaagaatgtgcagttggaatgctaactgctgcaaccatctctgaggagaacagggaaccctccagcctttccagttaatcatggatcgttatctacagtctgtttcccttttcatcaaagtagtcagctcctgctgtcaggagaaaagaatatatatctatgattttacattcatagttaaaaaaaatcattctttctagaaaatattaactttttccaagggtctgatctagaagccatcagctgaatcccaggagtggatttcagctggctgatgaac

SEQ ID NO: 339501 - DNA, 620 bp, Homo sapiens
atgttgtactggatgttccaactagcaaaatatggcaagaagaaaaggtcatcttggaaggaaaagaagtaaaactcttttgtttgcagacaacataaatatctatgtagaaaatctagtggaaaaagctccttgaatgaagaagtgagtttagcaaagttatataataaaatatcaatatacaaaartccaattacgtttttgtatactagcaatgactatttggaaattgatataaaaagttaaagccatttaaaataacataaaaaatgtgcacttcggaataaagctgaaacaagtatgcataatttaaaccctgaaaactagatttcagttggctgataaaaactacaaaatattgctaaaggaaattaaagaagacctaaataaataggtaaatatactgtatttatgggttggaagactatttattaagatatcaatttatccatattaatctgtacggtcaacacaattccaagtcaaatttcagtagacttttttgtagaaattgacaaactgattctaaaatccatatggaaataaaaaatgatctaaaatgataaaatggttttgaaaaagataaacataagggaccaacactaacagattgtaaggct

SEQ ID NO: 339502 - DNA, 620 bp, Homo sapiens
atgttgtactggatgttccaactagcaaaatatggcaagaagaaaaggtcatcttggaaggaaaagaagtaaaactcttttgtttgcagacaacataaatatctatgtagaaaatctagtggaaaaagctccttgaatgaagaagtgagtttagcaaagttatataataaaatatcaatatacaaaagtccaattacgtttttgtatactagcaatgactatttggaaattgatataaaaagttaaagccatttaaaataacatmaaaaatgtgcacttcggaataaagctgaaacaagtatgcataatttaaaccctgaaaactagatttcagttggctgataaaaactacaaaatattgctaaaggaaattaaagaagacctaaataaataggtaaatatactgtatttatgggttggaagactatttattaagatatcaatttatccatattaatctgtacggtcaacacaattccaagtcaaatttcagtagacttttttgtagaaattgacaaactgattctaaaatccatatggaaataaaaaatgatctaaaatgataaaatggttttgaaaaagataaacataagggaccaacactaacagattgtaaggct

SEQ ID NO: 339503 - DNA, 620 bp, Homo sapiens
atgttgtactggatgttccaactagcaaaatatggcaagaagaaaaggtcatcttggaaggaaaagaagtaaaactcttttgtttgcagacaacataaatatctatgtagaaaatctagtggaaaaagctccttgaatgaagaagtgagtttagcaaagttatataataaaatatcaatatacaaaagtccaattacgtttttgtatactagcaatgactatttggaaattgatataaaaagttaaagccatttaaaataacataaaaaatgtgcacttcggaataaagctgaaacaagtatgcataatttaaaccctgaaaactagrtttcagttggctgataaaaactacaaaatattgctaaaggaaattaaagaagacctaaataaataggtaaatatactgtatttatgggttggaagactatttattaagatatcaatttatccatattaatctgtacggtcaacacaattccaagtcaaatttcagtagacttttttgtagaaattgacaaactgattctaaaatccatatggaaataaaaaatgatctaaaatgataaaatggttttgaaaaagataaacataagggaccaacactaacagattgtaaggct

SEQ ID NO: 339504 - DNA, 620 bp, Homo sapiens
atgttgtactggatgttccaactagcaaaatatggcaagaagaaaaggtcatcttggaaggaaaagaagtaaaactcttttgtttgcagacaacataaatatctatgtagaaaatctagtggaaaaagctccttgaatgaagaagtgagtttagcaaagttatataataaaatatcaatatacaaaagtccaattacgtttttgtatactagcaatgactatttggaaattgatataaaaagttaaagccatttaaaataacataaaaaatgtgcacttcggaataaagctgaaacaagtatgcataatttaaaccctgaaaactagatttcagttggctgataaaaactacaaaatattgctaaaggaaattaaagaagacctaaataaataggtaaatatactgtatttatgggttggaagactatttattaagatatcaatttatccatattaatctgtacrgtcaacacaattccaagtcaaatttcagtagacttttttgtagaaattgacaaactgattctaaaatccatatggaaataaaaaatgatctaaaatgataaaatggttttgaaaaagataaacataagggaccaacactaacagattgtaaggct

SEQ ID NO: 339505 - DNA, 572 bp, Homo sapiens
agtctctctgtcacccaggctggagtgcaatgatgccatctcagctcactgcaacttccccctcccgggttcaagcgattctcgcacctcaacctcccaagtagctgtgattacaggcacccgccatcatgtctagataatttttgtatttttgtagaaatggggtttcaccatgttggccaggctggtcttgaattcctgacctcaggagatccgcccgcctcagcctcccaaagtgctgggattacaggcatgagctaccacaccaaaagagtttttcttaacatagtctaaggtaaaccaaattaccttagaatatcagggacagctttagagtgatggtaaaaattaaaatctaaattaaaatccaaacctcacatacttgatacttccaacaaatggacacctatttgcagccagtgttgaaaattagagtaggctcttctgaaagaacatagccatgtccctccaaataacaattgagactattgatcaaaatttctagtcatttcagactrcagcacttgttttaatgacctgctgggcatccataatcacagtgcaggcactag

SEQ ID NO: 339506 - DNA, 621 bp, Homo sapiens
atcaagtttctaataatttaactgctcttagattagtacactatcaaaatagtcctttattgttgtcaaacctgctctgaactccttaaccagggcagtcactaggccagaaactaagcaaataataggggcttgcatacatcagcctyataccctgcatacagcatataaaaataaatgttagaaagtttaatttcaaacagtaacttgaacatggggtcaaatatttgaatatctttgaaattggatactcaaggtattctattagcaggggcttattttcacatgcattgtttcacatgcattgaaacatgcattgtttcaaatgacagcagcaaaccacagacgcttcagtcatttctctgtccctttctaccagctgtctccatatacctgggctttccacttaaacacgattttgatgtttgttttcgtgcggaggagacaaaaatccagatgtttccaatgcaaaagcttgttctcatctttattattaaaaatggtaaagcttcatttgtattttattaaaatgattggataactagtatttttaaaagaactgtagctgttttggctttagctattgagcttaagacagatgttgtgggttcaaattgtttg

SEQ ID NO: 339507 - DNA, 554 bp, Homo sapiens
tgcattgtttcacatgcattgaaacatgcattgtttcaaatgacagcagcaaaccacagacgcttcagtcatttctctgtccctttctaccagctgtctccatatacctgggctttccacttraacacgattttgatgtttgttttcgtgcggaggagacaaaaatccagatgtttccaatgcaaaagcttgttctcatctttattattaaaaatggtaaagcttcatttgtattttattaaaatgattggataactagtatttttaaaagaactgtagctgttttggctttagctattgagcttaagacagatgttgtgggttcaaattgtttgaacgttagtgaaagtacaactgttaaggaaaacagtattatgagtggcttctttatcttaactcatgaggccagtctgtttgtaaggttttctgtgcctgttcagaggtggaactatatcatatgtatgacatgctggtttgcttgtatgataactttcattgccaaactcctgaagtgttctatattggctacagtcagggtcagaatcaaggtcaga

SEQ ID NO: 339508 - DNA, 557 bp, Homo sapiens
aaaaataaatgttagaaagtttaatttcaaacagtaacttgaacatggggtcaaatatttgaatatctttgaaattggatactcaaggtattctattagcaggggcttattttcacatgcattgtttcacatgcattgaaacatgcattgtttcaaatgacagcagcaaaccacagacgcttcagtcatttctctgtccctttctaccagctgtctccatatacctgggctttccacttaaacacgattttgatgtttgttttcgtgcggaggagacaaaaatccagatgtttccaatgcaaaagcttgttctcatctttattattaaaaatggtaaagcttcatttgtattttattaaaatkattggataactagtatttttaaaagaactgtagctgttttggctttagctattgagcttaagacagatgttgtgggttcaaattgtttgaacgttagtgaaagtacaactgttaaggaaaacagtattatgagtggcttctttatcttaactcatgaggccagtctgtttgtaaggttttctgtgcctgttcag

SEQ ID NO: 339509 - DNA, 554 bp, Homo sapiens
tgcattgtttcacatgcattgaaacatgcattgtttcaaatgacagcagcaaaccacagacgcttcagtcatttctctgtccctttctaccagctgtctccatatacctgggctttccacttaaacacgattttgatgtttgttttcgtgcggaggagacaaaaatccagatgtttccaatgcaaaagcttgttctcatctttattattaaaaatggtaaagcttcatttgtattttattaaaatgattggataactagtatttttaaaagaactgtagctgttttggctttagctattgagcttaagacagatgttgtgggttcaaattgtttgaacgttagtgaaagtacractgttaaggaaaacagtattatgagtggcttctttatcttaactcatgaggccagtctgtttgtaaggttttctgtgcctgttcagaggtggaactatatcatatgtatgacatgctggtttgcttgtatgataactttcattgccaaactcctgaagtgttctatattggctacagtcagggtcagaatcaaggtcaga

SEQ ID NO: 339510 - DNA, 498 bp, Homo sapiens
caaacagttgaataatggactgatttccatcaagatgtttgtcattgaattgacaaagactcaatattaaagtaggagaargtgttgaagataagatgtcttatctagagacgaataaccttttttatctttaacaagctgtcttatctttactaccctgccttggaaactcaagagagtagcagccttgaatacacactgttatttcctccttcatggcctgagactgattcagagaggaaatgccccatcagaaggatggatgtagttcgggctaatgaggcagcaggtagacccatgaggagctgaccttgaatggatgaagaactttctattctggatcaattatcgtaattattctaactccatcctcaattgtacattggatgctaaagagagctagttagaattcttttagccacctccagttcatgagataaaaagagataggggtgaaggctttagttgattgacagtttttaatggtagttttgaggg

SEQ ID NO: 339511 - DNA, 591 bp, Homo sapiens
aattagagctggggaaggtgggaaaaactttaaaggagattctaatgtggttgtgctgaaagatggtagggcaatacttgattacattcacttccacaggcattgcttggtgtgattttggccccccaaaaagatttcagaagtgctttgtgttttacgtaggccttcaggctgagagtttcttttttcttcttttttttttctagccttctacacaaggacataaattttccagaatgttcattctgcctgtaaaataatgtgacacagttagccatatcagacaagtgcatcctgcccatcagtgaagggattctaaaacttaatgaatccttaagtccactaatgatgttggatgttcctgaggctattattccagattgcttctgacatttgtgtgttcatatcagagtaagtttgtatcattcttcagttyccccccagtgaatgttgagcctgcatagcagataagcataagtctatgggagcaacatgctgacagaaccccttagacccatgctctccaatgcattaactgttagccacagtgtgactttttacacttaaattaatacaaggtaggtaaaattt

SEQ ID NO: 339512 - DNA, 481 bp, Homo sapiens
tatatggaagtagattcagcattatttagaatagtgaaaaatcagaaactaataaattatgaacagcttacttaagtaaatattgtatattcatatgatagaatgggatgcaataaatatatttttagtcttaattatatagggaaatgttaacagtatatcttgggaaaaacatgtatagygttatgtgcctataaaatatatacagtgttatatcattttttcaaacaaagcatagacatatgcataaacatgtgggtgtggagacagaattatttaaagaaatgcaacaaaacaaaataacgtatctttggatggtgtaattacaagtggtttttattatcctctttatacttttctacattgtcaaaaatttctttaatgcaaatacagtttgcaaataaaaagactgaggggtaaatataaacagaagccaaaaatagatctgtggtaaacatttctgtcccttgccattatgaga

SEQ ID NO: 339513 - DNA, 554 bp, Homo sapiens
ttattgtaacctaagataattagataatagtaagataagaacttgttacatggaagctgtcactttcatcgttgtgtattgtttttactgggaggaattgtgagcgaggtgaaagagtgagtttggccacctttgattattctttatgactcttaaatttcatgatttaaaatgacctctgttcaaatctacagtgcttattctggctagataagtcatgattaacagattacaatttaatgagtgaatatttgttgtttgtaatagtgcacattgttgtgaagtgtatatcataatgtaaaatagaataattgatcaaaacctaaagaaaaatgggttaaaaacttgaagaaaaattgtatgraccataaatgatgtaagttgaggcatgctaacatagttcccctttagtgaacatagctgtgtagttcagatcaaaaggccatacaaaacaccccactgtccattttgtaagggcttatttgagtatctagatgacaataatgtcattagtcccagacccagaagtaccacctagaatttgatggcaggta

SEQ ID NO: 339514 - DNA, 600 bp, Homo sapiens
gcacttgctagagtagcggtgctgcctacaatctagactgacacagtagcaattmaaatgtcccttccaaaggggaaaaagtttgggtgttaacggagagaaggagaactagtagctgagagtaaagagatgaataaatgggttattaatttaggaaacccaatattaacaccttgaaagaggttcagaccactgtttggtatacttgtctcttaactcaagtattccaaatacctgaaagagtgaagttatatgtttgctgagaccacttctgtttttggatgctgccaagattgaaggggataaatgcttgaggggatggatactccattctccaggatgtgcttatttcacattacatgcctgtatcaaaacatctcatgtacctcataaatgtatacacctactatgtacccacaaaaattttaaaaattaaattagaaaaaaattatgggaaagttaaaaaagaaagattgaaggtaggcctgcaaacctgagtagcctcaccctgggagacattaatacaatataatggactggactagttattaatgactgaatgaggttctagtaatgtggcagcatcttttgagttgtata

SEQ ID NO: 339515 - DNA, 555 bp, Homo sapiens
caatacaccagtgatttgaaagcgtttgtaatcaatgagaatcaaaaaatgcagaatgttaatcctgcaaaggcctgtaaaggctgttcacaccccttctcccccatcttaaagaaggagaaacctggaacccagagagatgaagcagttggcctggtcacagtcccagtttacagtggagtcagaccttggcccatcccctgactttcaagtcctatatttaagcrcccacaccacacagcccttcaatcataaacccatatcagtcagaatggttgagggctgtcctcagtgcctgggcaccaaaactacaggcacgttacacttttacaaagttaacccgtcagaaagaataactgcaattgctttggtacacaccagttttctatgaaatcctttgagctcaaggaggtcaagcacatttctcttcaagtgatgtacccataagtctctcatgtatttgaaagatgtacaagagaccaaggttgagaagaaaatagaagttgcacaaaccagctcagaaaaactttttattttatcaatagttctttatct

SEQ ID NO: 339516 - DNA, 555 bp, Homo sapiens
caatacaccagtgatttgaaagcgtttgtaatcaatgagaatcaaaaaatgcagaatgttaatcctgcaaaggcctgtaaaggctgttcacaccccttctcccccatcttaaagaaggagaaacctggaacccagagagatgaagcagttggcctggtcacagtcccagtttacagtggagtcagaccttggcccatcccctgactttcaagtcctatatttaagcgcccacaccacacagcccwtcaatcataaacccatatcagtcagaatggttgagggctgtcctcagtgcctgggcaccaaaactacaggcacgttacacttttacaaagttaacccgtcagaaagaataactgcaattgctttggtacacaccagttttctatgaaatcctttgagctcaaggaggtcaagcacatttctcttcaagtgatgtacccataagtctctcatgtatttgaaagatgtacaagagaccaaggttgagaagaaaatagaagttgcacaaaccagctcagaaaaactttttattttatcaatagttctttatct

SEQ ID NO: 339517 - DNA, 628 bp, Homo sapiens
aatgaataaatgatgactgagtaaatgaatgaataatctatatgatgtctgacagttcacgaagtgctcttgtaatatattgcttcacttaaaagatgggggaaattattgygcttcactaagttaaaaattctttgcacatgacatcacccatggatcatggcaccacagtcctagggcacactgtgaggtatgatacccaggtgtgtgagggcatctgattgactgtccacaaaatcctgcctgtatcttgttcatgaaaggcccctatctctattggtagttaggacctaagaggtttgtggcctccaaatccacgtcacaacagagaatccatacagccctgcacagtgggtgaattttcatcctctggaatcggcctcttttcagtctaaatccacagacaccacttagcagctgtgtgactttaggcaaattacctaaactctctgaatctttctttccatatctgcagagtgctctcatgtcccaaattgccagggatagctcagaattatgcctcctgctctgatgtaatcattgacaagggctcctttcactctccaaagaattcaagtctagatgataaattatgtcaccactctacccgtgtgccctcatctctctt

SEQ ID NO: 339518 - DNA, 550 bp, Homo sapiens
gggctcctttcactctccaaagaattcaagtctagatgataaattatgtsaccactctacccgtgtgccctcatctctcttctaggattgctgttcagctgaaatgcgttaatgtggctttagttaggacaatttatatggcaagtatcataaaatgcaactaactaatgtaaacagtacaggaatcatgtggctcacatagctggaaataattattttgtgttcaaatccagggctagggagctcattttactagtattattatttgtagtaggcatagtactgttatcattattattattattattcctcttccttttgaaggctggtggcatcaaaggaacatgatacttggaaccagaagacttactaactgacactaaacttccttggacataagttcctttgtcacacacacattgccgcacttctgtaaggagcagatgagatcccataggtggaaatgctttgtaaatacaggagggtgaacaagggtaaaggactccgtcagcagctcataacaaaagatgcctttgtttcaagcatgctt

SEQ ID NO: 339519 - DNA, 550 bp, Homo sapiens
cctctcagccaggtcgattgcaggagtgacccttccccacttaatccatcttatcagtgttcatgcttgtggacttttaaagttctaatgaccacccagagcccatcacctgtaatttagtactttaaaacttggggcacattctacattctttgaggaatctcctatctttttctatattccaggtgctatcaatacatcagcattcatcatttctttgaaagaatgaggaccttataaaaagcctaagtccatataggaaaagatggctcataaatggttagtgaggaagcaagtacatggagcctgaatgtcacacacttcatcggtgcagtggccctggggactgaactcagagcacttgtaccttgaaaaagccccataaatatttagtgagctgataatygaggaatggctgatggagaacagaggcagtaaattctcctctaaggcatatgagaaatatttttcttggttgaaagaatttatgagtactgtgggggtagaggagatgaggagtgaaggactgagtacatgatttattatgata

SEQ ID NO: 339520 - DNA, 489 bp, Homo sapiens
cctttgtttcttaattcacaacctttttctcacttttgttattttgttcaggatattattcttgctgcttaaacatttctcaactttatgcagtaaaaaataaaaagtttccctttatggccaaagaggaaaacaaagttattcacygtgtctctagttgtttttcatcacacagtttttttgggatccagagcttaacattttgccagaaacagaagttggttattttatttataaaactctgttcacttagcactttagtaaatataaaaattaaatgtacaaaaatatttaaaagaagaatgtgagaaggctgatggagagaagaagagcaaagtcacagaagcacgactggccacacatatgccgtgactacaaattgtgaagcattattagagcatcaaggataaggatgtaagacggggctgggaaggttagcacagcacaaggcattgtaggtctctatataattgggttctatttaaggga

SEQ ID NO: 339521 - DNA, 659 bp, Homo sapiens
gactggccacacatatgccgtgactacaaattgtgaagcattattagagcatcaaggataaggatgtaagacggggctgggaaggttagcacagcacaaggcattgtaggtctctatataattgggttctatttaagggaaagaagaaaatrtgtgtcagaaagatcatcctgtctagacaggggagcctaggtgggtggggcaggcctgaaggttggcagaccaattaggaagttgttgctataacccagatgagagaaaattgtctttaactagggcacaaaatacagcagtaggtacagaggaaggaacaaattccagaaacatttagcaagtctagaagaagaggcattgtgtcagtctgttctcgcactgctataaagaaatatctgagactgggtaatatataaggaaaagagttttaattggctcacaattctgctggctgtacaggaagcataatggggaggcctcaggaattttccaatcatggtggaaggcaaagggggagcaggcatgtcacatggctaaagcagaagcaagagagtgaggtgggtcaggggggtggtgctacatgcttttaagtgaccagatctcacaagaactcactatcttgagcacagtaccaagaaggatgctgctaaaccattcatgagaaa

SEQ ID NO: 339522 - DNA, 659 bp, Homo sapiens
gactggccacacatatgccgtgactacaaattgtgaagcattattagagcatcaaggataaggatgtaagacggggctgggaaggttagcacagcacaaggcattgtaggtctctatataattgggttctatttaagggaaagaagaaaatgtgtgtcagaaagatcatcctgtctagacaggggagcctaggtgggtggggcaggcctgaaggttggcagaccaattaggaagttgttgctataacccagatgagagaaaattgtctttaactagggcacaaaatacagcagtaggtacagaggaaggaamaaattccagaaacatttagcaagtctagaagaagaggcattgtgtcagtctgttctcgcactgctataaagaaatatctgagactgggtaatatataaggaaaagagttttaattggctcacaattctgctggctgtacaggaagcataatggggaggcctcaggaattttccaatcatggtggaaggcaaagggggagcaggcatgtcacatggctaaagcagaagcaagagagtgaggtgggtcaggggggtggtgctacatgcttttaagtgaccagatctcacaagaactcactatcttgagcacagtaccaagaaggatgctgctaaaccattcatgagaaa

SEQ ID NO: 339523 - DNA, 592 bp, Homo sapiens
acgccaccaactgcttttaaatcaattttctttccacacagacagctctctgcatcatgtgatcaggagtcagggagccacaatcctcacaaatttctctctgctcttcaaaaagaaacaatattcatcaccataaaacaactactatcaggtcagttctgtgattgtctcccatctttgaaatatatagcaatgcaggcatttgaggaggcaagggtggatttccctactcaactgagaagaggtagtgcttggacactgtttccartgacactcctttatgccccaggtatttgtccgaagtctagttcgatatacgataagaaataagcttagaaaacaaacaaacaaaagaaataggcttagctcctaagatatccttaagtagtctttgtcacttcataactgattacttccttttatctccaattttaaagaacaagctgacaaattacagtaatcagagagaatttgagcataagtttgcttgagaatcttctaaattgatatttatgtaaagcctaaagcccgactcttgtagaaaagggtctatttcttagtatttagaaatatgtgtctgccatgactctga

SEQ ID NO: 339524 - DNA, 656 bp, Homo sapiens
tacacagcaactccctggaccttgttagaaatggcatcacctctggaatatcccacttaagaatcaccatttcccttcctttttgtttaaacagctatgttagtttaggaacactagctgctgcaacagacaaaacacaaaatcccagtgcaatatgaatttacttctcacaatataaattttatatttctcacaatataaacgtatttctcaacctcttaaaatttaaactgggtgctcctgattagtgggcagctctcatctaagcagcagttccaagatgcatgttccttctgtcttgcgactctaccatcttcgacatgtggcttccaagggccaaagaagggaaaggggatagagaattgcatatggaaattttcatgggtcaagcctagaattggcacacaacacttycatctatagtccaccagccagaactgagacacatgttcataacagacaggaaaaagaataaacagggtttagtgaatatctagcccgtctcttccactctattaacccacctaatcttcaattttcagccttattgagatatctgatccttttatccttttccttcctttcatctgctctctcctggttcctgtcctcctattccagcctattcctcgtgacgaagcacctgaactaccctc

SEQ ID NO: 339525 - DNA, 637 bp, Homo sapiens
  misc_feature (1)...(637): n = A,T,C or G
ctattttaaactgtctgaccctctcctttctgttgatataagcatctgctgttgccttggagaataagcacattgcttttggatatctgacctggcaggaaggatatcagatggaggagcttattttgctggccaggtttaattcagaggaaacccgcttggatgcttcaccttctctggcattgctgcttttactgacaattacaggatatccaaagcttcaaaatctacttataggtgataaacaatggtcacagaagggtggaggtagagagaatgraaattaaaatatagctttttatacattagtcattgagttcttccaacagtcccgggaagtaactaatgttgtctccactttacaactgaagaaactgagacttaagtggtttataaaaggtcacaaagctaaatacaggacagagtcaggcttgaattctaagactttntctgccatgtgacataagttaatatccttattgattgaatgaaagtgtgatgatttgtccttttctagatggtgactggggttctggggatcaactgagggtgcaagagataagtcaagagacccagtggacacatagccacactctgtccccagagcctaaagattcagtgccaaacctagtgacca

SEQ ID NO: 339526 - DNA, 637 bp, Homo sapiens
  misc_feature (1)...(637): n = A,T,C or G
ctattttaaactgtctgaccctctcctttctgttgatataagcatctgctgttgccttggagaataagcacattgcttttggatatctgacctggcaggaaggatatcagatggaggagcttattttgctggccaggtttaattcagaggaaacccgcttggatgcttcaccttctctggcattgctgcttttactgacaattacaggatatccaaagcttcaaaatctacttataggtgataaacaatggtcacagaagggtggaggtagagagaatggaaattaaaatatagctttttatacattagtcattgagttcttccaacagtcccgggaagtaactaatgttgtctccactttacaactgaagaaactgagacttaagtggtttataaaaggtcamaaagctaaatacaggacagagtcaggcttgaattctaagactttntctgccatgtgacataagttaatatccttattgattgaatgaaagtgtgatgatttgtccttttctagatggtgactggggttctggggatcaactgagggtgcaagagataagtcaagagacccagtggacacatagccacactctgtccccagagcctaaagattcagtgccaaacctagtgacca

SEQ ID NO: 339527 - DNA, 459 bp, Homo sapiens
atatatgtggcatatatatatatatatatatcatatatatatttatatatgaacacacacatataaacctgtatgtgtatactgtcagtggtattattaattagtacagccattttggaaaacagtatggagatttctcagaaaactaaaaatttatttattatatatgatccagcaatcccactactgagtgtatataccccaccccaaattgaaatagaagagatgtccgtacaccyatgttcattgcagaattattcgcttctgttggaaacaacctgtctatcaacaaacaaatgggtttttaaaatggggtatatatacccaatgcaatactattcagcctttaaaaatcagaaaatcctgtcatctgccataacacagatgaacctagaggtcattatgttaagtgaaatgagccagacatagacaaacactatatgatctcacttatatgtg

SEQ ID NO: 339528 - DNA, 510 bp, Homo sapiens
agagccagactccatctcaatatatctatgtgtrtatatatatatatatatatatatatatatatatatatatatatatggcgatgaataaaattgacattaaacagctatgaagttcttagcaccattggtctctgcaggaaaggtgaagatgtttttgtttaatttcaggaacttcaattaaaaaaaaaccaaaaagcctctggaaggactactactggctagggttgtctaggtaggaggtaggacaacataggagctctttaccacactcacatgtcctgctggactgagtcatccctcattaacatggttgattgacttgttacttgactcattcattcatgcatgcatacaacagttttgtatacctactatgtaccaggcactgaggacacaaagaacaagaagccttaagtcgtcttaccataggggttttcagggtaatgggggaagactaacatatggacagataagttgcactaaatttttgagttataacaaaagtgt

SEQ ID NO: 339529 - DNA, 595 bp, Homo sapiens
taaatgaccttttgcctttgaggagctcatactatagtggaacaattagatgagttcaataattaatttccattcatttaaaagctgtttctgaaataactatgtataaaataagtatccataaaacactgagataaatagaggtagtcaaacagtaggctcaagaaagacctccttggttaaatgtaatcagagctgagtctttaatattgaggaattaattggacaaagaagagaagacataagaaatagtgtttgaataggacacaaagaagagtgagcaagtaatttttgaaaaagaatgctcataataacaaaagtaatggctaacatttatttagccktcactatataccagttactaagataagcacctcacatgtttgcttttaatctgatactcagtataacctcagaaataggtagcagtagcttacccattgtgtagttcgtaatattgaagtccagatgaaaacacttgcccttgaacttttgtgaataagtagttgagctggaaacctaagtttctctggctccagagcctggataatggagaggtgcaataaagaaggttagggcagtaagcagaagcagg

SEQ ID NO: 339530 - DNA, 526 bp, Homo sapiens
tcaaggctcttactgacagcctaagaaataccccagaaagtctgcttcctacactggtcattatgtcatttaatattcttttaaaaaagtaaaacaactctcatttggcaaatgccttttagagttaacagatacagtagaaaggccataggttttgtgactagggacctggattggaatcctggctctccatacactagtgacactctgtcaagtggaggaatcttatttcttaatggagatagtaacaccttcttggaagggtgttataggaattgcagaattcactggatgtttacaatgtgcaatgcaccctgctagagctttataagcacctcactaaattcttacaacaaacttatgagccagggattattagccccaccccatctgctttccaagtgcacagataagggatcacctgtattgcattaggtaaattacctggaatctccctgctagttagrgagggaggggcaaaggtagtgtaggtgaaagctcctaggagttactgaatgggcgccaa

SEQ ID NO: 339531 - DNA, 560 bp, Homo sapiens
gaaaacaaaccaaacagtgagaagattagcatgtgtgtgtgtgtrtgtgtgtgtgtgcaaatctctttaatgtctggttttatagaagacaggtggatttgtatttctggttttgcatcgaattggttgtgatctgttgttttggttaatgtatacgaagaaaattgactttatacaaataagtcattagaaaaagaaggactcaacaaggacagcttttagaggttagttgccatgtagaatctgaaatatattaatgaaactttgcactgttatatttaaatccattggccaatcttgcatttgtgatggatcttttaccatgaatgatgtttttacattatgcattgatctcttggaaaatattggttcattgagttatacagacccttaaaataatacattgtattattcaatatataaagcaccatttttcagtattaccaacaacctcctcagaaaagtctctaaatattgggaagctctcaagctcaaagcggaaaatacaagtttctaatttttttcttgaaagctcaatattttgccattggcaatggtta

SEQ ID NO: 339532 - DNA, 619 bp, Homo sapiens
agcagcttcaagttttgtttagagcgtattcaaagtctcgagggggtttgctacctgttgttgaattgctaaacgactgggatgattgtattcgttaattaataacaggcaatatgaattctaggatggatgagaactattaacgacggttctacctcatcgtgcttctggttctgtgtggcgtgagagttgatgktcgcttgtacgtaaagtgttctaaagggaggccttccccaagaacccagtttttattagagcacttttcttgtgtcacctttattttcttcgtagtgtttaccacattttgaaattattcatttactgatttctcctacctttggaacggaagttccgccgagtcagtagttttcaaagttttgacttaatcctttgtttataacaaatgttttttttttttccaacttcccttttgtgtaaatattcaggaggactcccttaaagggtgtaatgaagcaggtagccgaaaaggctccccagcctctgaagttttcctatcaccctctttagttctgtactttctcctattgagaatcatagcactgaagcaggggctttgttcactgcagtgtatccgggaacgtggctgatacttattgcc

SEQ ID NO: 339533 - DNA, 619 bp, Homo sapiens
agcagcttcaagttttgtttagagcgtattcaaagtctcgagggggtttgctacctgttgttgaattgctaaacgactgggatgattgtattcgttaattaataacaggcaatatgaattctaggatggatgagaactattaacgacggttctacctcatcgtgcttctggttctgtgtggcgtgagagttgatggtcgcttgtacgtaaagtgttctaaagggaggccttccccaagaacccagtttttattagagcacttttcttgtgtcacctttattttcttcgtagtgtttaccacattttgaaattattcatttactkatttctcctacctttggaacggaagttccgccgagtcagtagttttcaaagttttgacttaatcctttgtttataacaaatgttttttttttttccaacttcccttttgtgtaaatattcaggaggactcccttaaagggtgtaatgaagcaggtagccgaaaaggctccccagcctctgaagttttcctatcaccctctttagttctgtactttctcctattgagaatcatagcactgaagcaggggctttgttcactgcagtgtatccgggaacgtggctgatacttattgcc

SEQ ID NO: 339534 - DNA, 619 bp, Homo sapiens
tattaaactacatgatgtggtttggctgtgtccccacccaaatctcatttgaattcccacgtgttgtgggaggtatctggtgggaggttattgaatcatgggggcaggtctttcccatgctgttttcatgacagtgaataagtctcasaagatctaatggatttttttaaaagggtagtttccctacacaatttctctctttgcctgctgccatccatgtcttaacttgacttgctcctccttgcattccaccatgattgtgatacttccccagccatctggaaccctaagtccattaaacctctttcttttgtaaattgcccagtctcaggtgtgtctttctgagagccatgagaatgggctaatacagtaaattggtaacagtagagtggggcattactgaaaagatacctgaaaatgtggaagtgactttggaactgggtaacaggcagaggttagaacagtttggagggctcagaagaagacaggaaaatgtgggaaagtttggaactccctagagacttgttgaatggctttgaccaaaatgctgattaataatatggacaatgaaatccaggctgaggtggccttagatggagatgaggaacttgttgggaac

SEQ ID NO: 339535 - DNA, 617 bp, Homo sapiens
gataagggcagacacataaaaaccaaagtgtagaatttaccatgaagatttgactttgaggcatttagtaaattgatataagcaatgaatttttaaaatttaaaaccttttgagctagtctcctaaataagttgcatgtgttaacatttactaatggcatmccctttctaaaaactcttgcagagttagtaagtcttattgtatttttgttttcagaaaagatgacccctacaatttataactgttcaaattaattaaaatgttgtctattatctagtgtgtaatagatttgtaactgtttctaaacacttagaagcatggcttattagttataaagtttgatgtatatgtgttacaccttaaaaattacatgattcatatctttttcttgaattagattttttccaggaggtctatagtaatgtaagtgtatgatgttaatatttccccagaaaatttgaacttacactaatttctcttgctatttctctattttataatggtgatgcagtggcatgtatagcacatataagttcaataatatcatattctaaataaattatatttatttatttcatatataaatgttcagtgttcactgctaaaaaataactttc

SEQ ID NO: 339536 - DNA, 582 bp, Homo sapiens
gatgtctatttttttttttttactaaatgattctaatctaaagttaattgaattatgcctaaaaacaaaattactatacacttcttgcctaccttttaaagtgtttctcctcttatacttctgctgaaatcttgaagtcagaagttagatattttaaagtcagtccattaattttaattccatcactggctcctctatatattggcattggaactacacacagaaaacgtawttgctttttaaatttagatttttttctgacaaagatctttgacatagctatgtatatttgctatatcccccctaatttagataataatttatatgcaggattaatagatttttcaatgcaagactattaatagttttaagcactttataagtgtaacatggaaaagatagtactttgatgggatataaagaggaatacaacatatcttcaaggggacacaatctcatggcatgactatatataaaataggaaagagggataatgtgttaaaattgtgctacaatgatcattttgttgacttcagaatcatgagattttaataacattctaacacgttatacagaaacaag

SEQ ID NO: 339537 - DNA, 656 bp, Homo sapiens
gtaaatgtttttctatgagattattagggatgatggagaagccactttatatttacttcttcattacaggactcacatatgctgtctatgagataaataacacaatatattgaacacagatttagagcatatttcacatcccaaaagatattgctccagtcctacaaggtattataatctatatggcattataatttggttttctaaaagctattccacctttctatctagccagctgcttcaggattatggagaatatggtaaaagcactgaattcatgaccatagccttatttttaaattcatttactgtgaattgaattccttggacataagcaatactgcatggagtactgcgatagtgaatattgtgtccagttacttcacggatgaaagtttcrgcagaatcattaagagcagagaacacaacaccgtatccagagtaaatgtctcttccattaaaaaatagttcttccccttctatgatgaaagcggtccaatgtaatcaaccttccaccaaatagctgactaatcatgctgaggaatagtgttcaatgttgttctataatgtaaacaaattaagtactctgcaagtgactgcatccaggtcagcgttggtgagtaaaagaccatgttactgatcccatgcctaacctt

SEQ ID NO: 339538 - DNA, 587 bp, Homo sapiens
aaatgataagtgaggttttttcaataattttgtaaactttatagtcacaatgatggtaaacttgtttttaatatttcttgaatgatgtaataaattaaccaatgggaaaaagtataaaaatggaaggttaggatgagaaaaaataggttaatatttccaactatttcgactatttcctccctattactgttaattgaaaatagttactattttactttcacttaattagaagttaaagataggctygtgctgttttgcatgtcatcagagcacttttgaatataattttttaaatcgttataatttacattaccatttgtagctgttggagaaattcttgtattaaatgattgaaggaaaaacagatgattcaaactctttaagatagagataagatatattcatggcctgaatgctattccctacttttatttctactgaaaaaaaattttatccttttcaaaatataaaaagagtacaggacccagctgaataattttatagtaagtattatattgctttaatatcaattgatctcatctctgaagaatatttgtctttttcacccattattttctcctttagtt

SEQ ID NO: 339539 - DNA, 587 bp, Homo sapiens
aaatgataagtgaggttttttcaataattttgtaaactttatagtcacaatgatggtaaacttgtttttaatatttcttgaatgatgtaataaattaaccaatgggaaaaagtataaaaatggaaggttaggatgagaaaaaataggttaatatttccaactatttcgactatttcctccctattactgttaattgaaaatagttactattttactttcacttaattagaagttaaagataggcttgtgctgttttgcatgtcatcagakcacttttgaatataattttttaaatcgttataatttacattaccatttgtagctgttggagaaattcttgtattaaatgattgaaggaaaaacagatgattcaaactctttaagatagagataagatatattcatggcctgaatgctattccctacttttatttctactgaaaaaaaattttatccttttcaaaatataaaaagagtacaggacccagctgaataattttatagtaagtattatattgctttaatatcaattgatctcatctctgaagaatatttgtctttttcacccattattttctcctttagtt

SEQ ID NO: 339540 - DNA, 602 bp, Homo sapiens
tcaaacattaggtacaccatatgacaagacacgtaacttcaagtaagcggaaactaaatatcatctaaaaacgttatttttttcccaaataaagtagattattcacccactcttagtaaattcccaaacaataataaatagtgctcaattgactctgtttaccttttccttttcaaaatgtattttttatttagcttctgttgtactcctgtcttggtttcctcttatctgtttgggctgctataaccgaataccacaggcaaggtggtttaagtgacggatatttatttatctcagttatggggactagaagtcygagatgaaggcagtaacatggtcagtgtctggtgagggctctcttcctggtttgcagatggctgccttctcactgtggcctcgcatattggagagagtgagccctggtgcgtcccctcttctataaggccactatctcaattgaattaggttcctaaccttatgactttatgtaacctttattacttcctcacaggccctgtctctaaatacagtcattttaggaattagggtgaaaaaatgtgaattctgtgggggatgcaattcagtccacagcagctttcaaa

SEQ ID NO: 339541 - DNA, 434 bp, Homo sapiens
catcagagtgtgtgaggaatccattgtcaaatgttgctgaaagatcaagctagggaaggactgmtggattaactgatgagaaatgttattgatgatcttactatgagtagtgtgcgcaaaggaatagaggatactgaaactattctgtatgatagtttaatggtaaatgtatgtcctgatacttgtcaaacccatagaatgtacagcacaaaaagtgaactctaatgtaaactatagactctggttactaatattaaatcaatattagatcattaattctaagaaatgtaccctcctaattcaaggtgttaataatgagagaaataggaaagaaagcatagaagaactgtactttctgctcagtttttctgcaaacctgaaactgctatacaaaatactctatgtgtatgtgtatttacacacacacacacaca

SEQ ID NO: 339542 - DNA, 539 bp, Homo sapiens
tgctgatagccagcgctcatgtgttaactacacatgctcagcatgaggattgcgctaggaagaacaaaaatattatacaaggaggcaaaaaagaactttttctcaagaggcttacagtctcgttagggagacaacatagctgtacatgaaaaayagaatatgaacaaaaaatatataatagtgtataatgagaaatgtaaagtgagaaaataaaatctgagaaaggttgttaaactttacataaaccctactaatagtgaatgcatgattactgcttgcaaagccgcttcacacaaattatttcattcaatatttcttaccttcctcacaaaaaactctaagtatcatggtataattagtttttatttattttattatatttatgagttattttaagggtcaaaattaaagtgaaattagacagaaaatagtgtttatttaaatagctatttaatttgggatcttcccattttattttcacattacctctttcataattttgttttatctttctttttcacttgtgcatttataacata

SEQ ID NO: 339543 - DNA, 593 bp, Homo sapiens
atacacagctttccttatgcttaccttactaattatcgttaactataatattagggtcttttatattaaaacatatttgctgtatgtatgctaaagtatatttactaaaatgctatttgagtctgtggttttggaaagaaaatttgttgaaaaaaatgcatcatttatgtacgttaaaatatacagagcatgtaaaactgcataggcataaaagacttttatctgatttttagtaaaatgactagtttattgaaaaaaaatcattaaatggygagttgattaagtgcttgttacctgaggatagccatatatgttaatgacttctcacaaaaagtatcataacaagtattactgcataaatatatgagacctggagcaccaaccaataaagagagcacagattagtctacttgtatgacacttatggaaaagctgataggttagtggaaaacagagggtatgaaaagaggcagcagagatgaggagtgtcaggagaactaagctgaccatgaaataacttcctaatcagtatggaacatcatgttcacttacactaatgctaccttctttcagcttcataatatttctgcaac

SEQ ID NO: 339544 - DNA, 505 bp, Homo sapiens
gcagaaatttttaagggtagaagatgaatatagtatcctagctttttgtggaggaataaaatgtttgactaaatcagtagatgctggccaggtaatggccagaacatctcagggaaccctgtgggtcagtggcttaaatcaacaattcattcattttacagtatgtttccctgacagaacagtaaacagacctttcagaaacacatatatatttggaaatataaataataaatcacttctgacaggcaaattgaacttcacaagtacttgggcagtaacaatccaggtatctagatttgtaagagttgtctatctgcagtacatgccccaatgtgtcttgaagtcaattcaatgtaatctattcaccaaggagttagtttatcattctcatgagggcagatcaccaagtatgtgcygaggaaaccaaaaggttggactgaggagtggatcacctaaaagaaggtcaaaaggataaaaggaaaatgcaatttaaatgtaggccacc

SEQ ID NO: 339545 - DNA, 523 bp, Homo sapiens
atgtcatatgcaagatgaatatggcaagatccttctacatgagacaaaggaaggaacttgttgtttcccataggaagccaattggaagactgaattagagtgattggagtaagcagctgtggaaagtctgtgtggtgtatacgatgggactctttcacatcactaagtctacagcagggcctttacgtgtctgtggcagaattggtgacttagtacagggtgacccaaaatagaagacacgctaggaaaggtacaggagtcagtctagaagagtctactcagtgtaaagcagcagacatcctagtaggcccagaggtttgtctgtaaaacaattctttctacataaatctgtagaactcatttcactttctgggttacagctttattaaattttttaaacaacatgtttgtaacaaatgaaaaaacaatttcaatgtracaaatgagaaaaagaaggctctacaaggtcagagttgagaaaggaaaaagaaggaagcacagaggctggttttcagccggttgc

SEQ ID NO: 339546 - DNA, 513 bp, Homo sapiens
cacggtctggcgataaacatcaaggtcagctacaacttgtaacttgaacatggtcatgtttcctttctctctgtaccattagggcctctgggttggtccatcawccactgagtttttctaatttttcttccaggaatcaatggcagaatactttcctgagaaattactccatgcccttgggtctagtgaagcctatttcatccatctcgtaagttcaatacaaaatctctctttctaaaatggcttaccctggtggggaagccaggtctttttctacttctttacattgtttattctcctgtgtggttactttaattaatgtttaatcttcctgtgtttgtgtcctgaggcagagcctctgaagggcacagagttcaaaatcttacagcctcataacactccataggtttgacattaaataattatgacaattcaaagtaaagaccaaaatcccattctctactcaaactgccagggatgctggatcagtttctgcagaccttctctgcaaaa

SEQ ID NO: 339547 - DNA, 513 bp, Homo sapiens
cacggtctggcgataaacatcaaggtcagctacaacttgtaacttgaacatggtcatgtttcctttctctctgtaccattagggcctctgggttggtccatcatccactgagtttttctaatttttcttccaggaatcaatggcagaatactttcctgagaaattactccatgcccttgggtctagtgaagcctatttcatccatctcgtaagttcaatacaaaatctckctttctaaaatggcttaccctggtggggaagccaggtctttttctacttctttacattgtttattctcctgtgtggttactttaattaatgtttaatcttcctgtgtttgtgtcctgaggcagagcctctgaagggcacagagttcaaaatcttacagcctcataacactccataggtttgacattaaataattatgacaattcaaagtaaagaccaaaatcccattctctactcaaactgccagggatgctggatcagtttctgcagaccttctctgcaaaa

SEQ ID NO: 339548 - DNA, 513 bp, Homo sapiens
cacggtctggcgataaacatcaaggtcagctacaacttgtaacttgaacatggtcatgtttcctttctctctgtaccattagggcctctgggttggtccatcatccactgagtttttctaatttttcttccaggaatcaatggcagaatactttcctgagaaattactccatgcccttgggtctagtgaagcctatttcatccatctcgtaagttcaatacaaaatctctctttctaaaatggcttaccctggtggggaagccaggtctttttctamttctttacattgtttattctcctgtgtggttactttaattaatgtttaatcttcctgtgtttgtgtcctgaggcagagcctctgaagggcacagagttcaaaatcttacagcctcataacactccataggtttgacattaaataattatgacaattcaaagtaaagaccaaaatcccattctctactcaaactgccagggatgctggatcagtttctgcagaccttctctgcaaaa

SEQ ID NO: 339549 - DNA, 513 bp, Homo sapiens
cacggtctggcgataaacatcaaggtcagctacaacttgtaacttgaacatggtcatgtttcctttctctctgtaccattagggcctctgggttggtccatcatccactgagtttttctaatttttcttccaggaatcaatggcagaatactttcctgagaaattactccatgcccttgggtctagtgaagcctatttcatccatctcgtaagttcaatacaaaatctctctttctaaaatggcttaccctggtggggaagccaggtctttttctacttctttacattgtttattctcctgtgtggttactttaattaatgtttaatcttcctgtgtttgtgycctgaggcagagcctctgaagggcacagagttcaaaatcttacagcctcataacactccataggtttgacattaaataattatgacaattcaaagtaaagaccaaaatcccattctctactcaaactgccagggatgctggatcagtttctgcagaccttctctgcaaaa

SEQ ID NO: 339550 - DNA, 574 bp, Homo sapiens
ccatgcttgttttcatactctcccccacttccatatttcccgtccacccccacagggcacagagctgcaggtcactgtgggagcgtggagcctttggccctaccccaatcattctttttaaaaggagtcagaatataggtagcacagctcctcctctttatctgagtctagctcataattggaaccaccattttcctcactatctgagctgggtattgggaaactccagcagcagcttgccttccctccagtggggaggaggggggagtatctgaatcttcaggggggcaatccaagactcaaaatccttccaatccggtgagctcccctcttcctgttccttaatggkctgcatgaggtccttcatctctaatttagggggttctctttcctctttatgtgtggacaaaggtcttcagtggagactgcctatctgagtcttatctatcctttgtttagaagccacaaccacattgcactgcacacgagtcctgcccctctgattgtctcccttttgggcccttggaggaccacttgtagaggtctctactgctcaggtctcatccacagctac

SEQ ID NO: 339551 - DNA, 554 bp, Homo sapiens
ataagcatattgcaaggttttcttttcttcaggtttcaatactctaacagatatgttctcaaagtagaattagtccttggttaaaatgagtcacatgtaatctaaagtgtttttcctcataaacccatctccagcttttatggtgaaattcaattgtaaaataagatgaggtgttaagtttaatttttttgaagaagacgttcattccataaatatttatcaagcactctctcagttatgacataattcagtttctaacgtacagtacacctcttacaaaattgcataatctttaaactgaaaggccaaatatcttcatcaaatactgcttcttcagatctttgcttcctcagctctttaaagaaatgggcacctttggcatggatgggtttatatccagatgataattccagagccatcagggtttcagtttttgctggcaaagaaatcaattttattgctactcgaaggctcccctgggatgaagcaatattggaggaggcaatgcattctagaatgtcaactttcagaggtttgragtttgctcaaaaaat

SEQ ID NO: 339552 - DNA, 569 bp, Homo sapiens
taattttgtgataaaacaggacaggcctaaaaaattaggtgcagactctgaataaatttaatatatctacccatctctcttattcctcttaagctcactttaaaaaatctctttttaaaaggaggttttctttttaaacctaacaataaaccaaggacatccgtccaagttaataaatatgtgccttttttaaaaaatagaaaaaagtctaattgacaagtaaaaattgtatatatttatagtgtacaatgtgaggttttgatacacacacacacacacacacacacacacacacacacacgctgtgaaatggccaaatcaagcttattaacatattattaactcaggagtttattctttatattatattcttaaaatctaattgctttgctatttttaagtatatagtgttattattaactattatcttcatgatgcacagtaggccacttgaatgtgttcttcctatccaaatgaagtttagcccccctccccacttyaagtatctgtcttttaatggctacataatatagtttggatacattatattcaattagccttttgttgat

SEQ ID NO: 339553 - DNA, 398 bp, Homo sapiens
aattttatgttcttggactaattatttaacctctcaacctatattttcacatttatttaataaaaatatcaattgccagtaattcttaaatgttttcattatcgtccctctaaggacactttttagacattttttctaattgctcccccacataaaattttaatatcacagatatactgtgtatctgtttgtatactgcacatgtatctgtgctttatatatacaaaaagtatatggttgttgttaaaagtaaatggtatttcctcccagacttcacmactactgtaatatatccatgtaacaaaattgcacttgtacccctaagtttatttaaataaacataaatacatagataagtatctaatataaagactaatgcagaaagaaaaagagtaaat

SEQ ID NO: 339554 - DNA, 581 bp, Homo sapiens
caagactgggatggttttcaccaggcagttttgcaatgttttttgaaagtgcaaatgtcacaatcaagtataatctgaagttcttgcccatgtaaatatctctgagaagaagaagaacacaataacaccatggctggctgcccactccaggcatttacatgagctattccctagtccaamgcccctagcctgccccaacagctccaccaggttaacactcactctccttcaggacctggcttaaaccctacttcattcaggaggaagtcattgcgtcctccaccaagtcagcattagatcatcctgccatgtgccctcaaaacactgtcctctaaattataatggcctgattatttgtttgtattggttgatagattacaagatctgtgaaggcctgagtagccccatttcctggcatatagtatgccctcaaatattagttaaatggaatgattgtctcaattaatcatgcatgcaggcatgaaatattttaaaaatgaaccaaactgctaaagttattttactttgtataaaatgcttgttttaaaaaagaactgtaagcaaagaggatttacttatat

SEQ ID NO: 339555 - DNA, 581 bp, Homo sapiens
caagactgggatggttttcaccaggcagttttgcaatgttttttgaaagtgcaaatgtcacaatcaagtataatctgaagttcttgcccatgtaaatatctctgagaagaagaagaacacaataacaccatggctggctgcccactccaggcatttacatgagctattccctagtccaaagcccctagcctgccccaacagctccaccaggttaacactcactctccttcaggacctggcttaaaccctacttcattcaggaggaagtcattgcgtcctccaccaagtcagcattagatcatcctgccatgtgccctcaaaacactgtcctctaaattataatggcctgattatttgtttgtattggttgatagattacaagatctgtgaaggcctgagtagccccatttcctggcatatagtatgccctcaaatattagttaaatggaatgwttgtctcaattaatcatgcatgcaggcatgaaatattttaaaaatgaaccaaactgctaaagttattttactttgtataaaatgcttgttttaaaaaagaactgtaagcaaagaggatttacttatat

SEQ ID NO: 339556 - DNA, 434 bp, Homo sapiens
tacaaggattaaattcaaaatacatgcaaatcccttagtgcctgatatggtaaataactaataaacataaatagcacaagtaattattgtctatactacaaatgatggcaataaaagtgccagtaacaataacaaatagaacaatctttttgtgaagtggcagagctgggattcaaacatagatctgccagattctaaagcctttgctcttaattcatacatctgcaatataacccttagctaataaraattaagctgcaggaatggatgtatccacgaggaaaagaaaggacggaaagaggggaggcatggaaagaaaaagcacataaatgttgatatataaaaataaacatgtgaatacatacattatagatataatttttcctttagaaaatggtgaacagcttttcttttaaaattgtatatgcacatgt

SEQ ID NO: 339557 - DNA, 434 bp, Homo sapiens
tacaaggattaaattcaaaatacatgcaaatcccttagtgcctgatatggtaaataactaataaacataaatagcacaagtaattattgtctatactacaaatgatggcaataaaagtgccagtaacaataacaaatagaacaatctttttgtgaagtggcagagctgggattcaaacatagatctgccagattctaaagcctttgctcttaattcatacatctgcaatataacccttagctaataaaaattaagctgcaggaatgratgtatccacgaggaaaagaaaggacggaaagaggggaggcatggaaagaaaaagcacataaatgttgatatataaaaataaacatgtgaatacatacattatagatataatttttcctttagaaaatggtgaacagcttttcttttaaaattgtatatgcacatgt

SEQ ID NO: 339558 - DNA, 577 bp, Homo sapiens
atgcagtggtcatacgtggaattcatacactttatctctgataacatatcccttttgtgagatgttcaccatctaaagcatgtagtctgaattcccttaatcagatgatggtggccaggagaggtagatgacttcatctgctgggttatgcccaggcaaggcagtctcctgggcaggatttagaggaagaatagacacctgccactattcacctccctaaaagattgcatgttcaccattttaatgtgcatgtgacaagcactctgctggcctgtaaattagcacatctctgtgattttagttggaataaatagagcaagggaatttgtttttaatagaacagaaactggcataggtactttgrttgcagtatttgttgctttcaggtcaaatatttttcagcataatgatactaagaaactacaccatcatgaaacttttaaaaattaacacaagctactgtaacaaacaacccacaatcaaatttccttgacttaaaacaataaaggtttatttcttgctcaatcacattgtggcttcatgtgcattgataggggctctgctccatgttgtgttt

SEQ ID NO: 339559 - DNA, 551 bp, Homo sapiens
cacattaaaagaaaaagaaacttagaaaaacacataaatttcttttgtgatcccactattcaggaaaatccattgaaaaagcagatgacttatccgtgttaaatttttaaagcccctattaaactgtcatgtaaattcttatttatctaatttttaaacacatatagaatttactctccagttcataaatgcctcaattctgtgatgtcattacaacagcattaacgcagacatatcgacttaaacagccatgcagtcctgaatcagaagtgagttttaagtcactaattatttycgtaattgaaaaagaacaacacatctgaatagtattttggcccagaggtattcaacaggctggtgcttctcaaagagtaacatgcatgatatacaggaaccttgtcaagattcagattgagtcagtgggtctaaggtggagtctgagactccacgtgtccaacaagctccctggtgatgcccatgctgctagtacacgtcccacactttgagttgaaaggcaatagatgatccttccaggattcaaggaggggcag

SEQ ID NO: 339560 - DNA, 432 bp, Homo sapiens
ctggtgaggttcatcccaagacagaaggcatcacgtggcaaacatgtgagatagaaatgggactgaccccactttgtcgacaactagcccacaccggtgatcatggcattaactcatttatgaggtctctggtcycatgagttaatcacctcttaaaggccccgttacttaatagcattactaaggcaattcaattttaacatgagttttggagggggacattcaaaccataccaggtggttacccacaacccccattcaaattgatggtaaataatgaatgttaaatttatcttctcttcagtattgattcccatagtccatattctttactggctgttagattttcaccttacatgctccaatgtgcctaacataaaatgatcttagaacctactttgtgaagatgctgcaccatcctgagatggcacaa

SEQ ID NO: 339561 - DNA, 432 bp, Homo sapiens
ctggtgaggttcatcccaagacagaaggcatcacgtggcaaacatgtgagatagaaatgggactgaccccactttgtcgacaactagcccacaccggtgatcatggcattaactcatttatgaggtctctggtctcatgagttaatcayctcttaaaggccccgttacttaatagcattactaaggcaattcaattttaacatgagttttggagggggacattcaaaccataccaggtggttacccacaacccccattcaaattgatggtaaataatgaatgttaaatttatcttctcttcagtattgattcccatagtccatattctttactggctgttagattttcaccttacatgctccaatgtgcctaacataaaatgatcttagaacctactttgtgaagatgctgcaccatcctgagatggcacaa

SEQ ID NO: 339562 - DNA, 352 bp, Homo sapiens
taaaccttgagtacacattctttttaatattctgtgtgatgaaatgggaaaatgtataaagcacttctactacacacgtaaatacagtggttgtcacaaggaaaagcacttgtgcaattgtttgagttgcaaactcaaataattgcttttttcatgaacataattttttcctgaaaggaaaattaaccaagtaaagttatttatatgtgggcagttggcagatgttttcttctaaatgaatgaaataatcttaacactttaagaaaaacaactaatagtcattgatgycaatgataaaaaccttgttttcaagcaaaaattcggattttgtaaaactcacatctgccatcat

SEQ ID NO: 339563 - DNA, 527 bp, Homo sapiens
gacaaagaatcctagaaaccccaagcaggaaatgtaaaaagaaaacttcacccaggccaattacaataaaactgctaaaaccccaaagaaaaaaaaaaaaaaactaaaaatcagcataagggtgaaaaagaaacaaaaattggatttttatctaacttatcaacagaaataaagaaagccagaagtaaataaaatatcttttaagtattgaaagaacataacagatagcctagaattttatgcccagaggaaatatccctaagagtgatagtaaaataaagcacttcaaacaaaaaacaaaagaatttgttaccaacagacctacaataaaggaaatagtgaatgatgttcttcaggcaaaaagagagtgctcccagatgaaagataaataatacaagaaaataaaatgaagaacaaagaaaagaataaatatatgattaatcaaaatgaattatgactgartaaagcactaataataataatgtcttgggcatctgaaaggtgtataagtaaaatacatatcactg

SEQ ID NO: 339564 - DNA, 607 bp, Homo sapiens
tgatctatagaaaaggcaagctttagtctttcactttttaaaaaaaaactacatgctatcttttgttgaatgctgattctcctcctctgacatggattctctaggagttcaaatgacttaagcacacttaatggggacttgcaggacctaggaggtgtggtttgcttcagggtttggctggaagaatattagactctccaagtctagcatgccagtgctggggctacttcttagcctgacccagggaagatgcatacgtaaactgacttcttttctgggcaacagacgagagaaaccctctcttttctggaaatggagayagttctaagaacttatctccacagcaaaaatctctagccatgaagggtgctgcaactcagcattatgaaataaatcatgctggctaataaaaatatccattgggactgtcacaaaggagactggtaagcatgctggtgccagctcagtagatgggctgccagggacatcccagcatggtgcatggaaaccaagtctccaggctactaaaaaatgccctccgtccattccgtctttcatccaaatcaacccaagtcattaattatttcaagaaacatttactgagtac

SEQ ID NO: 339565 - DNA, 607 bp, Homo sapiens
accagggtggtgacgggtgaagatacccttaccagaaacagaaagaggctctcagatggaggctggaaaaaaaaaggcaggggtaggatctgcagtgctgtaagatattagagacagtctaggtttgctttctcatcctgaggagaaggaaacgcagcccagaaatgtgcagtgtctgcctgagtcacactgcagyatgcagaagagctgagtccccattcttcccagcagagctctttccaccaccatgtccctcctaggaggaatcaaccaggtgagctctggctctagggaggttccctctatttaagaatcttctcatatcattcaggaaacatctagcaacgtgcaaaacaactcctagaatggcattatgacccagcaatcccacctctgggtacatatccaaaggaatgaaatcagtatctcaaagaggtatctgcagccctgtggtcatcacatcattcttcacaaaagcaaagatatggaaacaacctagatatccatggaacaatgaatgaatacagaaatatgaatacacaatgtgataaaaatacacaatggaacaatggaatattacttaaccttaaagaagaaggaaatcctg

SEQ ID NO: 339566 - DNA, 607 bp, Homo sapiens
accagggtggtgacgggtgaagatacccttaccagaaacagaaagaggctctcagatggaggctggaaaaaaaaaggcaggggtaggatctgcagtgctgtaagatattagagacagtctaggtttgctttctcatcctgaggagaaggaaacgcagcccagaaatgtgcagtgtctgcctgagtcacactgcagtatgcagaagagctgagtccccattcttcccagcagagctctttccaccaccatgtccctcctaggaggaatcaaccaggtgagctctggctctagggaggttccctstatttaagaatcttctcatatcattcaggaaacatctagcaacgtgcaaaacaactcctagaatggcattatgacccagcaatcccacctctgggtacatatccaaaggaatgaaatcagtatctcaaagaggtatctgcagccctgtggtcatcacatcattcttcacaaaagcaaagatatggaaacaacctagatatccatggaacaatgaatgaatacagaaatatgaatacacaatgtgataaaaatacacaatggaacaatggaatattacttaaccttaaagaagaaggaaatcctg

SEQ ID NO: 339567 - DNA, 402 bp, Homo sapiens
ctctgttccctttggctactacttctgcttatagcaggaagcctcgctcccagsagtaaatgcagaatcctttccttaacctaccactgtctgcttcaggtggaagggacaggaagcctgttccatgaacctggggggagaacctggctgtagaccactttggctttctgatagaacgcttgccctttattccccacagaacagcgtcctctccaccagcacaaatcgaagcaggaattccccacttttggagcgggccagcctcggccaggcctccatccagaatggcaaagacaggtgagagacccgggccctgcctgcctcactccctaggagccatgtctcacagggtgatgtctgtcagcagcaccgtctcctgtccctgccagcgcattgctccct

SEQ ID NO: 339568 - DNA, 552 bp, Homo sapiens
ccagggagcatggcgcaagcatgtcctcgggcggggggaacccgatggggccgggccacctcggcctgcagtgggggcctacaggtgactccaagagcagaccacagactagggcactccacagcctccagggtgtgcttgctgccgggaggccccgcccccacccagagccaaagcgaactgtgccgctccaagctcccaggtccaggctcgggtcccccactcagccccacatggcgttcaaaggcccctgtttgctgggagcaggtctgggtcccttgggtggggctggatcatgagccccagcttggactcgcagtccagtgcccatcccccacctcacacagccactgcccgcytgaagccaccacgccttcagcaagaagagccctttgaggtgggcatgttgggggtcaagaaaaggagctgtgacaaccagtgctcctgggcccacctgcatctcccccagtccccgggtactctgtgagcctcagtttcctcctctggaaactgggttgatgacttgttgtgtaaggaccagagcctcccagc

SEQ ID NO: 339569 - DNA, 496 bp, Homo sapiens
ggagtcctggccaggcgtggtgactcatgcctgtaatctcaacactttgggaggccgaggagggtggatcacttgaggtcaggagttcaagaccagcctgaccaacatggtgaaacttcgtctctatcaaaaaaaaaaaaaaaaattatccaggcaaggtggcaygcgcctgtaatcccagctactagggaggctgaggcaggagaatcacttgaacccaggagccagaggttgcagtgagccgagatcatgccactgcactccagcctgggcaataagagcaagactacgtctcaaaaaaaaaaaaaaggaaatcctgccatttacgctaacatgaatgaaccttgaggatgttatactaagtgaaataagccggacagaaagacaaacactccatgctcttccttatacatggactcttaaaaaaaagaagtagaaactcatagtcattaagagccaaatggtgattcccaggggaaaagaaaaggcattggtc

SEQ ID NO: 339570 - DNA, 496 bp, Homo sapiens
ggagtcctggccaggcgtggtgactcatgcctgtaatctcaacactttgggaggccgaggagggtggatcacttgaggtcaggagttcaagaccagcctgaccaacatggtgaaacttcgtctctatcaaaaaaaaaaaaaaaaattatccaggcaaggtggcatrcgcctgtaatcccagctactagggaggctgaggcaggagaatcacttgaacccaggagccagaggttgcagtgagccgagatcatgccactgcactccagcctgggcaataagagcaagactacgtctcaaaaaaaaaaaaaaggaaatcctgccatttacgctaacatgaatgaaccttgaggatgttatactaagtgaaataagccggacagaaagacaaacactccatgctcttccttatacatggactcttaaaaaaaagaagtagaaactcatagtcattaagagccaaatggtgattcccaggggaaaagaaaaggcattggtc

SEQ ID NO: 339571 - DNA, 496 bp, Homo sapiens
ggagtcctggccaggcgtggtgactcatgcctgtaatctcaacactttgggaggccgaggagggtggatcacttgaggtcaggagttcaagaccagcctgaccaacatggtgaaacttcgtctctatcaaaaaaaaaaaaaaaaattatccaggcaaggtggcatgcgcctgtaatcccagctactagggaggctgaggcaggagaatcacttgaacccaggagccagaggttgcagtgagccgagatcatgccactgcactccagcctgggcaataagagcragactacgtctcaaaaaaaaaaaaaaggaaatcctgccatttacgctaacatgaatgaaccttgaggatgttatactaagtgaaataagccggacagaaagacaaacactccatgctcttccttatacatggactcttaaaaaaaagaagtagaaactcatagtcattaagagccaaatggtgattcccaggggaaaagaaaaggcattggtc

SEQ ID NO: 339572 - DNA, 483 bp, Homo sapiens
tacaaacatgagacaatgatcaaaacaaaccccactctattgtgaatcatcttgacgagaatgatccatgtctagccatagtcaaaaatgggatgccatttgtgtatttactaatttcayctaaactggtacagcttggcaccacataattatttattttttcttaattccccaaacgtgagcttacgatagacttggtgtagatggtgtcttgaattgacatagtgttctaatgtgaaaagtcacgagtttgtgctactaatgccgtggtgcagctgggcacgccatcaggctgaccctcagcctaaactcttggacggcagggatcagaggagccatgatttatctcctgcctccacctagcccagcagatgctccaggtggactttatccatcgatgctgtcctggccctgagcttctctctgggctgctgggtaggtgtagcgagttgtttaatgacactgcaacggggaggcagaggc

SEQ ID NO: 339573 - DNA, 483 bp, Homo sapiens
tacaaacatgagacaatgatcaaaacaaaccccactctattgtgaatcatcttgacgagaatgatccatgtctagccatagtcaaaaatgggatgccatttgtgtatttactaatttcatctaaactggtacagcttggcaccacataattatttattttttcttaattccccaaacgtgagcttacgatagacttggtgtagatggtgtcttgaatygacatagtgttctaatgtgaaaagtcacgagtttgtgctactaatgccgtggtgcagctgggcacgccatcaggctgaccctcagcctaaactcttggacggcagggatcagaggagccatgatttatctcctgcctccacctagcccagcagatgctccaggtggactttatccatcgatgctgtcctggccctgagcttctctctgggctgctgggtaggtgtagcgagttgtttaatgacactgcaacggggaggcagaggc

SEQ ID NO: 339574 - DNA, 447 bp, Homo sapiens
tcaagtataccagtgatatggttaggttctgtgtccccacccaaagctcatctcgcattctaatccccacatgtcagagaaggggcctggatcatggggatagatttcccctttgctggtttcatgatagtgagtgagttctcatgagatctgatggtttaaaagtgtgccacttccctgtttgctctctttctctctcctgccaccatgtgaagatgtgcttgcctccccttcaccttctgccatgattataagttttctgaggcctcccagtcatgctttctgttaagcctgcagaactgtgagtcaactaaacctcttttcttcataaattacccagtctcaggtagttttttaatagcagtgtgaaaaaggactaatataatctcagacttctaggttccacaacrtaaatttctgttgcttaagccaccccctaggtgctat

SEQ ID NO: 339575 - DNA, 532 bp, Homo sapiens
aatttacaagatgcagctaaagcagtactttcaggaaattttatagcactaaatgatcatattagaaaagaaggaaatatgctgttccaggtagcagagaaataattaaaaaaaagaaaagaaggaaatgaataaaataaataatctcaaattccacattagtaaagcagaaaaataagagcaaaagaaactcaaagtaggagaagaaagaaaatagtgagcatcaaaacagaagtcaataaattagaaaagcagaaagcattagagaaaagcaatgaaccccagagctgattctttgaaacaatcaataaaattaataaaccttgagtcagattggtcagcgaacaaaggatagaaaatacaaatcaccaatatcagaaatgagagaaatgacatcactacrgagtcttcaggtgtttaaattataagaagaagatattttgaaaaaaaagcaataaatttaaaaacttagataaaatggacaaattccttaaaagatacaatctaccaagattcactcaagaaataatag

SEQ ID NO: 339576 - DNA, 433 bp, Homo sapiens
ttctggttcccggagcagggagggctgtgggcatgggctcacttgcttcctctttggaaccccccaccccagaaccccacacctggagagccctggcccagcccctgggacgtcccgccagtccctcctctcagcagggtacaggtggttagggcacaagcacaggtaccccacaggttgtctgtgcacgccgtaggtgtgggtgggcgacagctttgcttgtcccmagtgagcagacccggtggtcttgcaacctgagagctgcaaggcaccctccacgtcctcagggcctgatggagatgggaagggccaggccacgtgaaggccatcgtgccctcagtatcttggcactctggagggccaggatgtcacccttcagagaccatcttgggggaagttctgggccaagtcttggggcacctccctcccgggg

SEQ ID NO: 339577 - DNA, 433 bp, Homo sapiens
ttctggttcccggagcagggagggctgtgggcatgggctcacttgcttcctctttggaaccccccaccccagaaccccacacctggagagccctggcccagcccctgggacgtcccgccagtccctcctctcagcagggtacaggtggttagggcacaagcacaggtaccccacaggttgtctgtgcacgccgtaggtgtgggtgggcgacagctttgcttgtcccaagtgagcagacccggtggtcttgcaacctgagagctgcamggcaccctccacgtcctcagggcctgatggagatgggaagggccaggccacgtgaaggccatcgtgccctcagtatcttggcactctggagggccaggatgtcacccttcagagaccatcttgggggaagttctgggccaagtcttggggcacctccctcccgggg

SEQ ID NO: 339578 - DNA, 433 bp, Homo sapiens
ttctggttcccggagcagggagggctgtgggcatgggctcacttgcttcctctttggaaccccccaccccagaaccccacacctggagagccctggcccagcccctgggacgtcccgccagtccctcctctcagcagggtacaggtggttagggcacaagcacaggtaccccacaggttgtctgtgcacgccgtaggtgtgggtgggcgacagctttgcttgtcccaagtgagcagacccggtggtcttgcaacctgagagctgcaargcaccctccacgtcctcagggcctgatggagatgggaagggccaggccacgtgaaggccatcgtgccctcagtatcttggcactctggagggccaggatgtcacccttcagagaccatcttgggggaagttctgggccaagtcttggggcacctccctcccgggg

SEQ ID NO: 339579 - DNA, 433 bp, Homo sapiens
ttctggttcccggagcagggagggctgtgggcatgggctcacttgcttcctctttggaaccccccaccccagaaccccacacctggagagccctggcccagcccctgggacgtcccgccagtccctcctctcagcagggtacaggtggttagggcacaagcacaggtaccccacaggttgtctgtgcacgccgtaggtgtgggtgggcgacagctttgcttgtcccaagtgagcagacccggtggtcttgcaacctgagagctgcaaggcaccctccaygtcctcagggcctgatggagatgggaagggccaggccacgtgaaggccatcgtgccctcagtatcttggcactctggagggccaggatgtcacccttcagagaccatcttgggggaagttctgggccaagtcttggggcacctccctcccgggg

SEQ ID NO: 339580 - DNA, 487 bp, Homo sapiens
aatgccccacatggtctctgatctctgccaaaacatgaaaacagtgactaggagagaataatagcacataagagcaaagccttccaaacagccagaggtggagtgaggggacatcaatgggcagcgtggatcagagaggcaggggccaacctagggaagagaaagaaacccagcggcggtcgggatggggagctgctggacaccactgcagagaaagacaagcaggcccaaggagaaggtgtcacccgcaggaaggacactagtgaggacaacaggtcgctggaaggaaaggggctcctcaggctggcggarccttggctggggattgcatgatcttcaggctcatggatggaggcttaacgtgcttgctggggcaggatcctccccggcgattattgcagtaagcagcatgtgtcacgtgcggtctctacgtgctgggctccatgtgggtagctctggtcatcctcagaacagacctcttagatgg

SEQ ID NO: 339581 - DNA, 622 bp, Homo sapiens
  misc_feature (1)...(622): n = A,T,C or G
tcttttttttttttttttttttttttttnggctaacattctccatctgccataatttcctataaattctttaacatatttataaaagctgttttaatgtctttgtctgctaattcaacatccgggtcattcacttttttatctttagagaatgtctagtaatttctgtttgtataccaggcactggtgaattatattttgtagacactctggattctgtatctttcttctaaagaatgttgacttttgctctggcagacattaaattactgttgatttttataagacactcacanaatacataggttttagtaataagtccactcagacctttaatttttgaattagtatactaaaacttactattggatttcaagtattttaatttcagaataaatagatttaaataaatgtagggagaacttgataaagtagacttaattaagaaaatgacagctaatataataacctrgagattaataaaaactgatagattgagcctgtggcttccctgggggacacacgcatatgccttttccttgggccattttgtatctctgtttaatgttctggtaccaaggcagggctttatctatggcgtacttgtccagataacctagagt

SEQ ID NO: 339582 - DNA, 458 bp, Homo sapiens
atctttgtttttgagctgaagtatctcaccatgtgcagacaatgacactggtgctgtgtttggacttgaatcctccttcacatattttctgtttgtctccctgatttatgttctcttccgtctcctttcttgcttkcttttgaatcaaacacatatttttcttttgcctcccttctgttattggcttgcgattgatgcattctttcgatattatgttagtagccacatatgcttggagcacaccatgtgtctgacttattaaagtccagtccatgacattccctttaccacgtcccagacaggcttgagctcacagtgcctccctcggtgcaccgcctcctcctcgtgctgtcctcttcctgcattttagccccacgttcatttgaatcccactgggccttggcatgatggtgcttgcggtgaacacctgcatttagctatccacatgtcggctgccc

SEQ ID NO: 339583 - DNA, 644 bp, Homo sapiens
tgtctgcaacactattttggcttgttctattgtctttctgcactcaaacagattgttatgcagaactcttagagtgcatgcacccacgattgaaaactataataaaagattatgagatgcccatgggcaaagattaattttagtaatctccatattcacccttgctgtgcccagcagtattcagttctcattatagatgctcaaccaattcaatttggtgtccagatggaatgtctcatgtttaaacagtgatactctttttagttagtcataacttaattcactcaaatcccttggcttgaggtctggcatcactatggaattagccatcattcattttcaatttaaattaattttcaatagcaaaccaatgacatttggagactagaaaaccaaagaatacgtttccaaagtttctattaagtcttctgaaaagactgtataattgaatgcattaacgttttaacagtccacattgcataccaaagccctctataatcaagtgcctggtgaataaattcttggcacttccatctagcttactgtaacaaatagaatagacttmtttcaggaataaaccttgaccactcaagctaatgggaatccagttaggtttttgccaacctcaggaaacatccattatc

SEQ ID NO: 339584 - DNA, 577 bp, Homo sapiens
gccattaggttaatatcagtgaactctggtatagagcatgttccaagtgaggtcatactcttgagttaattctaaaataagctgtttatttttgtttgttccatgactataggttgtagcttcatctcaggccaatcagatcaaaactgcagatgttgattcaatagagactactctctagtgtaaatagataaactcaaactcatggctattactggaaaataactcaaagtattattttttggctgacagactcagccaaaagataacctattaatgtgggggaaaaaatcaacgaatatgtattgttttgtggttaatcaayaactctaccttcgtgtaagggaaacaaacaatacgtttgccattctgaatcacaataaacaaagaaaaattctacaattgactcaaacttaacctgagtaccggttacaaagtatctgcacctctctgtaaatcagcaatgaaaatcaaattcacagttaaattacagccagcctcagttactcttttaaaatttttgataaacagtatttgaaatactgtttgtttgaaccatgactcagattatagggtt

SEQ ID NO: 339585 - DNA, 585 bp, Homo sapiens
gagaaaaactcatttggctatattgtttctccacagaatgttgtgaggataaaacaaaataattaaacatgaattttcttttggtaaaagtattcaataaatagtatatgtttatatgcatatgcacacatacataattattccttttgttttggctatgccaaattttaatatagtatatagtatttgaatgataggggatgactcygtaaaaatgataaaaaaataatgatggcaactatttagtagtactttataatggccaagtgttgagttaaacgcatatgttttcttatttaattctcccaaaaatatgttaatgacctttttcattcctattttcacccctgccactctcatttgaactcactccagtgaataaggcattcgtacccatgactccactgaatcttttcctctcagtgttgctattggcttttatgttgccaaatgtcagtggtccactctgccctcatctcactcagccccactgaacatatgacagtaggttcttctttctctcgaggcacttttattcacttggctctaggacaccaccattcccatggttttcctgcatcgtcc

SEQ ID NO: 339586 - DNA, 585 bp, Homo sapiens
gagaaaaactcatttggctatattgtttctccacagaatgttgtgaggataaaacaaaataattaaacatgaattttcttttggtaaaagtattcaataaatagtatatgtttatatgcatatgcacacatacataattattccttttgttttggctatgccaaattttaatatagtatatagtatttgaatgataggggatgactctgtaaaaatgataaaaaaataatgatggcaactatttagtagtactttataatggccaagtgttgagttaaaygcatatgttttcttatttaattctcccaaaaatatgttaatgacctttttcattcctattttcacccctgccactctcatttgaactcactccagtgaataaggcattcgtacccatgactccactgaatcttttcctctcagtgttgctattggcttttatgttgccaaatgtcagtggtccactctgccctcatctcactcagccccactgaacatatgacagtaggttcttctttctctcgaggcacttttattcacttggctctaggacaccaccattcccatggttttcctgcatcgtcc

SEQ ID NO: 339587 - DNA, 552 bp, Homo sapiens
tgatgttgattaagggtgttaatccattcagtgcgggcagagccctgacgacctaatcacctcttacgagttgtaccactcaacactgtttcactgcaaattaagtttccacctctcaaactttgggggggcacatgcaaaccatagcaacactatataataaaacagatattaccaggggaagtacaatcttgcaaggtatggaaaaaaattattttctcataatttatcatttgattcaggtcatggaattttctaattaattcacaatcaatttttggcaatgtgtgttgcttctacttccagaagataragcacatagcaaaagtgagctatttgtgaattttttcatggtcatatatcatatcaccacagccgtgcatttatctgtgggtgttcatgtacaatgatctaaatgaaatttttgagatgaatattagtttttcacaacataccaacatgtgttcccaatcgaggtaatagcgttacagtcaacgggatataaacaacttatagaaacattcatgttgagaaagaaccttctgggacaat

SEQ ID NO: 339588 - DNA, 552 bp, Homo sapiens
tgatgttgattaagggtgttaatccattcagtgcgggcagagccctgacgacctaatcacctcttacgagttgtaccactcaacactgtttcactgcaaattaagtttccacctctcaaactttgggggggcacatgcaaaccatagcaacactatataataaaacagatattaccaggggaagtacaatcttgcaaggtatggaaaaaaattattttctcataatttatcatttgattcaggtcatggaattttctaattaattcacaatcaatttttggcaatgtgtgttgcttctacttccagaagatagagcacatagcaaaagtgagctatttgtgaattttttcatggtcatatatcatatcaccacagccstgcatttatctgtgggtgttcatgtacaatgatctaaatgaaatttttgagatgaatattagtttttcacaacataccaacatgtgttcccaatcgaggtaatagcgttacagtcaacgggatataaacaacttatagaaacattcatgttgagaaagaaccttctgggacaat

SEQ ID NO: 339589 - DNA, 552 bp, Homo sapiens
tgatgttgattaagggtgttaatccattcagtgcgggcagagccctgacgacctaatcacctcttacgagttgtaccactcaacactgtttcactgcaaattaagtttccacctctcaaactttgggggggcacatgcaaaccatagcaacactatataataaaacagatattaccaggggaagtacaatcttgcaaggtatggaaaaaaattattttctcataatttatcatttgattcaggtcatggaattttctaattaattcacaatcaatttttggcaatgtgtgttgcttctacttccagaagatagagcacatagcaaaagtgagctatttgtgaattttttcatggtcatatatcatatcaccacagccgtgcatttatctgtgggtgttcatgtacaatgatctaaatgaaatttttgagatgaatattagtttttcacaacataccaacatstgttcccaatcgaggtaatagcgttacagtcaacgggatataaacaacttatagaaacattcatgttgagaaagaaccttctgggacaat

SEQ ID NO: 339590 - DNA, 621 bp, Homo sapiens
acaattaacttttacctcctattaactacattaataaaaaattatcagtgattacattatatgccctgtgtttgctgcaacagtaaagactgggaatcaattctagaatcttgctggtctccatgatatgagaaaaaatatyttcattttttaaatagttgatttcttttttctctaaattaaaatgcatatgtttaaaagtaaaataccatattacaccaattgtaagatgcacattttttcacattagtatctttgaaatctgaatgccttcttactgtctatgacatcttataattgcagtggaccgggtggcaatcataacacagtgacactgtctgcacatttacacttctaaaaagtaccaacatcaaaattcagaagtgacagcaacttggaaaaaaaacacagaatcaatagtgtatcactctttagaggagtactgcatcaccaatgatctcaatagcacagagagcactattgcagggaaaaatacaagcaccgacaacgctgagttgaagtaattcaggagaatttgacactttaggaataccttacccaatttatttcacttatatttttagttttcatttatgcacaggaattatgcatgattaaaaa

SEQ ID NO: 339591 - DNA, 613 bp, Homo sapiens
cttaaaatgattctgttctcttctgcctgctgaagctgccagccgcctgccaattgtgatgtactttatgacatggacacggggagctagacaaagatcaccaattaatttccttcccaacaaatgacaaaacatatcatgaaacagaatcacttaaaccagtggccactgggtcttggcttctaccccagaagcaacagtctttttcctttttgatgaccgatttaaacttggaaggaactcaactcctgcacccatggccacagctgtttaagcttggtctttacaatggattccatgatagaatgtgaatttagaagaaagggtagagctcatctgatacaaacttcctaatttacggaagagctcaccaacatccatcgaggataaatgacttgcacaaaatcactacaatgagttaaagctctattactcccaaatttttctagttattttagttagtragaactttttttacttgccttacccagactatacaatattacagaaaacatatttttacccaaattatgaaactagtttgcaaacatgtgcttgggtttctttataaccagattaaggtattaacaatcaagaaaagaggacaggcgcg

SEQ ID NO: 339592 - DNA, 501 bp, Homo sapiens
tagtctttttatccctcactcccctcccaacctttcctcgagtcccccaagtccatgatataattcttatgcctttgcatcctcatagcttagctcccacttataaatgtgaacatacaatgttttccattcctgagtaacttcacttgaaataatggtctctaccaaactgcctaargcaatctacaaattcaatgcaatttccatcgaaatatcaccatcattcttcatagaattagaaaaaacaaccctaaaatacatatagagccaaaaatagcctgcatagccaaagcaaggctaagcaaaaagaataaatctggaggcttcacacgacctgatttcaaactatactataaggccataattaccaaaacagcatggtactggtataaataaaggcacatagaccagtggaacagaatagagaacccagaaataaacccaaatacttacagccagctgaacttcaacaaagcaaacaaaaacataatgtagaaaaag

SEQ ID NO: 339593 - DNA, 501 bp, Homo sapiens
tagtctttttatccctcactcccctcccaacctttcctcgagtcccccaagtccatgatataattcttatgcctttgcatcctcatagcttagctcccacttataaatgtgaacatacaatgttttccattcctgagtaacttcacttgaaataatggtctctaccaaactgcctaaagcaatctacaaattcaatgcaatttccatcgaaatatcaccatcattcttcatagaattagaaaaaacaaccctaaaatacatatagagccaaaaayagcctgcatagccaaagcaaggctaagcaaaaagaataaatctggaggcttcacacgacctgatttcaaactatactataaggccataattaccaaaacagcatggtactggtataaataaaggcacatagaccagtggaacagaatagagaacccagaaataaacccaaatacttacagccagctgaacttcaacaaagcaaacaaaaacataatgtagaaaaag

SEQ ID NO: 339594 - DNA, 501 bp, Homo sapiens
tagtctttttatccctcactcccctcccaacctttcctcgagtcccccaagtccatgatataattcttatgcctttgcatcctcatagcttagctcccacttataaatgtgaacatacaatgttttccattcctgagtaacttcacttgaaataatggtctctaccaaactgcctaaagcaatctacaaattcaatgcaatttccatcgaaatatcaccatcattcttcatagaattagaaaaaacaaccctaaaatacatatagagccaaaaatagcctgcrtagccaaagcaaggctaagcaaaaagaataaatctggaggcttcacacgacctgatttcaaactatactataaggccataattaccaaaacagcatggtactggtataaataaaggcacatagaccagtggaacagaatagagaacccagaaataaacccaaatacttacagccagctgaacttcaacaaagcaaacaaaaacataatgtagaaaaag

SEQ ID NO: 339595 - DNA, 550 bp, Homo sapiens
aacgttgggtcattagaagtggaagatgaagatgtgtaacattcctttcctgcaggctcaagttcctggataatgtctagtctgtgttcagggaggcagaaaatatatgatataaagaaatcttagtgaacattatgtttctgagttcatttacctcatgattcaggcaagggaatgcatgtgtatgtgagtatgtgtatgtgtgtatgtatgtatcgtatatgtaggcaatgtgtgggtggtttatatgtagtatgtatgcatgtgtgtggcatgtttgagtatgcatgcacaygtgtgtgtggtatatgtgtatggagtgtgagtgcatgtggtatgtgtatgtgtggtgtatgtgtgtatatgtgtgtggtatatgaatgtatgtagtgcatatttgatgtgtatgtgtgtaagttgtatgtattcacatgtgtatatttggggtacacgtggtatatgtttatgtgtagtgtgtgtgtgtaagttttgtgtgtgtgtgtggattacttgtaaatatatttttattgaaagaaaagtggctccagct

SEQ ID NO: 339596 - DNA, 550 bp, Homo sapiens
aacgttgggtcattagaagtggaagatgaagatgtgtaacattcctttcctgcaggctcaagttcctggataatgtctagtctgtgttcagggaggcagaaaatatatgatataaagaaatcttagtgaacattatgtttctgagttcatttacctcatgattcaggcaagggaatgcatgtgtatgtgagtatgtgtatgtgtgtatgtatgtatcgtatatgtaggcaatgtgtgggtggtttatatgtagtatgtatgcatgtgtgtggcatgtttgagtatgcatgcacatgtgtgtgtggtatatgtgtatggagtgtgagtgcatgtggtatgtgtatgtgtggtgtatgtgtgtatatgtgtgtggtatatgaatgtatgtagtgcatatttgatgtgtatgtgtgtaagttgtatgtattcacatgtgtatatttggggtacacgtggtatatgtttatgtgtagtgtrtgtgtgtaagttttgtgtgtgtgtgtggattacttgtaaatatatttttattgaaagaaaagtggctccagct

SEQ ID NO: 339597 - DNA, 571 bp, Homo sapiens
aatccaactgaattttacctccatgaatacttactaatcacccggcctataaaaatgtccacaccctaatccctacatcctatgatgtactccattacagagtaacagggaatttgcaggtgtaacctgcaaaccttaagagaaagggttacaaactttaagagaaagaggttatcctggattatctggattttcccaattaatcacatgagcccttaaaagcagagaaacttctctggctgcggtcagagagatgtggcagaaaaggaggcagaagaggtgcrgcagaaaagaaggttagagattctaagtgtgagaagaatttgaggcacagttactgggtttgagatatatatatatatatctccttatgtaggcctctaggagccaagggtggcctccagctgacagccaacaagagaatgaatccttaggcctttgattgcaaggaacttaatttttccagcaaactggatgaacctggccatatattattcctaagcctctaagataataactcagccttgatttagcctttgtgaaacctgaaacagagaaacaagccaagtga

SEQ ID NO: 339598 - DNA, 570 bp, Homo sapiens
atcactttacaattttttttaaaaagaaactactctgcatcaggtgcttcaaaacagagtcaaaaaggatgtgcgagatcacattatttagatttctatagcactgcacatttttcaaacatcacctatgcatgaattctcagcaatatttttctatggttacttgattataaattagataaatcctctctcgctgtctctccccttttctctcttttattctgataaagaaattgagaaggaaatgagttgagtaacttgtctcagctcatgttgaaaaaaagacaagattcagaatatctaataagagaattttcaaatatgataaaaggggtcatgtctggccmacttaaaaaaaaagagaaagaaaaattcgtccttaatcatggtttaaacaccattgttttaggttatgtcagtggtaggggtcacttctagtttctagcccaacctgtaaagagcatgcaagtcatcactcccatcttcacaagaaaaaaaaaaaaaagctgaaaagctgagcaaaatgagaatcaacaactcttcttacatccttcagaaaattgaggtcac

SEQ ID NO: 339599 - DNA, 592 bp, Homo sapiens
accattcttttatgcagtgaatttctttcattctcaccttattttttacacataaatttgcatttagaagaattttagatttacagaaaaattgcatagatagttcccgtatacccctcacctgggttcagtttctcttattattttccattactgtgaaatgtttgtgaaaacttagaaaccaacattagcacattaattagtaactaaactgtgtacattattcagatttcatcaatgtttccattagtcttttttgtgtttstggatctaaacaccctggctttcttttaaatctttatcccaccacagagtcattgcgcatgccactgcaatgcttaaaacactgtcttttaccctcactctttcctcatagccctcttttgtgtgtggtttctactcattgttcagatctcagtccaaaggtcacttcctcagaggagcctctctgaagtccaggtctaggactgcttcctttattacatgccttcatgcaaccatgtactcttccttcataacacttttctcaatctgtaattataccctcagatatggtttggcggtgtctccacaaaattctcatctcaaattg

SEQ ID NO: 339600 - DNA, 592 bp, Homo sapiens
accattcttttatgcagtgaatttctttcattctcaccttattttttacacataaatttgcatttagaagaattttagatttacagaaaaattgcatagatagttcccgtatacccctcacctgggttcagtttctcttattattttccattactgtgaaatgtttgtgaaaacttagaaaccaacattagcacattaattagtaactaaactgtgtacattattcagatttcatcaatgtttccattagtcttttttgtgtttgtggatctaaacaccctggctttcttttaaatctttatcccaccacagagtcattgcgcatgccactgcaatgcttaaaacactgtcttttaccctcactctttcctcatagccctcttttstgtgtggtttctactcattgttcagatctcagtccaaaggtcacttcctcagaggagcctctctgaagtccaggtctaggactgcttcctttattacatgccttcatgcaaccatgtactcttccttcataacacttttctcaatctgtaattataccctcagatatggtttggcggtgtctccacaaaattctcatctcaaattg

SEQ ID NO: 339601 - DNA, 580 bp, Homo sapiens
gcgtcgcttggcacgcagctgcaacttctgcctttcagaaatgctgtaaataattaagaccagagatgagacccctcagatcaccacccctcctcaaggagcaatctgtaatcaatcggatcactgtracatactcactatcctcacgtggaaaatggtataatcttgctaaaacttctgtctctgcctatatgatactctaactcctccagagtggaacactgaccccatttgtttgaagctgttttcctgggtggccatcctccagctctgtgcttgagcaaactctatacttaatgatattttctgaatctcattatttaaggttgacagttgatagcatcatgcttattaaataacttttttttttcttgagatagagtctcactccatcctgggtgatggagtgaaatggcatgatctcagctcactgcaacctctacctccagggttcaagcaatagactctcctgcctcagcctcccaagtagctggaattataggcacctgccaccacgcctggctaatttttgtatttttagtagagatggggttttgccatgttggtcaggctggtatca

SEQ ID NO: 339602 - DNA, 580 bp, Homo sapiens
gcgtcgcttggcacgcagctgcaacttctgcctttcagaaatgctgtaaataattaagaccagagatgagacccctcagatcaccacccctcctcaaggagcaatctgtaatcaatcggatcactgtgacatactcactakcctcacgtggaaaatggtataatcttgctaaaacttctgtctctgcctatatgatactctaactcctccagagtggaacactgaccccatttgtttgaagctgttttcctgggtggccatcctccagctctgtgcttgagcaaactctatacttaatgatattttctgaatctcattatttaaggttgacagttgatagcatcatgcttattaaataacttttttttttcttgagatagagtctcactccatcctgggtgatggagtgaaatggcatgatctcagctcactgcaacctctacctccagggttcaagcaatagactctcctgcctcagcctcccaagtagctggaattataggcacctgccaccacgcctggctaatttttgtatttttagtagagatggggttttgccatgttggtcaggctggtatca

SEQ ID NO: 339603 - DNA, 580 bp, Homo sapiens
gcgtcgcttggcacgcagctgcaacttctgcctttcagaaatgctgtaaataattaagaccagagatgagacccctcagatcaccacccctcctcaaggagcaatctgtaatcaatcggatcactgtgacatactcactatcctcacgtggaaaatggtataatcttgctaaaacttctgtctctgcctatatgatactctaactcctccagagtggaacactgaccccatttgtttgaagctgttttcctgggtggccatcctccagctctgtgcttgagcaaactctatacttaatgatattttctgaatctcattatttaaggtygacagttgatagcatcatgcttattaaataacttttttttttcttgagatagagtctcactccatcctgggtgatggagtgaaatggcatgatctcagctcactgcaacctctacctccagggttcaagcaatagactctcctgcctcagcctcccaagtagctggaattataggcacctgccaccacgcctggctaatttttgtatttttagtagagatggggttttgccatgttggtcaggctggtatca

SEQ ID NO: 339604 - DNA, 551 bp, Homo sapiens
gatagctatggcacaggtcattcatgtttgacgtgcatatagtgtcaaactaggtgatgccccaattttccatcacttttgtaggttcaaacacctgcaacaayattattcacccagtcttcacttagcacaaatgaggctcattaacctatggcaaagtaattctactctataccagcacaaaaagaagtacacacacaaactatggaaaaggaaaaataaggcagtagttgttcattaactggtcgttttaggttacctagaatatatttatattcacttttggggatttttgccaaaaataaaacatttcattttcagccaggtgtgctggcacatgcctgcagtcccagctacttgggaggctgaggtaggaggatcacctgaaccccgaaattcaagtccaacctgggaactatacccagacactatctttaaaaaacaaaaaaaaatttaacatttcattttttattctgttagcaaaatttcatttccccaaaaaatgcatttgctgaccttctggtttgagaaacactgccatagcctggacc

SEQ ID NO: 339605 - DNA, 557 bp, Homo sapiens
taggcctaaaaatgtcagtaacttcatgaaagtagaaatctaacagaccatattttctaaactctgtgaaatgacagtwgaaatgtcagtgaaatgaaatcaacaagtaatatctagccacatgcaagttttatttaagatcaacttaaataactattgggttaatgtgaaaattaaagcaaagaatattttacaaagtcatggaagtacttaagaggaagtcttgtgactggagtgaaaagactttaattcatctaattacttcttttttaaaaaaattcaattttattttgggttcagaggtacacatgcaggtttgttacatggatatgttgtataatgctgaggtttggggtagaaatgatcgtgctacccagatagtgagcatagtacccaataggtagtttttccaagtctctctcccctccctccctctgtagtagttgccagtgtccattgtttccatatgtgtactcaatatttagttcccacttgtaagtgagaacatgcagtatttggttttctgttcctgtcttaattcacttaggataatggcc

SEQ ID NO: 339606 - DNA, 557 bp, Homo sapiens
taggcctaaaaatgtcagtaacttcatgaaagtagaaatctaacagaccatattttctaaactctgtgaaatgacagtagaaatgtcagtgaaatgaaatcaacaagtaatatctagccacatgcaagttttatttaagatcaacttaaataactattgggttaatgtgaaaattaaagcaaagaatattttacaaagtcatggaagtacttaagaggaagtcttgtgactggagtgaaaagactttaattcatctaattacttcttttttaaaaaaattcaattttattttgggttcagaggtacacatgcaggtttgttacatggatatgttgtataatgctgaggtttggggtagaaatgatcstgctacccagatagtgagcatagtacccaataggtagtttttccaagtctctctcccctccctccctctgtagtagttgccagtgtccattgtttccatatgtgtactcaatatttagttcccacttgtaagtgagaacatgcagtatttggttttctgttcctgtcttaattcacttaggataatggcc

SEQ ID NO: 339607 - DNA, 553 bp, Homo sapiens
cacatattttatgatttcatttatatgaaatatctagaataagtaaatctagaacacagattgatggttgctgctgatggcagtggcgggccatctggagtggcccctgccatcacgctggctgtggcagaggggtcgggcttakgtggtagcagcgggagcagcagtggcagtggtgggaccccctgtgccccgcatcccctgtgtcccacatccccaaagcagccaactacaccacctccactctcacatggccaggccagacgtgttcccaggcccagaccctccactgctccagaacctggccctgcatcactgctgcagggagggtgtggggaggaggcagacagtacccagagcctgcccctggggccccccaggagaccgccaccctgggagccactgcgatggggccaggctgagttgcctaccagcaggggagcagcacagtctggcacagagaggcgggcagagaggggccccaaggcagacctggacccagggcggtgctgcaccccatggagcaggcaggagcaggcaggagtctcacact

SEQ ID NO: 339608 - DNA, 553 bp, Homo sapiens
cacatattttatgatttcatttatatgaaatatctagaataagtaaatctagaacacagattgatggttgctgctgatggcagtggcgggccatctggagtggcccctgccatcacgctggctgtggcagaggggtcgggcttaggtggtagcagcgggagcagcagtggcagtggtgggaccccctgtgccccgcatcccctgtgtcccacatccccaaagcagccaactacaccacctccactctcacatggccaggccagacgtgttcccaggcccagaccctccactgctccagaacctggccctgcatcactgctgcarggagggtgtggggaggaggcagacagtacccagagcctgcccctggggccccccaggagaccgccaccctgggagccactgcgatggggccaggctgagttgcctaccagcaggggagcagcacagtctggcacagagaggcgggcagagaggggccccaaggcagacctggacccagggcggtgctgcaccccatggagcaggcaggagcaggcaggagtctcacact

SEQ ID NO: 339609 - DNA, 488 bp, Homo sapiens
tgaaaacctgctgaaagaaaaataaatacatgaataataaagaaaagaacccagtactcagggagttctgaccttcgtaagtgagagctgaggtgatttacagtgcccctgttaggatattttcttaccagttaaattagattgatcatgcacaactcaccctgcaaatttactattggcagtgtatttgtggtttaaaaaaaaaactttgggcrctttagatagctaaataatagggggcgatcagagagatctatcacaggagaagtcaaagggaaaggctatttcccttggatacttactgttagctgtatttatttaaataacttgtttatgctttgattgcccacctcttccattaaaatgtaaattccataaagatgggaacagtatctgtgtttttcaccattgaatccccaccccctagcacatagcacaaatggaataagtagttaatgaaggaggacatgaaatttttagacatacac

SEQ ID NO: 339610 - DNA, 547 bp, Homo sapiens
tcaaacgataatggtgatggtgggtgttccataatctattcatgattctaagaaacagacctctggtgtttctcattctgattttcacaactagagcccagaaagattctcatctgctcatttcctttcactttaccttattacagaccacttaaaataatcctaatgtaataatgtaagttttaacaacaccaagatggttagtcctcaaagaagtttcctttycgtccctaaaccacaatgcaagagcattcctttgcctctattaaatgcacacaaacacacacacacacagccgatgcagcctgtccaacccctgctttcttctgattcatgggctctggggggcatgaagcaatgctgatgcctcaagggccccggcacatccgcagtcctctggctagggcagtgcccgcagctctgagaacatcaagagcacccgggcataaacatgtgcattcccatggcagcgctggcagtcctggcagtactacacgaataaatagacagcaactgtgggcttgtcctaatcagcataagaagtgaa

SEQ ID NO: 339611 - DNA, 570 bp, Homo sapiens
cccactggctcatggaggagctgagggagtgagcaataccaggcttggcagatcacctggaagttcctaccctacctgtgtccaccgggtgatgctgggcctctctgaagttatgaaggccaagtcggatcctgcagcaccctagttaagccaaacggaatattcaaaagagatgaaaggaatagcacatgaaatttcagcattttgatcctcaagagaacccagctgaagtagcctgagaaattgctcagggaaggctggaatcgctcagggaagcagatggagtttctgaaggttagggaggaagagcatattacgtggactgggcttgcaggtgtaacmagcacagatcagaggcgcaactgattaaggctacagagatgctggaaaggaacagagggactggtccaaagccagggaggaaatgaaaggcaagacaaagccctatcatggaccagcattgagagatgaggctttggcatttgtatagaagatgccagagggttgggcagatgccagtggagaaagagaccacatgactagactctttaagagaagactgagaagtgg

SEQ ID NO: 339612 - DNA, 570 bp, Homo sapiens
cccactggctcatggaggagctgagggagtgagcaataccaggcttggcagatcacctggaagttcctaccctacctgtgtccaccgggtgatgctgggcctctctgaagttatgaaggccaagtcggatcctgcagcaccctagttaagccaaacggaatattcaaaagagatgaaaggaatagcacatgaaatttcagcattttgatcctcaagagaacccagctgaagtagcctgagaaattgctcagggaaggctggaatcgctcagggaagcagatggagtttctgaaggttagggaggaagagcatattacgtggactgggcttgcaggtgtaacaagcacagatcagaggygcaactgattaaggctacagagatgctggaaaggaacagagggactggtccaaagccagggaggaaatgaaaggcaagacaaagccctatcatggaccagcattgagagatgaggctttggcatttgtatagaagatgccagagggttgggcagatgccagtggagaaagagaccacatgactagactctttaagagaagactgagaagtgg

SEQ ID NO: 339613 - DNA, 547 bp, Homo sapiens
atgacttgaggagcactgtatcataacgaakgtttgatttaggttgtccccattttgctaagccttattataccaagtaagctcatttccaggccatgaaaagcaattcaaaagaatttcatatcctcaggatactagaaaccagtactctgaagatcatactctaaaagttggctcaggcaaatttcaatatgcaaatttgtgcttttaaattacacttcattaaaatacacttaccagtttaagtggaggctgattttgtaactgcatttggaatttagattcttactactttcaaacaaatgctatgtaaacatgaaaattaagtaatcaaatgattctttgccctccttctacgacacttttcacttgaaaatacaaatcctgaaaacatcccactaaggaaatgaagtccctcggctttggaaatatactttaaccaagtggagagcagactgccctgacctcatgaagatcacaggcacagggaaacttcacaaaggccctgggcaactcagcccagaaactctgcccaggcccaaacaag

SEQ ID NO: 339614 - DNA, 551 bp, Homo sapiens
ataacgaaggtttgatttaggttgtccccattttgctaagccttattataccaagtaagctcrtttccaggccatgaaaagcaattcaaaagaatttcatatcctcaggatactagaaaccagtactctgaagatcatactctaaaagttggctcaggcaaatttcaatatgcaaatttgtgcttttaaattacacttcattaaaatacacttaccagtttaagtggaggctgattttgtaactgcatttggaatttagattcttactactttcaaacaaatgctatgtaaacatgaaaattaagtaatcaaatgattctttgccctccttctacgacacttttcacttgaaaatacaaatcctgaaaacatcccactaaggaaatgaagtccctcggctttggaaatatactttaaccaagtggagagcagactgccctgacctcatgaagatcacaggcacagggaaacttcacaaaggccctgggcaactcagcccagaaactctgcccaggcccaaacaagccctttgcattctcctgcttttacca

SEQ ID NO: 339615 - DNA, 543 bp, Homo sapiens
acatcacagccccaaggccaattaatgattgatggggcatatcaaaagcagatccccttgcctgtcataaatttatactccaaatagtggctcaaaccaagactagcctcgacctgaaacacagtttactgtgctccttccccttctctccctctgtctttacagctttcttctgcatacaactaccktcataaatgacttttacaagaattctcattttaggcactcgcctaagtaccgtgctacaggtaattccacaaactgctgccagtgtcattctttaaaataaaaacatgttacatatactattaataatgattatgtaaaataacaccaaagaagtattttaaaaataaaaactgtgtttgagattatgccacttaccttgccgtattcttcaaatagctctcttcaaagctagaatagaatccagttttgcatttgagtcaccttaccatcctcatatcttccattctcttgaattgtttctatgcttctgggcatactcaccttctttctgttttcatgctaagctaattcctt

SEQ ID NO: 339616 - DNA, 617 bp, Homo sapiens
tgaaacatagttttatcttcctagagtaaatgtgaaaatttttgaatgtgtaaaaagctattctctttaagtgtacaaaattggattaattctatcactagaaataaaaatgatgaggaaaaaataaccctccttcatatgaaaaatgtgtaaagtatatcgtcattagtctgttatatgtatgaatactatatttttattcctaagaaaaatgcaaagaatttcagaactctattatttgtctttctccttcatagatataatagattatcaatagcaatgtgtaaaatatgtatcatgtctccacttctgtgatattttaaagcagaaaatatcaaatgtaaggttaccaagactttttccttgaaaaatttcagatgtaggagtgaattttaataactataaaattatgtctaattagaaaaatataatattctctgatagtacacaatgtatccatgtgaaaagattgattttcatagaagtgaatakttgagcatcaattttaggcttagaaagcctaatcatgggttcagaactagactgaatatgtgggatcctattcagattcttcaggaacaccaatgactgtgattgcaaaataatttgaatgtaga

SEQ ID NO: 339617 - DNA, 540 bp, Homo sapiens
ttttaataaaagagctttggttaattggcaaaattaaggaagacagaaaaaaatagcatgtaaatgactttgaagggaagataaaaagttgcattcttggtagcgaaatatggcctatgtatggctggaacaaaacgttgtgtctggggatatatatgtgcttgtttatagctatgtaagaaaatgggagaggtgtgatgggagatgaggctgaaaatgactaagaggcttgtaaaccaatggttttttaaaggatatccagcagaataatttacttagggacatacgatgatcaggttaatgttttaagaatattttggctatggtgtggagaatggcttgggtctggggtggatagacaaaaccagaggagactaacttaatgaactccagggagaagagwgggaaagttaaatcgaggtttttctaagacaaaggtggacaaaatatggaatctaaaaaaccacgacgagatcccatctctcacaagttagaatggctattattaaaacatcaaaaaaatagcagatgctggtgagg

SEQ ID NO: 339618 - DNA, 567 bp, Homo sapiens
tgcactgtgaaatttacctagtctttgtgatggtaattccatcctacttttaatttgttgttggtttgtgtgtgtgaatgcagccttaaattatcaaatgcatacttaaatgatgaatataaaaccatttcacaaaatttatttttaaaggccagattaaaattcagtgaagtagaacaataagtgtccattcataaaatgcaataatattaatgtctaattctcatatagtttctcctatatgaycattctgtattagccattaaaggctctccagtttcttattatccttatatggtatcttcataccctgcttagctgatattagtttattttgattttcttctctttaaatttcacacttcactaattattacaatgtgaatagcccagttgcaaatatgagtaaatagctaaatagttttggcaattacttttctatagaaaaatattagggaaataagttaaatgcagttatagattgtatagctatatggctttccataaatatttgtaaacctgtgcatttgcacatacacgcacatatttttatgtagagtctattac

SEQ ID NO: 339619 - DNA, 631 bp, Homo sapiens
ggtataaaaaataaaatggtgtttatttagtaactattaagtttctctatttttcttcagagcttatagatcagtaaagtaacctttagaaccaaagtaaacaattacatactgaagaagccttctcatatactattcttcatactttgctaaattagtaagccagtttccactgggctaagtaccaatgaagtattcattttattagataaatagctgaaytgatacttggaatttaaatatgagtgtgtagtaattatgtgagagtatatagagaggtgacactgatgaaaatatggcacatatttatacaagtttacatagatgcttgtaattctaagtgcattatagatgtgaagggagtgagagaaaaattaaactggcattcttatgatttattaacattgcagatattactctgagtcaattacagaaaacctgggctttgtttgaatcacccagtttagaaatagacaacaccatcagatgtttcaaactctttcctggacttgcacatagcatgcaccgtgataacacttgaaataacagaggacacttgaagagattattttgctttacaatttacaagtatccaatgattgcatcgtagctaaaatatcagatgctaaag

SEQ ID NO: 339620 - DNA, 533 bp, Homo sapiens
tgtaaaatcatgatcaagcagttgaagtcatagtttttgaagaaaccaagctgttctctggtatttaaaacttgtgaacaagtgttaattaccatccaagctgccagattctctttcattaattgctaataaattacagctgctaataaattacagatgcatataaagttcactttcccaaaacaaaggaggtaatatagtaatatcaaacaccataagttctcataactacatgaaaaaacaaartgacttttacattttagaaagtgtctgaagaagtggatagaagagatggttggttattttacacgagttatttctcgaagttctaaattagagatttatcttatacatgaaattttcttaatgaagcctttttggtatttggcaagtggtccagtatggattatctcacccagatatcctctggctataaagcccttaaaacatatctatatatttataatacagttctaagtggctggttattgtgcatatcaccattaatttctaccttgatactttcacatgca

SEQ ID NO: 339621 - DNA, 561 bp, Homo sapiens
ataattatattgatattggtatgccatatacactttttaaatttaatattcataatattatttatcagccgagttaaactaactcagatgatacaaattttatgtaaattttatctcttaatctctcaaaaaacctgcaaaaaaatttttttgctgagttttattgccttacaaaaagaaaaagaagggttgggcgcggtggctcacacctgtaatcccagcactttgggaagctgaggcaggcggatcacaaggtcaagagattgagaccatcctagccaacatgctgaaacccccttttttttaagaaaacaaaaattagccgggcttggtggtgcacgcctgtagtcccagctactcaggagttttaggcaggagaattgctttaacctgggaggcaaaggtttcagttaacttagatygcgcccctgcactccagcctgacgacaaaacaaaaatttgttttttaaaaaaaaaaaaaaaaaaaaaaaaaaaaaaaaaaaaggaaggaaaaaagagaaaagaaaaccataaaaccatacaaaatagaaaaattaaaac

SEQ ID NO: 339622 - DNA, 593 bp, Homo sapiens
atatttgtttatacattttagatgaatttataaatgatagatctttaaagatatattagatacatctacagtattttggaacaccacaaatgtgatgttgatttcaagaagattaatatgtccctcactgtcgcagacagggacagattattgggcacagctgaccacaggtccaaggcagtgtgataattcttacacttttacaacggaaaaaaattgcatttatttgcatttgtttaaakaatatttttacatttaaattagagcctggtactctcctgggcatgagaaagaaaggaaaagcatttcttcctacttctgtattgaattaaaaggatcatggcattgtcatctaaaacaatgattaaataatagtgccatattttatttctaccacttattagttccgcttctgtgggcagattatttgaacatgtgcgtcctcgttttatacagtgtataatgcctactcataggattcttatagaagttagatatgagtacatttttatatgaaagtacctatactaggatctagcacaaagtttagtgttaactgaacctcatgtaacatttcatgtaaaagttgagat

SEQ ID NO: 339623 - DNA, 613 bp, Homo sapiens
caaccacatatttaacatatttcatctgttaggttaatacattatgacagctaaaagtcagtcatgtctatcagaggaacaaaaagccctccaaaacttgtgaataaatcttttgtgcctttaaagatatttgtataaaaatgctatccttttatttttatatacaacttaaataaatcgcactcrtttcaactcaaatttgaagataaacaaaccaaacgtgaatggggtccatgcgttctgtaaaacccagagaaacctgaataccagagcaactggcacagcatttcgactctccacttttgattatgggaagatcattgttcttctacaacttggaaggcccttgaatatattttggatagggcaaataatgggttgctcatattaaatcttgaaaatatttgccaatcactctgtatactaaaatgtctgctttgccctttgttttttgacctagcaaagaggatgcgttcacgtaattgaaattctgtcaccaatttgtgtgcttatatattattctttagtgttcagtgtagtgtaaggggttgggttaatcttccacaaaatggatgtgactgggaagaaatacctaagatgcaagtacccaatg

SEQ ID NO: 339624 - DNA, 613 bp, Homo sapiens
caaccacatatttaacatatttcatctgttaggttaatacattatgacagctaaaagtcagtcatgtctatcagaggaacaaaaagccctccaaaacttgtgaataaatcttttgtgcctttaaagatatttgtataaaaatgctatccttttatttttatatacaacttaaataaatcgcactcgtttcaactcaaatttgaagataaacaaaccaaacgtgaatggggtccatgcgttctstaaaacccagagaaacctgaataccagagcaactggcacagcatttcgactctccacttttgattatgggaagatcattgttcttctacaacttggaaggcccttgaatatattttggatagggcaaataatgggttgctcatattaaatcttgaaaatatttgccaatcactctgtatactaaaatgtctgctttgccctttgttttttgacctagcaaagaggatgcgttcacgtaattgaaattctgtcaccaatttgtgtgcttatatattattctttagtgttcagtgtagtgtaaggggttgggttaatcttccacaaaatggatgtgactgggaagaaatacctaagatgcaagtacccaatg

SEQ ID NO: 339625 - DNA, 536 bp, Homo sapiens
ccaagaaaattttgcctagtgtttgttttccttattttttgtttcgtctttccaaaaacagtacattaaatcttagttacaacaaggaaacattataatctttgagccatgcaattgagacaaacatgatagaaaatgaggatgaaaacagttgatgggaaagacgataagggagagaattctcatccctaggaatcttgataatgcatatttttattcctcttctgcttaaaatgaactatgtaactttagacagaacagctttctctaaacaccagttacttaattgaaacatgtttttgagagtggttttgttagaccgtctgtaatttctcaatatgatgacacattttaaagtatagtctatttaactgcacgtcaaatttgtatatattaaataaaccactatgagaggaaatgaataaaatcaaaagtttattcagttttaatttctggctasagcttctttgctaagaataacaaatactcatgttcactgtaaagggacaataacatttccaaatccagtagaagag

SEQ ID NO: 339626 - DNA, 610 bp, Homo sapiens
ttcatgttagctttaacaacttaaaacaacttaaaatatccaatattaatattattaaagatccaatattaatattggatctttgcttcataggtagacatttctctcacaaaagtcttattcagaaaatataaagaatagtccaagtaagaattggcatgaatttgaagataaaactagtacatatttatctcttttaaactcttcaaactrttctgtggttacccccatagtcaaatcaattttattaactgcattaagtactttcaatccttttgattataagataccattgaactagaaattttaccctctttgagaataacagaaatgagtgttctacaaaatttttcttcacatgtaatgtaatttatactgattgcaccatgcatatatcaaacgcttgtaacaaagtgaatgctctataaaattcatatgattattaaggttgcttcaatatggccctttgtttctcactactgtctaaacctattagaactagctgtttttttctgtagttactcatttgacaacaattcacatttatattcaaatatcaggatccagatagaatcagtcatctaagtcatatttgatgcaattttggtta

SEQ ID NO: 339627 - DNA, 340 bp, Homo sapiens
cagctttgtgaaacctggagaagagaatctagtgaagctaacctggacttacgctctgagataatawaaatgtgttgttttgagctgctaaacctatgagaatttattatggcagcaggaaaacgctaatacagagagactaagtatgtctgaggctaagtgttcccaggtgacactcatgccaagttaactgctacaggaaggcttaagaagcgaggtggatgtgaggatgcgcagtgggaagcaacgggtttctgatgcgcccttgaaggacaacaactgaaggagaaagatagcgctgcttatctctgcggatgaataacaaggtaaggaacctgaa

SEQ ID NO: 339628 - DNA, 340 bp, Homo sapiens
cagctttgtgaaacctggagaagagaatctagtgaagctaacctggacttacgctctgagataatataaatgtgttgttttgagctgctaaacctatgagaatttattatggcagcaggaaaacgctaatacaragagactaagtatgtctgaggctaagtgttcccaggtgacactcatgccaagttaactgctacaggaaggcttaagaagcgaggtggatgtgaggatgcgcagtgggaagcaacgggtttctgatgcgcccttgaaggacaacaactgaaggagaaagatagcgctgcttatctctgcggatgaataacaaggtaaggaacctgaa

SEQ ID NO: 339629 - DNA, 578 bp, Homo sapiens
agataaaatcatctatgtggtgaaggcactttatgaaatgggccctatttctcttgtcctttcgcactaggagaaatgttcagtagatagaaaccgacctggatcactccagtctgaactcagatcatgtaggactttaatcaaatgaacgcttaatagcggctacaccattaggatgtcctgatccaacatcaaagttgtaaatcctgttgtcgatatggattctagaataggattgtgctgttatccctaaggtaacttattccattgattaagttattgcaacaatatatgttagttcgcaaaggctggtgtggtgtwagtttaggttgttcaaaggttgaattatgctccaaggctactccaaccaaaatttttaattcagggatagtagattatctcctctaggcttattttgagtttttgtttgcgttaataaatttaagctccatagggtcttctcgtcttatttgtgtatatctgcctcttcacggataggtgaatttcactgatgaaaagtaagagagagatgaaccctcatgtggccattcatacaagtccctaatgaaagaacaagt

SEQ ID NO: 339630 - DNA, 578 bp, Homo sapiens
agataaaatcatctatgtggtgaaggcactttatgaaatgggccctatttctcttgtcctttcgcactaggagaaatgttcagtagatagaaaccgacctggatcactccagtctgaactcagatcatgtaggactttaatcaaatgaacgcttaatagcggctacaccattaggatgtcctgatccaacatcaaagttgtaaatcctgttgtcgatatggattctagaataggattgtgctgttatccctaaggtaacttattccattgattaagttattgcaacaatatatgttagttcgcaaaggctggtgtggtgttagtttaggttgttcaaaggttgaattatgctccaaggcyactccaaccaaaatttttaattcagggatagtagattatctcctctaggcttattttgagtttttgtttgcgttaataaatttaagctccatagggtcttctcgtcttatttgtgtatatctgcctcttcacggataggtgaatttcactgatgaaaagtaagagagagatgaaccctcatgtggccattcatacaagtccctaatgaaagaacaagt

SEQ ID NO: 339631 - DNA, 578 bp, Homo sapiens
agataaaatcatctatgtggtgaaggcactttatgaaatgggccctatttctcttgtcctttcgcactaggagaaatgttcagtagatagaaaccgacctggatcactccagtctgaactcagatcatgtaggactttaatcaaatgaacgcttaatagcggctacaccattaggatgtcctgatccaacatcaaagttgtaaatcctgttgtcgatatggattctagaataggattgtgctgttatccctaaggtaacttattccattgattaagttattgcaacaatatatgttagttcgcaaaggctggtgtggtgttagtttaggttgttcaaaggttgaattatgctccaaggctactccaaccaaaatttttaattcagggatagtagattatctcctctaggcttattttgagtttttgtttgcrttaataaatttaagctccatagggtcttctcgtcttatttgtgtatatctgcctcttcacggataggtgaatttcactgatgaaaagtaagagagagatgaaccctcatgtggccattcatacaagtccctaatgaaagaacaagt

SEQ ID NO: 339632 - DNA, 459 bp, Homo sapiens
tgtataaataaactaatctccattyattttatgcatatatatttgtatcatacaaagaaaaagaaccgatatatatgtgtgtgtgtatgtccatatatatatatatatatatatgaaggagatttataattggaattggtacatgtgcttatggagcctgaggagttcaatggtatactgtctgcacactcaaggaccagcaaaggcagtcatgtgattcagtccaaatctaaaaatcggagaactaagggagccaattgtgtaactctcagtctaagggcaatgacctgagcaactgggtgggaggaggaagcaattcaggtgtaagtctttgagtctgaatgctcaagaaccaggagctctgatgtcctcagccaggagaagatggatgtcccagatcaagaaagagaattcacctttccttcacctttattctatttgggccttcaattaattgga

SEQ ID NO: 339633 - DNA, 566 bp, Homo sapiens
aagatcagtttcggtgcaaaaataaagcccactgtattccaattagatggctgtgtgatggaattcatgactgtgtggatggcagtgatgaagagaactgtgaaagaggtaaggtatttttgtgtgtgtgtgcctgtaaatgagagaatgaaagttaaggttctgtgcagaatatacagtgtatgctagaggcagaggatagaatctttaaataattctctttactcttccaagtttcattacatagcagcctggtctaaatatgcaaaatccagatcattgtcagacagagtataatcccaatctgggcatgacaaacacgaacacagggcaagtgtttactgagtgtctaccatttcagactagatgycgggtcaagtatagggatatgtggagaatacagagaaagtagccaatgaaaccatgactacaaaagtatatcttgaattttctgtatatgctttcctttcacattgcttgccttactctgaaagcataggaacaacatatggcatactcaattgcttacattcatatgctgtatgatatataggttataggttgtg

SEQ ID NO: 339634 - DNA, 566 bp, Homo sapiens
aagatcagtttcggtgcaaaaataaagcccactgtattccaattagatggctgtgtgatggaattcatgactgtgtggatggcagtgatgaagagaactgtgaaagaggtaaggtatttttgtgtgtgtgtgcctgtaaatgagagaatgaaagttaaggttctgtgcagaatatacagtgtatgctagaggcagaggatagaatctttaaataattctctttactcttccaagtttcattacatagcagcctggtctaaatatgcaaaatccagatcattgtcagacagagtataatcccaatctgggcatgacaaacacgaacacagggcaagtgtttactgagtgtctaccatttcagactagatgtcgggtcaagtatagggatatgtggagaatacagagaaagtagccaatgaaaccatgactacaaaagtatatcttgaattttctgtatatsctttcctttcacattgcttgccttactctgaaagcataggaacaacatatggcatactcaattgcttacattcatatgctgtatgatatataggttataggttgtg

SEQ ID NO: 339635 - DNA, 624 bp, Homo sapiens
acatctctagatatataacccaaatttattcattacttaggtcctttgcgtgtggcagatgtacttaagaatyttatatgagaatatttttgtattcctgatgtttttatttatttgttaaaagagaaaaatgcaaacattttaacaatccaaaaaataatgctttactgcacaacttttatttaaaaagaaccctgaaatatggtatgatatggccaaattcttactgctattaaaaaatcgtttctttgtgtttgcaaaaaaatttttactggctattctaagtttttagtgatctagtttatcagtatttcagatacagctaaattgtctaataattctaaaaatgtcttttccccaagaaagacacaaattttaaataattacaattaaaactaaaaaatataaatttctgtgtattcagtaacataaaaattatgtgaagcagagtataacttagattcttaaaaactttcttctaacatcagtattttctaaaaaatagacatatatgagagtaatattagaatgttttgaaatgtcaacaatgaatacatgttattaaaaaaaattgaatattacttgttcctggtattatgcttgaaataaatataatacatatat

SEQ ID NO: 339636 - DNA, 462 bp, Homo sapiens
ttttatgactgggcttacttccatgcacagattagattatgaccactggaagctgaaaagtttagtctaattctgtggcatgccatatttctgggaatttggcaagtcacatttttattcatatggcatgtctagagtggccaatagttggttcactgatccagcatctgagtgtctgttttatgttggcactggatgtccaagggctctctcattggcacttgatggcatctgtctttgcttcccaagtgattttcctttccagtctccctcttttaytcctccatctgaacacaaacccatgctggcaaacttcggttagtttcagaataggacgaaccagccttggatgatccaatatttataaaaatttataacttgcttaggggttttaaagctaaacaatcagcagtattactcttgttctctgccttccatagtgccctgctttccaaggggaag

SEQ ID NO: 339637 - DNA, 487 bp, Homo sapiens
tactgtcactgcaagtttattccaatgttggacccagtgccaagagtaatgctattgaaaataatttcttcccaaggagaaaaatagaacagaaggatttcagcagcctccaccaccaatgaccaaattgttcttgctgtcgttgtagacaattgcaaccttgactgccaagaactcccacagccttctcaatactgacctcagtaaatgttgttgcatggagactatgccactgtactctccccatagctgaaacttctgcacccaacccatctagcacctttgcattcacctttaggtgaaggtctttccccactgaaacctatcctttaaggctggatgagattattgctcccttacatgtgaaaacatcaataaaaatctggaagaaasacaaaaatgcaggaaaaattacatcaccaaaagaacacaataattttccaataaccaccccaaagaaatagaaatctataaattgcccagtgaa

SEQ ID NO: 339638 - DNA, 572 bp, Homo sapiens
ggatgggggactgggggagggaaagcattaggagatatacctaatgtaaatgacgagttaatgggtgcagcacaccaacatggcacatgtatacatatgtaacaaacctgcacgttgtgcacatgtaccctagaacttaaagtataatttraaaaaaaaaaggaaatgtgttgttatgtgatttcatcattgtgtgatcaccatagagtacatgtatacaaacctagatggtatagcctattgcttccaggctacaaacctatacagcatgttactgtactgaatactgtaggcaattataacacagtagtaaatatttttatatctaaacatagaaaaggttaatacattacaacagctaggcaataggaatttttcagcttcattataatcttatgggaccaccatcttatatgtgttcaaggttcacagaaatgttatgcagtacacaactgtatgttatattaatactatattttgttttgcctgcctgccataatttctgtctcttccttaggaatcaagccccatttgccttgccaaagtggtgacatgtaatcgaggctgggcaa

SEQ ID NO: 339639 - DNA, 534 bp, Homo sapiens
tatagtttgaagttgggtagtatgatgctttgggctttgttgtttttgtttargattgctttgactgtttgggctcttttttggttctgtatgaatatcaattttttttctaaatctgtgaagaatgacattgggagtttgataagaatagcactgaatctgtaaattgctttgggtagtatttccctttttacaatattgattcttccagtcctttagtatgaaatatttttccacttatttgtcatttctggtttctttagcattgttttgtgttttccttgtatagatctttcacctctttggttaactttattcctaggtatttcattttctttgtggctattacagtggaattgtgttcttgatttcactctcagcctggatttgtttgtatatagaaatgctactcatttttatacattgattttgtatgctaaaactctactaacattgttcatcaattctagagaccttttggctgagtctttaggattattcaggcaggtatagaatcatagaattggtaaagag

SEQ ID NO: 339640 - DNA, 534 bp, Homo sapiens
tatagtttgaagttgggtagtatgatgctttgggctttgttgtttttgtttaggattgctttgactgtttgggctcttttttggttctgtatgaatatcaaytttttttctaaatctgtgaagaatgacattgggagtttgataagaatagcactgaatctgtaaattgctttgggtagtatttccctttttacaatattgattcttccagtcctttagtatgaaatatttttccacttatttgtcatttctggtttctttagcattgttttgtgttttccttgtatagatctttcacctctttggttaactttattcctaggtatttcattttctttgtggctattacagtggaattgtgttcttgatttcactctcagcctggatttgtttgtatatagaaatgctactcatttttatacattgattttgtatgctaaaactctactaacattgttcatcaattctagagaccttttggctgagtctttaggattattcaggcaggtatagaatcatagaattggtaaagag

SEQ ID NO: 339641 - DNA, 534 bp, Homo sapiens
tatagtttgaagttgggtagtatgatgctttgggctttgttgtttttgtttaggattgctttgactgtttgggctcttttttggttctgtatgaatatcaattttttttctaaatctgtgaagaatgacattgggagtttgataagaatagcactgaatctgtaaattgctttgggtagtatttccctttttacaatattgattcttccagtcctttagtatgaaatatttttccacttatttgtcatttctggtttctttagcattgttttgtgttttccttgtatagatctttcacctctttggttaactttattcctaggtatttcattttctttgtggctattacagtggaattgtgttcttgatttcactctcagcctggatttgtttgtatatagaaatgctactcatttttatacattgrttttgtatgctaaaactctactaacattgttcatcaattctagagaccttttggctgagtctttaggattattcaggcaggtatagaatcatagaattggtaaagag

SEQ ID NO: 339642 - DNA, 549 bp, Homo sapiens
gctgttggagttgattttctattatttaattgaggatttttgtttctgtattcatgagtgatattgttctgaagttttgttttttcattgtgactctgccagattttggtagcccctcctcctcaattttttacaatggttttagtataattgatatcatttcttctttttatatctggtagaatttggctgtgaatctgtctggtctggggcttttcctggttggaaggttctttatgactgattcaattccagaaatttatatttgtctatttagggtttcaatcttttcctaattcaatcttgggagattgtgtgctaccaggaatttacccagtttcaaatttgggtgcacagtgttgttcatagtagtctttgaggatcttttttatttctgtgggatcagttgtaatatcacctttgtaacttctgattgtgcttatttgaactttctttcttgattgatagccaggaatctrtcaatcttaattattttttttgaagaaacagctattggtttcattgatattttgtatggatttttgcatc

SEQ ID NO: 339643 - DNA, 576 bp, Homo sapiens
aattattttttttcctttctgagaagatgcaagtccatactaatggctatgttaaagagaagaaatagtgttaattatggggaagaagagatagaaataggaacagagacaagatagataaacacataagcagaaggagaagcagaatttctatacagtacaggcaaagcatgcccatttactcatatctgtttcactcctaaatacctattggccaaacacaaaygccttcactctgaaatatgctctctgacatatctctttaaatgaaattttatggatttacagatactgcttaattttgtctctgttaaaacatggtcatcaaaggatgctaaacttctaataagtagcagtttactacggtttttgtaaagattcccaagattttgttgtcagttttttatcagcacgtcactacgaaaactcaggcattatttgagatgtgaatttaaaatgtccatgttttatatctgtggtcttagtcccattgaatcaatgcactgtacatattacaatgacgtattacatattacaataatctgagaaggaaatcctcctaaatctttgacccgc

SEQ ID NO: 339644 - DNA, 539 bp, Homo sapiens
aaaaacaaaactcttccttatttttcaggtaatatataaaagaagagtccatcccctctcctaattccctcctccccccaccccgccccacacacacaaaccagaaattcatacagatattttgtataggttatttctggcataccctccatccctacaaactgggccataaaccttgcrtcttgttcaaccacacttgttaacagaggagaaatggatacacacatatttttacttattaattatcagggtcttcttcctggttagcgctatgtgactagagtgtgattctacctgcgtcaacatcaaattatgttattcactgccgtagttcaggttgcagtaacaaatagcatagactgtgtgacttaaacaattaacattgatttctcaccgttctggagcctggaaatctgagttcaaggtgccaatatgattgtgttcagtgtgagctctctttcagggtgaagaatgccagcttctacttgtatcctcacatggcaggaagagaagcagctagtggctctctggtctctaca

SEQ ID NO: 339645 - DNA, 539 bp, Homo sapiens
aaaaacaaaactcttccttatttttcaggtaatatataaaagaagagtccatcccctctcctaattccctcctccccccaccccgccccacacacacaaaccagaaattcatacagatattttgtataggttatttctggcataccctccatccctacaaactgggccataaaccttgcgtcttgttcaaccacayttgttaacagaggagaaatggatacacacatatttttacttattaattatcagggtcttcttcctggttagcgctatgtgactagagtgtgattctacctgcgtcaacatcaaattatgttattcactgccgtagttcaggttgcagtaacaaatagcatagactgtgtgacttaaacaattaacattgatttctcaccgttctggagcctggaaatctgagttcaaggtgccaatatgattgtgttcagtgtgagctctctttcagggtgaagaatgccagcttctacttgtatcctcacatggcaggaagagaagcagctagtggctctctggtctctaca

SEQ ID NO: 339646 - DNA, 441 bp, Homo sapiens
catacagatattttgtataggttatttctggcataccctccatccctacaaactgggccataaaccttgcgtcttgttcaaccacacttgttaacagaggagaaatggatacacacatatttttacttattaattatcagggtcttcttcctggttagsgctatgtgactagagtgtgattctacctgcgtcaacatcaaattatgttattcactgccgtagttcaggttgcagtaacaaatagcatagactgtgtgacttaaacaattaacattgatttctcaccgttctggagcctggaaatctgagttcaaggtgccaatatgattgtgttcagtgtgagctctctttcagggtgaagaatgccagcttctacttgtatcctcacatggcaggaagagaagcagctagtggctctctggtctctacatttataaggac

SEQ ID NO: 339647 - DNA, 552 bp, Homo sapiens
tgtcactgtcttgggaaatgagacttcccagttctgatttaattaaagattacggaatggggagattatcctgaactacctaagtgggctaaatgtaatcacaatggtccttgtattgtaagtggttggcagggggatatcatggtaatagatactctgctagtgcctccagaaacaaccaatcatgccctcatcttgaatttgatccagtagaattgatttggggtttatgacctcctgaactgtaagataatacatttgcattgttttaagcactatatttgtggtaatgtattacagcagcaagaagaaatgaatcaaggaascaatcccagatagcacattaagtaggtgggggaagcaaggtaggaaaagggaaaaaaatcaatgtctctatcaattaaagtatcgctgtgtatctggagcttgcttccttcagatacatctaagagcagtgcaaaatatacacctctggattttctactctgcttccccttaaggtatgtagaatctcgactctcatcagtcatctatttaaggttgattcttaca

SEQ ID NO: 339648 - DNA, 553 bp, Homo sapiens
catttctgtgttccttttgcatacacacacacacacacacacacacacacacacacacacacacacgtctttgaaatataacagcatgtatgaaatattccctcatgaccaaggacaggataattaaagccctcaccaatcagtgaaacaaaacacacaaaaataattgcaaacgttaactttagccttttagccttataataaatgggaaatttttttaagttataaagtatttctacctgtgtttataccaatcataataactgttacatagaaaataatattaccttttagaatgtaatgcaaaattctgagtatacaattagtggaatgtgacatgtgacttgctaaaaatcggtggatcatrcaggcagtgtaggaaagcaataggtgaatctagaagtaagacacatggttcttttcaaaattagtcacccgaagaaaaaagtgatttttttttccttaataaaactaaacacagcctcatcaatctaaaattaaaacatccagggtagattagccaaacatataatcatgtacaccttactagaaa

SEQ ID NO: 339649 - DNA, 363 bp, Homo sapiens
tgttgctatttttcatccctgaggaatatgaaaattggtgtaaacttcaaaaactggaaaaatcctagccctgtgattcatagtatatacctattcatttgactactttggttattagaaaagaagtaataatcaattactgtaaacttatcacttaataagtatgactgtgtctgctatccagatgttcatgtgaatatgtgcyttggcaataggtatgtttttaccgatgtagcaattacatttcaattgaacacagggtaaaagagaagcttgctggcaggaactgcctttgtgatgtatcttttactctgggatatatctcccttctagttctgtgctatataaagttttcagcaaatt

SEQ ID NO: 339650 - DNA, 639 bp, Homo sapiens
gatgattctccacaaaaagtcattgtggaattgttaccacaatcaaattaattaatacatcatcactaccattagttgccattatgtgtttatgtggtgaggacacttaaaatctattctcaagatgttcgtgttcttttcttctccctcctctctttaacctaggtattcccttccaggtccatagctttatgtttccctacaacagctcctgctcatgaaaagatttactaatgtactaataaagtataagcttcagaaaacctcatttatatagggcttatttttaggaattatacttaatattgtattttagaatgtatagattattaaggggcctccaaattgtacaggcttccttctggtgctgtaaaacttgcatcagcccctgctcatgatgctatgcacctgaccatatctgagtcttaaatgtacacctgtgagtgcctttacatattaccacctagatatactttccaacagggaggattcacacaggcatcccaaactcagagtatgcaatttgaatttatatctatactctaaacttttattctggtaattkaattttcacccagttagtcacccaactaagaaatgtgacaggcttccttaatccctcctatatttcagcccaaa

SEQ ID NO: 339651 - DNA, 561 bp, Homo sapiens
aacatttatagacattactctcaatgaacttacaatttaattataatatagtggttatagaggaagacaaacaaacccattagtgacttcatagcaaaaagaagattaaatatttactttatgtcctttaaatttctctagtctttccttttcctctttaggaggcatttattaatattatcctcrcttctgttaaaaataaaatttcacttttgaccactgctatgtaaaattaacaccataggatcacagaattgacagtgatattagatcttgcaggcccaacctcctcaatttataaggcataactgaacacttttcctgcttgtaagctcattaaagaacatgtgcttaagaacaaaagatttgcccaacccagtcagattcaagagctatgtaacacagtattagatctccgaacaggtgggtttaaaagaacatggttgctcttcacaatttctatttcaaaatacgagtcatgcctatgttctatgttcccttacctattcgttaaatttcaaaatttcaaaacttttaaagaaattggggaaacagttcttc

SEQ ID NO: 339652 - DNA, 623 bp, Homo sapiens
aaaatattgaaataagcatgcatagtgttagaattacagtcattaaattagtaaaaacttttttactactaactctcaatttacctgaagaagtacttggaagagtaaagtgattattttaattgaacacacaacatgtcaagatgaagacagtgctaaagtttcataatagacaaatggtaaggtgctttgattgtgcatagagwttccttaattgacagtaaatagtctaaaggactggaacagtttcaggcacacaatgggcactcaacaaatatttgctgatttaatgtctgaatgaagtaaatacaaattaaaatttggaaatctttctccagttagatatgttagaaaatatctgaaataaaagattaacttgatttctgagggaaattagatcaaaaggaaatataaatttagatgggaaattgtagtattgagtaaacactcatagataatttaatagaaactagatatcctaaaaatgaaaaattatgtaaaccttcctcctctctcagacattccctgagaacgttacaatatatttcatattataaaggagtaaaaaacagctgacagacatattggaaatgttctgttttagtgccagaacaaaaaaatgc

SEQ ID NO: 339653 - DNA, 561 bp, Homo sapiens
aacatttatagacattactctcaatgaacttacaatttaattataatatagtggttatagaggaagacaaacaaacccattagtgacttcatagcaaaaagaagattaaatatttactttatgtcctttaaatttctctagtctttccttttcctctttaggaggcatttattaatattatcctcgcttctgttaaaaataaaatttcacttttgaccactgctatgtaaaattaacaccataggatcacagaattgacagtgatattagatcttgcaggcccaacctcctcaatttataaggcataactgaacacttttcctgcttgtaagctcattaaagaayatgtgcttaagaacaaaagatttgcccaacccagtcagattcaagagctatgtaacacagtattagatctccgaacaggtgggtttaaaagaacatggttgctcttcacaatttctatttcaaaatacgagtcatgcctatgttctatgttcccttacctattcgttaaatttcaaaatttcaaaacttttaaagaaattggggaaacagttcttc

SEQ ID NO: 339654 - DNA, 561 bp, Homo sapiens
aacatttatagacattactctcaatgaacttacaatttaattataatatagtggttatagaggaagacaaacaaacccattagtgacttcatagcaaaaagaagattaaatatttactttatgtcctttaaatttctctagtctttccttttcctctttaggaggcatttattaatattatcctcgcttctgttaaaaataaaatttcacttttgaccactgctatgtaaaattaacaccataggatcacagaattgacagtgatattagatcttgcaggcccaacctcctcaatttataaggcataactgaacacttttcctgcttgtaagctcattaaagaacatgtgcttaagaacaaaagattwgcccaacccagtcagattcaagagctatgtaacacagtattagatctccgaacaggtgggtttaaaagaacatggttgctcttcacaatttctatttcaaaatacgagtcatgcctatgttctatgttcccttacctattcgttaaatttcaaaatttcaaaacttttaaagaaattggggaaacagttcttc

SEQ ID NO: 339655 - DNA, 540 bp, Homo sapiens
tctttcttacatcttcatgtgagcccatttgttcttgctgtagaacatgcttcctgtagcccgattaacwtttaagcattcaaatataaaacatagttttaatatcaatcacttcctccatcatcacaaccagttatcttctagtctattggcttagaaacctataattatcctattactgcaaccttcatcacaaatgggcagatggtacctacctcttattcttgaaattttgctcactttggtgtctgcagtacaattacatttgatgaatgaatgaatgaatcaatcaatcaatcaatgaaaattcatgaaaagtggaatatttggcatagtattatcaattctaggatactttccaaaatatacaatccttactatcagaaaagtgtacataattgtgtttataatgacattatttaaaataaagcaatattagaaatcatttaaaggttcaaatacagagcattatttaaatagattaggatggcagtgggcacttactgtttgtttgtttactttaaaaattagttctcctgg

SEQ ID NO: 339656 - DNA, 540 bp, Homo sapiens
tctttcttacatcttcatgtgagcccatttgttcttgctgtagaacatgcttcctgtagcccgattaacatttaagcattcaaatataaaacatagttttaatatcaatcacttcctccatcatcacaaccagttatcttctagtctattggcttagaaacctataattatcctattactgcaaccttcatcacaaatgggcagatggyacctacctcttattcttgaaattttgctcactttggtgtctgcagtacaattacatttgatgaatgaatgaatgaatcaatcaatcaatcaatgaaaattcatgaaaagtggaatatttggcatagtattatcaattctaggatactttccaaaatatacaatccttactatcagaaaagtgtacataattgtgtttataatgacattatttaaaataaagcaatattagaaatcatttaaaggttcaaatacagagcattatttaaatagattaggatggcagtgggcacttactgtttgtttgtttactttaaaaattagttctcctgg

SEQ ID NO: 339657 - DNA, 537 bp, Homo sapiens
aaccaaacacaactactgagatcagaaaccttaagcagttatcttctgtgcatactatctgaatcttctttaatgcatctggcttccaaaatgccaactaagggaacaaattccagcaggtrtagctacatattatgcattcaaaaataaaacctcactaaaaagaaacatattttctgctttgtgatttaaacttctcttacctcacgatttataccaggtttcaaatacatactaacattgaatttcaacagtgagaaacaaatgagatgaatatcgctattaagtttgcaatgttagtttggtatattgcttgaacttttggacctctttttaaatataaagcttctgggcgtagacaactacttttagaagttatccttactaaacaaggagatttctgtacaatgatgtcactgagtctgctgatactaaatgaatttagtgttcttcagtttgtcttagtgctatatgatgtgaaacttatctatcctccttttcaatgatagcctcactgatatattggtctaaacatgg

SEQ ID NO: 339658 - DNA, 537 bp, Homo sapiens
aaccaaacacaactactgagatcagaaaccttaagcagttatcttctgtgcatactatctgaatcttctttaatgcatctggcttccaaaatgccaactaagggaacaaattccagcaggtatagctacatattatgcattcaaaaataaaacctcactaaaaagaaacatattttctgctttgtgatttaaacttctcttacctcacgatttataccaggtttcaaatacatactaacaytgaatttcaacagtgagaaacaaatgagatgaatatcgctattaagtttgcaatgttagtttggtatattgcttgaacttttggacctctttttaaatataaagcttctgggcgtagacaactacttttagaagttatccttactaaacaaggagatttctgtacaatgatgtcactgagtctgctgatactaaatgaatttagtgttcttcagtttgtcttagtgctatatgatgtgaaacttatctatcctccttttcaatgatagcctcactgatatattggtctaaacatgg

SEQ ID NO: 339659 - DNA, 543 bp, Homo sapiens
aataaaatcctgtcctttgcagcaacatggatgcagctagaagccattatcctaagtgaattaacacaggaactgaacaccatactgcatgttctcacttatatgtgggagctaaacattgggaacacatggacataaagatgggaaatactagaggatggagagagaaaggggaaggattgagaaaccaactgttggggactatgctcwctacctgggtaacaggatcaactgtatcccaaatctcagcatcccacaatatacccagttaacaaacatgcaaccatgaacctaaaataaaaatagaaattagaaaaaaaagaatagaatatgacatactactgaaaaataaaaaaataagcatgttgtgccttaatctcctcaataataaaaaataatactggctttgcatgattaatataaagaggtgtgtgtaaagtactcagactctcttcctagttgatattaattaataaaaaagcaatgcctattatcaaggtagctgatgggatggtacaaatgtggatgttggagtagtttaac

SEQ ID NO: 339660 - DNA, 592 bp, Homo sapiens
aagcaaacagccttagagttaaaacatcagttctatttagaaatgtgtatatacattcctagctatctatatagctagataatagttttgatttctcaggatcaaataataaaacaacaaaaaaatcaaacaacttaaatatatgagctgtactgcattttttttgtttacaaaagtggaattagaatgctttttacagtataaagtttaagaacacaaacttcaggattagtctgatttcttcccaggtgtgcctcttaccacatgtatgacttttaatatattatttcacctttcagcatctcagttttctcatttgtccagtgaayactaataaaacatccctttcatgattattgtgagaattaaattaagtaatttaagagaagcaaataatcaggttagtgcctaggaaattcttagctattgctttattactactattattagtagtagcagttattttatctacgcagttatggggtttatcaatttattaattgaaacaggttaacatatgatttctagctacactcagttaatttgtttcaattggcaaaaattgtgcaaatccaaccatttctgattctcc

SEQ ID NO: 339661 - DNA, 648 bp, Homo sapiens
catatgcagttttaagaaataatacagaaaaggataggttcaacatgcctgactagagatatycaacatttgccctctccagaaagaagaaccgaaattatgattagataattacgctgtgaagagaacatttaggagagagcactggagttcaccagagaagtcacacgaaacacctgagacacagaaagggaaggaaatgagtggccagcacagcaaagattggctgagagcctggagagtaagagaccctaagcagtccacatcctcaccaacgactgctgtaagcctaaccatggaagaactctgctacccacatgaatcctgacactagcatgtgcagtgatgtggattccctgcaagggcattgcacccaatcaggaactcatgctaagacacatacgccctggagaccaaagcagctgcagcacagtgccatcatgagaacacagccatcactgaactgcattctatcctggaaatcacagcccccatatctccacaccccaggataccccactgacatatcacagtgcccacccagggggctacagtggcacagcaagggctggacccaaagttactgcaatgtccctagtaccctaactttcatggagtactatttcccatggaaaagatggtgcagca

SEQ ID NO: 339662 - DNA, 542 bp, Homo sapiens
ggacctcagcaaacttacaatcatggcagaatgcaaagggaaacccagcatgtccaacatggctggagagggaggaagagagagagaatagggagtaaacttttaaacaaccagatttcataagaactcactcactgtcacaagggaacagcaaggggaaagagaacagcaaggagtaagtccatctccatgatccagtcacctcccactaggcccctcctccaacactggaaattacaattcaacatgagatttyggcagggacacagacccaaaccatatcaacctctactctgctatttttgacaaatatctctaattttactttattaaatagattgtcttcgataaaagtatactcctatagttaactattgtatatacttaatagcaaacatattcttcactaaattgtataaggaaagcttccataagtacttacatagattttaagtataattattttaaaatatatttttgaatgttttctttttagatttcttttatagtcccagacaaaagaaatggtaactattttatca

SEQ ID NO: 339663 - DNA, 470 bp, Homo sapiens
tatcatgacagaaggaagagataatatttaaatatttaaaataattaaaatttaccaaatatctgccaaaattagtatcttaaaatatgaaaataygtgaataagtgtatgtaatgtgtatatatatgtatgtatatgcatgtatatgtgtgtatatatgtatatatgtatacacatacatatataatttttttttgcaaatactaaggtcccattatttggcccatttatgttcccttttaccagctacacaatcaataaggtttcaaatgttaaagttaatattagttaatctggtttaaatattgcggcaatttttaaacattattaaatcactaaatcaagattgtttaatttgcatatgttaaatcattgtaaaagaaaatctataaattaattctcttgcttacattgcttctattaaggctataatagaatctaagcaattttttttttgttgtagacagccc

SEQ ID NO: 339664 - DNA, 470 bp, Homo sapiens
tatcatgacagaaggaagagataatatttaaatatttaaaataattaaaatttaccaaatatctgccaaaattagtatcttaaaatatgaaaatacgtgaataagtgtatgtaatgtgtatatatatgtatgtatatgcatgtatatgtgtgtatatatgtatatatgtatacacatacatatataatttttttttgcaaatactaaggtcccattatttggcccatttatgttcccttttaccagctacacaatcaataaggtttcaaatgttaaagttaatattagttaatctggtttaaatattgcggcaatttttaaacattattaaatcactaaatcaagattgtttaayttgcatatgttaaatcattgtaaaagaaaatctataaattaattctcttgcttacattgcttctattaaggctataatagaatctaagcaattttttttttgttgtagacagccc

SEQ ID NO: 339665 - DNA, 573 bp, Homo sapiens
acgactgctgtaagcctaaccatggaagaactctgctacccacatgaatcctgacactagcatgtgcagtgatgtggattccctgcaagggcattgcacccaatcaggaactcatgctaagacacatacgccctggagaccaaagcagctgcagcacagtgccatcatgagaacacagccatcactgaactgcattctatcctggaaatcacagcccccatatctccacaccccaggataccccactgacatatcacagtgcccacccagggggctacagtggcacagcaagggctggacccaaagttactgmaatgtccctagtaccctaactttcatggagtactatttcccatggaaaagatggtgcagcataccaaggaggcagcccccaggacaaagaaacccaaagtgtgtgcttaatagagtatgagagctccctgtctgggactctgagaagtgacctactccccaggaatagcacaatctgtggctccagcagaaatgtagaatctcctcctccctcatgcacactgctacagcagttgctgccattaagatatcaggtaggca

SEQ ID NO: 339666 - DNA, 581 bp, Homo sapiens
tagcatagtgtctggtaaataataagcgtttcaccaatttcctgttttacaaattcattaactgtgggtaattgaacagtactatttaccttgggctatcaaagatcayaaacagtgcaaattgagacagaaacaaaacaaaacacaggtatcagagactcagtaatcagaaggagtcacccagtgaagtcatattaaagcaacgtcatagaacaatgtggagaattttttaggacaaagtattgttaaacttctccaaataaatgtctaaagagtcattagcatatattaactgttgttttaaagggtgcataattttacaatttccaagtctcccaacctctgcgtaaaaataaaatcacattagaaagaaataacccaaatatccctagaactttgtgcacacctacatgaaaaatattttggatttttttctcttaagttttttcatttctgagggtctcaagttgctactatgcataaacagtccctatacattctttcagttctgtccaccttactgctgtctgttatccatgagatcatctgaaagcagggcctctagatagctacagatttct

SEQ ID NO: 339667 - DNA, 581 bp, Homo sapiens
tagcatagtgtctggtaaataataagcgtttcaccaatttcctgttttacaaattcattaactgtgggtaattgaacagtactatttaccttgggctatcaaagatcacaaacagtgcaaattgagacagaaacaaaacaaaacacaggtatcagagactcagtaatcagaaggagtcacccagtgaagtcatattaaagcaacgtcatagaacaatgtggagawttttttaggacaaagtattgttaaacttctccaaataaatgtctaaagagtcattagcatatattaactgttgttttaaagggtgcataattttacaatttccaagtctcccaacctctgcgtaaaaataaaatcacattagaaagaaataacccaaatatccctagaactttgtgcacacctacatgaaaaatattttggatttttttctcttaagttttttcatttctgagggtctcaagttgctactatgcataaacagtccctatacattctttcagttctgtccaccttactgctgtctgttatccatgagatcatctgaaagcagggcctctagatagctacagatttct

SEQ ID NO: 339668 - DNA, 581 bp, Homo sapiens
tagcatagtgtctggtaaataataagcgtttcaccaatttcctgttttacaaattcattaactgtgggtaattgaacagtactatttaccttgggctatcaaagatcacaaacagtgcaaattgagacagaaacaaaacaaaacacaggtatcagagactcagtaatcagaaggagtcacccagtgaagtcatattaaagcaacgtcatagaacaatgtggagaattttttaggacaaagtattgttaaacttctccaaataaatgtctaaagagtcattagcatatattaactgttgttttaaagggtgcataattttacaatttccaagtctcccaacctctgcgtaaaaataaaatcacattagaaagaaataacccaaatatccctagaactttgtgcacacctacatgaaaaatattttggatttttttctcttaagttttttcatttctgagggtctcaagttgctactatgcataaacagtccctatacattctttcarttctgtccaccttactgctgtctgttatccatgagatcatctgaaagcagggcctctagatagctacagatttct

SEQ ID NO: 339669 - DNA, 507 bp, Homo sapiens
ctcactctcaccattcctattgaacatagtactggaagtcctggccagagcaatcaggcaagataaataaataaaaagcatctgagtaggaaaataagtcaaactatctctcttcactgataayataattctgtactagaggctctgccaaaatgctcctagaattgataaacaactttagtaaagtttcaggataccaaatcaatgtacaaaaattagtagcatttctatacaccaacaacatccagtctgggagtaaaatcaagaacacaattccacttacagtagccacaaagaaaatgatatacctaggaatacagctaaccaaggaggtgaaagatctctgtaaggagaattacaaaacactgctgaaggaactcagggatgacacaaattaatagaaaaatattccatgctcatggattgaaagaatcaatatcattaaaatggccatactgcccaaagcaatttacagattcaaagctatttctatcaaactcccaacgt

SEQ ID NO: 339670 - DNA, 627 bp, Homo sapiens
ggcttattaattttaattcagtccctttcactttttgatgaataatacaacttcttgtctactctaattcacataaaacagaatctaaaaatattacaacagtgaagtttaattctgctatttaatcagattttttcttaatttatacttccccttcatttatatttctttgttcatttatctttctaatactgatgaatggagttttaaaaagtattccaaaattggtgcttcaatcaaaacctgtgcttctttcagctaatgcttcacacatactactttccaaactagytgccttttgcttcaactgtcacattttaaaataattaagacacttgccatccactggctattgaagttcatgaattaattgacctgaatgttttggatttctttgatctaagctattttctctataatactgtgatttacctgacattaaagggcaaactaagcaatgagtttctgaactacattcacacaatacagcagcagtattccaataagtggcattaattgcaattaggatatttacatggaagcaggatgcaaatataacatttttgggatacatcaaatgccagaaattattattaaaattagaccaatggaagatataatcatttg

SEQ ID NO: 339671 - DNA, 627 bp, Homo sapiens
ggcttattaattttaattcagtccctttcactttttgatgaataatacaacttcttgtctactctaattcacataaaacagaatctaaaaatattacaacagtgaagtttaattctgctatttaatcagattttttcttaatttatacttccccttcatttatatttctttgttcatttatctttctaatactgatgaatggagttttaaaaagtattccaaaattggtgcttcaatcaaaacctgtgcttctttcagctaatgcttcacacatactactttccaaactagctgccttttgcttcaactgtcacattttaaaataattaagacacttgccatccactggctattgaagttcatgaattaattgacytgaatgttttggatttctttgatctaagctattttctctataatactgtgatttacctgacattaaagggcaaactaagcaatgagtttctgaactacattcacacaatacagcagcagtattccaataagtggcattaattgcaattaggatatttacatggaagcaggatgcaaatataacatttttgggatacatcaaatgccagaaattattattaaaattagaccaatggaagatataatcatttg

SEQ ID NO: 339672 - DNA, 541 bp, Homo sapiens
tagctgccttttgcttcaactgtcacattttaaaataattaagacacttgccatccactggctattgaagttcatgaattaattgacctgaatgttttggatttctttgatctaagctattttctctataatactgtgatttacctgacattaaagggcaaactaagcaatgagtttytgaactacattcacacaatacagcagcagtattccaataagtggcattaattgcaattaggatatttacatggaagcaggatgcaaatataacatttttgggatacatcaaatgccagaaattattattaaaattagaccaatggaagatataatcatttggttctattctgcaaatgtagttcaacacccactatatccaggcattttggaggaaatcagtaaaatgcctgtgagtctaattgaagaaaatgaaaatgagtatggtctgaatgtagcccctcctactccttttattatggcgagagaaagttttctcttttaatattcaccttttcactttaaaattaaaaggccaaaaaaa

SEQ ID NO: 339673 - DNA, 438 bp, Homo sapiens
tttagctcttttatatttcctcttcacttgcattatgattcacattccaaactgatcattacctcctaaactgtatcatacacatctttctaaaattctgccttcttaatagaagggcccttttaaaaacctctaattatgagaatcatacaatagtattacaataatagaggaggaagagaaaataatttcaaggaaaataaatccaaatttttgttcagtaaacaacttagactgacccaagcatgagacataatragctaatggtgagggagggggcaaaaaagtgggaccacatgtcagacacttgaccctaggaaaaccaatcaaagtctttttacatggattaatatggaatgcatcaaaaattatctttctttctgagatcataagcttgaacattatgtaaaatttctgatgctagaggctatctttcca

SEQ ID NO: 339674 - DNA, 656 bp, Homo sapiens
ttctgtggaagacaactattacctgccttgcaagaggctgatatcagaagctttttcagaagacttagtggattgctagagttctcaaaataaagtctgagcataagtatatgtctttgtcagttaatggtgctataamaaattaccatagactaggtggcttaaacaataaacatttatttctcacagttctggaaactaaaagtccatgatcaaggcatcagcagatcaacgtctggtaagagtcagcttcctgatgagcagatgcctccctgacttaatctcacttgttggagagcaagaaaagaggatgttttcctgtcacttcctataagggtgctaatcacagtcatgtgagctccactcttatgacctaattatctcccaaaggctccatctcctaatatcatcatattgaaggttagaatttatttcaatatatgaatttgggatgatataaacattcacttcataatagatatagactgacaactgaggccagcttgaggaaagttaattgtgcttgacctaagagggactaagatccctttcctttgtaggattatggcagtttgtactaggtcctactccaagaaaatattatgaagttgaccatcagtgtttgttctgtggaggactggagttcaacaaagcca

SEQ ID NO: 339675 - DNA, 656 bp, Homo sapiens
ttctgtggaagacaactattacctgccttgcaagaggctgatatcagaagctttttcagaagacttagtggattgctagagttctcaaaataaagtctgagcataagtatatgtctttgtcagttaatggtgctataaaaaattaccatagactaggtggcttaaacaataaacatttatttctcacagttctggaaactaaaagtccatgatcaaggcrtcagcagatcaacgtctggtaagagtcagcttcctgatgagcagatgcctccctgacttaatctcacttgttggagagcaagaaaagaggatgttttcctgtcacttcctataagggtgctaatcacagtcatgtgagctccactcttatgacctaattatctcccaaaggctccatctcctaatatcatcatattgaaggttagaatttatttcaatatatgaatttgggatgatataaacattcacttcataatagatatagactgacaactgaggccagcttgaggaaagttaattgtgcttgacctaagagggactaagatccctttcctttgtaggattatggcagtttgtactaggtcctactccaagaaaatattatgaagttgaccatcagtgtttgttctgtggaggactggagttcaacaaagcca

SEQ ID NO: 339676 - DNA, 575 bp, Homo sapiens
gagttctcaaaataaagtctgagcataagtatatgtctttgtcagttaatggtgctataaaaaattaccatagactaggtggcttaaacaataaacatttatttctcacagttctggaaactaaaagtccatgatcaaggcatcagcagatcaacgtctggtaagagtcagcttcctgatgagcagatgcctccctgacttaatctcacttgttggagagcaagaaaagaggatgttttcctgtcacttcctataagggtgctaatcacagtcatgtgagctccactcttatgacctaattatctcycaaaggctccatctcctaatatcatcatattgaaggttagaatttatttcaatatatgaatttgggatgatataaacattcacttcataatagatatagactgacaactgaggccagcttgaggaaagttaattgtgcttgacctaagagggactaagatccctttcctttgtaggattatggcagtttgtactaggtcctactccaagaaaatattatgaagttgaccatcagtgtttgttctgtggaggactggagttcaacaaag

SEQ ID NO: 339677 - DNA, 393 bp, Homo sapiens
aaaacgatagttccaggatggggaacaggtataaattttgggtccagccacagatctttttatctcccatgtagcaatggtgtacatcatcttcccagaggttctgcaggtcctctgacaactttttgtatctggttacatactttaacatagcattttacccccaacataagatctaagtttggtcacatcaaaagtggatacgtgtatacctatgttttagaattgaggactgaagatcttttccttttcttttcttctcatctcatayaccaaaaaaagtcaaatgaatagaatggtatatgttaaaaagatcatacacagttatatatttctcccatatggtggtaatattttacaaatccaatgagaaagtgatcaattttttacaac

SEQ ID NO: 339678 - DNA, 393 bp, Homo sapiens
aaaacgatagttccaggatggggaacaggtataaattttgggtccagccacagatctttttatctcccatgtagcaatggtgtacatcatcttcccagaggttctgcaggtcctctgacaactttttgtatctggttacatactttaacatagcattttacccccaacataagatctaagtttggtcacatcaaaagtggatacgtgtatacctatgttttagaattgaggactgaagatcttttccttttcttttcttctcatctcatacaccaaaaaaagtcaaatgaatagaatggtatatgttaaaaagatcatayacagttatatatttctcccatatggtggtaatattttacaaatccaatgagaaagtgatcaattttttacaac

SEQ ID NO: 339679 - DNA, 551 bp, Homo sapiens
ttatttaagacaaatttactatcttgtttatgtttttatgttttgttttattgttgaagtgctttttttcaatttggtatttagtgaataattccactgttatcactttttttcactttctgaaatacacacaaagaagagatggaatcacaactgacagaagtattttccctccattaattgaatagyatggtttattcaaatatataggcaatggacatttttatgagtatttacttttcatgctagtcatgagctattcttattaaggtatgagggtttcaattgcaaaacaagtatctttgattggccaagtgaattttatagaaagtatttggtagaacaggccatgtcattttgtgttgttaggaagatctgatgaactccattgttccttttatccaagaattggctggcattccccagtacaaagaagctatgtgtgcagctatattttttttaagtttacagattgtaaccatcctattatactatccaatatattatattcaaatagtcctccttgcatattttttctaccaagaataaga

SEQ ID NO: 339680 - DNA, 551 bp, Homo sapiens
ttatttaagacaaatttactatcttgtttatgtttttatgttttgttttattgttgaagtgctttttttcaatttggtatttagtgaataattccactgttatcactttttttcactttctgaaatacacacaaagaagagatggaatcacaactgacagaagtattttccctccattaattgaatagcatggtttattcaaatatataggcaatggacatttttatgagtatttacttttcatgctagtcatgagctattcttattaaggtatgagggtttcaaytgcaaaacaagtatctttgattggccaagtgaattttatagaaagtatttggtagaacaggccatgtcattttgtgttgttaggaagatctgatgaactccattgttccttttatccaagaattggctggcattccccagtacaaagaagctatgtgtgcagctatattttttttaagtttacagattgtaaccatcctattatactatccaatatattatattcaaatagtcctccttgcatattttttctaccaagaataaga

SEQ ID NO: 339681 - DNA, 584 bp, Homo sapiens
tgttttaccaaacatagattgtcaaagataatgcaaacatccaagatatttcaaatagaagagggtttaatactgggggcaggctaaaggagcagaaattggtgataatgaaagtagtttggaattgatacctctgccatattcttgatagtctaaatgttgctatttacatgcaaactcagaaatctgtacgaaaccactaccaacgtccctgcttcatgtgatggcagggaaatatgaagatcactgcaaagccccttttagcaaagtcatattttagctgctgttcttagacacataagatcatggcttctgwctaattttctaccttccaagttttgagtaactgcatttcacagaaggtaatcatatccagaacccttaaacaagagtctaatatattcaattcccaggcttctcatgcctaaaattgcgtgcaaacagtagaaagaaaaaaaatgatgatagaacagcaacaaaagcaataacaaaatattgctgaacagtgaatgttaacataagtcacagaattttattggacttgaacttcacatttactcagtaaatttaaaatcttctctatt

SEQ ID NO: 339682 - DNA, 513 bp, Homo sapiens
aaatattttggtctctgaaagacactagtcactatcacatacttgaaaaagataaattacaaagtggaagaaaayataagcaagggagtgcttccaagatggcctagtcggaacagctccagtctgcagctcccagcgagatggacacagaagacgggtgatttctgcatttccaacagaggtacctggttcatctcactgggactggttggacagtgggtgcagcccatggacggcgagccaaagcagggcagggcatcacctcacctgggaagtgcaaggcgtcaggggatttccctttcctagccaagggaaaccgtgactgactgtacctggaaaaacagtacactcctgacaaaatactgtgccttttgatggtcttagcaactgcagaccaagagatactctcctgtgcctggctcagcaggtcccatgcccacagaggcttgctcactacgagcgcagcagtctgagatccacctgtgaggctgcagcctggcagggggagggatg

SEQ ID NO: 339683 - DNA, 513 bp, Homo sapiens
aaatattttggtctctgaaagacactagtcactatcacatacttgaaaaagataaattacaaagtggaagaaaatataagcaagggagtgcttccaagatggcctagtcggaacagctccagtctgcagctcccagcgagatggacacagaagacgggtgatttctgcatttccaacagaggtacctggttcatctcactgggactggttggacagtgggtgcagcccatggacggcgagccaaagcagggcagggcatcacctcacctgggaagygcaaggcgtcaggggatttccctttcctagccaagggaaaccgtgactgactgtacctggaaaaacagtacactcctgacaaaatactgtgccttttgatggtcttagcaactgcagaccaagagatactctcctgtgcctggctcagcaggtcccatgcccacagaggcttgctcactacgagcgcagcagtctgagatccacctgtgaggctgcagcctggcagggggagggatg

SEQ ID NO: 339684 - DNA, 593 bp, Homo sapiens
caacttctgcagacttaaacatccctgtctgacagccctgaagagagcaatggttctccagcacagcgttcaagctccgagaatggatagactgcctcctcaagtgtgtccctgacccccatgtagcctgaatgggaggcacctcccaataggggccgacagacacctcatacaggtgggtgcccctctgggatgaggcttccagaggaaggatcaggcagcaatatttgctgttctgcarcctctgctggtgatacccaggcaaacagtgtctggagtggacctccagcaaactccaacagaccttcagctgaggggcctgactgttagaaggaaaactaacaaacagaaaagaatagcatcaacatcaacaaaaaggacatccacaccaaaaccccatctgtaggtcaccaacatcaaagaccaaaggtagataaaaccacaaagatgagaagaaaccagagcagaaaagctgaaaattcccaaaactagagtgcctcttctcctccaaaggatcgcaactcctcaccaggaacagaacaaaactgaacagagaatgactttgacgagctgacagaagtaggcttcagaag

SEQ ID NO: 339685 - DNA, 238 bp, Homo sapiens
ttaaccattaatctcagcccctcattatacaatagattttctatagaattttctctatatktgtaattatgactaatttaactctcaataaggaaaacttttcagaatcctttaagtgtcatgatttatcttaagcaatactaaccagcaagagggaaacttgaagtagtaatagttggaggtcaagccaaatgttaatttgcctacttataacttttgttaaagttataacaaagaa

SEQ ID NO: 339686 - DNA, 403 bp, Homo sapiens
attgagaacagctctgccagtgaaataaarattcggatttatcaaaggaaactcaaactaattttttaaatgtgcccaattgtatacatggaacactacctatttgcattatcctaattttaaactaggagatttttagaaatcaatgagtgtatctaataaacaagatttagaaaagcagttacatctttattttcatatctatatacgtatttatttttatcacagaaataagtttaaattttattgccttttgttggtaaatgactaagttaaatggccatgttacaatatcctaaagatgcttcaaactatgctctatggggtaacttataaaaggcccagggctatctctagcatttggaaatatcttgaaatgtttattaatggcctcataaaccat

SEQ ID NO: 339687 - DNA, 415 bp, Homo sapiens
tggcataaaatcacataggtagcctgtggatttttatgctcagctattttgattcaacagttagtgttatttctgaccaaaacaatgttatgtttgtatctctatcaggattagaaggaaatattagagatagtcagaatttagaaaatcatattttacaaacttaagaaaacatatataaatagaaagattgcttgtctgcaaataagataaaagcaagyatgttttaccaccaggttgtcatagaaggctaaaaatattttataaaatggaggatgtggttgagtgttaccagattggaaaaagaagaaaaataacatgttttggaaagtcaattgaaaacaattttgaagatctattacataattgattccataaaacctgggtgccatcctatgtagacaaggtttgacat

SEQ ID NO: 339688 - DNA, 537 bp, Homo sapiens
atggacatttcagggatactatgcaatgtaacagatgaatagagagagagaaaaagactgacagaatagagagagaatatgtatataccagaacagacagagaatacatacacaccaaggcatcctggttacagtacaaaagtttatcactgaagttattttttctctccattcacctataggccatttgatagtttaaaaattaataaagtgaatattaagttctgttatggtgggaaaaactgctgttaaagaatgcatatgaacaattacctaatgagaatgaacaattagctattccgtatataatgcaacagttttacagatttctgttcttggagttcattaatatagatacatactgttagagcagagggaaagacgtgaaggaagaccaaatgagagagccgctcartggttgagacaggttttttgagagtaaacctgagaagggcttctggccggcagggtcaggagcaaacctctcttacagcctgaagcttttaaaaagggcctggtaggggaagtgtattctga

SEQ ID NO: 339689 - DNA, 526 bp, Homo sapiens
aactaactctaattaccaacattggcaaagtaaatactacctattatcatgaaggtgacctgtaaaaggaaacaagttctaagacaaataatgctataacacaaaggagaagcagactggagggcaaaggaagatgtggttttagtttgacatcctcaaagacatgtagagaattacaggcatcatcaggattggtagtgatcttacagatcaattttttgaataacaattacagacatcatgagctagaacctgagagctggaaagctctctttggccacatgtagtgaagtgtggaaaggggatattatagcaatagcctgcataatggtgaacaacactgctgcatcttgtacatatcatgagccaaaggtagtcataaacagagattgggggtagagatgccagaggaaaaataaaaaawtttttattaaaatgtttaataacaacttaaattaaaaaaatttaaaatttttaataaaaatctttttattaaaaatgcaaaatgatcaaacatcaagtgtgc

SEQ ID NO: 339690 - DNA, 440 bp, Homo sapiens
gctgctcagcacagcacctatattaatttcctggggctgaaataacaatataccacaaattgatggcttaagcaacagaaatttattatttcacagttctggaacctaaaagtctaagatccaggtactctcagagtcttgcttcctctgaagatgctctcacctagcctctcatcrttctttgacttgtgacagcattaactccaatcttcacacagcattctctctacattcaaatattaccttttaaaaaagacactgagatattggattagaatccacactaatgattttattttaatttgatgatctgcaaaataccctatttccaaattaggtcacagtgacaagtactggggggttagaaccttaacatcttttggggaatcacaattcattctgtaacactgctcaacttaatacatgtgaattgagttgtt

SEQ ID NO: 339691 - DNA, 604 bp, Homo sapiens
cagaaatttattatttcacagttctggaacctaaaagtctaagatccaggtactctcagagtcttgcttcctctgaagatgctctcacctagcctctcatcgttctttgacttgtgacagcattaactccaatcttcacacagcattctctctacattcaaatattaccttttaaaaaagacactgagatattggattagaatccacactaatgattttattttaatttgatsatctgcaaaataccctatttccaaattaggtcacagtgacaagtactggggggttagaaccttaacatcttttggggaatcacaattcattctgtaacactgctcaacttaatacatgtgaattgagttgttaaatggtatgtgacagggaagagaaaacaaaactttttggagacttgaaaagatattaaaaagaaagaatataataaatataattttggtttaggtagagacttcatgtgccaaaatattgtccatatgtagcatacatagcagagtcacatatttattacaaggcagctcctctattttctataactgagctagttttgacttgtgagcctccaatccagagtatagttgggtggtgg

SEQ ID NO: 339692 - DNA, 551 bp, Homo sapiens
cctgccctcaattgttttcatgtctagaccacagacccatatttgctctctgcataccatgatctggattctggttccgcagctactgtgcatacacccattttctagacgctggcaccaccaccacagcaggcacagctgtgttccacacactggcatactaccacaacaggtgagtctatacccggaaacccagggttgcaatcatttaatacatgcctatgcttcaggactcagctttgcatctattccatgtatgctttcacatcagacaagggcactactgycactgcaagtttattccaatgttggacccagtgccaagagtaatgctattgaaaataatttcttcccaaggagaaaaatagaacagaaggatttcagcagcctccaccaccaatgaccaaattgttcttgctgtcgttgtagacaattgcaaccttgactgccaagaactcccacagccttctcaatactgacctcagtaaatgttgttgcatggagactatgccactgtactctccccatagctgaaacttctgcacccaacc

SEQ ID NO: 339693 - DNA, 551 bp, Homo sapiens
cctgccctcaattgttttcatgtctagaccacagacccatatttgctctctgcataccatgatctggattctggttccgcagctactgtgcatacacccattttctagacgctggcaccaccaccacagcaggcacagctgtgttccacacactggcatactaccacaacaggtgagtctatacccggaaacccagggttgcaatcatttaatacatgcctatgcttcaggactcagctttgcatctattccatgtatgctttcacatcagacaagggcactactgtcactgcaagtttattccaatgttggacccagtgccaagagtaatgctattgaaaataatttcttcccaaggagaaaaatagaacagaaggakttcagcagcctccaccaccaatgaccaaattgttcttgctgtcgttgtagacaattgcaaccttgactgccaagaactcccacagccttctcaatactgacctcagtaaatgttgttgcatggagactatgccactgtactctccccatagctgaaacttctgcacccaacc

SEQ ID NO: 339694 - DNA, 608 bp, Homo sapiens
tgtgatggtatttggaggtggggcctttgggagctaattaggccattaaggggaaaccctcaagaaagggattcatgtccctgtaagtggagaagagaccagaactatctctcagccatataaaaatactatgagaaattggccatctgtaaaccaagaggagggcccttgccaagaactcaaccatattggcaccatgatctgggtcttccagactccaaaactgtgagaaataaatgtttgatatttaagtcatgaagtcagtggtgtcttgttactgcagtcaaaactgactaagacaacaatcttacacagatcataaaatttttcttgtgttttccagtatacaaaataaattcacttgagttcctttaatccttataataactcagtggaccaggtacaaactcaatgggtcagcatagatgggtagatcttcatgctatccatgaggaagacacaaaatgaggtttggagacattgtgtgacttacataaagtcacaaatctgataaatgacttagtgggataagactcccattyttcatactactaggataatgttctttccattatacaagtctttttacaacttcttttttttttttt

SEQ ID NO: 339695 - DNA, 575 bp, Homo sapiens
tataaacaaccttacaaggtacttagtacagagttaggatggtgttatatattatttcactttatttatttactatgtccaaaaacaaatatagttcttagcagaacattctactaatattctttcatattgagagtcctctttcaatattttagaatatttttgaagtacaggatccatagtagggaagaagctaagctcattctcatgttcagcttaaaaactgaatctaaccacattagaaaacatttctacttcctctaatcactctttttcattaccctragttactaccttcagagcactaatcactgtgtaaaattgtttaaatttattacctcttttggttttattgtctactactctctccaagtaaaatctaatctttttaagggtagctacctattctcttgttcaatgtaacatcgttgtcatcaaactctgcctggcacattgttggtagtaaataaataattgaccaactgtcttacagctattttaaattatcttatcaaaatctcaagcttgttttgacttacaggcagggttaaatgtgttttcacttagaagaaatt

SEQ ID NO: 339696 - DNA, 507 bp, Homo sapiens
aatatattcaatgatttaaggattgcatattgagtaactctattttcagtttcacattgaaatttgaaatatacacactaaataactagactttatttcatttgaagtctgaatgctcattacaaggtgatggatgaattatataaagagaatataactcagtccataactttttagttagaaaattgtttctcctcatttactaaattactcagtaacaatttaatgggtaaagagggaaaaggaacactaaaaatgaaagtgaaaatctaggctctcagaatgaataatatgakaatttttcagacgaatgctttagattgtatcaatgaaaaagtacctgatttaaaaaatgaatgtttaatattcgaaagaaattaaattcccctagatccctgctaaaagtttcattgcatttccaaattaaacaactctttcaggaactgctcaatgtgtcagtcgtctttaataattgaatttgctccaagaaataagcaaataaagagc

SEQ ID NO: 339697 - DNA, 507 bp, Homo sapiens
aatatattcaatgatttaaggattgcatattgagtaactctattttcagtttcacattgaaatttgaaatatacacactaaataactagactttatttcatttgaagtctgaatgctcattacaaggtgatggatgaattatataaagagaatataactcagtccataactttttagttagaaaattgtttctcctcatttactaaattactcagtaacaatttaatgggtaaagagggaaaaggaacactaaaaatgaaagtgaaaatctaggctctcagaatgaataatatgataatttttcagacgaatgctttagattstatcaatgaaaaagtacctgatttaaaaaatgaatgtttaatattcgaaagaaattaaattcccctagatccctgctaaaagtttcattgcatttccaaattaaacaactctttcaggaactgctcaatgtgtcagtcgtctttaataattgaatttgctccaagaaataagcaaataaagagc

SEQ ID NO: 339698 - DNA, 577 bp, Homo sapiens
tggaagatgaaaatttgatcagatatcacatgcgatcagagagtaagggtggagaatttcttaaaacctgacttagcaggatttttactaaaactgggaggcaaggcaaggactaagacagaaacctgagattgagaactagtcaagaaaagggctcagaggggcctgactaaagtttgccagagttgaagaatatcagagttgaacagattgaagaaacttgacacctgctggtaggaaaaatcagcagtgtgggtgagcagatggcaaggaaaaggttagaaaaagcagtgagcaaagcaattggatggacagacaaactttaagacatgaataaattatagtattaagaagtggttttgcaagtgtaacaactgatttaaaaagagcaagtatgcaatattttaaaactctaacttattgtaaagkaataagtaactatgataaaatttagattttagaatttaacagacttgtctattcatctgtggtgcacttagtgaattcaaatgtcacaaacactgagcctcaatttccttgtttagaaattgctaggaataatgtacctagcatagga

SEQ ID NO: 339699 - DNA, 461 bp, Homo sapiens
tccacagcccttgcaggtattgaactctgtatagaaatctgcctaaagaccacacactgcattattccagagggggaatccacactgcttccctccacccacccacctaggctgttgcatcacatcatcattttgagaggagagtcacctctagactacatcctgccccggggcccagtagttctgacatcgtcacatcctggggtcctgccaacatctcastgcattcactcagaggactgcaacattacaacaccacctggacccagctatacagatatgaccctaccatatgaacccatgcagtgccctacaccctgaggcacaggcagtctaacacagcagggaggcagcccttagtacaaagaaagccaacacaatcacgacacagaaccagagagctgccctcccaggaactgctctcatcaccaccagcaaccacactcttctggagatgaagg

SEQ ID NO: 339700 - DNA, 633 bp, Homo sapiens
attttggtaaaagtgacaagatcatacattgaatacaggacaccttcttcaagaaatgttgctaagtaaacgggttatccatataaagaagaatgaaagtagacccttatctctcaacatataaaaaaacagctgaaaatggattaaatatttaaatatattttctgaaactatgaaatactagaagaaaacatgggggaaaagttccgtgactttagtctggggaaatattttataggtaaggtttcaaaaacacaggcaataaatacaaaaatacataaaggagattctatcaaactaaaagtgttatgcacagcaaagaaaacaatcmacagagtgaaaagacaacctcttgaataggtgaaaatatttgcaaatatccatttacaagtgattaatttccagaacatatagggaactcaaataacttatcaaaaaaaaaaaacccaaatcacccaatttaaaatggccaaaggatctgactaggcaattctcaaaagaaggcatacaaatagccaacaagtatataaaaattatcatcatcactaattataaggaaaattcaaatcaaaaccgcaatgagatatcatctcaacatagttagaatgattattttcaaaaacacaaaaaata

SEQ ID NO: 339701 - DNA, 447 bp, Homo sapiens
ttacctatttaatttcccagcaccacagtctcttgaataaaataggtgataggtaaatatgcattgaaagatcacagctggcagagcatggtggctcacacctgtaatcccagcactttgggaggcagagacaggtgggtcacttgaggccaggagttcaagaccagactggccaacatggtgaaaccccatctcaataaaaatacaaaaatcagctgggcattaatggctggcgcctctactcagctcagctactcaagaggctgaggtaagagaatygctttaacccaggaggcagagggtgctgtgagctaagatggccctacttcactccagcctgggcatgaaactctgtcaaaaaaaaaaaaatcacagttacataagttagtttcaaatagaaggaatgaaaaaaaaattctgtgtattcaaatgtcttcacctgaattt

SEQ ID NO: 339702 - DNA, 600 bp, Homo sapiens
tgttgtgtagttggaccagttttgaaaggacggcaaaattcttcaggtcctagctgcttagaatctagaatctagaatcacaataatcttttatgagctttagaaaataaaattttactcagaataattatttctttgagaaaagttacataaaactatgatctgctgtttgtccctctgagataaattttgtgtaatggttaaaatataaggaccatcaccaaaagctgtctaggcttatatctcaaccattataacttggacaaagtatttaacttccctgagcctccaaaagcctagggcttgggagctacgaatatgagattttcccccagcatttaattcctaatataatttttttaaagtttagatttttttaagtttaaaacaaaagtagaaaaaaaaawttttagctttgatgtatgcaactttaaacatctgtctactcaaacttatttaagattccagggcactttttataattctgagcacagtcaaacactctgaataattgtttccctcccactgaactccctttagaatgtcagttgaaagagatatttctgttgtaaaacattacagttattgttcctattaggc

SEQ ID NO: 339703 - DNA, 590 bp, Homo sapiens
tggatcaccctcaccaaatgctgccgccatgctcttggactccagttttcagaacagtgaaaaataaatttcttttctttatacatttgctagtgtcargtattccgttattgcaacagaaaatggattaggacaaagagtaatgcctacttttgaataaggtgtgaagggacaaatgagcaaatgcatgcaaaatgccatgataactagtatatgttaattaacaaatgttagcttttattgatattcatctaggccctgttaatactaatgcattaacatatgcactaaaataggtgctcatgaaacaataaatattaaaattacataattatcagtgaatcttggtttttcatttctctcaaactgtcccccttacagtataaatatttttcatcaagtaaacatacaatacaagcctgagctgagaaattttttgaaaatatagcactgcattccttcctcaaaccataacatatagacagttaagagtagagatgtttaggcatttctaactcttcataagtagtccaaatgtaagttgattaaagaacctacagagaaaaatacaattacaataaagtataatc

SEQ ID NO: 339704 - DNA, 563 bp, Homo sapiens
aaacagcagaaatttatttttcacagttctggaggctgggaagtccaagatcaaggcaccagtagactcagtatctggtgaatgcctgcttcctgatttatagatggctgtcttcttgctgcattctcacatgggagaaggggttaaccagctttctggagactcttttataaggacactaatctcattcatgaaggccccaccttcatgacctaatcatttcacaaaggtcccatcctgtaatgccattacattgacaattaggtttcaacatatgaatgctggggcacacaaactttcagtctatggtgataattcatttcatttcttctccaaaraacacttgtattagcattattaaaaaacaattataaaactggaggattatgtgaacattatgtgaacattaggtgattattaataatacatttactcataaaagagcttgtctttggaataatcacacttgatagatactgtaagtgaatgcagtgaactggaggtatcaataatgccccatagccagaattttaaaagcatgaagcaggaattggacatgactt

SEQ ID NO: 339705 - DNA, 375 bp, Homo sapiens
  misc_feature (1)...(375): n = A,T,C or G
nnnnnnnnnnnnnngaatgttaacagtttttaaatggagaacagaattagtggttgtcaggagtaataaggaaagggagagctaggaagaaagcagtagatgtggctaaaagagcaacatgaagaattcttataatggaaatgtatcttcactgtatcaatgtcaatatcctggttgtgatattgtactatagttatgcaagaygttaccattggggtaaatttaggaaagggtacatggggtttctctgttttattttttacaattgcatataaatctacaattacctcaaaaccaaaagtttaattaaaaaaattcttaggaaagcttaactccatcaagtgttcccattgtagccttacataacattgaatt

SEQ ID NO: 339706 - DNA, 639 bp, Homo sapiens
ccttctgctgagcaggaaaaaagcatacaaatttcagttataaaaaaagtaaaatgagttttttatcttttaaattaatttaatgactgttcagtcatagtacatcaccctttggcatgtaattgcactatgcttaatgatttatctggagaggaagagagaaagagagagaggtaaatattcaatagayatatatagagaggtaaatattcaatagacatataattgcactatgctactgatttacctggagagagagaaagagagagagagagagagagagagacagtgagagagagaggtaaatattcaatagatatagagatgtgtatgtatgtgtgtgtgtgatgtgtgcgtgtctatgtgtggttacatacacactctataggtcacatatctatttatctgaagcttctatttctatttcagagaaatatctatttctctgaagcttctggcagtgaatgttttcctagtatgtgtgtgtacacaaatatatccatatgtatatatctttactgtccaagttaagcttatgggaacagatactcaaaataattttgcacactctttctactctctatggtatgatacatacatacatagtatgctctagtaaaaggttgtggtcagagtagg

SEQ ID NO: 339707 - DNA, 639 bp, Homo sapiens
ccttctgctgagcaggaaaaaagcatacaaatttcagttataaaaaaagtaaaatgagttttttatcttttaaattaatttaatgactgttcagtcatagtacatcaccctttggcatgtaattgcactatgcttaatgatttatctggagaggaagagagaaagagagagaggtaaatattcaatagatatatatagagaggtaaatattcaatagacatataattgcactatgctactgatttacctggagagagagaaagagagagagagagagagrgagagacagtgagagagagaggtaaatattcaatagatatagagatgtgtatgtatgtgtgtgtgtgatgtgtgcgtgtctatgtgtggttacatacacactctataggtcacatatctatttatctgaagcttctatttctatttcagagaaatatctatttctctgaagcttctggcagtgaatgttttcctagtatgtgtgtgtacacaaatatatccatatgtatatatctttactgtccaagttaagcttatgggaacagatactcaaaataattttgcacactctttctactctctatggtatgatacatacatacatagtatgctctagtaaaaggttgtggtcagagtagg

SEQ ID NO: 339708 - DNA, 644 bp, Homo sapiens
ttctcatcacagggctgccttacaacatggcagctagatcctcccaggttaagtgatctcagagtgagaaagagagaaagcggagagagagagagagagaggagacagagagtgtgtrtgtatatgtgtgtctgtgtgtgtgtgtgtgtctgggtttgtgttctggaaagcatgcccagagagaagctatcacatttttataaccagctctcagagtggcatgtatttcatcaaatttgccatattctattcattaaaagcaaggtaattagtccagcccacatctaagaagagagaattacataaggacatgaatatcaggatgcagggatcactggcaaccaacttagaggttgcctatgacaagtttcctccaggaagtgatacccacaaatgcaataagttagaaaaatttaatgataaaaacttggatttactctggtcacaaacacacaactgggagaaagaatcatctgataccataaccaattaaccctgagtcatttcctatgtcgcttcctttgtattcaactcaaattccttctgtctccccctctagggaagagcttcttatattacatgttgtgtcacccccacaacgttcgtgtgttttttctcattgtaattgcattaataaaagcaac

SEQ ID NO: 339709 - DNA, 585 bp, Homo sapiens
gtttcactcatgtggttgctggtaagccttagcttctcatcacagggctgccttacaacatggcagctagatcctcccaggttaagtgatctcagagtgagaaagagagaaagcggagagagagagagagagaggagacagagagtgtgtgtgtatatgtgtgtctgtgtgtgtgtgtgtgtctgggtttgtgttctggaaagcatgcccagagagaagctatcacatttttataaccagctctcagagtggcatgtatttcatcaaatttgccatattctattcattaaaagcaaggtaattagtccagcccacatctaagaagagagaattacataaggacatgaatatcaggatgcagggatcaytggcaaccaacttagaggttgcctatgacaagtttcctccaggaagtgatacccacaaatgcaataagttagaaaaatttaatgataaaaacttggatttactctggtcacaaacacacaactgggagaaagaatcatctgataccataaccaattaaccctgagtcatttcctatgtcgcttcctttgtattcaactcaaattccttctgtctccc

SEQ ID NO: 339710 - DNA, 520 bp, Homo sapiens
gctagatcctcccaggttaagtgatctcagagtgagaaagagagaaagcggagagagagagagagagaggagacagagagtgtgtgtgtatatgtgtgtctgtgtgtgtgtgtgtgtctgggtttgtgttctggaaagcatgcccagagagaagctatcacatttttataaccagctctcagagtggcatgtatttcatcaaatttgccatattctattcattaaaagcaaggtaattagtccagcccacatctaagaagagagaattacataaggacatgaatatcaggatgcagggatcactggcaaccaacttagaggytgcctatgacaagtttcctccaggaagtgatacccacaaatgcaataagttagaaaaatttaatgataaaaacttggatttactctggtcacaaacacacaactgggagaaagaatcatctgataccataaccaattaaccctgagtcatttcctatgtcgcttcctttgtattcaactcaaattccttctgtctccc

SEQ ID NO: 339711 - DNA, 584 bp, Homo sapiens
cttcttgcctttttgttttcccccagtaaaccttagaaacatttctactgcttgaactaacatggttgaaattatgtattcttactctatacatgtcatgatggtccttatgttgaaaactcatgcgaaaatatagtttatatactcaacactcacattagacaacctgagatacaaacagtagcaaggaaactcatatacctagtggcgtcttgctatcattgtgcagcatgagtccgttcttgtgaattcacaccctaacttctgtttaataccttgctgggcatccttctttaaaaaagatatgttaaaaatccatagacactgcttagaaagaataaagagaagattgccaataaatattgaaaagtatttctaagaaattcagaaatggcttttcgatcttgaaggaagtgtttcatatttctgaaagtttaaagtttgagaagtatgaagcattcaacaattaaatayttttcctttttatctgaatacttttttctgtttttaaccttatgaaaatatatcaatacttcagtataatagaaatagtttgaattcttggacaaagaaacgcagatcgc

SEQ ID NO: 339712 - DNA, 538 bp, Homo sapiens
tccttatgttgaaaactcatgcgaaaatatagtttatatactcaacactcacattagacaacctgagatacaaacagtagcaaggaaactcatatacctagtggcgtcttgctatcattgtgcagcatgagtccgttcttgtgaattcacaccctaacttctgtttaataccttgctgggcatccttctttaaaaaagatatgttaaaaatccatagacactgcttagaaagaataaagagaagattgccaataaatattgaaaagtatttctaagaaattcagaaatggcttttcgatcttgaaggaagtgtttcatatttctgaaagtttaaagtttgagaagtatgaagcattcaacaattaaatatttttcctttttatctgaatacttttttctgtttttaaccttatgaaaatatatcaatacttcagtataatagaaatagtttgaattcttggacaaagaaacgcagatcgcctratgccatggcatgcacccacagtcccagctacttgagaggctgaggcaggaggat

SEQ ID NO: 339713 - DNA, 638 bp, Homo sapiens
tcttgacttgtctctgtcttgcaacacctacatccaatcagttaccaagttgacttctctcttaatccaatgctgttctcatggtaagatctgtcatactctctcacatgggttattagaaagatttaccattctctccaattgttttaagtaagtttttgtcagtgaatttttgaaaatgaaagacacatgtgtttgtgtaggagacaagtaaaataataaaaacaaataattctgtttgctttttcagaagaaaatggctcctcaattttctatctcatgtggaggcaacatttctgcatcagattcagcctgtrggcaaaggaatgaggcttcttctacgatccttcaggctggcccttcctgaagtagcaaagcatgtgtcattataaaacatgattgtaactcctctttcagtgccactgattttgtcgtgtgggaaatttttggcaataaagtgtctatcaagcaattttcatgggattagggctttacatttgttatgaatctcaggagagaattaggagaagacaaataaatattaaaagtaaattaatgttttcaatttgattttatttaaaaacctactgtccagatgcaatattaatccaaaagcatatgtctccagtttcattaac

SEQ ID NO: 339714 - DNA, 584 bp, Homo sapiens
catcaaggacgccaacccagacagccaacttcaccatccatactacttgtcttgccttatatagcctttggcttttaaagcttttccagaccattagaaactggcccttttctaatttgtatcctccttgcagtaaatgacacttcccaaaacaaaatatgcaaacaaaaccaaccagcaaaacaaccaccaaaatggcagctcctttcaatcctaagcatctctggtcttttttgtccctgcctaggacatggagtttgtgacactgctctgattgctctctgctccttccctccaattaacagaaggaaagagagtgagcaacagtttgcaccaatcttttcacattttccaaagcaatgtttcaactcagtcattstagaactatgatcaggaacaacaacatagaaagtggcctagtttgtgacactataactatgataaaattatactacctgataatcatatctattattaatataagaaaaaattaattgctctattaaaaaatacaaaggaggataatggggcttcgagaatttaattgagtccttgctaatagtgataacttaatgggaggaaag

SEQ ID NO: 339715 - DNA, 561 bp, Homo sapiens
ataaggataagttgggatgaaaaccagccacatatagaacttttcctgtgaaatgtatttctctcaataattttctaggttttcatagtttktggtcccagatggacattttgaagtattcacattaattcacccttctcaaaaactgtaatttatagtcattttaaagaatggcatctaatatccagattcaaaatgatgaagtgttgtttgtcataatatcattacagatgttttcactcgtaatccatttatttggtaatgatccagtatgatttataatgaggtcctgtggaaggattttttttcagaaagttcatgaacttaatcccattctggaagcatcatttaaaatggcagggggtatttgtctttaagcaaatgagggcacacacacacacatacatagcctcactgaatattcagtgaagcatttacaaagtattattgtcacaaggtcattgttatttatcagataactactcaaagttttctttaaaccatcagtatatattttctctgtatgttttcctctatgtctcttactgtctgaaatatgtg

SEQ ID NO: 339716 - DNA, 561 bp, Homo sapiens
ataaggataagttgggatgaaaaccagccacatatagaacttttcctgtgaaatgtatttctctcaataattttctaggttttcatagtttttggtcccagatggacattttgaagtattcacattaattcacccttctcaaaaactgtaatttatagtcattttaaagaatggcatctaatatccagattcaaaatgatgaagtgttgtttgtcataatatcattacagatgttttcaytcgtaatccatttatttggtaatgatccagtatgatttataatgaggtcctgtggaaggattttttttcagaaagttcatgaacttaatcccattctggaagcatcatttaaaatggcagggggtatttgtctttaagcaaatgagggcacacacacacacatacatagcctcactgaatattcagtgaagcatttacaaagtattattgtcacaaggtcattgttatttatcagataactactcaaagttttctttaaaccatcagtatatattttctctgtatgttttcctctatgtctcttactgtctgaaatatgtg

SEQ ID NO: 339717 - DNA, 561 bp, Homo sapiens
ataaggataagttgggatgaaaaccagccacatatagaacttttcctgtgaaatgtatttctctcaataattttctaggttttcatagtttttggtcccagatggacattttgaagtattcacattaattcacccttctcaaaaactgtaatttatagtcattttaaagaatggcatctaatatccagattcaaaatgatgaagtgttgtttgtcataatatcattacagatgttttcactcgtaatccrtttatttggtaatgatccagtatgatttataatgaggtcctgtggaaggattttttttcagaaagttcatgaacttaatcccattctggaagcatcatttaaaatggcagggggtatttgtctttaagcaaatgagggcacacacacacacatacatagcctcactgaatattcagtgaagcatttacaaagtattattgtcacaaggtcattgttatttatcagataactactcaaagttttctttaaaccatcagtatatattttctctgtatgttttcctctatgtctcttactgtctgaaatatgtg

SEQ ID NO: 339718 - DNA, 561 bp, Homo sapiens
ataaggataagttgggatgaaaaccagccacatatagaacttttcctgtgaaatgtatttctctcaataattttctaggttttcatagtttttggtcccagatggacattttgaagtattcacattaattcacccttctcaaaaactgtaatttatagtcattttaaagaatggcatctaatatccagattcaaaatgatgaagtgttgtttgtcataatatcattacagatgttttcactcgtaatccatttatttggtaatgatccagtatgatttataatgaggtcctgtggaaggattttttttcagaaagttcatgaacttaatcccattctggaagcatcatttaaaatggcagggggtatttgtctttaagcaaatgagggcacacacacacacatacatagmctcactgaatattcagtgaagcatttacaaagtattattgtcacaaggtcattgttatttatcagataactactcaaagttttctttaaaccatcagtatatattttctctgtatgttttcctctatgtctcttactgtctgaaatatgtg

SEQ ID NO: 339719 - DNA, 611 bp, Homo sapiens
ctagggggaggaaatacatgttgtacacatttgctctcattttaataattttaatgctaatctttcacttctcttttttataagttgctttgaattaacctcctttacccttttgtcattccatttctctgtctttcctttcctccttcccttgaatttcrtgcctgggtgattgtgggtgggttgaggtggaacaaatgtctggcagctgaaattatgagagaaggtggaaggcatggtctgagagtattgagagggagacgagcttctccctgggcagcagcgtccttgctgctgggggcaggaatgggaatcaaggtacccaccttctctgtattcaaacttccaagctgtcttcctctctgcacccaccaccacctacccagctccagcttcaccattgctctgtgtgaagcaattatattctggcaggtttgtcattgtaccctgtgaatccaagacttgagcctctcagaaattctgaagtttaaaatatttatttctactgaaggtctttaccttaaagctctgatccttttactgaatcagttatctgtaaatctttctatccttcaaaaaggcttgaaatacctcacctgctcctgtccaaa

SEQ ID NO: 339720 - DNA, 557 bp, Homo sapiens
ttccccacatataataattacaattgccttgctggatatatttgagactctgttacattgctcccttccagtctgaaattttgcagaaataatgttagcctataatggcaaatatttaacctttctctagtgctcaacttaaacctctagccccaagaaatgagcatctccagaatacaattctcatactatgcccacacatggcctatgttttggctcatgctattatcaactgacgtgtcacttccattcccatgtgatttttattcctcctttacagtcagctatttaatgaactrtttctgagtttgcttatttttcccctttctgatcagtttctggcaacagtaaacatcctttattatcctcaaatagtttcatgtgagtcaaactgttcgttttctcactttaagagacaccaaagacaaaacccatttcaggaagaccacaaaaaatcacaatgtacacaagttacagttattttaaaagtcattgctgtgtcaagactacctccctgacgtgtcagagaaaaatatgttctcaataagctcatggca

SEQ ID NO: 339721 - DNA, 539 bp, Homo sapiens
ttgacacagcctctccttgggtgcccgctaastctacattggttcatagataccaatgcatgtctgtggagatacatagggtgcagcagttctccattcagctatgaagagtggggatcttagcttctctttacactcagcacataaaaatgctttatttagtaatgtggcagcttacacacaggcagagagaaaagctaaaccctcatgaaactgggttaaaaagtgagaacttttttccactgacaactaagtattattaattctcttacagggccacttactctctatgcatattatgttacattatttcacactaaaattactgcaacattatcaattcaagcaggattgagtatatgaaatatttataaggttaccactcatccaattttcaaaggaatggcctatatatagggcatgaatatagtctcagaatagctttgggcttctgagcagtagacaaggtctcacgaagcaatggtgtaatgactgtctgtaaaataaacgtgaccacataaattctaacaggaggtaaa

SEQ ID NO: 339722 - DNA, 626 bp, Homo sapiens
gtgagaacttttttccactgacaactaagtattattaattctcttacagggccacttactctctatgcatattatgttacattatttcacactaaaattactgcaacattatcaattcaagcaggattgagtatatgaaatatttataaggttaccactcatccaattttcaaaggaatggcctatatatagggcatgaatatagtctcagaatagctttgggcttctgagcagtagacaaggtctcacgaagcaatggtgtaatgactgtctgtaaaataaacgtgaccacataaattctaacaggaggtaaaaataatctgggactccaaaatatatatgttgagagaaactcagaagttaggaaatggggaaaagtgattattctggcrtgattaattcccaaggccaatgtgtatactggaatgaagattggccatgcagtcagaatataaactcaaattcagattctgcccccaaatgttgcattaatttaaacgaagtaataaaattgagctttagtttttttcaataaaatggaatgaaaatacaaacatccacctcacagtgatgttgcaatgaacacataagattgataagcagtctgaacactttaagaatgtata

SEQ ID NO: 339723 - DNA, 548 bp, Homo sapiens
caattttatatttccaatattcaatttctttcaaattagtcataattcacatattgttttctctcctaacatttctcaaccccaccttcaccccaattagatgttcacattaaaaagatattgtgtgtctcagtttcctcttccctgaattaagcacagtgttttacagtctcaccaggacaaaaccccttattcaaataatacaaagaacatagactttagaatctggcagacccttaatagattatttctagagccatgaccttaagctacaaatgtactacttgggtcgacaggtctgtgaacctcaaaatataaccattatcatgctcactcctccatgtgatggttctgttggagagtaggaaactaatgaagatatccagcctccagatagattaaacagaaacytcaacatcactgagtcctggaggaccctgtcctgaccactcctttaggaggtcactgagtccatgctgagaagactgacctagatcatgaggatgacttaagacaaatggtttaaagctatttgttggctaaggaac

SEQ ID NO: 339724 - DNA, 591 bp, Homo sapiens
ctggctttcctgggtcacattggaagaattgtctcaggccacacatgaaatacactaacactaatgatagcagatgagctaaaaaaaaaaattagaaaaaaaaagtctcgtaatgttttcagaaaatttacaaacttgtgttcagccttattcaaaaccatcctgggccacatgcggcccatgggccacaggttggacaagcttgctttayagattctctgccacagcacctgcattatgacacagcattgctgagagcccaggattctgacctctgccttggtaccctggactgaatcaaaatgtcttccgtaactgtaatctattaaccccattgcattctccctcttgatatagttctagaatcccccatatatttgagcttccctcctagactctaattccagataaggccttacccctggagtggaaaggaataggatagaacttttccactattattttactgctatgtggcctctctagacaaatgtctgcacttggttttgagaggctagcacagctcaaataattataaggaagtgaactaaaaatgaaaatctggtcataggcttaagaaataggccaagt

SEQ ID NO: 339725 - DNA, 558 bp, Homo sapiens
tacagtagtgggattgctggatcaaatgatgattctacttttagctcttcgaggaatctctccatactgttttccatagtggttgtactagtttacattcccaccagcagtgaaagtgctccattttcatcacatccatagcaacatctattatttttttgatttttttattatggccattcttgcaggagtaaggtggtatcttattgtgattttaatttgcatttgcctgaacattagtgatgttgagcatttattttttcatatgtttgttggccatttgcatatcttcttttgaggwttgtctattcatgtccttagcccactttttgatgggattatttgggtttttttttcttgctgatttgtttgagttccttgtagattctggatattagtccgttgtcaaatgcatagattgtgaatactttcttccactctgtcggttgtctgtttactccgctgattgtttcttttgctgtgcagaagcttttttaaattaatgagttcccatatatttatttttgttttttgttgcagttggatttgagtttttga

SEQ ID NO: 339726 - DNA, 492 bp, Homo sapiens
tccttgttgttaagactggctttatgtttcaaatatagccaataaaacataagtagaaatcaacttggtggggcttccagttaagctattatttccctgactgaaaacaaaaaacaaaaagaacaatttgacatggcttttctgtctttctttccttcttcctgccttggacactaatattcctgcatgtagagtgctcttgcctgattatgaaaatgaacaaataataagaatagagcaacagaaagctgaaatgaatcttaatctttggcaattcttttggacaacttcttgagtgccatgttgggactctatgcctcaacagttctttttacatggtaaaaaggagaccccagccattttcaaactctaaattaggtttaaaagcagtcctcttcttcaraaaatataaggagatccacgtgtggccatttgggttgtagttggtggaggtggggaggtaatagggataatcccaaagtataattgaag

SEQ ID NO: 339727 - DNA, 638 bp, Homo sapiens
aagctaagcacagaacttcaaagtgtacagccgtagtaaacacttttattgatggctacagtaccctctaacctcatactgtagctcaatgtaaactgaagagttttttaaaaaaatatttttatacttaactcagttttatggaactttgtaacagctggctttaaagttatgggtttgtatttcttctatgacttttttctttttaacagactcattaacatttttaaaaaaatagactgtacacatttgaagtgtaaaatgttatgttttaataattgtctacatatgtgaaaccaagatacaatcaagataatacacgtatatatcacatgcaaaaaagtttctcatcaccctttgccaacctttcttcctgcagtttctttcttttcatcccatcttctacttcactccatttacaaaaattaacttaaaaaggatgaatgaactaaatayaagaactaaaactataacaatcttaaacaaaaatataggggtaaatctttatgaactcagatttgtcaagggatttttatatttgacatcaaaagcacaagaaacaatacaaaaatagataaattgagcctcctccaagtgaaaaattttatgcatcaaagaacattatcaagaaagtaagg

SEQ ID NO: 339728 - DNA, 451 bp, Homo sapiens
atatattcaaatgttggttcctctcagttgagatcataracagttactcaagaagtaacagttattataggaaaacccttataccttaaaactatttgactgcttttattttgtgatactggaacagtaggtattatttcatagtcatgctggatagcactttcattgaatgataccatcatgttagccaaatagttccatagctgtagattttcacttgtttaataggtaatatggcagtgcaagagactgcattttacctccacctctggcttttcagttatataaaccagcttattgtgacctgtggcaggtgcagtcttagttacattccagtatttcccaagttgggaagcagagtcgggtgactttagacgcaggtgttattctgaaataatttggaaacattacgagcatgtgtataggggcatttgcagtgagtagcttgata

SEQ ID NO: 339729 - DNA, 613 bp, Homo sapiens
cacaaaaatcctcagtgttaaggcaatttttggattagtaaagcaaacaacaaaaatatattctagaaaatcagaaacttctctatctgctagagcacatttcctgtggttcctttataataagtgatcgtttctcccagggcttgaaaaagactgtatttcatgtatagtaggcctcctttgaatcaactggcctctgcyccagggaagctgccagcaaagggaagaattgggaaaaaaaaagtctgcattcttgtcacttgaaaagatgatgaaatttcaggagcaatattgaatatttcataatgtcttatttttctctctccctctaatttatatttcattctaggttttccaaaaggaaagggcaaaaataaacaaaaattctacttgttaagtgtcaggacaaaaatgtgtaggtatggtttgtgtgatgttgaatttgaaaccatgtatcactaataacaaagtttatcacaaatgaatgtaaacaaataatacgtttgttttacaaaatagaagtctgctaggtatcaaaaaagttcaagtgccggatatttattgactctttttgtcttccacaaaacataagcataatttggacctatcttag

SEQ ID NO: 339730 - DNA, 352 bp, Homo sapiens
cagatgtgctagtaccaaagcaacagccacattttctctatcacaaaagtgaaatgtaccttcctaaatctcatatgcttgtggctgtgaacattccaatttctccctcagttcgatatctctatagtgtacgtccatgtgaaggtgtgctttattgttgtctgcctttccaacaatcaattcatttgcacctttttctaatattatracatttcctaagtctggctgttttgaaatgccattcttccccctttaaaatattttcattcacttttatcagtagagccaagttatgtgaatcttaggagaagcaaaaactcaaaagaactttgccagatttgctacttgggaa

SEQ ID NO: 339731 - DNA, 581 bp, Homo sapiens
tgaatcagctccctatcttttataattctttaaaggtaaaatttcatggattaaactgccacagaacagggtacacctttcagaagtctcacttataaaagatgtctttcaaaagtttgccaaaattactatgcagttttcatataatgcttgtagacatgttttatgagaatgaaattatctatggagaaaaggtaaaacccatatcagaatcaaatctattggtactgaatgcactaaaaaggattagcaaatgtctgcaaaaaaatktaaaacggttgaaaaacctcacaattgacgatgtttaaaaaggagctatggaataattagtcacagataaaattccagaagggacttcagaaaacccagaaatattcatggcatgaacaaaaacctatatgcagaagttcacaaatgttcaattacaagaagaatatacttctctcaagttaaagatgaaagttaaaaaaaactttttaattaaaaatacctccgaagtaaaaagctctgcttttaatattttaaagttctgttataacaaatgaaatactcttgaaaaaagtatgaggtaaattatgtta

SEQ ID NO: 339732 - DNA, 627 bp, Homo sapiens
caatgggatgaagagagatatttaacaaaagttttaacatctctttttctttcataattttgagacaactagattaataactaaattttactaggagaaaagagaaaagattcataacrcttctgttttataatgacttttaaatatctcctataaataaaagccacaaaatatattgactttgttaatcagatacaacatctatgtaaatatttatctggtcattactcatctcagagctcataagagatgtgagaaaaaccttgatggcaatcaaaatcattagctacggagctatatttgtagaataaatgcagtattaagcacattctgatgaaaattctctaaaaacggattgcatgttcaagtaccttcaaggaccaaagagctcaaacactgggattataaatgttttcattataaattgtggtttgaaggttataatattaagtccatcctagctaagactattttaaggaacacaaggagaatgcactacaaatggtacttactagttttttggaacatttaaataataacaaaatttaatggaatataaatttgaaacttcaaaaataagtttcaaacttcatgctataaactggttataaataacttggttaaact

SEQ ID NO: 339733 - DNA, 627 bp, Homo sapiens
caatgggatgaagagagatatttaacaaaagttttaacatctctttttctttcataattttgagacaactagattaataactaaattttactaggagaaaagagaaaagattcataacacttctgttttataatgacttttaaatatctcctataaataaaagccacaaaatatattgactttgttaatcagatacaacatctatgtaaatatttatctggtcattactcatctcagagctcataagagatgtgagaaaaaccttgatggcaatcaaaatcattagctayggagctatatttgtagaataaatgcagtattaagcacattctgatgaaaattctctaaaaacggattgcatgttcaagtaccttcaaggaccaaagagctcaaacactgggattataaatgttttcattataaattgtggtttgaaggttataatattaagtccatcctagctaagactattttaaggaacacaaggagaatgcactacaaatggtacttactagttttttggaacatttaaataataacaaaatttaatggaatataaatttgaaacttcaaaaataagtttcaaacttcatgctataaactggttataaataacttggttaaact

SEQ ID NO: 339734 - DNA, 581 bp, Homo sapiens
gaagttataattaaaaaaaagagcacttaatgcagatcattcataaactagattaaaataattaattttattatagaaagtattcaacttatcaaaatatatcaccgagatgtaaaaaaaaataataaaaatatgtatttatacatgaaagtgccttgagtcatttcttcagttactttatcaccgcaaaaaaaaatcagcttctcttttttgggttatttcacctgtatttaatagttggaccatatgaggaaatgttccttctagaaatattttcaacatgaaaatgaatgccttccttccttgctttaactctattttttaaaattgagcctcatgaggaactactcattctagacatgctagatttttaaaagtcatctattgtgaaataaaaagattaagctggaagtcaaagacttgtagatttagaatcctgatagtaamtgcacataatgtaaataatatccaggttgaaaagcagactttcaatatcatttttctaaataaaatagtagaatgttcaatttttttatcattaactgaaatttagatatgattaaagagtcttacattaatgt

SEQ ID NO: 339735 - DNA, 589 bp, Homo sapiens
  misc_feature (1)...(589): n = A,T,C or G
gcctcccaaagtgctggtattacaggcatgagccaccatgcctggcctacatttttaatttaattaatctgataatcatcttattcaaactttcttgtaaaggctttctaaaataaaatgaatagtatactcttgaytccaacttactagagtcattaatgacatttatttctaatgaaattgctccttcaatcatgatttccacagtccacattatagcttttaacatgtattaaatggacacatccaatctcccatataaaatataatgtaagaattatctacactttaaaatggtgaatttgttatatgaattttacctcaataaaaatttgttttctgaccttttcatgggtgaattatgattatttaaattaagagtagcaaagaagaaagataaagtataaaaaatactaacataatgtgtcaaaatctgaaactttggcatgcatttttgtatttgcattcttagcttaggcacacagtctggctatttataacacctcagatagagatgcaagtacaattataagtaaagatacagatacatgcacagatacagagatgcaaannnnnnnnnnnnnnnnnn

SEQ ID NO: 339736 - DNA, 618 bp, Homo sapiens
ggcaatgaagtattagaaagagtagaaagtttctcaatcatttcctacctgctggccatattccactcaagggctggattttgagaattcctttcagtctctgttaccaccccctcctgagacactttccttctctggttttagttgatgccactgtgcagtaccaatattgatggactgcagatctatttggtattgtctgtcttcgatttctgatccaggatctcgaagaattcctaagttcaaggctctcctgtaaaggcagcgaaaaaaacaaaaataaaaacaagaaaacagataaaataaccattctatgtttattttgttcactaacatartgtcaataccatttttttcctttggattactgatgaataaactggggcacatctatgaaaaaggtttcagaaagttagtacatattatgacttgaaaacatatccaaaacttatcacttacagtaatctacactataatgatttattatgttattcctggcacgttactctttttctaagtactctcacatacatgatttcaatccctgagatgctctgaggttctattttatgtccatttttaccaatgagaaaataattcacagagtttgaaagacag

SEQ ID NO: 339737 - DNA, 571 bp, Homo sapiens
gcaacgaaaacgataaagataaatgttccttaacatttctagtatcacctatttctgaatatggcatattagaaactctgaatgaacctcctggctctcataacaaattgctttaacaaatctaaagtattttttcagacacatcctggagccaacaccaataacagaataacagaagctgggaagtctcccaaataatgtgaaaccaggaaccatgataaataagcacctgccaaagctggcttttactctaaggttttctgctaaatcctgcagatactgattttctgctctgttaactgcacaggaggagatgaagctcagggctcacgcaaatgatgaatctatttaayagaagacaattcacataaagctgagatcacgaagggtcaccagtagtgaaagggtgaattagaaacagcccttctacggacctctgtggtgataggacagttctgtatcttgattgtgatggtggttacatgaatctacatgtgacaaaattacatagagcactatatacattaacacaactaagtgcatgtaaaattggcagaatctgaatacaact

SEQ ID NO: 339738 - DNA, 627 bp, Homo sapiens
ttttactccatttttgaaattaatttcaatttatattatagaagggttatttaaaattgtaaagaaaaatttccaggctctgtcaattatacgtagattacatgaattgcagcttactaatggattaagtcttaaacatcacctcttttattctacatatgagtataattgagtagtggaactacactgacatatccccaccacaaataaatgagagaaattaacgttaaaatttgtaagtaagatgcacaactttgacagttttcaggatttcatgaaaacatgctatacacatagacacattagcatgtttcatttccatttaaaatcagtctgttactatcaatctgaaaatcggctgagtgaaaaatcttttaatatgatgaagctgctctttcatcagattctggaagttacacagaatattgctctaaatcagaggttggcaaaatttttctgtatattaaatagtttagttttattyggcatataggctgtgttgcaattagttaagttttctgttatatcaaaaaactagctttagacaatacataaacaaatgaatataactatgttccaatagagcttaatttacaaaaacaggtggagaggtagattttacctaca

SEQ ID NO: 339739 - DNA, 536 bp, Homo sapiens
ggaagagacttgccttgtctcagatgtggctttggactgtggacttttgagttaatgccraaataagttaagactttgggagactgttgggaagacattaatggttttgaaatgtgaggacatgagatttgggaggggccagaggcagaatgacatggtttggctgtgccgcccacccaaatctcatcttgaattgtatcttccataattcctacatgtcatgggaggaacccagtgggagttaattgaatcatggggatgggtcttttctgtgctgttctcatgatagtaaattagtttcacaagatctgatgtttttaaaaatgagagtttccctgcacaagctctcttctcttgtctgccaccatgtaagacatgccttttaccttctgccatgattgtggggcctccccacgtatgtacaactgtaagtccattaaacctccttcttttgtaaattgcccagtttctgttatgtctttatcagcagtgtgaaaatggactaatacaggctgtaatcagaaatggttttatgt

SEQ ID NO: 339740 - DNA, 536 bp, Homo sapiens
ggaagagacttgccttgtctcagatgtggctttggactgtggacttttgagttaatgccgaaataagttaagactttgggagactgttgggaagacattaatggttttgaaatgtgaggacatgagatttgggaggggccagaggcagaatgacatggtytggctgtgccgcccacccaaatctcatcttgaattgtatcttccataattcctacatgtcatgggaggaacccagtgggagttaattgaatcatggggatgggtcttttctgtgctgttctcatgatagtaaattagtttcacaagatctgatgtttttaaaaatgagagtttccctgcacaagctctcttctcttgtctgccaccatgtaagacatgccttttaccttctgccatgattgtggggcctccccacgtatgtacaactgtaagtccattaaacctccttcttttgtaaattgcccagtttctgttatgtctttatcagcagtgtgaaaatggactaatacaggctgtaatcagaaatggttttatgt

SEQ ID NO: 339741 - DNA, 542 bp, Homo sapiens
  misc_feature (1)...(542): n = A,T,C or G
nnnnnnnnnnnnnnnnnnnnnnnnnnnnnnntgaggaatgtaaaaggaagagagtatttaaaataataaccatacaataccaaaaacaaacaaaaaaaaactctattcacttcacaattaggttttgggccatgtcttctaacactgtgaagccaaagtaataataaatctggttagatcagggatcaaggtggggcatactttgaaagctgacatattttgtgtatgatctcttaagttgtacttctctaggaaaacttccctcctgccttctccactgcatctttcctaaattctgatctcttttctgaacaatatgacatttattcttatttataatttttaaatgtatttaaattattttttcatatagacagggtctccctatgttgcccagactggtcttgaactcctggactcaagtgatcttcctaccttatccttccaaagtgctgggattacasatgtgagctaccatgtccagatgacataatataacatttcttatgcagccactctaaaaaaaaaaaatttcatatatg

SEQ ID NO: 339742 - DNA, 547 bp, Homo sapiens
ttggcagtgtggaacttctctcagaatatttcatcatgaggatttccttggattggctttactcatgtatcatttagcagttagcaattcacttacttattttgtgcttctccttggccattctttgccagaacaattagattccacaacaggaatttggtcctaaacattttttaattatttcctttactcttggatatgtgtttaaaatttattctaaatatgtcaaatataaaataagattagctgttactgttggaaaacaacagttttatattgaaattactttttagcgactttatatttcaasggaaaacatatttctacttgcaatacttagatgagtgatttggaatgagccactgaggatcagagaacttgccttcaagttttcatgacaccacttgtgaacagagttctgggcaatctattttttttttttttttcacattggagttttgtatagcaggtaggctggagcagcggtctcccatcaatcagacattcataacaaaagtttacatatgtgtttgttgaaactgagaag

SEQ ID NO: 339743 - DNA, 562 bp, Homo sapiens
gaacttctctcagaatatttcatcatgaggatttccttggattggctttactcatgtatcatttagcagttagcaattcacttacttattttgtgcttctccttggccattctttgccagaacaattagattccacaacaggaatttggtcctaaacattttttaattatttcctttactcttggatatgtgtttaaaatttattctaaatatgtcaaatataaaataagattagctgttactgttggaaaacaacagttttatattgaaattactttttagcgactttatatttcaacggaaaacatatttctacttgcaatacttagatgagtgatttggaatgagccactgaggatcagagaacttgccttcaagttttcatgacaccacttgtgaacagagttctgggcaatctattttttttttttttttcacattggagttttgtatagcaggtaggctggagcagyggtctcccatcaatcagacattcataacaaaagtttacatatgtgtttgttgaaactgagaaggtagatttttggttaataaggaaaaa

SEQ ID NO: 339744 - DNA, 577 bp, Homo sapiens
tgtctctactgaaaatacaaaaattagctgggcgtggtgtcatgcacctgtagtctcagctacccaggagtctgaggcaggagaattgcttgaacctggragccgaaggttgcagtgagccaagaccacgccatttcactccagcctaggtgacagagtgagattccatctcaaaaaaaaaaaaaaaaaaaaaaaaaaagggctatggaatacaataggtacaaaattacctaccctcatgaaacctacattttagataagggagagggaaaatgatatttagcacaatatttgatttgtttagtaggttagaaggagataagtgctttcaaaaaatagaagagaatgagggattgaaattattcatattgctcaatttgataagaacattgatagataaaatctaagaaacaatactgaaaggactttggaagatgagatatctatctcaaatattagggaccttgggaaaaaagaaatacaatgataattttctatcataaaaatatctgcagctgaaattaacaatcaatagaatcagtttccattgtgtgtgtgtgatctacagtttttctat

SEQ ID NO: 339745 - DNA, 594 bp, Homo sapiens
gctgaaattaacaatcaatagaatcagtttccattgtgtgtgtgtgatctacagtttttctatttttttgtcctgacartttatcataatatatattttttcctgtgtgttcatcttggattgaatttcagttctttttcagctggtataattgttttccatctttttattttcaatcttatatttattcattcatttaataaatatgtcttgaaagcctaccaaattccaggcacaataattttacttagaaatgtcaatgcataaaacagacacaaacaataatcatcattaataactgaatcataaaatattagaatgatcagagttatggaaaataatacagggatgtagaactcatagaatgcggtgtaaaatatgttgatcagaataagcccattgaggaggtaacattttagcaaagatttaaggaggctaggaaattttccatgatgatatctggagtaaaattttactagactggggaaatatgcaggtctatagacaagatggtgcatagtgtgtttgaaaagaaacggagacaaagtgtgtgagtagtgagcatgtaatggggagtagtaaaatgtaagctct

SEQ ID NO: 339746 - DNA, 594 bp, Homo sapiens
gctgaaattaacaatcaatagaatcagtttccattgtgtgtgtgtgatctacagtttttctatttttttgtcctgacaatttatcataatatatattttttcctgtgtgttcatcttggattgaatttcagttctttttcagctggtataattgttttccatctttttattttcaatcttatatttattcattcatttaataaatatgtcttgaaagcctaccaaattccaggcacaataattttacttagaaatgtcaatgcataaaacagacacaaacaataatcatcattaataactgaatcataaaatattagaatgatcagagttatggaaaataatacagggatgtagaactcatagaatgcggtgtaaaatatgttgatcagaataagcccattgaggaggtaacattttagcaaagatttaaggaggctagraaattttccatgatgatatctggagtaaaattttactagactggggaaatatgcaggtctatagacaagatggtgcatagtgtgtttgaaaagaaacggagacaaagtgtgtgagtagtgagcatgtaatggggagtagtaaaatgtaagctct

SEQ ID NO: 339747 - DNA, 629 bp, Homo sapiens
gcctaccaaattccaggcacaataattttacttagaaatgtcaatgcataaaacagacacaaacaataatcatcattaataactgaatcataaaatattagaatgatcagagttatggaaaataatacagggatgtagaactcatagaatgcggtgtaaaatatgttgatcagaataagcccattgaggaggtaacattttagcaaagatttaaggaggctaggaaattttccatgatgatatctggagtaaaattttactagactggggaaatatgcaggtctatagacaagatggtgcatagtgtgtttgaaaagaaacggagacaaagtgtgtgagtagtgagcatgtaatggggagtagtaaaatgtaagctctaagaaaataagggcagtggagtcttgcacaagtccttgtgtgctactgtgtgtattttgtcttttaacttgagcaagatgcagaaccrttaggtgattttaaatgaaggaaaagcaaaatcaggtttatatgttaaaaggatcattctgttatttttaggtatggactgaagaggaaattgttagagataagcaaacaagaatttattgcaaaaataaacattacctgagagatgatgatgtgtgggaagt

SEQ ID NO: 339748 - DNA, 599 bp, Homo sapiens
acaattctatgatatgacgttgagaacatatggtcgaaagtgattgatggacaccaccatttaaggagagttgaaggaaatgagagactagagtgttgggaggatcacccatgtgtattatcaaaaccactgagaataaaggtaggagtcatattagaaagacagtgatccagaaacaaattcttgagaaattaagragaatgactcaatgatagttaacgacaacactgaagggaagtctaacgccaggcttttaggtagcacaatattttagttggactaaaattattgggcatattttaacgcccctccccaatctctcattatctgaatatccttttactagctcccacccccgctccatttctcttctttctttttaacaaaaataaacttaccagagtttagctttattccccacccaaaactttgactgtatcctggattattttatgcttttaatctttgagtatcttatcctaaattttttaatgtgggtctttgtgcggtaaagactctgagggcttgaatgtttgtgcatatttggggtatacgataacatttgaatggggatttgactaaatatagaactgcagaat

SEQ ID NO: 339749 - DNA, 634 bp, Homo sapiens
aagctctgaatggattattccatttgtggcttaatggattagtgagttaatgaattaaaaasttatcataagaggagaactggtagctttaaaggatggggaagagagccctgagctagcatgttagcacattcggcccccttgccatgtgatgccctgcacctgctcagaaccccttgagtctccactagcaaaaaggttctcagcagggttagcccctcaaccttggactttgagcctcaaaactgtaaaaatacatttattttctacagaaattaccatttcagatattctattataagcaacaaaaattggattaatacaatgatccttttataatgtttttaccattctttccctcatcttcctatttatgcctctctgtaggcctttagaatgctttcagttatgcttctgacctctgacaacatacggttttgttggtgtttccttgtggaattcaaagatgttttcactatttcatgcattttttggtgggtttactgattccactacttcctcttcagttatttctgtattaatgttacattcttgttctttttaaaaaagattaatttttaaagtatttctttagatctttttgtggatgacagcatttttaaaattcttgcac

SEQ ID NO: 339750 - DNA, 628 bp, Homo sapiens
gtattatcaaaaccactgagaataaaggtaggagtcatattagaaagacagtgatccagaaacaaattcttgagaaattaagaagaatgactcaatgatagttaacgacaacactgaagggaagtctaacgccaggcttttaggtagcacaatattttagttggactaaaattattgggcatattttaacgcccctccccaatctctcattatctgaatatccttttactagctcccacccccgctccatttctcttctttctttttaacaaaaataaacttaccagagtttagctttattccccacccaaaactttgactgtatcctggattattttatgcttttaatctttgagtatcttatcctaaattttttaatgtgggtctttgtgyggtaaagactctgagggcttgaatgtttgtgcatatttggggtatacgataacatttgaatggggatttgactaaatatagaactgcagaataatgtgcatttcttgaatactttaaaactatcattttattatttttttacatctagcatagtgttcaaaattcttttataaatctggatattgttcttctgtagttgatgtatattgtctctttaaacttggaattaaatttg

SEQ ID NO: 339751 - DNA, 634 bp, Homo sapiens
aagctctgaatggattattccatttgtggcttaatggattagtgagttaatgaattaaaaacttatcataagaggagaactggtagctttaaaggatggggaagagagccctgagctagcatgttagcacattcggcccccttgccatgtgatgccctgcacctgctcagaaccccttgagtctccactagcaaaaaggttctcagcagggttagcccctcaaccttggactttgagcctcaaaactgtaaaaatacatttattttctacagaaattaccatttcagatattctattataagcaacaaaaattggattaatacaatgatccttttataatgtttttaccattctttccctcatcttcctatttatgcctctctgtaggcctttagaatgctttcagttatgcttctgacctctgacaacatacggttttgttggtgtttccttrtggaattcaaagatgttttcactatttcatgcattttttggtgggtttactgattccactacttcctcttcagttatttctgtattaatgttacattcttgttctttttaaaaaagattaatttttaaagtatttctttagatctttttgtggatgacagcatttttaaaattcttgcac

SEQ ID NO: 339752 - DNA, 438 bp, Homo sapiens
aaaagttataaaatgtaccacataaatatatacatctacaatacgctgcaaaacttaaaaaataaaaattatttaaaaagacaaaaaaataaaaatttgaagtgattaacagtattgtttttgaaatgaaattcttggacaagatactatgttttgtctataaaatgtaatactgtacttacctcatagaattgaatgatggatgcattaattttagatttccttaattcccagaaatgtgagaatgacttagtcttcacagattaaactaagtttgctgaatgtagaattcacagttggtagagttgaggttcaaaattttatgtgttttctttaattgtctttctaygtaatgttgtacagaaatctgagaaaacctaattttggaaaaaaataataattattagttttaaattccctgatttttgtgaattcaga

SEQ ID NO: 339753 - DNA, 535 bp, Homo sapiens
gaagctacagtgagtggtgatcatgccactgcacttcagcctgggtgacagcgtgagaatcggtctcagaaacaaaaactacaacaacaaaataacaactccaaatccaattttttaataggcaaagtatgaaaataatgttgmagagacattccacaagataagatatatgaatggttaccaaggatttgaaaagatacccaatatcactactgattagtgaatagcagctaagtcaatgtgagaaattactagacacctactagaatgatgaaaactaaaccaaatgttgaggaagatacacaacaactagaacattgctaggacaaaactcatcggtaattgagtgtaagtttatcatagagctatcatatgacatagtaatttaatgtctttctcaatatttatatgactataaaacaaaatttatttcactatgaggaagattgtgactcactgtaaaggactgtgaaaggtaatctttgggttttggttacacaagtgtattagttcgtttcatgctgctaataaacac

SEQ ID NO: 339754 - DNA, 535 bp, Homo sapiens
gaagctacagtgagtggtgatcatgccactgcacttcagcctgggtgacagcgtgagaatcggtctcagaaacaaaaactacaacaacaaaataacaactccaaatccaattttttaataggcaaagtatgaaaataatgttgaagagacattccacaagataagatatatgaatggttaccaaggatttgaaaagatacccaatatcactactgattagtgaatagcagctaagtcaatgtgagaaattactagamacctactagaatgatgaaaactaaaccaaatgttgaggaagatacacaacaactagaacattgctaggacaaaactcatcggtaattgagtgtaagtttatcatagagctatcatatgacatagtaatttaatgtctttctcaatatttatatgactataaaacaaaatttatttcactatgaggaagattgtgactcactgtaaaggactgtgaaaggtaatctttgggttttggttacacaagtgtattagttcgtttcatgctgctaataaacac

SEQ ID NO: 339755 - DNA, 457 bp, Homo sapiens
cttcttcataatctctttgaaccctggcattaggttagacaaatgacatatattatattaatatgacatttttatcattaaactagttatatgcatatactgtaagaagatgaaaacatcatagaagcataaaactcagaaaatctactgtattcccattcttcaaaggaataatttataaacagttaaacatattaatttatagttagttttctattggtacgctgtcttctattgaatatatcatttactttttaggaatgaggtcattctataaatactcttcagcagtttactgtctgtcaccaataaaaaatcttaagcatttttgatgttagtatacatttttgtaattaatttattataagagctaaataatttcattgctatttktgatttaatagaaatatccttatactatgaggcttaagtgaaatttacaattctatatacaagc

SEQ ID NO: 339756 - DNA, 600 bp, Homo sapiens
gtgtcattcgcagactctaaagttttgatgtgcacagatttcactacctttcaaaggctcagccctgtgcctgggtcagcaaagcaataagtgccacactccaaggtgagtagaaaagtcaggatgtaaaatttataaaggatgtaattgagctaatttcaaagctcttcagttttactgccaaaaaaatatagtgaattggaagttgttggcaagtaaagagaatattttaatattgtcaaagttgttgatgtttcccccttatcccaagtgcaaaaagtgatgctgtaatgagacctcctccaacttggagaagttttaagtgatctcttcatattagagggaataagagactgtgtgtttcacatggtctagagtctagaaagtaagaattggtcagcctgatttaactatggggccarggagaggtaggtgtgtggggattggtctgatctcccaaagtatctcagaaaaaaaatgagtgattgccatggaccagatatggactaggggttcatggtatggtcatcacctagaatgggggatatacctcaccagaatgaaagtcaacctctgatgccaaaaggcttagaaaacaga

SEQ ID NO: 339757 - DNA, 600 bp, Homo sapiens
gtgtcattcgcagactctaaagttttgatgtgcacagatttcactacctttcaaaggctcagccctgtgcctgggtcagcaaagcaataagtgccacactccaaggtgagtagaaaagtcaggatgtaaaatttataaaggatgtaattgagctaatttcaaagctcttcagttttactgccaaaaaaatatagtgaattggaagttgttggcaagtaaagagaatattttaatattgtcaaagttgttgatgtttcccccttatcccaagtgcaaaaagtgatgctgtaatgagacctcctccaacttggagaagttttaagtgatctcttcatattagagggaataagagactgtgtgtttcacatggtctagagtctagaaagtaagaattggtcagcctgatttaactatggggccagggagaggtaggtgtgtggggattggtctgatctcccaaagtatctcagaaaaaaartgagtgattgccatggaccagatatggactaggggttcatggtatggtcatcacctagaatgggggatatacctcaccagaatgaaagtcaacctctgatgccaaaaggcttagaaaacaga

SEQ ID NO: 339758 - DNA, 612 bp, Homo sapiens
atattaggattatatacagaaacgttttacccaaattaataatttggaagatacataaacttctcacacaatgttctattaataattattataccagctgattggacacatattttaagacgtgacgctttgaatgtctccagtgacatcaatttccaaaaaagtgtttctgagtgtgtcccggtcacttcaagtttattgcagctaaattcaactgaagtgtctctgcttctaatctgggaaagccttcatcatgtgccatatctctaggccaacagttggagtttgggtacccttttttggccacctcagtagtctacatattggtaaacaagaaaacaacagtttgggtggcggattacaatgtttatgacacatgatttttgaggcttacaggaaaaaaaatatacattttatttctatttttgactttaatatcaccgattgccaaatagctaaagaaatgtatgtggtttctgacactttctaataccccatttctagaatctgttcccttcaagcraccctgtaattgtgcattttgttttgctgtaacagaatacctgagactgagtagttgataaagaaaagaggtttattttggctcacagt

SEQ ID NO: 339759 - DNA, 534 bp, Homo sapiens
agtccaaattttgcctttttaagatagaaatttatttaaaaagacattgccaagtactcttaaatacaaaatatcaaacaattgaactgtttaaaaagtttcatgatttaattaaatagctaatgcattcataagaattagtaacccaacatcaaacagaataattaattacatgtaattgaactaatagtagactaaaataatgtttatgactttttttttaaagtggtgattctttttatattatgttttccagagccaagaaaactttmttcttttgatctatagctcacagaaattgggtaaagcacacatttgtgaggaaaattaaaacgtttgcttttctcttcaacggacttctccagaattttgggactgtttgtgagtattcttgatttatggaaatacagtcatttgtataaattcaataagaacatgttttcttttgcaacagcacacacttgaagacactggttttttttgtttgtttgtttgtttgttttgttttatttaccaaggctttgactggaatgg

SEQ ID NO: 339760 - DNA, 534 bp, Homo sapiens
agtccaaattttgcctttttaagatagaaatttatttaaaaagacattgccaagtactcttaaatacaaaatatcaaacaattgaactgtttaaaaagtttcatgatttaattaaatagctaatgcattcataagaattagtaacccaacatcaaacagaataattaattacatgtaattgaactaatagtagactaaaataatgtttatgactttttttttaaagtggtgattctttttatattatgttttccagagccaagaaaactttcttcttttgatctatagctcacagaaattgggtaaagcacacatttgtgaggaaaattaaaacgtttgcttttctcttcaackgacttctccagaattttgggactgtttgtgagtattcttgatttatggaaatacagtcatttgtataaattcaataagaacatgttttcttttgcaacagcacacacttgaagacactggttttttttgtttgtttgtttgtttgttttgttttatttaccaaggctttgactggaatgg

SEQ ID NO: 339761 - DNA, 534 bp, Homo sapiens
agtccaaattttgcctttttaagatagaaatttatttaaaaagacattgccaagtactcttaaatacaaaatatcaaacaattgaactgtttaaaaagtttcatgatttaattaaatagctaatgcattcataagaattagtaacccaacatcaaacagaataattaattacatgtaattgaactaatagtagactaaaataatgtttatgactttttttttaaagtggtgattctttttatattatgttttccagagccaagaaaactttcttcttttgatctatagctcacagaaattgggtaaagcacacatttgtgaggaaaattaaaacgtttgcttttctcttcaacggacttctccagaattttgggactgtttgtgagtattcttgatttatggaaatayagtcatttgtataaattcaataagaacatgttttcttttgcaacagcacacacttgaagacactggttttttttgtttgtttgtttgtttgttttgttttatttaccaaggctttgactggaatgg

SEQ ID NO: 339762 - DNA, 527 bp, Homo sapiens
tgcttttctcttcaacggacttctccagaattttgggactgtttgtgagtattcttgatttatggaaatacagtcatttgtataaattcaataagaacatgttttcttttgcaacagcacacacttgaagacactrgttttttttgtttgtttgtttgtttgttttgttttatttaccaaggctttgactggaatggtgtattttaagatctgactacactactttgaggaattacagttgaccttatggagctgataaaaaaagccctttggaaagactggcctggtaccttgtttacatagttctcttaaaggttcctgactttgtggtaagtaaagaatgtcactttctgacaggcccaggaacctcaagatattttgggatagcaaagtaagatcatttcacccagtttgtataggcccagtctcattgtgaatcattgtctttggttcttgagctagaaaggcttttaaaagtctaataagtgataccttatgaaaaattttccatgaaagccaattttaaa

SEQ ID NO: 339763 - DNA, 599 bp, Homo sapiens
cccctacttgggagagtcattgagagcctatggtggataaataaaaatgatgttttaattaatatcaactattagagaaatgtggtaatcaacaggttaaagatctatctgcccctttgccgtgtgtagatacaaatgaaatatgcaaaatattttctaaaatagcatatgatactaaaatagcctaaacttcagatgccattttgcgagcccaaaatgctgcggtgatttggggtaagcatgsacagattttccacattgaacatttagagcaatttcttctccaagttggttttattatacctgatttttaaaaaaggaattgctctcttatttcagactacactcatattcttgagcttccaaaagttctcttttttatttaaaatgaaaacaattactgcagtgtattatgctgaattacatctaaaaatccaaaccatttctgcagcaaattctatttaactgtcctaatatcctcttttaatatgggtttcactagagagataaaaaattaaatgtttgccagagtgatgcattaataactcaaaacccttaattatagcagtgcccaatttaattaaaccctacattacaaa

SEQ ID NO: 339764 - DNA, 599 bp, Homo sapiens
cccctacttgggagagtcattgagagcctatggtggataaataaaaatgatgttttaattaatatcaactattagagaaatgtggtaatcaacaggttaaagatctatctgcccctttgccgtgtgtagatacaaatgaaatatgcaaaatattttctaaaatagcatatgatactaaaatagcctaaacttcagatgccattttgcgagcccaaaatgctgcggtgatttggggtaagcatgcacagattttcmacattgaacatttagagcaatttcttctccaagttggttttattatacctgatttttaaaaaaggaattgctctcttatttcagactacactcatattcttgagcttccaaaagttctcttttttatttaaaatgaaaacaattactgcagtgtattatgctgaattacatctaaaaatccaaaccatttctgcagcaaattctatttaactgtcctaatatcctcttttaatatgggtttcactagagagataaaaaattaaatgtttgccagagtgatgcattaataactcaaaacccttaattatagcagtgcccaatttaattaaaccctacattacaaa

SEQ ID NO: 339765 - DNA, 599 bp, Homo sapiens
cccctacttgggagagtcattgagagcctatggtggataaataaaaatgatgttttaattaatatcaactattagagaaatgtggtaatcaacaggttaaagatctatctgcccctttgccgtgtgtagatacaaatgaaatatgcaaaatattttctaaaatagcatatgatactaaaatagcctaaacttcagatgccattttgcgagcccaaaatgctgcggtgatttggggtaagcatgcacagattttccacattgracatttagagcaatttcttctccaagttggttttattatacctgatttttaaaaaaggaattgctctcttatttcagactacactcatattcttgagcttccaaaagttctcttttttatttaaaatgaaaacaattactgcagtgtattatgctgaattacatctaaaaatccaaaccatttctgcagcaaattctatttaactgtcctaatatcctcttttaatatgggtttcactagagagataaaaaattaaatgtttgccagagtgatgcattaataactcaaaacccttaattatagcagtgcccaatttaattaaaccctacattacaaa

SEQ ID NO: 339766 - DNA, 548 bp, Homo sapiens
gtactacattactttcataaattccattttatgtatcttcttatgacttacacagactatttatgacatgtttggactttttgacttgtcctaaacattcctctttttaaacaaccattcattttaatttaggagaagarcttaccatatgagatgtccttttatacaaaatctcttttctttattaccttccttaccaaaatacttatttacttttataaccttttaattagataaaagtcttttttttatgttatgaagttataattttagtacatgtcgctgtgtgagtccagtaaagaggggagcagacaaggttatctacctactgtagaagttatacccaatcaaaagattgctcaggtaaatttttgctacgacttgtcaagataagtgtgggctgtttctaaaccctgagattggactttccaagttgtggttattggttaaagattttggtataaataacagatgaatttagaggttgggaaaatattaagcaggcacccattttggaaagtatgtttttgcctcaaaggagtatgatt

SEQ ID NO: 339767 - DNA, 548 bp, Homo sapiens
gtactacattactttcataaattccattttatgtatcttcttatgacttacacagactatttatgacatgtttggactttttgacttgtcctaaacattcctctttttaaacaaccattcattttaatttaggagaagaacttaccatatgagatstccttttatacaaaatctcttttctttattaccttccttaccaaaatacttatttacttttataaccttttaattagataaaagtcttttttttatgttatgaagttataattttagtacatgtcgctgtgtgagtccagtaaagaggggagcagacaaggttatctacctactgtagaagttatacccaatcaaaagattgctcaggtaaatttttgctacgacttgtcaagataagtgtgggctgtttctaaaccctgagattggactttccaagttgtggttattggttaaagattttggtataaataacagatgaatttagaggttgggaaaatattaagcaggcacccattttggaaagtatgtttttgcctcaaaggagtatgatt

SEQ ID NO: 339768 - DNA, 548 bp, Homo sapiens
gtactacattactttcataaattccattttatgtatcttcttatgacttacacagactatttatgacatgtttggactttttgacttgtcctaaacattcctctttttaaacaaccattcattttaatttaggagaagaacttaccatatgagatgtccttttatacaaaatctcttttctttattaccttccttaccaaaatacttatttacttttataaccttttaattagataaaagtcttttttttatgttatgaagttataattttagtacatgtcgctgtgtgagtccagtaaagaggggagcagacaaggttatctacctactgtagaagttatacccaatcaaaagattgctcaggtaaatttttgctasgacttgtcaagataagtgtgggctgtttctaaaccctgagattggactttccaagttgtggttattggttaaagattttggtataaataacagatgaatttagaggttgggaaaatattaagcaggcacccattttggaaagtatgtttttgcctcaaaggagtatgatt

SEQ ID NO: 339769 - DNA, 545 bp, Homo sapiens
ggttgggaaaatattaagcaggcacccattttggaaagtatgtttttgcctcaaaggagtatgattcttttattttggaggtatggggtgccatttgctctcattacgcagcaggatttggaggacggtgcctcagagaagattagcacagagtagacrgctcgtgaaccccaaagagaaatttataattttacttcctacctgtagggctgtagggttttccttggctttgttctgtcgataatgatgtctgatttggaagccagctggaggagagagccccttcagctcaaggccatcaggggttgggattctgtcccagggccttttggacctcaggggccgtcctgtttccagtggccaagcttgtggcagaggggccaagtcatgcagggcttttttccatttatcccactggggaaatttgccttccagtgacctggcttctcacactgatgatgacagttaccctggagggtattctgaggacaacttgaagtgggcttcagggctggtaaaccagtcaatagttgagcctgcctttg

SEQ ID NO: 339770 - DNA, 497 bp, Homo sapiens
caaaataactgttggtagagaaacagctctgaggaaacctcaacgaaaaaagaacagaaagaccaaagtttgggctattgtagaaaaaggtataggaaattagagggttaatccacaagtttctatatttgaccaatagaattctggcaaaaatgaaatagggagaacagaaaagagaaaatgacgaaagaaagagcgtaaaattcagtgccagaattaataaaaggcttatatcaaggcataccttcagggaattttagaactatcacctaatgagaagattcragaagcttctagagagagaggaggaaagaagccacgtacaaaggtttgaaaataagaatgtcattaggtttcacaattgcaattctggaaggtgaaagatcatgccttcaaaaatttgagtgcagatgatttcaatattagattttttatctaaccaaattataaatttaggtatggaaaatacaaaaaaagagatacagttttagacttgc

SEQ ID NO: 339771 - DNA, 524 bp, Homo sapiens
gcagtatgcttggtccagctgcagcctttcagggagctggcacctggagctgcccaccctgctgcagccagcatgcctggctgtgcayggtggccagaccccacaatggctcattcacacaaccctctcatctctgcacctggctcaaccttggcgggcatgagactcaggctggtagtgcaatccaagtgcagcctgccaggctgagtgggcagaataaacccagtggggctgagtaaaaactcggacagaggtgccactggccacagagatttctgcctggtgaagtgacacccccaaggatcctgtgacactttttcctcagttcttatcacccagtacaatatgtctggctttcaacaaaaagctaccacttataccaaaaagtaattacaaatacagtctgaaaaaatcaagcaaacttcagagccagaatcaagcataacactgatttggatttatatcagacagagaatttaaaacaaccaacattaatatgtaaagaactctaaaaagttgacaac

SEQ ID NO: 339772 - DNA, 554 bp, Homo sapiens
tagatctatctctgtgctaggccaatttacagcagatatccagcatgtagctattgaattctgagtttatatgaacaaagtttctatataccagaggatatttrccaccaaagagctgcaaatccatgagtgccagcttcaatactaatatatcaatggtagttcttcttaaatttttaaaattcactataaggagaaagtactacttttatttttaatcagaaaaaaatttaacatggttaatgaagttttttagatttctcgtaattttagtcaaataatattttcagggattccttgtcaaactaatagttgagtaatgacatgtggaatattgcatcgccaaaaatgttttctaactatattgcctcccctcctccttattttttctatcgactacagggtaggagcctaggtgacttgatattttctgtttctgggcaaaatatatgtagaaaaaataactttcaagtcatttttatcctcaaactgtaatattggccctatgttcccagtggtaaaaaaaaaaaaaaaaaaaaaaggagaaaggaagg

SEQ ID NO: 339773 - DNA, 617 bp, Homo sapiens
tatcatatattggacactaatccacataatatacagccttctgtaataaagaaccttgtcccagctctgcaaggtattaccaccttgctggaactgtaactgagtcttcaaaagccattccrccattctatcaagccagcaactttaggatggtggagaacatggtaagaccactaaattccataagcatgggctgattcctgagcttatttggtcagaggcaacgttgagtggaataccatgatggtggatactatggtttaagtgatggtgtcatctccaaatttatgttgaaatttaatcctcactgcaacagtattaagagttgttgcccttggaggaagattaagtcatgagggctccaccctcataaattaaatcagtatccttataaaagatttgaagagagtactctcttgccattccaatttttgacatatgaggacacagtgacatggcaccttttcgaaagcagagagcagcctcaccagacaccagtgacagtaccttaatattggatgtctcaactccagaactgcaaaaaataaatttctgttcttcataaattatctgtctaaggtgttttgtgaaagcagcacaaatggactaagagagtg

SEQ ID NO: 339774 - DNA, 553 bp, Homo sapiens
tttttgcccagagaggtaaaacacgtctcctccaaatattttgtagccaattttctaagcatgtttcttccaagtctctgactgtccagccaaaccaytggccacagcccgtgaatcagagtataatcacaagtctggtcatttctcctttcaaccgaagttgacaaccatgtgcagtgcttgaagttctacccactgggagaattcacctttaccactgcctttcaagaatgtctcagaaagaggctatagtgctgcagctgttcacttttgggtagtgtcaacataaaattcagaactgtaaaccataacttagtcttctctttgtcaactgatcatagctaattccccatgaagtcacaggtacagactgggagagggaaaacagtgtagcagcaatggaaccatgagcatttgggccacttcatgtaacttacttgtgccttcagggcctgctcaaacctgatcacaccttcatttcatgatgaaattctcctgtcacaccaactttatagcttaggagtaagacagcacccagttcatgaggggcagc

SEQ ID NO: 339775 - DNA, 553 bp, Homo sapiens
tttttgcccagagaggtaaaacacgtctcctccaaatattttgtagccaattttctaagcatgtttcttccaagtctctgactgtccagccaaaccattggccacagcccgtgaatcagagtataatcacaagtctggtcatttctcctttcaaccraagttgacaaccatgtgcagtgcttgaagttctacccactgggagaattcacctttaccactgcctttcaagaatgtctcagaaagaggctatagtgctgcagctgttcacttttgggtagtgtcaacataaaattcagaactgtaaaccataacttagtcttctctttgtcaactgatcatagctaattccccatgaagtcacaggtacagactgggagagggaaaacagtgtagcagcaatggaaccatgagcatttgggccacttcatgtaacttacttgtgccttcagggcctgctcaaacctgatcacaccttcatttcatgatgaaattctcctgtcacaccaactttatagcttaggagtaagacagcacccagttcatgaggggcagc

SEQ ID NO: 339776 - DNA, 588 bp, Homo sapiens
ccttgtggctataggagataagaacctcattcagggaacacatagaagctttcaagtccttcatggaatgcttaagctgggaattcgaatccctaagctcattcttttctctcaccacttyttccagagacattaaaagcagcctgccaacctcattatatttgttacttttctaaaaatgttcagaaatgttatcttcacagtcactcagctccttgcttcttataagtggtttattaggagaatttaatggaggtgttttgtgtatttctattgacagattacaccatagactatcagttctctctgtacaactggaaatagagtcattagcaactttaaatccgttcagattagagagccaattccagaagccctggaaccaactctgaaaactcatctttaacattctgtttctttagaaccacacttggtattaaaaatctgtattagtaaaggttcttcagagaaacagaaacaacaggagataaattggatagatagatgatagacagatagatatagatagatagatgatagatagattagatagagattagatagatagataatagatacatagacata

SEQ ID NO: 339777 - DNA, 549 bp, Homo sapiens
aatctctttaagcagagagtgaataggttaacaaaggaaccagactgcttcacatgccatcagtgacttttttcctccttttcctctcctttttctttgcatggtataaaagaatagatgggcatgcattgcaaatgtgatctatctcatcttgctctgcccaagaccgcctcatatgtaattttcccctgaataaatttttgactacctaccaacctagagtattctgcctcttgctttggtctgagatcgccctctgcttaaagagggtcattcttggagctggaagggaattttcacaacaaatacgtagctatacataaaattcattataaggaattgacacatgtgattatgaaggctgagaagtcacaagatctacagttagcaaggtggagaccccagagagttgatgatgtagtttcagtctcratcccaaaagactgaggatcaggagagccatggatgtttatgatagatttattcataattgccaaaacttggaagcagccaagatattcttcagtagcttaatggataaactgtggt

SEQ ID NO: 339778 - DNA, 504 bp, Homo sapiens
gtaaaggttcagtgtttcccaaactcttgaaagcagcatttatgaatggcacatggtggcctggtctcaaactgcccacttctcctgtccctctccagggtactccagcagtactagaccgaaaccactcacagttctctgaatgtctgcctcttcaagcctgggttactttacgtactataccctgtggttgccttcacatagattcctcctctttttatctgcctgctaaagtcatgctcatcctctaagtctcaatttaaatatccccccttctctgacattttcrgtagctgagggaaaattattcttttttaaataagagagtcttgagcctttttgagaaaggaggtagtagaatgggagagattgatagtctgggataactgatggatcccagttcagaaatatatgataaagagaaagatcaaaagcacagaagaaaagcgtgtatgcctgctcttacacagcctctgtggattgtaaccatttgtttctgtttcg

SEQ ID NO: 339779 - DNA, 506 bp, Homo sapiens
tcctccatgctattcttatgatagtgagtgagttctcacaaaacctgacggctttatmgggggctcttgccccattcagtctgcacttgtccttcctgctgctttgtgaagaaggtgccttgcttcctccttcaccttctgccatgattgtaaatttcctgaggcctccccagccatgctgaactgtgagttaattaaacctctttcctttataaatttcccagtcccagacagttctttacagaagtatgagaatggactaatacactagcagaaaggaggaaatgtgttcataagcaaataaaacagtataaactcacaccgagatgagaaagcatgatgtggcccagaaatagcaaatactccagcttaagtacagtgtatattatggccaagatgaggctgagaaagcagatgggatgagggtgtagaggatactctctgtaagaagaaggacttggaaattctttttgcagttacctgtttcccaaagagtagttctccac

SEQ ID NO: 339780 - DNA, 562 bp, Homo sapiens
atgagattttggtggagacacaaagcctcaccataaaggtggggaggagcttatgaaaaatttaaaaaaatcattcatacactgagagactaataataaaattaaaattaattttgtaatattcttaatgaactaattcaatgactaatactcccaatgatattagataggtgtgatctttgtcatcagactttcaaaagagcaaattcattaggaattaaaccatgacatgaaattaattttaaataccctacatcctgtctagaaaattcacctcaycagtagtaatttaaataaaatcctgttgtttatcataattcctttcagcaatagagcaaccttgacagatccaattttgtaatggacaatttactctggttagtaattaggtgagtggttaaaacattgtttctgtataataggatacatttcttttaagtggccccagtattattgtcttggtctagttcatgaattagcctttgtaatgtccatagacagaactttttaatagattatttagcctcagaagatgtttgatatggtttgaatgtttgttctc

SEQ ID NO: 339781 - DNA, 633 bp, Homo sapiens
attgtttctgtataataggatacatttcttttaagtggccccagtattattgtcttggtctagttcatgaattagcctttgtaatgtccatagacagaactttttaatagattatttagcctcagaagatgtttgatatggtttgaatgtttgttctctccaaatctcatgttgagagataatcctcagttttggaggtggggctgggtgggaggtgtttggatcatggtggggatcgttcattaatggcttagcaccatctccttggtgatgagtgaattcacatgagatttggttgtttaaaagcatgtggaacctgccccactctctctggctccctttcttgccacgtgatttgccggcttcccccttgccttccgccatgaacgtaagcttcctgaggcccttaacagaaatagatgttggcactgtactttgtgtataggctacagaaccatgagccaattaaacctcttttctttatgttacccagcctcaggtatttctttattgtaacacaaacacagactcatacaatattctaagattttacaaaacagcattttaaatttcactttagtattcacatcattcattactcacctgaragcagggtagagtgtcaatggagag

SEQ ID NO: 339782 - DNA, 599 bp, Homo sapiens
gcacatgaatttaatttatctttttttttttttttttgaggcggaatctcactttgtcacccaggctggagtgcagtggtgtgatctcgtctcaccacaacctccgcctgctgggttcaagcaattcccctgcctcagcctcccaagtagctgggattacaggcacacactaccaccatgcccagctaatatttttgtatttttagtagagacagctttcaccatgttggccagactggtcttgaactcctgacctcaggcaatccactggtctcagcccccaaagtgctaggattacaggtgtgagccaccgcgctcagcctaattgatstttttaaagaacaagcttttagtttcattgttttttctctattgcttgcctgttttcaatttcatttatttctcttaaattttatatttttcttctgtttactttgggtttaatttgctgtactttttctagtttctaagatgaattcttaaatttctgatatttgatctttcttcttttctactatatacattcagtgccataaatttccttctaagcactgctttcactgtatcccacaaattttaataggttgtattttattttc

SEQ ID NO: 339783 - DNA, 608 bp, Homo sapiens
tcctcgatatctgcgtaagagttagtgttatacggcacatggactgctgatatattttacaggcaaacatgagttccggtgtaatttaggtaactttctagttttgggtaagtcatcattttcaagtctcagttttctcattggtgaaatagagatgcctgtttatgattctttccccctgggactattgggataatgaaataatgtggtatatgtgaatgttcttggtgagcagtgttgttatttgaactatcttgacaatgacagaatcatcaaaatgaagacaatgaaggattcatagagatagtactcaatcttttctccaaatgatcactttgccactgcctctttacagatataattatttctagakaaataacatatagtagttaagtaatgataaatatacaggatgttcaatggggtgacaaaatgactgtgagttcagacctttctcacatctaagcaaaattgctaagggaagtcaaaatgatatttggaaaactgtgctgtctaagtttccggattcatctcttgctgccctcccacaagtgctctgcctcatgtttatacccaaatgagctgtgctcttttttacctcctatcct

SEQ ID NO: 339784 - DNA, 539 bp, Homo sapiens
gaaaactgagagctacattaactgaaggttctctttcagttatgcctgcctcttcctccctgacagtttgtatctccatgaccccatggtcacacaccttacaaaatggcagtaaccttccattttgkatccctagctgtaaatattcttctcttcacttcagttttcataccttcatcactctgccttaaagcattttaaatgtacaaaagatatgtttttaaaatcttaattggttgaatcatttataaactccttagtctataatcacaccactactacctgagggtgggtccaaaactaccctcccaactcattttttagtgttctctaaaatcaaaattttccattcctagagtatgaattgggcaggctgtatcttgggcatcctatctggtactatataacagtatgggttttaacttgtataattcattttacatgacacctagcagtgcaaattgcacatggcaggaactttagtaacctgctttaaaaaaatctaaattactagtgtgtttatttttaagccaaatgtt

SEQ ID NO: 339785 - DNA, 539 bp, Homo sapiens
gaaaactgagagctacattaactgaaggttctctttcagttatgcctgcctcttcctccctgacagtttgtatctccatgaccccatggtcacacaccttacaaaatggcagtaaccttccattttgtatccctagctgtaaatattcttctcttcacttcagtyttcataccttcatcactctgccttaaagcattttaaatgtacaaaagatatgtttttaaaatcttaattggttgaatcatttataaactccttagtctataatcacaccactactacctgagggtgggtccaaaactaccctcccaactcattttttagtgttctctaaaatcaaaattttccattcctagagtatgaattgggcaggctgtatcttgggcatcctatctggtactatataacagtatgggttttaacttgtataattcattttacatgacacctagcagtgcaaattgcacatggcaggaactttagtaacctgctttaaaaaaatctaaattactagtgtgtttatttttaagccaaatgtt

SEQ ID NO: 339786 - DNA, 593 bp, Homo sapiens
agtattttttaaaatgtcttcagtgtakgtatgtcattattataacataactataaaacttaaaaaacatgtcaatgtagttttggcatattatttaaaaaatcaagctaaaaagttatagaaaagcaaagcataacaaatttcagttctttaatgtgaatattcaataataaaactaaaacatatttaaatgcaaaattaatcctgtacaaatagtttttgctcaatctccattgcccatctatgcttaagccttcctattcactggccctagatttttcccttattcaaattacatattctacatatttttatggagttttacttctctgcctcaaagccagcagtgcctccctcttaacaaatacacaaaatgaaaattctgtttctggatttcaatcctgctagctatccgaacactttttcttaaaactagctcttctcttcagactagttcctttttattggcttctgatcacatagcatgtgtgacccacattttgcctcttcctctcttctctaattcaggccttttgtgaaggtttattccccactctgcttcttccaaacaacttctccttagcccatgctca

SEQ ID NO: 339787 - DNA, 476 bp, Homo sapiens
ctgtgtgcttagcggagggagagcacagtgattgtgggactttgtgctggaactcagtgctgccctgtcacagcagaaagcaacacaaggcagaactctgcccaccaagggagcatttagaccatccctggccagaggcaaaacatccatcccagtggtcagaacttaagttctggcaagccctgccaccataagctgacgtgttctggggtcctaagtaaayttgaaaggcagtctaggctacaacggctgcagttccggggcaagttattgtcctgtgctgggctcagagccagtggacttggggagcatgcaacctagtgagacattaactggggtggccaagggagtgcttgcatcactcatctcccaaccctgggaagtgcagctcacagctccaggagagactcctttactctgcttgaggagagaagaaggaagagtaaagagaactctgtcttgcaacttgtatacca

SEQ ID NO: 339788 - DNA, 476 bp, Homo sapiens
ctgtgtgcttagcggagggagagcacagtgattgtgggactttgtgctggaactcagtgctgccctgtcacagcagaaagcaacacaaggcagaactctgcccaccaagggagcatttagaccatccctggccagaggcaaaacatccatcccagtggtcagaacttaagttctggcaagccctgccaccataagctgacgtgttctggggtcctaagtaaatttgaaaggcagtctaggctacaacggctgcagttccggggcaagttattgtcctgtgctgggctcagagccagtggacttggggagcatgcaacctagtgagacattarctggggtggccaagggagtgcttgcatcactcatctcccaaccctgggaagtgcagctcacagctccaggagagactcctttactctgcttgaggagagaagaaggaagagtaaagagaactctgtcttgcaacttgtatacca

SEQ ID NO: 339789 - DNA, 614 bp, Homo sapiens
aggcttcttttgacttcatgtctaagtttaaacttgtaaaagagttctcacattatatctgcacataagaaaactttctgaatgtatccagaaaatatttctgaagacaatgatattcattatyattgcttcataattacattttgtaagttcctaattggaatttgatgttacttataatcaatatgtaagtataatgctttaatataaaattgtaaaatgtcaggtatcgtattaatactatactcagtgaagaacactgcaaaaatgtcatgattgccgagttcaatatgtaggatcattataaaataagcaagactataattagtatcaaaacaaaattctaagtcagatggagatattaattttattttttcaaggtaaagtgaagtaaggaagaatgattaaaggagagatattttataattccaaagacacattcactatatactgcaaatattacagcagaatagattgacatcatcttatatttgccttaaatctgttatctttaagttaatagatatctatcattatggaaatttgaaaccctagcataagatattaagctggtcacttggtttgcaactggaactctttaatctaatttggaa

SEQ ID NO: 339790 - DNA, 515 bp, Homo sapiens
taacaattataaatttatatgcacccaactggaacacccacatatataaagcaaatattagtgctgaagagatagacctcagtacaatagcagttggagacatcaacacctgattttcagcattagacagagcatccagaaaaaaataataaacaaggaaacactggacttaatctgcactatagaccaaatggacctaatagttgttttcagaacattcatccaatgaatccagaatacacattcttctcctcagcacatggatcattctcaaggatagamcatatgttaagctacaaacacatcttaaaaaattcaaaaaaaaaattatatcaagtatcttctctaacaacaaaggtaaaaaactaggaatcaataacaagaaaaatgttggaaactatacatacaacacatataaattaaacaatgtgccctgaaaggaccagtaggccaatgaaaaaattaagaaaaaaattgaaaaaaaattttaaactaatgcaaatggaaatacaaca

SEQ ID NO: 339791 - DNA, 515 bp, Homo sapiens
taacaattataaatttatatgcacccaactggaacacccacatatataaagcaaatattagtgctgaagagatagacctcagtacaatagcagttggagacatcaacacctgattttcagcattagacagagcatccagaaaaaaataataaacaaggaaacactggacttaatctgcactatagaccaaatggacctaatagttgttttcagaacattcatccaatgaatccagaatacacattcttctcctcagcacatggatcattctcaaggatagaccatatgttaagctacaaacacatcttaaaaaattcaaaaaaaaaattatatcaagtatcttctctaacaacaaaggtaaaaaactaggaatcaataacargaaaaatgttggaaactatacatacaacacatataaattaaacaatgtgccctgaaaggaccagtaggccaatgaaaaaattaagaaaaaaattgaaaaaaaattttaaactaatgcaaatggaaatacaaca

SEQ ID NO: 339792 - DNA, 445 bp, Homo sapiens
aacacattaaaaagatcattcatcatgaccaagtgggatttaagggatgcaaggatgattcaacrtatgcaaattaatcaacaagatacatcacatcaacagcatggaggacaaaaacatatgatcatttcaactgatgctaaaaagcatttgataaatttcaatatctcttcgtaataaaaagactcaaaaactgaggatagaagggacatacctcaacacaatgaaagtcatatatgatatacctacagttagtgtcattctgaaaaactaaaagcctttcctctaagatctggaatatggcaaggatgcccaccgtcaccactgttactcaacatagtactggaagtcctaactagaccaatcagacaaaagaaagaaagaaagtgcatccaaattggaaaggaaaaagtcaaattatccttgtttgtagataatatggtct

SEQ ID NO: 339793 - DNA, 610 bp, Homo sapiens
gttctttgaaaagttcagtaaaagtgacaaaactctagcctggctaactcagaaaaaaagagaaaaaacaatctaaattaccaagattggaaataaaaaagggattatcactgctgatcccatggatattaaaatggtaacaagatagtactatgaacaactcttcatccacaaattgagtaacttagatgaaattaccagttctttgaaagacacaaactaccaaaattcacttaaggagaaagagataaccagcayagatatatatatattaaaatttgtaaattaaaaaatttttaaatgtttccaaaaaagcacttgtcccatatagtttcactggtgaattctaccaaacattttagtaaacaatattgccaatcctccacaatccctttcagaaaatataagtagagtgaatacttctcaactcttttacaaggcccgtgtactctaatatgaaaaccagataaacacattataaggaaaataacacagtaatatctgtaatggacatatatgtaaaacttcttaacaaaatactagaaaatctaatttggcaatatataaactggaaaatacaacatgatcaacttgggtttattctaggaat

SEQ ID NO: 339794 - DNA, 610 bp, Homo sapiens
gttctttgaaaagttcagtaaaagtgacaaaactctagcctggctaactcagaaaaaaagagaaaaaacaatctaaattaccaagattggaaataaaaaagggattatcactgctgatcccatggatattaaaatggtaacaagatagtactatgaacaactcttcatccacaaattgagtaacttagatgaaattaccagttctttgaaagacacaaactaccaaaattcacttaaggagaaagagataaccagcatagatatatatatattaaaatttgtaaattaaaaaatttttaaatgtttccaaaaaagcacttgtcccatatagtttcactggtgaattctaccaaacattttagtaaacaatattgccaatcctccacaatccctttcagaaaatataagtagagtgaatacttctcaactcttttacaaggcccgtgtactctaatatgaaaascagataaacacattataaggaaaataacacagtaatatctgtaatggacatatatgtaaaacttcttaacaaaatactagaaaatctaatttggcaatatataaactggaaaatacaacatgatcaacttgggtttattctaggaat

SEQ ID NO: 339795 - DNA, 610 bp, Homo sapiens
gttctttgaaaagttcagtaaaagtgacaaaactctagcctggctaactcagaaaaaaagagaaaaaacaatctaaattaccaagattggaaataaaaaagggattatcactgctgatcccatggatattaaaatggtaacaagatagtactatgaacaactcttcatccacaaattgagtaacttagatgaaattaccagttctttgaaagacacaaactaccaaaattcacttaaggagaaagagataaccagcatagatatatatatattaaaatttgtaaattaaaaaatttttaaatgtttccaaaaaagcacttgtcccatatagtttcactggtgaattctaccaaacattttagtaaacaatattgccaatcctccacaatccctttcagaaaatataagtagagtgaatacttctcaactcttttacaaggcccgtgtactctaatatgaaaaccagataaacacattataaggaaaatarcacagtaatatctgtaatggacatatatgtaaaacttcttaacaaaatactagaaaatctaatttggcaatatataaactggaaaatacaacatgatcaacttgggtttattctaggaat

SEQ ID NO: 339796 - DNA, 450 bp, Homo sapiens
gatagttaggctatggatataagtgtttgtaaccaaggagtgatctagaataattgtgagaacacagagaaaacacagtggaacagtactagcccatccaggcaatctgacaataaaagtactgctagagagacttcctatttcagctccacatrtaaaaatcttgatattcatcactcctgggcacaagaaagaaaatgctgtaaaaaatgaaaatcaatgagttttcttggtcccattagacagatgacatcataggaaatctagagaaacaagtaaatccaaagagttgcatctgagatgtgcttagctagaggagaagcagtagaaccatgagcaggtagaaatacttaaatggtaactttgatgaattgctggaggttgagtacagactagcatgagagaaaaccttctgaaggctgtaatattaagaagtcttgtgaagcagat

SEQ ID NO: 339797 - DNA, 654 bp, Homo sapiens
aactcgttgcctacaactttgttataatcacttgttagttccctgagtactttttgccaattctactaaattttctacatagataargtcatctgcaaacaaagagtttttatttcttccttcacaatctgtgtatctttttatttttttcttgttttattatattggcaagaacttccagtataatgttgaagaggagtggtcagagttgatatctttgccttgttcttgtcttagctggaaaacttataattacttaccattgagtatgatgttagctgtaggttttttgtagatgttcattttcaagttgaaaaagttcaccttctgttcctagtttgctgagttttcatcatgagtgggtgttggatttttttcaaatgttttttctgcatctattaatataatcatgtaattgttcttctttagtctattgatgtgatagattatattgatttttgaatttagaatcagccttacatatctgagataaatgtcacttggtcataatgtataatggtttttatacattgttgaattagattgcctaatattttattgaaaatttttatgtcaattctcatgaaagatattgatctgttgttttactttcttataaggttttgaattagggtaatactgaactaataggat

SEQ ID NO: 339798 - DNA, 478 bp, Homo sapiens
atactcacacttgtttttaattttgattagcattagcatgatatatatttctccatctctttatctttaacctatatgrtatctttatatttaaactggttttctactaagcaacatagagttgggtctatatgatttttgatacactctgaaaatctgtgtttttattggtgtatttagaccattcatctttaaagtgattattgatatagatagatgtattagttcattctcacacggctataaagaacttcctgaaactgtattatttataaaggaaagaggtttaaccgacttacagttaagcatggctggagaagcctcaggaaatttacaatcatggtggaaggcaaaggagaaacacaaaccttcttcaaatggcagcaggagagagaagagtaaagaatggagggggaagagccctttataaaaccataagatcttgtgagaactgactcactatcacaagaacagcagt

SEQ ID NO: 339799 - DNA, 478 bp, Homo sapiens
atactcacacttgtttttaattttgattagcattagcatgatatatatttctccatctctttatctttaacctatatggtatctttatatttaaactggttttctactaagcaacatagagttgggtctatatgatttttgatacactctgaaaatctgtgtttttattggtgtatttagaccattcatctttaaagtgattattgatatagatagatgtattagttcattctcacacggctataaagaacttcctgaaactgtattatttataaaggaaagaggtttaaccgactyacagttaagcatggctggagaagcctcaggaaatttacaatcatggtggaaggcaaaggagaaacacaaaccttcttcaaatggcagcaggagagagaagagtaaagaatggagggggaagagccctttataaaaccataagatcttgtgagaactgactcactatcacaagaacagcagt

SEQ ID NO: 339800 - DNA, 622 bp, Homo sapiens
gtttcagattattttcaataacatgtttctgattaattataaatgtctgaatcagttacttgcttcatcttatttgttaatagaaaaaaatgtcatacaagtgataatgttgggaatggtaatgcatttgatattatcaagttcatagtctttctataagattcgatttttagatattttgaagtccataaatatatttaataatatctgattatgtttataatttacatttagcaattattataagcaataaaaacacactaaaaattgtcagaactgataaaacagaatggtgaatggcatctaaatgggactttggttgggtagtactatcaattgttgctataattagataaatttatgaagcataaatttaaagaataggacttmcatttaatattcgagtatactgaaattcttcagataaaaagcaccttaaaatgctgggtaaaatacaacaatcagtcttttaaagtaatttgtgcttgtaagaaaataaatttccttgtgctctaaattaaaaagactgaaaaccagggagtttagtgtgtgcactaaatgtttcataaactaagtggagtttttacctgaggattcccagggatgaaacttgactgtttga

SEQ ID NO: 339801 - DNA, 263 bp, Homo sapiens
gtattccatatatacaatggaatactattcagccataaaagaataaaatttggtcatttgcaacaatatggatgaacctggaggrtattatattaactgaaataaaccaagaacagaaggacaaatgctgcattatctcactcttatgtgaaatctaaaaatgttgatgtcacagaaatagagattagaatagtagttatcagagtgtagggagggtaaatgggagaaggaatggagagaaggttaatgggtacaaagttata

SEQ ID NO: 339802 - DNA, 263 bp, Homo sapiens
gtattccatatatacaatggaatactattcagccataaaagaataaaatttggtcatttgcaacaatatggatgaacctggaggatattatattaactgaaataaaccaagaacagaaggacaaatgctgcattatctcactcttatgtgaaatctaaaaatgttgatgtcacagaaatagagattagaatagtagttatcagagtgtagggagggtaaaygggagaaggaatggagagaaggttaatgggtacaaagttata

SEQ ID NO: 339803 - DNA, 530 bp, Homo sapiens
caacattgcaaaaataaacctctatacgtgatcaaaactaagcattttcattggtctctagcccagtttcacaggccaatataacagtgacatgttttcatggacttttttcttaacctgagtttctcagaaaaaaatgttacctctggtgatggtagagtatcaggaaaatcatcaagcatatcagaaagcaaggactctccaaaagtagcctgcaaattgtctgccattacttcttgttgggcagtggagcagtgattttctaaagagagcaccactgggtagtcagatgtctaaaaaagtaaccattactatggttattcatcaaaacttctaaataattgtaaggcaattaatataagtgcttaatgtattttaaaacttacttctaacgtttagtacctttgcaaaataastattctttaaactgaaagtacttttgagtttggcaaaacagagaccattaaatctgcataaaaagaaatgtattactatttgcaccaaaagaataggaacaactgaagcatcca

SEQ ID NO: 339804 - DNA, 494 bp, Homo sapiens
tgtaatttcatgtcctctttttccaaatagtgactaccttgagtaggaagtctaaactttaatcttatctatgctgcaaaactgagtcaccttgttcagctgggaagtctcattgagtctccactgctcaaagccttgtttaaaatctcacttcttgctcttttgggtgtttttaaatgcattttattgtgtatacttaaggtatacaacatgatgwtatggaacacacgtagatagtaagaaggttattacagtgaatcaaattaacatatccatctatccatcatttcacagttaccctttttaaaatttttgtagcaagagcagctaaaatctattcattcagcatgaataccatatacagtataactttattacctataatcctcatatgatacattagatgtctagactttttcatcctacatatgtgctactttgtagcctctgacctacctttctccattttcttctccctccccacacctcgttcc

SEQ ID NO: 339805 - DNA, 602 bp, Homo sapiens
aatatatacacatgtaatcacagaatattataaaactgtaactgtggtgtgtaaactagccttatattaagtagaaacataaaatgatgaacccatcaaaaataataactacaaaaacttttcaagatacagccagtacaataaggtataaatagaaacaacaaaaagttaaaaagcagggagaccaagttaaggtgtagagtttttattaattttctttttgcttgcttgtttatttatgcaaacaatgttaagtggttatcagcttaaaataatgggttgtaagayaagatttgtaagcctcatgttaacctcaaatcaaaaaaatacactggatacatgaaaaataaaaaccaagaaaacgaatcatgccaccagagaaaatcaccttcactaaaaggaagacaggaagaaaaaaaaaaagaaggagaaaaagaccacaaaacaaccagaaaacaaataaaaaatggcaggagtaagtcctgtaaaaggaaaataaatcttgggaccccaaaatcattaagccaaagggaaaacttcagctgggaactatgtcaggcaaacatgcctcccactttattcctaaataagaaagctacaaa

SEQ ID NO: 339806 - DNA, 602 bp, Homo sapiens
aatatatacacatgtaatcacagaatattataaaactgtaactgtggtgtgtaaactagccttatattaagtagaaacataaaatgatgaacccatcaaaaataataactacaaaaacttttcaagatacagccagtacaataaggtataaatagaaacaacaaaaagttaaaaagcagggagaccaagttaaggtgtagagtttttattaattttctttttgcttgcttgtttatttatgcaaacaatgttaagtggttatcagcttaaaataatgggttgtaagataagatttgtaagcctcatgttaacctcaaatcaaaaaaatacactggatacatgaaaaataaaaaccaagaaaacgaatcatgccaccagagaaaatcaccttcactaaaaggaagacaggaagaaaaaaaaaaagaaggaraaaaagaccacaaaacaaccagaaaacaaataaaaaatggcaggagtaagtcctgtaaaaggaaaataaatcttgggaccccaaaatcattaagccaaagggaaaacttcagctgggaactatgtcaggcaaacatgcctcccactttattcctaaataagaaagctacaaa

SEQ ID NO: 339807 - DNA, 547 bp, Homo sapiens
tgacttgcatacatttattatttttccctgtttaattagcagtaattggcttagcccttttgaactaytgaataattaaataaatatctttggtaatggaatagaaaataaactcattttgttcccttaaaaactaccagtttgaaataaggattaatcacatggatttttaaaaacctcatttggtgcctgtcacataccaatgagggatgaggctgaggaacttggcagcatttggaactataagatcataattcaaattggccttaataagacaccaaagtgatcaataatcatgtaaatgaaatgcaaggtcctggctgtgttggagagtatttgaggcaggtgaaggctcaaaagaggaaatggatgaacagtataatattgtagttaaaatgcaaacacaattccaaagtgtcactgcctccatcccaacatctcatttgtatcttttaatttaccacctgaagtttacagtgccaaagtaattgttttggtaatattctctagatcagtgctacttaaagtgctcatctgtaaactggtt

SEQ ID NO: 339808 - DNA, 547 bp, Homo sapiens
tgacttgcatacatttattatttttccctgtttaattagcagtaattggcttagcccttttgaactactgaataattaaataaatatctttggtaatggaatagaaaataaactcattttgttcccttaaaaactaccagtttgaaataaggattaatcacatggatttttaaaaacctcatttggtgcctgtcacataccaatgagggatgaggctgaggaacttggcagcatttggaactataagatcataattcaaattggccttaataagacaccaaagtgatcaataatcatgtaaatgaaatgcaaggtcctggctgtgttggagagtatttgaggcaggtgaaggctcaaaagaggaaatggatgaacagtataatattgtagttaaaatgcaaacacaattccaaagtgtcactgcckccatcccaacatctcatttgtatcttttaatttaccacctgaagtttacagtgccaaagtaattgttttggtaatattctctagatcagtgctacttaaagtgctcatctgtaaactggtt

SEQ ID NO: 339809 - DNA, 605 bp, Homo sapiens
gcagaagctgtagtagttatgcaataccttgaggaagtggagtctgagtaatcattgaaggatttggggcaggtacaaacaagatgagttccaataagaaagagtggattcgaaaggtcatatttgaactttacgagaaaaggcaagttgttaaaagtaccaggatgattgggagtttctgaataggaaaatcaataccaaaaatagaagattggtttgattagttgtgcatttccaattggaagagttagagaactgcaggtaagagcagataagatgaaattcaagtgggaggtggtgaatagacactaaagaacagacctcggtgaaatgacgaaggaagaattcagaagaattcgacacaatgaaattttagacaaatgagagagataactcaagaatgactggggtcagggagagttagaaaaactggtagaactatagtatcactaacaaataaaaaaactgggaaataggaatttcagctaagagggagatttaattttttaaaaaatgcttttttataacatcttaactctcttgttacattgtaaacagcttgaatgcaagaakcatgtgttgaaggggcattgtgtcatggtggg

SEQ ID NO: 339810 - DNA, 628 bp, Homo sapiens
tatgaaactgatgaaataagtgcatttagacaataattacataaaggaattaagtatctccctagacttaaggaggataggaaaagagatttaaaaatgcatatcccagaagatatgcaaaatctcaggccccacctcagggttcactaccacctttaaaatgtttcgtattaatcattaaacatacaacataaaataagagtaataaaatcatttgtctcctgtttaaaaaacgttccttaagtggttattctttgcaaagcattacaaaaagcactttcccaaacaattcattcaatgtcttgtatatttagaaatacaccatatgcttcaagaccgtgaacatcatgaaggtagacattttattctttttattcccaatgcctactactggacctacctagaggaggagcttaattactatacgtttaaatgagtgattgaataaacaagggaaaataaaattcaaaataattctattgattgtcattctgagtgtacactttcagaaacasaatgaaggctttccatattgtcaccattttccatttccaatgctcagtttgctagtaaaaatatgaaatgttatttaaaataatgtgatgagaaagctgatttatcaaaacag

SEQ ID NO: 339811 - DNA, 468 bp, Homo sapiens
tataagctacttataaaacagtaatttctgcattcctttttctgcccttaaaagaaagataacactttattcattttttacagttcacagtttcctacagagtgtcascacatactatagatttaatagtggctattaattccttaaagaatttgaagactcagggcaaatccaatttaaaaaatcctgaaattacaaaggatactatttcttactcaaccaacaatcaaaagtgtaatccaacactcatactgtgtattgaaataacatatatttcctataaaatattttaaatgctataaagactattgcatgataaaagcaataggcttttttagtaaagggatttaaaaaatcttagagaattgctgctcaagccatgaatcaataattaatcttgtagaaagaagttcagaatatattgccaagatcacaaagttatattttctttactcaaatttataataa

SEQ ID NO: 339812 - DNA, 616 bp, Homo sapiens
tcatgtcaacagcattaactgttctgatctgtagacttcatggaagaagatgctacttcaccctctggattttagttcatatttcttaatccatttaaaacaaatgtaagagaatctaatcatttactaaaaaaaaatcggtagtgactggcaagatggctgaataggaatagctacagtctgcagctcccagcgagatcaatgcagaaggcaggtgatttctacatttccaactgaggtacccagttcatctcattgggactggttagatgktggatgcagcccacagagggcaagccaaagcagggtggggcattgcctcacctgggaagtgcaaggggtaggggaactccctcccctagccaagggaagccaggaagaactgtgccatgaggaatggctggttccagcccagatactatgcttttcccatggtcttcacaacccacagaccaagagattcccttgggtgactacgccaccaaggccctgagtttcaagcacaaaactgggcagctgtttgggcagacaccaagctagctgcagcagatttttttcataccccagtggctcctggaatgccagtgaaacagaaccatacactcccctggaaagg

SEQ ID NO: 339813 - DNA, 616 bp, Homo sapiens
tcatgtcaacagcattaactgttctgatctgtagacttcatggaagaagatgctacttcaccctctggattttagttcatatttcttaatccatttaaaacaaatgtaagagaatctaatcatttactaaaaaaaaatcggtagtgactggcaagatggctgaataggaatagctacagtctgcagctcccagcgagatcaatgcagaaggcaggtgatttctacatttccaactgaggtacccagttcatctcattgggactggttagatgttggatgcagcccacagagggcaagccaaagcagggtggggcattgcctcacctgggaagtgcaaggggtaggggaactccctcccctagccaagggaarccaggaagaactgtgccatgaggaatggctggttccagcccagatactatgcttttcccatggtcttcacaacccacagaccaagagattcccttgggtgactacgccaccaaggccctgagtttcaagcacaaaactgggcagctgtttgggcagacaccaagctagctgcagcagatttttttcataccccagtggctcctggaatgccagtgaaacagaaccatacactcccctggaaagg

SEQ ID NO: 339814 - DNA, 580 bp, Homo sapiens
aaaatattccttaagggtttaagatactttttatagtgcaaacattttactgctaatttattaaaagccaactaaagaaaactattatagttatgaacattatagcagactaacaattataaatacagcaaggtgaatttttcccacttgaagtgggagtaggacattatgatgagggatatgaagtttctggaaatctgtattcccacaaaaaaaaaaacactgtgtaggtctcaaattctaaattcatttaagggaaagatatgagggacaggaagagggaggctctaaycctactcagcgcattattaggatgaagtgcactacactgttgagcttcagaatcaaccatttcataaagttcagcctataaagtccatattcctttccggtccactttctcagtgttttcagactatgtttcccacagagttctgcagaagcgtctacactgctactcaagaggggagacaggagctgatgccatgtggaaagtaaaccctgtgagtagggctctagttctttgtcattgtttcaaccagagaaactctgtttttatcttttttatacaatgaagctc

SEQ ID NO: 339815 - DNA, 297 bp, Homo sapiens
cagatcccctggcctcatagatgtgmccacagtggagggcacaaatggggagagagggcacaaccactcccaggtgttggttgctctctgtatcaggactctggaccctcatcatgtgctgggatggcactggtaggaagccacaataatccatttccaagctggagcactctaccaaatattcaccaccctcctgaatcagtatgtttcattaaaattatactgttcttattttcttctgttttttaggctttatttgatgggtctaaaaagctgcagacaaaaaataatgataca

SEQ ID NO: 339816 - DNA, 536 bp, Homo sapiens
gcaaccagcctgtcatttacctccagtgaccatcatttcccagacaaaagtccagataagtctgggtagagagactgtactcatcttctatttgagaccctaaccaaccacaaccagaaaaagaataaaccctcaaaattaacaacataattaaacttttctgtaacacatgtaagtacaagataatggaagaagtcagaatttgtccagccaaagacaacsaggaacacacagttgcatctattgctcactacaaaaggacacacaacatgggaagccatagggcatctcagtaagagggtattagaaaggactcactattggatttgggcttggattaaatgatctgggggagatttcaaaaaagtagagttctcctctgtatttggatgtcgtcaagaacaggggtcaattctatgattggagtaaatcttatctatatgatgagaggagtaaatcaaggctaaagcgatacttggtaataaattaatagtcatttatgtcagccaggataggggagtgtgtagcattgttgc

SEQ ID NO: 339817 - DNA, 536 bp, Homo sapiens
gcaaccagcctgtcatttacctccagtgaccatcatttcccagacaaaagtccagataagtctgggtagagagactgtactcatcttctatttgagaccctaaccaaccacaaccagaaaaagaataaaccctcaaaattaacaacataattaaacttttctgtaacacatgtaagtacaagataatggaagaagtcagaatttgtccagccaaagacaacgaggaacacacagttgcatctattgctcactacaaaaggasacacaacatgggaagccatagggcatctcagtaagagggtattagaaaggactcactattggatttgggcttggattaaatgatctgggggagatttcaaaaaagtagagttctcctctgtatttggatgtcgtcaagaacaggggtcaattctatgattggagtaaatcttatctatatgatgagaggagtaaatcaaggctaaagcgatacttggtaataaattaatagtcatttatgtcagccaggataggggagtgtgtagcattgttgc

SEQ ID NO: 339818 - DNA, 614 bp, Homo sapiens
cacacagtagatctcttttatagatacggagtctgaatacagtttgcaggcaaatcaattttatacacactcgtaaaaatggctgtctaattacagggtaccaactccagtgcacagcatctaagaactagcataagaatgcaggggctaattactctccaggatatgaaaaggctcagagggcctggcaatctaattccttcccacaaaaatacgcagtagtgggtgtctagaagttaaaacactcttagatttcacatttcttttatactgctaaatatttgccaatgtatattttataattagatgtatttcaaaagyttataaattctagtaattaaaaatgatacaagccagttgaaaacaactcagcagcagaagggcaggagaaatcagcaaacaagaacgccatgctgggttaggaccctctgaagtttctattttcttttcttccactgatttatttttgtatatttttaagtgaatgggctcaatatttctagttttatgagtaattatttttctttatgtttaaaaaagaaaacataaagacattcattttggctgttttattgcgatgcatagctaatgatatgtcatttatcattagctgt

SEQ ID NO: 339819 - DNA, 569 bp, Homo sapiens
cctggtagaaagtgactggattatagggggctgttctcatgatagtgagtgagtactcatgagatctgatggttttataaggcagttttccccactcttactagcaatctcctgctgccacatgaaaaggtccaaatttgtttccccttcaccttccaccatgattctaagtttcctgaggcctccccagccatgaggaactgtgagtcaattaaacctctttcctttgtaagttatccagtctcaggtagaatctttagagcaatatgaaaatggactaatacagtcagtcttattatgggaagagttccatacttagttgttagactgaaagctagataacaaactaaagccaactcttgatccttctttagactaagtgctcctttcaaagtccaaagttgatgaatttcaatctctaagaaaataaatcatcccaagcaaccaatttctgccaagcaagaaatccacatygtgtcacagtatgacccaaatcatccaaaaagtaaagcgtaatttaacagaatcaagaaattcacatccagattaaatataaattctgcttaata

SEQ ID NO: 339820 - DNA, 495 bp, Homo sapiens
ttgtatggttacagtcctattcttttcaaataatttcccctagaactctgtcatttctgaattcttataatattcactggaaaagaaaacaattctgaggacactttaatttttatctccttgtatgtaatctgagcttttctcttaattatttatttcaatgggaaatttggaaagagagatgcatattctaagaaaaacatctaactttgaaatccctcatcatgatgtaaactgaatgcattgtttggaaagtttagcatctgtggagatacratgtaaatgaaaagggaaaagaatgaatggcattattaaatttcaacatatgaacagaaccaataatgaaaatgcaattggagcaaggaaataaaaaaaactataagtaaggaggcaaaattttcctgtaaaaagaaactgtccttaattaaattttaaaataattttaacacgctgttgcttgtaagagttacacttaatatccagaaatattagcaa

SEQ ID NO: 339821 - DNA, 495 bp, Homo sapiens
ttgtatggttacagtcctattcttttcaaataatttcccctagaactctgtcatttctgaattcttataatattcactggaaaagaaaacaattctgaggacactttaatttttatctccttgtatgtaatctgagcttttctcttaattatttatttcaatgggaaatttggaaagagagatgcatattctaagaaaaacatctaactttgaaatccctcatcatgatgtaaactgaatgcattgtttggaaagtttagcatctgtggagatacgatgtaaatgaaaagggaaaagaatgaatggcattattaaatttyaacatatgaacagaaccaataatgaaaatgcaattggagcaaggaaataaaaaaaactataagtaaggaggcaaaattttcctgtaaaaagaaactgtccttaattaaattttaaaataattttaacacgctgttgcttgtaagagttacacttaatatccagaaatattagcaa

SEQ ID NO: 339822 - DNA, 612 bp, Homo sapiens
ctcggtgtacctcattccagaaagaaaaaaaaaattatctaattttgaaaaacataattgaatatgaaaactgaatgagaatttagggcaagcttgtccaacctgcgggccacatgtggcccatggtggctttgaatgcggcccaacrcaaattcataaactttcttaaaacattatgagattctttttgcattttttaaagctcatcagctatcgttagtgttagtgtattttatgtgtggcccaagataattcctcttcttccaacgtggcccagggaagccaaaatattggacacccctggtttagggagcattgatcaaataatttgtaaataaattaacaaatttgtttgtacaggagccaatgcagaggaagggatatcaaacaataagccctcagtggtcaactctgttgttacccattggccttacccataagattttggatttagaaagcagtcctgtagcttttataaatttgaaaataactggcctagaccaaaactctcagattgcaggtgacgaagagtaaagcagcaatgtcaaatgccttcatcaagaacttaagaaagcttatagtaaaacttggctctctgattcccaaatcgtg

SEQ ID NO: 339823 - DNA, 572 bp, Homo sapiens
ctaatgtacactatctagtttatataataaccaaaaaatgtaaaagaaaatttattaatcttacccttattgtaagtgtaattggcataccctcttttatgttacttgggttaaagtatgatttactctctcttaagaaatgtggtttcaaaatatatccagaaccaccattatccaaaaatttcccattttgcagatccatgggcagaccaggggtctggaaatttaaagccactgtaagaaagaagtattttgacattgtcaggtaatagagaatacaaataaaggaacacaaaccacttactgaaatctaataatggattctatgtccccaaatgttctatgagcaagyatcattagcctaataattcatgatttttaaaactctttctcctgccatgtctatattaatgtatattgatgagttgcaaagtttaatctgtaagtaaattactacacagctttgagtaaagaaatcaaaatggtatccagtacagattacagaataacaatgttcatgtcaggtaacacttaagaaatgtcagaataaagagtatcagtgcattgaatgc

SEQ ID NO: 339824 - DNA, 531 bp, Homo sapiens
gacatcagccagggcagctaagagagtgcttgtgccacctctctccaaccccaggctgcacagctcgtgaattgaaaagacaccctctttcgcttgagaggaggaaagggaagagtaaagaggactctgtcttgaatactagcccagccacagtaggataagggcaccagtcagagtagtgaagccacttctctaggcccttgctcccagatgacatcaccatgcctgccctgggacaaaagagaacgtacttccttgaagggaaggagccagtcctgtaggacccatcatctgctgactaaagagccctttggttctgaaaaaccagcagcaataccaaggtagcacaccatggagcttgggtgagactctgaaacttgctggtttcaggtaagactcagcacattcccagctatggtgtctatggggagagacccctgcttcttgagaaaagtggacaaaaaggccaagkggactttgtcttgcaccttaggtagcagcttggccaaagaggaatggagaaccaagtgg

SEQ ID NO: 339825 - DNA, 572 bp, Homo sapiens
tgttgcagaaccttctcttcttctgagccccactcaaaacaagcagcttttcaggtcactcagcaaatgggccaggctaacacacccaaatgaggagtatgttgcatccaaaatcccataggcccactagtcattgtgcctctttcttggttgtaggagaagccagctgcaacaacgtaccctttatcttagaagggatatatcaacatgctccacaccactggacctctaaaaatttcactgagatagaagtcctttgaagtttagtcagctttattttccaccctctgacatgcaaaagtctcacaaataagtctatagttagcatamtgtcatcagtgtaatggaccagtgtgttaccatatgaactaaattatgacatagagctggagagttgatgtacccctgaggtaggacagtgaaggtgaaggtgatttgctggtcttgtcagctgaaagcaaactgcttctggtggtctttgtttttgttttgttttgtgttgttttgagatggaatttcgctcttgttgcccaggctggagtgcaatggcacgatctcggctcaccgcaacc

SEQ ID NO: 339826 - DNA, 572 bp, Homo sapiens
tgttgcagaaccttctcttcttctgagccccactcaaaacaagcagcttttcaggtcactcagcaaatgggccaggctaacacacccaaatgaggagtatgttgcatccaaaatcccataggcccactagtcattgtgcctctttcttggttgtaggagaagccagctgcaacaacgtaccctttatcttagaagggatatatcaacatgctccacaccactggacctctaaaaatttcactgagatagaagtcctttgaagtttagtcagctttattttccaccctctgacatgcaaaagtctcacaaataagtctatagttagcataatgtcatcagtgtaatggaccagtgtgttaccatatgaactaaattatgacatagagctggagagttgatgtacccctgaggtaggacagtgaaggtgaaggtgatttgctggtcttgtcagcygaaagcaaactgcttctggtggtctttgtttttgttttgttttgtgttgttttgagatggaatttcgctcttgttgcccaggctggagtgcaatggcacgatctcggctcaccgcaacc

SEQ ID NO: 339827 - DNA, 606 bp, Homo sapiens
tattgacaaatgagggtgtccagatatattttatcttatttgttaataattataataaaaacccaarctgtctaatgatataatttttaatatgtaatttagaactgaataaaatttagtcctataataatatatatcatattttcttgctttactacacgtttttttgagttctgaagaaagatgtgaaattaaagctaatggagctgggtgtgggggtgcactggttttcacatgtgaatatcactgtatttcagagcattaaaatatatttcttgaaaattactgatttaatagaattagtaaacaaaacaagcacttaattcctcaaattttacttttaaatcatctgctttaaatataaattatacaaatatttctcattttataaaactagactttcagagttttagtaccatttactctacagttggtcaagatcacaaaggtaaaatccatttctttcaagtatgatggtttccaaatttttgaaacaggggagtcattcttcaaatgatctatttagaaattaacatatccataacagatttgaaggcaagatggaaaaggtggaaacaagttctgaagccaggaaggggagctgag

SEQ ID NO: 339828 - DNA, 570 bp, Homo sapiens
ttctcttatagttttttctaaaagttgtatagctttacattttacatttaagtacattacccattttgagttaamtttttaataaaatgtgatgtttaagtcaaggctctttatttccccactgtggataccaattattccagtactatttgttgaaaaggcaattcttcctccactgaatttcttttgcacgtttgtcaaaaatcacttgggaatatttgtgttcttatactctttttgttatcccatacttagccatattttcagatcacatcagacagcttgtcattccctgaatggactgtaggattttgtgatagaactcatgccaccattcacctctctctgcccttctctgcctgctttgagactgacctcagatgtgaactctgcaaacactgtcacctcgtggactcacaccacacttataatcctttctttagtcctacacggtttttcttctagtatatcataaacttctccagggcgggttaaatgtcttatcctttttaatacttttaacacttagttacctctaaaatgatgtgtaataaatattcggggcagttt

SEQ ID NO: 339829 - DNA, 539 bp, Homo sapiens
cataacccactgattaaaactcactacaaatctttctcaattgatctatacttgtmgcatgaatagacactttatactttggacacattttaaattgcttcgaaagccatggtccatgcatagccaattccgatcagaacatagtccaatcaagcagaaatttgaagtagtgtgtgtataagtgatgattttagtagtagtcattaggacagtaagaggtttctaatcatataaacaattctggcaaagaagctgggtgaattccaagagccaaaaggaaaaaaaggcaacaacgtttaatttaatttttttcattctatgcctgtatcaacacaacaagaatatttataagaaatgcaaagaagcacactagatgttaactctgattttactgtctcttgccctcagttgtgatgtaggatcccatctttgtgtcaaactcctcgatcacttgtgtgcaacctcaagagcaccttactagatgtctttaccaataagcccagtgcttactagagagcccagtgagttatcacagggca

SEQ ID NO: 339830 - DNA, 539 bp, Homo sapiens
cataacccactgattaaaactcactacaaatctttctcaattgatctatacttgtcgcatgaatagacactttatactttggacacattttaaattgcttcgaaagccatggtccatgcatagccaattccgatsagaacatagtccaatcaagcagaaatttgaagtagtgtgtgtataagtgatgattttagtagtagtcattaggacagtaagaggtttctaatcatataaacaattctggcaaagaagctgggtgaattccaagagccaaaaggaaaaaaaggcaacaacgtttaatttaatttttttcattctatgcctgtatcaacacaacaagaatatttataagaaatgcaaagaagcacactagatgttaactctgattttactgtctcttgccctcagttgtgatgtaggatcccatctttgtgtcaaactcctcgatcacttgtgtgcaacctcaagagcaccttactagatgtctttaccaataagcccagtgcttactagagagcccagtgagttatcacagggca

SEQ ID NO: 339831 - DNA, 539 bp, Homo sapiens
cataacccactgattaaaactcactacaaatctttctcaattgatctatacttgtcgcatgaatagacactttatactttggacacattttaaattgcttcgaaagccatggtccatgcatagccaattccgatcagaacatagtccaatcaagcagaaatttgaagtagtgtgtgtataagtgatgattttagtagtagtcattaggacagtaagaggtttctaatcatataaacaattctggcaaagaagctgggtgaattccaagagccaaaaggaaaaaaaggcaacaacgkttaatttaatttttttcattctatgcctgtatcaacacaacaagaatatttataagaaatgcaaagaagcacactagatgttaactctgattttactgtctcttgccctcagttgtgatgtaggatcccatctttgtgtcaaactcctcgatcacttgtgtgcaacctcaagagcaccttactagatgtctttaccaataagcccagtgcttactagagagcccagtgagttatcacagggca

SEQ ID NO: 339832 - DNA, 592 bp, Homo sapiens
tattactcctgcatatgtacaagaaaatatcattgtgaatgagcaacactagaaaactaaaccataatctcctgtatggaatgagagtaaaattctggaagaagaggtagccaagaacactcacatggatcagggtagaccgcattcgcatatcatattgtatctcatgccctttgattgaacytatttacttggtaagtgaatcattgttcagagtcactaacagattgacctggaactgaatttcattgataacgtaatgaaaggtaagcctatgctgtacaaagtactggaagctaaatccatgctcacaggggaggccacccagtgaactcagagggctgccctctcaagttgtctcctctgcttctttttggcatatattgagaaagtttctatcttgtgacttggctgtaaaaagcaggcaagtttgtagcagcatatgaaattccttttctaaatgtgttctaagacatttccctggtaaccatgccagatttccactcagctctctcctcctttcatgataaataactaatttcttagcggtactatgcctttacgttgctttaccactgcaggttgccgatgg

SEQ ID NO: 339833 - DNA, 613 bp, Homo sapiens
agaagcaaaacaattcagcagcattcttcatcccaacatctgggaataattaatttgctagctatgatgtataacatgaagttgataaagttgcctgaagctctgcatttagaccatttgccttatttaaagctttctgctttagggtttaacactgtggctaattttagtaaatctttttctttttattcctgaaatgctgtgatgaggaggaaccttctgcttatagtttcttgatcattttctttttgctcttattgtcaaagtgttcaggaagctgacactcacaaactttgcctccttcttcctctgcagtgcaatgctgcaagaaaaagttctagaaactgaggccctggaaaatgtcattgggtttttacatctctctctcttctctcttctctctctctctctctctctctctgtctstctttctctctttctctcttctctctctctctctctctctctctctcctaaacacatatttgagctctgaagagtttctctggaatagagaatgtgtttttgttccattttacaaatcttaggctaggatactggagactgtcatgtgagactctcagtatattacatatggaaggtattgtgacaa

SEQ ID NO: 339834 - DNA, 536 bp, Homo sapiens
aggagggggaaaagaagaatgataataaaaattgttataattattgttaatcgttagtaatattattaatcactattgcaattaggtttctagcatattctgtgaaaggccaatttaatgaataatattgatgaactctcatactaataatataagtttaaatttttattcctgggtacaagggctgtaagctcaaaactaaaatggaaagagaaggagatgaggaggaagagcgggcaagagggcaaaatgttaacgatctcttgcttgggccacatgttaaaattagggatgtttgctttgggcatttttctacctcctttctacacctttcctaggatgtcctgtgctctgattgtaaacacatacacacacacacacacacacacacacacacaccacccctcttctagaagtatgccatgctctagaattatctactyttctttccccagcaaacaaaattctatcttcttggtacagctggtttgtaagaagggaaacaatcgtgctgaacaaaaaccatattaagatga

SEQ ID NO: 339835 - DNA, 606 bp, Homo sapiens
ctgcatgttctcactcataagtgggagttgaacaatgagaacacatgggcacagggaggagmacatcacacaccaggccctgtcgggggtgggggctagtggaggcatagcattagaagaaatacctaatgtagatgacaggttgatgggtgctgctaaccaccatggcacgtgtatacctatgtaacaaacctgcatgttctgcacatgtatcccagaacttaaagtataataattaaaaaaaagtaatgctttttatggcaaaaaccacacaaaaaaagaagttcaacatgggtctcactgagttaaaatcaaagcatctgcaaggatgtgttcctttctggaggctctaggggggaatccattttgtgctcacccaggttgttggtagaatccagttgccttgcatttgtatgactagggtctccattttcttgttagctgtaaattgagggtttttccaagcttctagaggctggtgcatttcttggctcatggccctcttgctgtatcttcagagcttgcaatggcagattttcaggtcacattcctctgattctctgatttcttatatgtaaagatgccatagtcactcatttccaatat

SEQ ID NO: 339836 - DNA, 606 bp, Homo sapiens
ctgcatgttctcactcataagtgggagttgaacaatgagaacacatgggcacagggaggagcacatcacacaccaggccctgtcgggggtgggggctagtggaggcatagcattagaagaaatacctaatgtagatgacaggttgatgggygctgctaaccaccatggcacgtgtatacctatgtaacaaacctgcatgttctgcacatgtatcccagaacttaaagtataataattaaaaaaaagtaatgctttttatggcaaaaaccacacaaaaaaagaagttcaacatgggtctcactgagttaaaatcaaagcatctgcaaggatgtgttcctttctggaggctctaggggggaatccattttgtgctcacccaggttgttggtagaatccagttgccttgcatttgtatgactagggtctccattttcttgttagctgtaaattgagggtttttccaagcttctagaggctggtgcatttcttggctcatggccctcttgctgtatcttcagagcttgcaatggcagattttcaggtcacattcctctgattctctgatttcttatatgtaaagatgccatagtcactcatttccaatat

SEQ ID NO: 339837 - DNA, 539 bp, Homo sapiens
gatgaacatttgggctgtttccacttttctgctattatgaataatgctgctatgaacatktgtgtcttgggtatgttacagatcacaggctctttggctccctgtataataaaaattaacatagggccaagtagatatcccagacaaggctgttattttggggcttgcacttgagcgcaagggagacagcagaggtgcaaggactctttagctgagtctgtgaaacagctggtagggaattttttgttagacaaagtgcacgattgacatcaggggtgagacatgcagactgggctgggaaaagcctgtgaagggtagggtatgagggtcagcatatctggttgtgatatttatcttaaatattggacaccctagtagtctggccagaggcaacaaggctataagttaattgttaagcattctttcctgaagtgggacactccacaacctcggtttgatatttagatttcctaaggccagttcctggaattctttaagtaaaaggcatggtttaaacattacgaagaaggagctgtgtc

SEQ ID NO: 339838 - DNA, 520 bp, Homo sapiens
tctgtatgtttttttctttgtggtttctgaattttgtcttatttaggaagacctttccaccccaagattgtaaaaaatatttcctgtattttattctagaacttttatagttttgcctttttacatttagctatttaataccttgaatttagtttttaaaatgtgtcatatgaagagaactctaatttttttcttgtaaataaaaatccattcatccccaaacaatttattagtctattctttccacaaggcttgaagtgacatatttttcatatactaaatattsaatttatttggatctgtttctgaatcctctattatatttaattgctctgtttctgtaccaatactacactattttgactacaaccttatagtaagttttgatacctgaggaattcagtttctttatttttattcttgtaacttgcttctaattgttactaatttactcatccaaatgaacttgagaattagtttgccaagtttcatttaaaaaattcgagaccagcctggccaa

SEQ ID NO: 339839 - DNA, 548 bp, Homo sapiens
ttcagtataacaactctaaagctttttcattgtggtcaaaaacacaaaatttaccatcttaaccattttgagtgtatggtacattagtgttaactatatgtatgttgttatataacagatctccagaatttttcatcttgtaaaactgaaaatctacatcctttgaacaataactccccttttctccctcccctrgaccctagcaatcaccattctactttctgttttgttttctttttctttttttttgagacaaggtctcactctgtcacccaggctggagtccagtggcacaaacacgactcactgcagcctcaacctcccagcctcaagcaatccttatgcctcagtttccagagtagccgggactacaggcacatgccactatccccagctaatttttaaattttttgtagagtcaagtctggccgggttgtccaggttagtcttgaactccttaggctcaaatagtcctcccacctcagcctcccaaagtgctgggattacaggtatgagccaccatgcctgacctactttgtgtttttgag

SEQ ID NO: 339840 - DNA, 542 bp, Homo sapiens
tgggttctggcttagatttctaaytccttcatgcttttattctgttcaggaatgccaagaactacagcaaaatcttgtccagatgtgattccacagtacagtcagccctgaagacacaattccagaattacaaattttgtctatttacccaaaatgtaaggtggataatcttttcagtttattggttacaaatgaccagctgacaagttactcagcttctgcaattgtggtgaaattctagagctaccaagaaagggtcacttgttcaagaagaacaagctaaggaattgattggctcttcagaacttgtgccaacttcctttctgcaggcgggctaaatattggatacctttgagagaagggaagccatcatcttaggaaaaaaacctctctctgctgtgaacaagctgaatgcaatcacagaaactgcagacaaaagagcttttgatgacagatattgctgatgcctggtgccttcaaaggcattccaggaaaggtgaaggaataattatgattaacaataactcatgtttcttccagga

SEQ ID NO: 339841 - DNA, 542 bp, Homo sapiens
tgggttctggcttagatttctaattccttcatgcttttattctgttcaggaatgccaagaactacagcaaaatcttgtccagatgtgattccacrgtacagtcagccctgaagacacaattccagaattacaaattttgtctatttacccaaaatgtaaggtggataatcttttcagtttattggttacaaatgaccagctgacaagttactcagcttctgcaattgtggtgaaattctagagctaccaagaaagggtcacttgttcaagaagaacaagctaaggaattgattggctcttcagaacttgtgccaacttcctttctgcaggcgggctaaatattggatacctttgagagaagggaagccatcatcttaggaaaaaaacctctctctgctgtgaacaagctgaatgcaatcacagaaactgcagacaaaagagcttttgatgacagatattgctgatgcctggtgccttcaaaggcattccaggaaaggtgaaggaataattatgattaacaataactcatgtttcttccagga

SEQ ID NO: 339842 - DNA, 498 bp, Homo sapiens
cataacctgcttttttcttctctttgtttacatgttggcaaaacataaggaatgtaaaaatataaaaactattatgaattatgagccctgctcacaaggattgtagaaaaactgttcttgatgcaaaaaggagctgcactatatttaaggtgaatttatcccyctccagctctaaaggagtttggaataatttataaatgaggttgtactgctgttgaatattttttttaactagaaacagtttgtttacaagttgttactaaagactgtcagaaaaaaatgcttgtggacatggtatccaaaaggctgacagaacccagaacttgcttggtattcatttgagagctcatccaacattatcctgcacagtgtataattacttgcatgttgggagccaaaaaagggaatgtaaccctgtgagtgtgtgtttatactgaaaagttggagaagcaaaacaattcagcagcattcttcatcccaacatctgggaataattaa

SEQ ID NO: 339843 - DNA, 493 bp, Homo sapiens
taaattagaatgacttttctttagaatgattttgtaagagggaaaagattttgtttaggactagacaattcacacatacaaaaaaaacttaagcaaagaaaatgatgatgttgagacatattttaataactttattagccaactgtgtgcattgatgtcaaagaaatgtctgcaaagaatattaatatggaatatttggggaattctgatttgccagtgaagagactctttcactgactgggcttgcactgagcacaacagagagaaaagaaaccatttctaaccatttcttcctttcaaaagatagaccggtcgccacagaccagataaaaggacgaaagagggacaaagttgtgattaattccaactgagttctgtcaaaagaaaagtgatacctrcaaaacattcttgataggtctaaccaaccatggtcaccattatcattatctcctatgatgatagatattggtaaaatttatcagagctacccaga

SEQ ID NO: 339844 - DNA, 603 bp, Homo sapiens
acatgttattttactttctacccataccagatagagaagttaggtattattagcatcaatttagaaatgaagaaactgaggcgtcaggcatactagaatttgatatccacatgtctcgtaagtggaacgccatgattaaaaccccatcttctgccaccaatccaaacttctatcgtatcccaagtacttttcagtaaaaaatataagccacggtctttaagtccaagaattctgttatgaatgttccattcagcagtgccagtgggctagggaactgtcttttcttcgttctacagcacttggcaattcactataaacttagccaaagccaggcatacaggcctagaagtaaaaattcctatataacaaactcttctgctctcagattctacactgcttcttttaaaatgctttttaaaaacttaattttctatctataaacatagacagtcattaacatgaatgctaattgttttattttagaagtgattatttatgagtaaaaatgtcatttctacrttaaaaaaatgtttcctctatttattatttctttcactcagcctgacaattttcaagaatatgggaagcaaaagttggaagaca

SEQ ID NO: 339845 - DNA, 594 bp, Homo sapiens
atggcactacctaacctatcctgcctcctacatacttccattgcttcgcaagccaaggttccactattggctggccctgaatctcttacccttcctctttaattcttctatcaaaaatgtgctctatgtaggtcctctaattggtagattgcactattcacatcactgtttattatgatagctaaaagggaaggcccatattttcttggctatgtttttgggaaaccaaataattagaagactataatgagtatcattcaggccttcaatttgaatttccctgggacatgaggtkgttattatagatgagttgaataattccttcataatgaaagtggagaatctgtcatacctccaaaaaaaaaaatcatttctatttgcagttctaaacttgtctagtagtgaaaaggaaatgattgagcttggtaatatgatgaatagattttaatgcctgaattaaactgactgttcatttttaaccacacaggactgttagctatgtgaaaagagatccatatattgctcaaagagatatgacagtgcttgctacatagtaggtgctgaataaagttgttaaggcaataaataatattc

SEQ ID NO: 339846 - DNA, 560 bp, Homo sapiens
ggagcctttttttttgttatcagaggtaatctagagtttaacatgaatacccatcaataacatcagtctttctgcaattagtctgtatgagtactcccaaagcactcaattgcatattgtaatttcattccaaagagtgggaaatctctgtcccgttctagcaaatatacaatttacatgtttacaggagcaccacatccctrgtaaccattaaatcagtagttcctaaagtgcagtccccgagccagcaggtaagcatcacttgggtacttgttataaaagcagattcttgagcctcattccagacctagtgaatcaaaatttctgagagttagtctcagcaatctggttttaacagaactttcaagtgatgctactataaagtttgagcactgctgtgttctgaactgtaagctctctgaaggtagaggtcatctatgccccatgacccttctattcctaatgcctagcagagggagcaaatgaatgagtaaatgaaagaatctactatgccttagcgacagctgaaaacctattaattaactgacagcaggtaaggc

SEQ ID NO: 339847 - DNA, 618 bp, Homo sapiens
ttttgggggctgtgaaagctgtcaaaataaattgtcctcataatgtaagagggaagccaagctccacatctttctggatgcagcgaatgtgcataatcagctagaaaaacagcattgtgcttcagcagcctactggatatattggtcaagggtgaatttccaaggacatccctttggaatttctatacaattctttaggttttgagaataagtcagtttcattttcctggggcaatgcatttgtaatgtatacattgacacatgataaaggaatgaccattgaaggggtagtaatttttagaattattacctaaactttcttccttatcttaggtcagtcacctttaacatttaaatgytcacctttaccacagaagagtttagctgttatcaatatctttcactatttaaataggttttatggtgcatggaatatttaaatctccattttagttttaaattcttgcactctgctcataagtgtaaaataagctaatgcgaattttgcttgaaatactaattaataatgaaatttcttctcatttttgaaatggtcctattgcaccattttgttcattttttcaattataatattggagggtaggggcaaaagaccag

SEQ ID NO: 339848 - DNA, 451 bp, Homo sapiens
cttcaaatattaaggattttgaagtgccaagttcatgctataaagacaaaattyccccaaacaactatttaacaataaactaggtctctcagagacccctttgaaaaccgatttttttttttttttgagacacagtctcgctctttcacccaggctagagtgcagtggcatgatctcagctctctgcaacctccgcctcccgggtccaagcgattctcctgcctcaacctcctgagtagctgggattacaggcatgtgccaccatatccagctaatttttgtatttttagtagagacggggtttcaccatgttggtcaggctggtcttgaactcctgacctcaggtgatccacccgcctcagcctcccaaggtgctgggataacaggcgtgagccactgtgcccggtcaaaaactgatttctttcttcagtttcttgggctgtgttcatca

SEQ ID NO: 339849 - DNA, 559 bp, Homo sapiens
cacaagcattttattgttcagtgacagaggaaataatgaaatatataaggcagagatggccctgacaaatctcagcttggcaccagcctactgaaaccagcataatctggactgggcaccatatcttgctttgaacagttaacctcttgggtgtggtatgattgtggcagaagcaacttkctgctaaaatccttacacagtgaacagtcaccagccagcccagcacttacctaatgtacaagcccagagattgtcagtcaggcaacatgacttagatagagacactgcttttttcctatgggaaagaaacagttctcaggctcatggctttaaaagactaactctatatttcttctgaagaagtccactcctagagtcagactctggctgtcagtagaactttttcattctgtgcttaatctttatttatatttcctttaataatgctaaaatatattgagctccttatatgttatcatttttttcctttttgcctttctttctttctttcttccagtgatattcattgagcatttactatgtgccaggcactatggaa

SEQ ID NO: 339850 - DNA, 544 bp, Homo sapiens
ttacagtctaaaaaggatcaccaaccctttggagatcccaggtaaaaatgtttggtaattgtaaatgtatacaaaatccctgaatatatycaaaggccctgaggtgggaaagggcttgggatgatccaggaacataaaaaaagtaagtgtgactggaacagaatgaacaaaggagtagggattagggataagctggagattcaaacatggatagatcatacagagctatataaactatgatgatgagattgatacttatttcaaaaatgatagaaaaccaatgaacatattaagcaaggcaatagcatgagtcaatttatatttttctctgattattgcatggagaatgtgctgttaaatgggtaagaatggaaactgtaacaccaacttgggggctcctgaaatcttcaaggcaggagacagcagtggcttgtagaaggtcattgtactgaaccattataccagataaacaaaggagatatcagattttcccccttttagaaatgagttaacaaaggctaccagtgattgtagcttctaaatc

SEQ ID NO: 339851 - DNA, 581 bp, Homo sapiens
acttctaagaaccaaaaaccttgctagctaggaggcaggcaaatagcatcagtaatgccttggataaaatgaaacaaggctgcaataatgagattgtgattcaggaacatagctctggttaccagttgcgggagactgacaaggacaatgttagtgcacaatccggggagatcctgattacctttagagaacttagaaatgagcrtcaaagtggatctcagctattgggcctaaaacattgaggtatttcatgaattagaggcagaatattaatataaattttattgaaatctgaaactcacaagtgtttaaactgggtacactattattttttcccatcgcaaatgaacacaattaaaacctcaggtttttaaggcttatttatattgccttccttcttcaatgtgtgttttagcagaaaagaatgaatagcaaaaataatttttgacagtatttttgttttggttgactccattttactgctaaataaggagcaaaatcactagaatgtctatgggctaaaaaaaaaagaaaaaaaaagatggggggatatagggaacagtgatctagtcagtgaaatt

SEQ ID NO: 339852 - DNA, 581 bp, Homo sapiens
acttctaagaaccaaaaaccttgctagctaggaggcaggcaaatagcatcagtaatgccttggataaaatgaaacaaggctgcaataatgagattgtgattcaggaacatagctctggttaccagttgcgggagactgacaaggacaatgttagtgcacaatccggggagatcctgattacctttagagaacttagaaatgagcgtcaaagtggatctcagctattgggcctaaaacatwgaggtatttcatgaattagaggcagaatattaatataaattttattgaaatctgaaactcacaagtgtttaaactgggtacactattattttttcccatcgcaaatgaacacaattaaaacctcaggtttttaaggcttatttatattgccttccttcttcaatgtgtgttttagcagaaaagaatgaatagcaaaaataatttttgacagtatttttgttttggttgactccattttactgctaaataaggagcaaaatcactagaatgtctatgggctaaaaaaaaaagaaaaaaaaagatggggggatatagggaacagtgatctagtcagtgaaatt

SEQ ID NO: 339853 - DNA, 601 bp, Homo sapiens
tgtttgcaaaatgacttgccaatcatagagaacaatcagaaattgttaagtgggaaattgttaatgttaagtgggaatgattttaacctatttgtagaaaaagacaattcaaatgtgacaaagatactaattctgcagtcacattgtaagatattaaagggagcaagacatttttgtttgctttctataagtaagatatttattcaatatctaatagtattagagaaaatagtaatagattacasttacagtgatagtatgggccaccggtggtcaatatcgtgggtttgccttgggtaactgtgttgtctttcaggtgtaataatatcaaaagaccttttatcttgcgctcacagcaacactgtggcagacactcgtgtgctcctgtgccttcaattgctgtgatcttttctaacaagtctgtttatttttgctttgcgtagatgggtccgtgggttttacaaagaatcgattcagatcattaaatcctacacaaagctgaataacaaaacagaaaaatctgttcacaaaatgctaaaatccttcctctgactcagaaccttgcttttctcagtctttgagtcatcacgtggaagatggc

SEQ ID NO: 339854 - DNA, 601 bp, Homo sapiens
tgtttgcaaaatgacttgccaatcatagagaacaatcagaaattgttaagtgggaaattgttaatgttaagtgggaatgattttaacctatttgtagaaaaagacaattcaaatgtgacaaagatactaattctgcagtcacattgtaagatattaaagggagcaagacatttttgtttgctttctataagtaagatatttattcaatatctaatagtattagagaaaatagtaatagattacacttacagtgatagtatgggccaccggtggtcaatatcgtgggtttgccttgggtaaytgtgttgtctttcaggtgtaataatatcaaaagaccttttatcttgcgctcacagcaacactgtggcagacactcgtgtgctcctgtgccttcaattgctgtgatcttttctaacaagtctgtttatttttgctttgcgtagatgggtccgtgggttttacaaagaatcgattcagatcattaaatcctacacaaagctgaataacaaaacagaaaaatctgttcacaaaatgctaaaatccttcctctgactcagaaccttgcttttctcagtctttgagtcatcacgtggaagatggc

SEQ ID NO: 339855 - DNA, 583 bp, Homo sapiens
actgctcatggtcctgggggtagggcaccccacagaactgagggtgcagggtcaccatggagagctgagaaggtggggctgctgcaacccccgtgggtttggagtgcasagaggccagccagagaggattattctcaagccttaagagcaaacgaacagacataggggcctatttgaaggggaaaggtgggaggaggaagaggttcacaaagaaaaaaaaaaaaacccgttaggtactaagcatagtgttttggtgatgataatctgtacactaaaccgctgagtcacaagtttacctatataaccaacctgcacatgtatccctgaacctaaaataaaagttaaaatattaaatatatactaatattaaatatacataaatattaaatatatattaattatttgtaaagatcaaatgaaatttgccttgctagatttttgacttgtttgggacctgccaccctttcttctttctgatttctccctttgggaatgtgattgtctaaattattccagtctcaccgttgtattttagaagcacaaaacccgtagtttcacaggttcacagtaggagaggattatt

SEQ ID NO: 339856 - DNA, 583 bp, Homo sapiens
actgctcatggtcctgggggtagggcaccccacagaactgagggtgcagggtcaccatggagagctgagaaggtggggctgctgcaacccccgtgggtttggagtgcacagaggccagccagagaggattattctcaagccttaagagcaaacgaacagacataggggcctatttgaaggggaaaggtgggaggaggaagaggttcasaaagaaaaaaaaaaaaacccgttaggtactaagcatagtgttttggtgatgataatctgtacactaaaccgctgagtcacaagtttacctatataaccaacctgcacatgtatccctgaacctaaaataaaagttaaaatattaaatatatactaatattaaatatacataaatattaaatatatattaattatttgtaaagatcaaatgaaatttgccttgctagatttttgacttgtttgggacctgccaccctttcttctttctgatttctccctttgggaatgtgattgtctaaattattccagtctcaccgttgtattttagaagcacaaaacccgtagtttcacaggttcacagtaggagaggattatt

SEQ ID NO: 339857 - DNA, 495 bp, Homo sapiens
tcttgttattgatttctgtggttctgtttggcttgatcgtgggttataatttttatttaataagaatcatttattagtttaagaaattgccaacataaattatacttttttttgggggggggggcaggtcctgttttgtgctaaaaagtagttttctttacaattctcatgaaagcataacaacaaggatatatggttctatatgtaagagagctaagcttagagataacctgcccaaaaccaaacagctaatacattttagaaaccatttatttcmccagtctttatcattgcattatactctttttttttttttttgtgcttctttttctcctctctttataggctcccccttcatttagaagagataaaaaaactaatattgatcaaacagtaccacatgagtagacagtgttataagtatcatcagctcacctgatcttcacagtccatctatgaatgattgctattattgttcttaattaaaggataaga

SEQ ID NO: 339858 - DNA, 447 bp, Homo sapiens
tatttatattaacttttagacagtgttatattttacattttaacttgaaatatggttataaaatttttctctgttatattttccacagcagctatatttagtggcactaaaagattttattggttgctgccttcaatatacttaaccacttctctactgaggcatatataatttacattttccttttcattactgtgctgatgctamacttagttttttgtgcatttactgattttactgaattaaaagctgtatctgtttttcagtctttctcctttttttggcttcatcagacaaaacactaagactttaagcattctttttccttaatcagtacaaaattttatactacattcatgtcatttatctatcttttataattatcaaggctggacattttttctatgtgtttatttactatatttacctctctgtacggcttatctg

SEQ ID NO: 339859 - DNA, 580 bp, Homo sapiens
atttagtggcactaaaagattttattggttgctgccttcaatatacttaaccacttctctactgaggcatatataatttacattttccttttcattactgtgctgatgctaaacttagttttttgtgcatttactgattttactgaattaaaagctgtatctgtttttcagtctttctcctttttttggcttcatcagacaaaacactaagactttaagcattctttttccttaatcagtacaaaattttatactacattcatgtcatttatctatcttttataattatcaaggctggacattttttctatgtgtttatttactatatttacctctctgtacggmttatctgttttatactcttttctaatatacctattggagtcctaattattacatatatacataaatgaataatttttatataggtgttaatacattttaatttaatttacatctttttttctttttttaaaattttggtttttacattgctataatagaacaattgtgtattcaaatctgttggtcttttaatttgtgacttttttctatagtttagaaatattttaaaagtatt

SEQ ID NO: 339860 - DNA, 620 bp, Homo sapiens
tcatttacttcccaaactgttaatgtagcaaattaaccttgggtgatgaacttctgctacattttsaagggtcattggatatagacagagataataagcaaagtatttctaatactttttacatcctctctcactcgtcatctcttaacttgcttgttgcctaacctcttctgctagacctttctatgaaaaaaaatatattttctctaatctctgatagaaaatactgaatctgggtatatttctattatctatgatagtcagaacttttttctataaggttaatcatgatggacaatctccatgaggatattgatgagctagttggtaccaccaccagatatgtaaaatctagacagggaaaggttacttttacttgtgcttctaaattaaggtttttgtcagtgtcacaggtgctctgtggccactgcaaattcctacgttccaaccacagcagagcaacctgtctgtaatttcatgtttcaaagtgctaaggagaaaaatagagaccctggactttcatgtctttgcctccattttaactactgagatgaaggcatgcatttgtatcaccaccttttttcctcgtctttgccaaatactgaaaaacaaattgtatt

SEQ ID NO: 339861 - DNA, 633 bp, Homo sapiens
tttcttatttattcttttacatttattttcagcattgaggataagcaattaaaaagaaagtcacaaattaaagtatagcctagaaaactgctactgagtctgctttttcttcaaaaaatatttcatgattattaatcgagttaattcacatgtaattgtacaccaatccacaggagcccactggtatcctgtagtactaggagcttgttgtatgccccaatcactcttctagattttatcacatccacttccacatactgattctataactatgctggatgggaacacatcaatataagtaagtaccaggggattatatcatagagaatccaagccagactctccaattagaatatgtggttgcaaaatattttattttccatgattctatttggtccattatagataacactgaaaaaatcttttggcatgatcttttcaattagaaatacttgcattcaatactgatcgcactttaaattacagcaataaayaagcaagatgtggccttcaaggagatcccagatagcaactgaaaagtagcaagctttattacgtttgttctgtgataaaagcaagtaaatgctgcatactttcaattccccctttcaatggtattgtaagtttaacaca

SEQ ID NO: 339862 - DNA, 600 bp, Homo sapiens
gagttatgacaaaactgagcacctaacataacaagccttccagcatcattccagctattagtaatgagtatcaaaaaacttgagggtagacttgtttcccgacagaactatctgaatctggcgggttcaataagtatgttttaccctattgtattttgaagagttaaactgttacttgaccaaaggctgaaatcctagatgtgtctagagttcagcagtattttcctgatgtctcagctagctatttctcttcaacgtatatccatttggttcaaggtttttttatatatatttttgcttttgcatctctccagcttcccagcagtgtttcctaggagcaatgagatgtttattatatgtaccacaaatttgaygttattctacatttttctttatttatcccagcttatgatcatgtcattcccctaccatttgtgtggatttttctagatgagattttttttttgtactgctaatgatgacaacacctctgcatttagtcctcaggcagactctcctggaatttgttgtttagaactggaaattattgatctgcctaggcttgatctgtgcttcctttatccaagctgacaatatttg

SEQ ID NO: 339863 - DNA, 532 bp, Homo sapiens
taacagctggtgataggcaagggttactctgcctgggctggagacccagcaggctgactttccatacagacagctgacacttcctctcccccaaagagcaggctcatttgaaaactaaaatgcagaagatagaaaaactggcaacaactgagtactcaagtcagacatctgataggatgccaatgaaatggacagggctgagggccaagaatccccaacaccatatgacaacaaacaygagacttgggccctggactccgatctcaccaagggatgggttactgagctctctgttataaatgctgcggtggaagatcagggatagaagtcacaattcttgtacatcacagaactgtaacaacaaagttttgaccttggccccaatctatcccaggggaaggtgtcatgcttctgtaaccaggcagcttataagccccacatctcaagactggagcctctcccatgacagacatttgcccaccagatccttgtacaactggtatggagaaagtggctcacctgctgctactct

SEQ ID NO: 339864 - DNA, 397 bp, Homo sapiens
acatgtcttttcaagacagtcattgttttcactggagtggaaatcacattccatcactttcttagaataaaagcaatttgagccaatactttccacaaagaaaatgaaccaaaaatgagcctttaaaaaaatgtgtcttcataattaagcatgtraacaggcatacacaattatttaacaagctctttttatgtgccagaaagtagactatttcaaactaaataacgaaaaacatggaaaatatgaatatctgcagggtatgcatatacacatgtgtattgttataaaataataatacttttaattatctttcttttcctacagtatacaaagattcagatttttgagttaagtttttttctatttacccttgctatgttattatttctaaaattaa

SEQ ID NO: 339865 - DNA, 397 bp, Homo sapiens
acatgtcttttcaagacagtcattgttttcactggagtggaaatcacattccatcactttcttagaataaaagcaatttgagccaatactttccacaaagaaaatgaaccaaaaatgagcctttaaaaaaatgtgtcttcataattaagcatgtaaacaggcatacacaattatttaacaagctctttttatgtgccagaaagtagactatttcaaactaaataacgaaaaacatggaaaatatgaatatctgcagggtatgcatatacacatgtgtattgttataaaataataatacttttaattatctttcttttcctacagtatacaaagattcagatttttgarttaagtttttttctatttacccttgctatgttattatttctaaaattaa

SEQ ID NO: 339866 - DNA, 397 bp, Homo sapiens
acatgtcttttcaagacagtcattgttttcactggagtggaaatcacattccatcactttcttagaataaaagcaatttgagccaatactttccacaaagaaaatgaaccaaaaatgagcctttaaaaaaatgtgtcttcataattaagcatgtaaacaggcatacacaattatttaacaagctctttttatgtgccagaaagtagactatttcaaactaaataacgaaaaacatggaaaatatgaatatctgcagggtatgcatatacacatgtgtattgttataaaataataatacttttaattatctttcttttcctacagtatacaaagattcagatttttgagttaagtttttttctatttacmcttgctatgttattatttctaaaattaa

SEQ ID NO: 339867 - DNA, 604 bp, Homo sapiens
tgtcttctaccctcctcagtgcatctttcatcaatatgaagttaaaaccaggtagtgttagtgctcacctgatttttggttcttatgaaggtgctctttttgtgtagatttttgttaaattggtgtccttgcagtggggatgatcagtgctgggtcttctatttggccatcagggtccactcactacatacataattttgaccatattatttaacctctgaccaacaggcttcttatttgaaaaagaacataataataactgtttcaagtaagttgaaattagtgtaacatatactaaacacctattaaaaccaggtgaccaataacaattagctccttgtacttccctcactttcagggaatatatagtccaayaaggaaaacataacttgtattcaagtaatttatgtacaaaagactatgtgcataatgctgcaagaaaagttttatttaatactttgaaattaagcttgtcctaaaaattatctggtttatacaactatagagcactcctttattctgtttagatggttgttagttaggctatgagtttttatatactatacattgtttatttcatgtacattaccttacatgaaataaa

SEQ ID NO: 339868 - DNA, 577 bp, Homo sapiens
actcaggtgatcttcccacctcagccttataggtggtagctgagactacaggcgctcatcaccacactggcctttagtatttttggtagagatgggttttcccatgtttcccaggctgttctcgaactsctaggctcaaatgatctgcccacttcggcctcctaaggtgctgggaatacagatatgagccaccacgcctggccatgaatatctttcattgttaggttgccagtaagttaaccgtaactaaaatttaatcttgaagtttgcttattaaattcttcaagaaaaatatgatatcctacagccaaatactttaacccatataattttaggaccaaaaatagtcaaataaattttttaaatttaattgaaaaaatatttccccactgaaaagtgaacctaatctttcaaaagaggcatgcagcttagtatttaaggggaagtatactgatgtatgcaagttgctttggacttatgaaaaatgagatagattgataggaagacagggtattaaatagacgaatgcatatcagaaaaccaatgataataaaatcttaagggtagaccctctata

SEQ ID NO: 339869 - DNA, 577 bp, Homo sapiens
actcaggtgatcttcccacctcagccttataggtggtagctgagactacaggcgctcatcaccacactggcctttagtatttttggtagagatgggttttcccatgtttcccaggctgttctcgaactgctaggctcaaatgatctgcccacttcggcctcctaaggtgctgggaatacagatatgagccaccacgcctggccatgaatatctttcattgttaggttgccagtaagttaaccgtaactaaaatttaatcttgaagtttgcttattaaattcttcaagaaaaatatgatatcctacagccaaatactttaacccatataatttyaggaccaaaaatagtcaaataaattttttaaatttaattgaaaaaatatttccccactgaaaagtgaacctaatctttcaaaagaggcatgcagcttagtatttaaggggaagtatactgatgtatgcaagttgctttggacttatgaaaaatgagatagattgataggaagacagggtattaaatagacgaatgcatatcagaaaaccaatgataataaaatcttaagggtagaccctctata

SEQ ID NO: 339870 - DNA, 599 bp, Homo sapiens
atcagtaaattgcccaccagaaacttggcagataagaaggtagtgtgcagatacakttcaaatcccaaagaaaactgtcaaacaagaattttatgtatggccaaactgtccatgaaaagtgaggaagaaactaagatatttgcagataaacaaaattctgagggaatttgttaccattacaattgcccggcaataaatggccaatggattcctgcaggatgaaatgacactagacaacaacctaaagccacatgacaaagcaaacatctcaatagggtacgtatatgggcaattttaaaaactcattttattcaaacaataattttgaatttattcaaactatttgctacataatttaagaaattaatacattaaaaagcaacaattattagtctaaaagctaacattattttaactttgattttggacttcccattttatttatacatagttcaagagactaatgatttcaaataaattttaattttggagcatacaacgtataaagatgtaattttgataacaacaaccaaaaaagtgagaactattaaaggaagagagattttgtatgttattgaagttaagctggtataaattca

SEQ ID NO: 339871 - DNA, 599 bp, Homo sapiens
atcagtaaattgcccaccagaaacttggcagataagaaggtagtgtgcagatacagttcaaatcccaaagaaaactgtcaaacaagaattttatgtatggccaaactgtccatgaaaagtgaggaagaaactaagatatttgcagataaacaaaattctgagggaatttgttaccattacaattgcccggcaataaatggccaatggattcctgcaggatgaaatgacactagacaacaacctaaagccacatgacaaagcaaacatctcaatagggtacgtatatgggcaattttaaaaactcattttattcaaacaataattttgaatttattcaaactatttgctacataatttaagaaattaatacattaaaaagcaacaattattagtctaaaagctaacattattttaactttgattttggacttcccattttatttatacatagttcaagagactaatgatttcaaataaattttaattttggarcatacaacgtataaagatgtaattttgataacaacaaccaaaaaagtgagaactattaaaggaagagagattttgtatgttattgaagttaagctggtataaattca

SEQ ID NO: 339872 - DNA, 571 bp, Homo sapiens
gacaggtctatgataatagttggagacttcaatatcccatactraataatgaataaaacaaaccaaacatgataaggaaatagaggacttaaacgatacaataaactagcacttcagatctatagttaggcatgatattgagtccatcatcaaaagtctcctgacaaaagccgtgggtctgatggcttaactgttaaaatttgccaaacatttaaagaataactagcaccaatccttcttaaacatttaaaaataatccgacaataacagaacacacatttctaatcaagtgcgtgatcttgagatgccaggctagaccatttattaggccaaaaatcaagtctcaatacatttacaaaggtagatattagataaagtgtcttctctggtcacaaaaaaaatgaaattagaaatcaataagaaaagtaaaaccataaaattcacagaattgtggaaattaaacaacactttaaaaaacaaatggatcaaagaaaacatcacaatggaaatcagaaaatacttagagaaaaatggaaaacagcacagtaaaacttagaagaaaaagtgcaag

SEQ ID NO: 339873 - DNA, 569 bp, Homo sapiens
cttaactgattctatgaagccagcaatactatgacaaccaaggtcaaaacagacactataagaagaaaatactgaagatcaataactcttacgaacattcatgcaaacattctcaaaaaatattaggaaactaaatttagcagcttaccaaaaggattacatagtaatcaagtagcatttatttattgaatccaataatgattcaacatacaataattaatcaatgtagttcaccgcattaacagaaagaaaaaaaaagaaactcataattatctgaaattgtgtaggaaaagcacttgacaaaatgtagcayactttcatggtcaaaacactcagcaaaacaaaaacacctagacaccacaaaatatacaaatggctatatatatatatattccacagcaaatatcatactcaattaatggaaaactgaaagccctttctctaacatcagaaaaaaggcaaggatacctgctttaacctttctattcaacatagtacagaaagttccagacagaaaaaaaataggtaagcaaaagaaataaagtcattcagattggaaagcaagttaa

SEQ ID NO: 339874 - DNA, 569 bp, Homo sapiens
cttaactgattctatgaagccagcaatactatgacaaccaaggtcaaaacagacactataagaagaaaatactgaagatcaataactcttacgaacattcatgcaaacattctcaaaaaatattaggaaactaaatttagcagcttaccaaaaggattacatagtaatcaagtagcatttatttattgaatccaataatgattcaacatacaataattaatcaatgtagttcaccgcattaacagaaagaaaaaaaaagaaactcataattatctgaaattgtgtaggaaaagcacttgacaaaatgtagcatactttcatggtcaaaacactcagcaaaacaaaaacacctagacaccacaaaatatacaaatggctatatatatatatattccacagcaaatatcawactcaattaatggaaaactgaaagccctttctctaacatcagaaaaaaggcaaggatacctgctttaacctttctattcaacatagtacagaaagttccagacagaaaaaaaataggtaagcaaaagaaataaagtcattcagattggaaagcaagttaa

SEQ ID NO: 339875 - DNA, 569 bp, Homo sapiens
cttaactgattctatgaagccagcaatactatgacaaccaaggtcaaaacagacactataagaagaaaatactgaagatcaataactcttacgaacattcatgcaaacattctcaaaaaatattaggaaactaaatttagcagcttaccaaaaggattacatagtaatcaagtagcatttatttattgaatccaataatgattcaacatacaataattaatcaatgtagttcaccgcattaacagaaagaaaaaaaaagaaactcataattatctgaaattgtgtaggaaaagcacttgacaaaatgtagcatactttcatggtcaaaacactcagcaaaacaaaaacacctagacaccacaaaatatacaaatggctatatatatatatattccacagcaaatatcatactcaattartggaaaactgaaagccctttctctaacatcagaaaaaaggcaaggatacctgctttaacctttctattcaacatagtacagaaagttccagacagaaaaaaaataggtaagcaaaagaaataaagtcattcagattggaaagcaagttaa

SEQ ID NO: 339876 - DNA, 546 bp, Homo sapiens
gagacagttgaggagcaattaaaagctggccatatagaaccatccaacagcccttggaattcgcccattttcatcattcctaaaaagtctggtaaatggagacttttgcatgacttatgtgctatcattgctaatttgcaacctatgagtccctttcagcaggggctcccctcccccatggtgattcatcaagattggcctataatcattattgacttaaaagactgcttttatactattcccttgcaaacaggacagagaaaaatttgcatttacaataccagccatcaataatgaaaagccaacttgccaatttcattggaaagtgcttcttcaaggaatgctgaacagtcctaccatgtgtcagtatcacgtaaatcaggctttgctccccagtagaaaagaatttcctaatttcaagatgattcattttatggatgatatttaagtagcagycccaacgaagccagtacttttaaagttatatgcctctgtcgtaaagaatacacagttaagaggcttaatcatagcacctgaaaaagtaca

SEQ ID NO: 339877 - DNA, 565 bp, Homo sapiens
ctgttgttgctgctggtggtggtggtattgttgaacatctgagaatgttctatttttctatattktatatgaaaacgggagtcttgtgttggtaattggtgtgcttgtaggtgtgtcattaattttttaaattgtaatcaccagtcacattcccaagtcaaatgcagtgcattccataactgcatttacagttaattatggccattagtgagtgtcatttatacagtggcataaggataacgtccagctccctatcattagataacacgtggctatttgttgttgttttgtttttagtaaatagaaacatatttatctataggttttcacaaacttattggaaacatttaaatgcatagttttatatttactatagggtttcaatttcttcaataaaatattcctactacagagattttagttacttaatttttataaatgaagtggtgttactgtatgatttttaaacattaatattattttaaatggagatattaatgcaacatgtgcaaaaattgggctgtaatatttaatcttagcaatacattttgaagaagccatactg

SEQ ID NO: 339878 - DNA, 565 bp, Homo sapiens
ctgttgttgctgctggtggtggtggtattgttgaacatctgagaatgttctatttttctatattgtatatgaaaacgggagtcttgtgttggtaattggtgtgcttgtaggtgtgtcattaattttttaaattgtaatcaccagtcacattcccaagtcaaatgcagtgcattccataactgcatttacagttaattatggccattagtgagtgtcayttatacagtggcataaggataacgtccagctccctatcattagataacacgtggctatttgttgttgttttgtttttagtaaatagaaacatatttatctataggttttcacaaacttattggaaacatttaaatgcatagttttatatttactatagggtttcaatttcttcaataaaatattcctactacagagattttagttacttaatttttataaatgaagtggtgttactgtatgatttttaaacattaatattattttaaatggagatattaatgcaacatgtgcaaaaattgggctgtaatatttaatcttagcaatacattttgaagaagccatactg

SEQ ID NO: 339879 - DNA, 567 bp, Homo sapiens
tgttattttaaatagggtgttcaagaaaggcctttttaataaggtgcgtattttgttagaaactggaaggaagtgaggcctgagaaaagcagatgtctgtgagaagagcaatgcacatagagggaggagcaaggaccaaggctttaaattgggagtgctggtgagggagagttttaggatatgttcaggaaacttgccaggtggttaggttttgtatgatcttgtacgtcattataaggactttaacttttattctgaaagccactggaagccactggagggttttgaactatagaataaaataatctgtattacctttttgaagggcaccattagctttcctgttgacaatagaacgtgtgtgtgtgtgtgtgtgtgtgtgttagcagtagtggtggtgggagaaataccwcagagaaaaagtatggagataagttaaaatacaattgccaaaatcctgtagagaagaggtggtggtaactgaagcctgtgttaaagttctaacccccagcatgatggtattaggaagtgggattgggggagataattagatcaagagaatagtac

SEQ ID NO: 339880 - DNA, 597 bp, Homo sapiens
aaactatgattcattcatccaattatttaccaagtatggattaagcaccaatttcatgctgtgtcctgagcttggcactgggaatacaatagttctgtaactcaatattatacacaacttaaatggacgcattgaaatgaagaaactaaggcaggataatgtaaaaaaaaaacaacacttttttgcttattgcttatatccagttgaagcttccttatattttacaatggtatatttattctaattgtatgagttaataaaaattaagctctttgaagtttgtatattctcaacatttttgatggcttaaatgtatggattcattttagcactctgtaatcttcaatatatttctactcttatgtatgtgcttagctcattttttattcttaaaaaatcatctagctaacattattcaccaaatgcttcaagtatttattaatttaatattgttaaacrttattcttttatgaataaaaatgctcttaaaatagccatttgtgacagctttccaaatattcatcataataaagctatgtattacagtaataaagtttaaagatgagcaagcattaggtactcacagttacataagtt

SEQ ID NO: 339881 - DNA, 576 bp, Homo sapiens
ttaacctttaaagatattaaagatgttaaaagtgttaacccaaagataaagagatgcaaaatgtggcagtaatcttatttttaaaatatcagatttgctttttcttccctaacctgtagaaagcttagagcatagtaactgacaaacacaggctttcaacaaatgttagtttctctctctcccataggctgacatcattttgcttgcagataatttatcatgagtatagaatatctgatcattccatgctagcgaaacctcaattttattcagaaataacgtgtccagctccaagggatacatcttyatttgcctgagccaatcatggtgttcctatacctctgctaggtcctaggattggaatggaactcaattttggccaatagcagataaaatatacttctgagatttaagaaaaaaaaatgtttctccctgattaagtgtgaaggttaattttgtgttaacttgtgagctaagggatgcccagatagatggtaagacaacttctgtgtatgtttgtgaggatgttctgaaagaggccagcatctgacttggtgagctggctaaagcagatgt

SEQ ID NO: 339882 - DNA, 537 bp, Homo sapiens
tgaacttacaccatcatctaataggtcccctccaccaccacaagccttcagacttggactgaattacaccacaggctttcctggttcctcggcttggagacagcagatcatggaacttcttatctgaataactacatgwgccaattcctagaataaatcttttatctatacgtctatacatcatctatatttatatctatatctagatctatctatatcatctatatctatgtatcttctattggttctgtttctctggagaaccctgactaatacacgaaggcaagagtagcatgaggagaatgccctttgtccctcctcacctttccccaaccttctgacatagtcaatgaaaatgtgatttctccgagtatagtagacatcttgcagctataaaacaatgtgccagaggattaaagcaaatgcttaagaaggtgaaatgcttaacgtggtgaaaagaaaaatagaaatatggcaataaaatttctcatagtttgtttgcttttctttaattctcttttcatacaggctctaata

SEQ ID NO: 339883 - DNA, 545 bp, Homo sapiens
tacaacacaatcaatcaggagacaattggcgatatgacctgaataagtcattatctgtcaataataaccttgaacgtaaatgtattatattgtccacttaaataataaagactgactgaatggatttttttcaaagatcaaaatctatgctgcctacaataaactcaaatcacctatgaggacacatatcaactgaaagtgaaggaatggaaaaagatatcccacacaaatggaaaccaaaagtgagcagggttagctatatttatgtaagattaaaaacagactttgcataaaaactgtaaaaagagaaaaagaaagatattatataaygataaaggaatcagtttggcaagaggatataacaattctaaatatatatgcactcaacatcaaaacactcatatatataaaacaaatattattaaatctaaagcaagacttcagtacagtggtgggaacgtcaacacccactctaagcacccactctaagcacctagacagaaaatcaacaataaaacattggatttaaactgcactacagacca

SEQ ID NO: 339884 - DNA, 570 bp, Homo sapiens
aaatatttgcacactgtcttccaacaagactactatccagaatatacaaggaaatcaaactactcaacaagaaaaaagaaaaatcaaacaaataatcccattgaatagtgggcaaagtatccagatagatatttcttaaaataagacataaaaattgtcaacagatatataaaaaaatgctcaacatcactaagtattagggaaatacaagtcaaatccacaatgatatattattttaycacggttagaatggctattatcaaaaagacaaaaactaaaaataaaacaattgctggtgaggatgtgtagaaaagggaactctttatagactgttggtgggcatgtaaattagtacagccattatgggaaacaaatagatttttctcagaaaactaaaaatagagctactttataaagtagctctatccagcattcctattaccaaatatttatctgcagaagaagaaatcagtatatcaaagaaatacctgtaccccattatttattgcagcactattcacattaggaccaaatgtggaatcaacctaagtgtccatcaatgtctaaatg

SEQ ID NO: 339885 - DNA, 656 bp, Homo sapiens
tggatttgttcatgggttctctattcttttccattgatctatgagtttgtttttttgccagtaccatacttttttggttactatagttctgtagtataattataagtgaagtaatgtgattcctccggttttatttttattgcttaggagagtttggctattctgggtcttttgtggttttatataaattttagggtattttatttctgtgaagaatgtcattggtattttgatagggatggcattgaatctatagattgtttaggatagtatggacatttaaaaaatattgagtcttccaatccatgaacaaggaatattttttctattttctgactcctactcacttttttccatcagtgttttgtagttttcattatagatttaacttctttkgttaattccttgatatttaattttacgtgtggctattgtaaatgggattactcttttatttatctttcacattgttcactgttgccatatagaaatgctactgattttagcatttatttttagatgaagagtttagtccatttatttttaatgttattattgatacgtaaggacttactcgggccattttgttatttgttttcttgttttatggtcttctcttccttctttcttaccttcctgtattcttttagtgaagg

SEQ ID NO: 339886 - DNA, 559 bp, Homo sapiens
ggacacagagaggggaacaacataaaccagggyctgttgatgggtggggcgtggggggagataacttacaggatggcttaataggtgcagcagagcaccatggcacacgaatacgtacgtaacaagctgcacgttccacgcacgtatctcatggatttttttttagaagaagaaataaagaaaaaaaagaatattctgttatttatttccaaatgtttggatattttcctgttacctcccctctgttaatttctaatctcatcccactgtatttggataacacaatctatatgatttcagttcttttaaattccttgaggtttgtttcatggctcagtatatgatccatccttgtttttgctgcttgagctcctgaaaagaacatatgttctgctatttgttggatagagtgttctataaattagtattttattctgttggttaatgatggtgcagagttattctgaatcactgccagtgttctatttgttctatcaattgtctagagaatgttttgtacaactatagctgtgaatttcactatttctttcagttctat

SEQ ID NO: 339887 - DNA, 559 bp, Homo sapiens
ggacacagagaggggaacaacataaaccagggtctgttgatgggtggggcgtggggggagataacttacaggatggcttaataggtgcagcagagcaccatggcacacgaatacgtacgtaacaagctgcacgttccacgcacgtatctcatggatttttttttagaagaagaaataaagaaaaaaaagaatattctgttatttatttccaaatgtttggatattttcctgttacctcccctctgttaatttctaatctcatcccactgtatttggataacacaatctatatgatttcagttcttttaaattccttgaggtttgtttcatggctcagtatatgatccatccttgtttttgctrcttgagctcctgaaaagaacatatgttctgctatttgttggatagagtgttctataaattagtattttattctgttggttaatgatggtgcagagttattctgaatcactgccagtgttctatttgttctatcaattgtctagagaatgttttgtacaactatagctgtgaatttcactatttctttcagttctat

SEQ ID NO: 339888 - DNA, 531 bp, Homo sapiens
aacaattggaacacctttgtctttttgctctttttaaactgttaattaataagaaaattttatattaagaaggcttttagttaaaattcaaattgctttgagagacgtaacaataaactcttttttattttgtttgagcttttatataagagtgtagatacttatttggaaattttattttataggaaataatcttaacactgatttatagtgagaaaaagaggacataatgttaactaaaataagccacatgcagaatgaaaaatactgcataatctcatatgtggcatctaaaaaatagtcattactggggcagggcggggagtgctggaaatgggaagaagcaggccagaaagtacaaacttgcagttatgtaggacgaatgcctaataaataataataaaaataataaattgcacagcataatgattgataggctaatttgcttaactataataattatacacacatacatatacacatrtatacacatgtaaaaaatctatatctctcaaagcatcatgttataca

SEQ ID NO: 339889 - DNA, 620 bp, Homo sapiens
gaataaaactagaaatcaataataatagaaactttggaaaccatacaagcacttctacatgaccgagatgcttctacatgaccaagacgtcaacaaagaaattaagaaaactaaaatatgtcctgaaacaaataaaaatggaaacacaacaatccaaaacctgtggacatagtaaaagcagtaaagcttatagctataaacatctacatcaaaaagcagagaacttcaaataaacagcctgatggtgctagaaaagcgagaacaaactgaaaccaacattagtagagcaaagaaataataaagatcacagcagaaataaatgaaattaaaacaaataatacaaaaaggcaacaagacaaaaattgattttttggaaataaaaacaaaattgacagaagatargccagactaagagtaaaagagagaagatccaaataaataatatcagagatgacaaaggacacattacaactaatcctggagaaattcaaaggataactggagattaatataaacaactatatgccccaaactggaaaacatagaagaaactgatacatttctagacatatacaacctacaaaaattgaaccatgaagaaatctaaaaattgaacagac

SEQ ID NO: 339890 - DNA, 620 bp, Homo sapiens
gaataaaactagaaatcaataataatagaaactttggaaaccatacaagcacttctacatgaccgagatgcttctacatgaccaagacgtcaacaaagaaattaagaaaactaaaatatgtcctgaaacaaataaaaatggaaacacaacaatccaaaacctgtggacatagtaaaagcagtaaagcttatagctataaacatctacatcaaaaagcagagaacttcaaataaacagcctgatggtgctagaaaagcgagaacaaactgaaaccaacattagtagagcaaagaaataataaagatcacagcagaaataaatgaaattaaaacaaataatacaaaaaggcaacaagacaaaaattgattttttggaaataaaaacaaaattgacagaagataagccagactaagagtaaaagagagaagatccaaataaawaatatcagagatgacaaaggacacattacaactaatcctggagaaattcaaaggataactggagattaatataaacaactatatgccccaaactggaaaacatagaagaaactgatacatttctagacatatacaacctacaaaaattgaaccatgaagaaatctaaaaattgaacagac

SEQ ID NO: 339891 - DNA, 625 bp, Homo sapiens
ttttatttttgtgtaattttctgaagtggaattgctaaataatatggtagttctattttgaatattttgaggaacctccatactgtttttcctaatgactatactaatttacatttctaccaatagtatacaagtgtttccttttctccacatcctcaccaacacttataatcatttgtgaggtttttttttaatagctgctctgacaggtatgagattgtagatccttgtggctttgatttgcttttctctgatgattattgatgttaagcctatttttccatgccttttggcaatttgtacgtctttgagaaatgtttttaaggtcctctgcccgtaattgtattatttgttttcttgctattgtgtttaaaaacctgttgcagagccttctctaatactaggtcctacacaacactagcaggttttcaggtccttcagtaaatggattagagtaacacatttaaataagaaatatgtttcctccraattcaaagaggctgattaggtattgtgcttcttgtcctttgttgtttttgtttattgcttttgttttgtttgtaggagaagccagatgcaaagacatatcctttatcttagaaggaatatcttggcttgtaccaca

SEQ ID NO: 339892 - DNA, 625 bp, Homo sapiens
ttttatttttgtgtaattttctgaagtggaattgctaaataatatggtagttctattttgaatattttgaggaacctccatactgtttttcctaatgactatactaatttacatttctaccaatagtatacaagtgtttccttttctccacatcctcaccaacacttataatcatttgtgaggtttttttttaatagctgctctgacaggtatgagattgtagatccttgtggctttgatttgcttttctctgatgattattgatgttaagcctatttttccatgccttttggcaatttgtacgtctttgagaaatgtttttaaggtcctctgcccgtaattgtattatttgttttcttgctattgtgtttaaaaacctgttgcagagccttctctaatactaggtcctacacaacactagcaggttttcaggtccttcagtaaatggattagagtaacacatttaaataagaaatatgtttcctccgaattcaaagaggctgattaggtattgtgcttcttgtcctttgttgtttttgtttattgyttttgttttgtttgtaggagaagccagatgcaaagacatatcctttatcttagaaggaatatcttggcttgtaccaca

SEQ ID NO: 339893 - DNA, 576 bp, Homo sapiens
gtttttgttagtgaatcatgttccttccataaggggacctggcctcaccttcattcaagagggtcttggtgtgtaaactggctcaattatagtacttgatgaagtggcagtgactctctgtctttttataactcaggttagactttcgtttacttgatctgaaacttttctgtttttatagctcagtaaaaatttggtaggtttcttatgtattccacttccaggaataccatggtccactacacagtggcatgggacttaataagtcagacaatttgactgctctctgttatgatggtacctatgcccaccttggctttgttagtcaagtgctgccacttggtccccaccaccrggtaattatttactccgtttgcatttaagtttcccaattcaatgactggagttcaagggaagagtaatcatatgctcttcaaggatgctgtggcttccctcataaatttatttcttagagtagtgatagaagatatgtcttctcaacccatgcagtgtgggttagtagggcttaagtgacaaatccactgtaacacaccaatttccctaaactttgaatcc

SEQ ID NO: 339894 - DNA, 548 bp, Homo sapiens
ggtccactacacagtggcatgggacttaataagtcagacaatttgactgctctctgttatgatggtacctatgcccaccttggctttgttagtcaagtgctgccacttggtccccaccaccaggtaattatttactcygtttgcatttaagtttcccaattcaatgactggagttcaagggaagagtaatcatatgctcttcaaggatgctgtggcttccctcataaatttatttcttagagtagtgatagaagatatgtcttctcaacccatgcagtgtgggttagtagggcttaagtgacaaatccactgtaacacaccaatttccctaaactttgaatccttcctttacataaaatcagagaaggtctgacatatctaattcacttactgtgggccagcttttgatttatgttttagacaatcaacgaaacaaactcagagtccttcctaattctccaatgtgcaagattaaatgcagaatacttgcttatggactttacatcaataaatttggcctaatccaactttatgtttcttctaccatt

SEQ ID NO: 339895 - DNA, 534 bp, Homo sapiens
acattatgcaggggagaagggccctgggcccagggcacaaaaccgtaacattccctcctaggcatctgggcctgtgatgagaggttctgcggtgaatgtctctctttgatgaaytttccacattgtttggatattaacattcagctcctctttacttatatgaatttctgcaaccagcttgaattcctccccagaaaattttttttttcatttttctttctgaccacatggttaggccacaaatttttcaaacttttcacactttgcttccctttaaatataagttccaatttcaggtaatctattttctacatatgaccataccctgttagaagtagccaggtcaaatattgaatgctttgctgcttagaaatctctttttccagatactctaaatcaacactttcaagttccaatttctgacagatccctagagcaggggcacaatgctgccagcctctttgctaaagcatagcaagagtgacctttactcaaggtcccaataagcttctcatctccatctgagaccaaatt

SEQ ID NO: 339896 - DNA, 558 bp, Homo sapiens
aaatttaagtatattaatgtaatatactgaactaatagaatgaattaaaacccacaactacaaaattgtctcaactggtgcagaaaacatttgggaaaaaaatctaacaccattttataattaaaaacactgaaaatagagagaacttactgaaaataataaatagaatttatttaaaagcccacaacaaacatacactcaatggtaaaattatacaagctttcattgtaaggtgagaaacaatacaaagatgyctgtttctgccacatctgtttaacattgtactggaaatcctaatcatagcaattaggcaagataaaaaaataagtcatcaaattagaaaggataataaaaaaatttatttgcagatgacatgatcatgtatgtagagaatcctaaaagacatagaaaaaaatataggagctaataaatgaattcagccacaggatacgagataaacactcaaaaatcagttgttagttttacacacaagcaatgaccaatctgaaagaaaattaagaaaaaaaaattcatttaattgccttaaaaagtgaagca

SEQ ID NO: 339897 - DNA, 557 bp, Homo sapiens
tgaaatatcactgtgatatttctaatatccagtgtttacacaccatattaatgaaatatcacagtgatatttctaatatccagtgtttacacactgtgatatcaacatcactgagatatttctaatatccagtgtgtacacactgtgataacaatgaaatatttcagcaatatttcttatatccagtgtgtacacactgtgataacaatgaaatattgctgcartatttcttatatccagtgtgtacacactgtgatattcctgaaatatcactgtgatatttctaacatccagtgtgtacacactgtaatattaataaactatcgctgagatatttctagtatccagtgtttacacactgtgatattaataaaatattgcatgacatttctaatagccagtgtttacacactgtgatattaagaaatgtcactgtgatatttataatatccagtgtttatacactgtgatattaatgaagtatcacatatttgtaatatctagtgtttacatgcagtgcttacactgtgatactcatgaaatttcactgtgagatt

SEQ ID NO: 339898 - DNA, 484 bp, Homo sapiens
ttctacataaatggtcatgtcattggcaaagacaattttgcttcttccttcccaatttgtatatagtttttattttcttattttattttcttgtcctagtgaattagctaagacatctatgatgatgaaaagaaatggtgggaagagaaaaatttgttttgttcttaattttgtgggaaagtttctagtttctcagcataaggtgtgatgtcagctgtagaggwtttttagaaaatattctttatgaaattgaataagttcccctctatttcttgtttccttagagtttttattaatgattattgaattttgtcaaatgctttttctgcacgtttaatttatttttaacctgttggtgtaatagattgatttttaaaatgttgaatcagctttgtaagcctaggatattccatttggtcatggtgtataattatttttatacattgttggatcctataatgttttcttgagaatttttgtatct

SEQ ID NO: 339899 - DNA, 494 bp, Homo sapiens
agatctggaaaatgaaaataaaactgttcattcaaaaacaacatggttgtttattcagaaaattctaattactctaaaaataactactaaaactaaacagcaaatttagcaaggtcacagaatacagtctttacaaaaatttaatgtatttctccatatttagatcaaatgactagaaaatgaaaaacaaaattcattttaaatrgtaacaataaaatataataccaaggagttcatgcaccaacagttattcaatacctatatatcaaagacttaaataaatggagaattatgtcatagattagtggagaagtatgcatagattgttaagagctaattttctacaaattaatacacaaatgtaatgctatcccaatcacaatctgaattgttattttgataaaaattgacatctgtttgtaaaatatatttgcaaatggcacaaaataaaaattttgaaagagaaaaagtatggaagacaactctacatgatt

SEQ ID NO: 339900 - DNA, 620 bp, Homo sapiens
tgagctgctgctatatgcattctggctaaaactgaaaagcctgactatactaaatgtttatgaggatatggaaagtttgaaactctcatawaattttgttgaaaatgaaagatgatgcaatcacttaacaaatctctttggcaatttttttttaagttaagcatacacctaacctatgatccagcaatttcactttatccaacagagacgaaaataccaaaaatggatttttataagaatgtttacagaagctttatttataacagcctaaaatggaaacaacccacagatttatgaacacgataatagtaagctatattatcctatattcatataatgggaaactactcatcaacaaaatggaatgaggtgctgggtcatccatgaaccatatgaactatctgaatagcattatgcaaagagaaagaaaccatgcactaatagagacctgcaagattatctgtataaagtttatatttaggtaagaacaggcaaacctaatctacatagatggaaatcaaagccctagtttcctatgattaaagaaaatttgttctaagattgcaaaacagaccactcagggatgatgggaacgttctatttattaatttaggtaatga

SEQ ID NO: 339901 - DNA, 594 bp, Homo sapiens
gctcctaaggccttgggcagttccatctctatgtgtctgcagaatacagccctgtggctgctttcatgcactggtgatcagtgcctgtggcttttccaggtgcttggtgcaaggtgtcagtctacctaccattctggggtctgaaggacagtggcccgcttctcacagttacattaggcagtcctccagtggggactctgtctggggctccaaccccacatttcctctctgcactgctgtggttgaggatctccatgaatgctctgcccctgcagcagacttctgtctggacattaaggaatttccacacatcctttgaaacctaggtggaagttcccaaacctcaactcttgccttccgtgcagctgcaggcrcaacaccacatgaaagcaaccaaggcttggagactgcgccctctgaagcaatagccagagctttatcttttccccttttagacacagctggagctggagtgtctggggaacagggcaccatgtcctggggccacacaaagcagcagggccctgggcgaggcccacaaaacaatttttccctcctaggctcacaggcctatgattgcaggggttgccacaa

SEQ ID NO: 339902 - DNA, 594 bp, Homo sapiens
gctcctaaggccttgggcagttccatctctatgtgtctgcagaatacagccctgtggctgctttcatgcactggtgatcagtgcctgtggcttttccaggtgcttggtgcaaggtgtcagtctacctaccattctggggtctgaaggacagtggcccgcttctcacagttacattaggcagtcctccagtggggactctgtctggggctccaaccccacatttcctctctgcactgctgtggttgaggatctccatgaatgctctgcccctgcagcagacttctgtctggacattaaggaatttccacacatcctttgaaacctaggtggaagttcccaaacctcaactcttgccttccgtgcagctgcaggcacaacaccacatgaaagcaaccaaggcttggagactgcgccctctgaagcaatagccagagctttatcttttccccttttagacacagctggagctggagtgkctggggaacagggcaccatgtcctggggccacacaaagcagcagggccctgggcgaggcccacaaaacaatttttccctcctaggctcacaggcctatgattgcaggggttgccacaa

SEQ ID NO: 339903 - DNA, 455 bp, Homo sapiens
acacaaagcagcagggccctgggcgaggcccacaaaacaatttttccctcctaggctcacaggcctatgattgcaggggttgccacaaagatctctgaaatgccctggagatatagatattttctccattgtcttggctattaatatttagctcctcattatttatgcaaatttctgtagctggcttgaatttctccccagaaaaaggatttttctttttggccccatggacaggctgcaaattttccaaacttacactctgcttcaattttaaacataagttccaatttcagactatctctttgtgaacacataygactatatactttcagaaacagccaggttacatattaaatgttttgcttcttagaaatttttttttgccagatacctgaaattatttctctcaagttcaaagttacacagatgtctagggcagggaaaaaatgccacca

SEQ ID NO: 339904 - DNA, 627 bp, Homo sapiens
aattatagacagaatgaataagacctagcatttggtagtacaacagggtgactacagtcaacaataatttattgtacatttaacaataactgaaagagtataattggaatgtctgtaacacaaataaatgataaatgcttaaggtgatggatatcccayttattgtcatataatcagtacatatcacatgcctatattaaaatatctcatgtacttcataattgtgtacacctactatgtacccataaaaaataaaaattttaaaaaggaagataaatttctttctatgagtacacaactaataaatggagaatctaagatctatctcaagtagttctggctccagaggactgactgttaaccacccttatgtgatgccatcttttagacagggttaacatactctaagtatccactctgtgatgtaacgtcaggttaatttacttcaaatcatgtccaattattgttcacctttcttttgaatgataagcaaggactattaaaaaatggaacataattccttgagcccaattttactatttaaagctgggctaggcaaatgatgtcctatgggtcaaatatgacccagaagttgtttttacaaataaagttttattggaacaaagc

SEQ ID NO: 339905 - DNA, 627 bp, Homo sapiens
aattatagacagaatgaataagacctagcatttggtagtacaacagggtgactacagtcaacaataatttattgtacatttaacaataactgaaagagtataattggaatgtctgtaacacaaataaatgataaatgcttaaggtgatggatatcccacttattgtcatataatcagtacatatcacatgcctatattaaaatatctcatgtacttcataattgtrtacacctactatgtacccataaaaaataaaaattttaaaaaggaagataaatttctttctatgagtacacaactaataaatggagaatctaagatctatctcaagtagttctggctccagaggactgactgttaaccacccttatgtgatgccatcttttagacagggttaacatactctaagtatccactctgtgatgtaacgtcaggttaatttacttcaaatcatgtccaattattgttcacctttcttttgaatgataagcaaggactattaaaaaatggaacataattccttgagcccaattttactatttaaagctgggctaggcaaatgatgtcctatgggtcaaatatgacccagaagttgtttttacaaataaagttttattggaacaaagc

SEQ ID NO: 339906 - DNA, 627 bp, Homo sapiens
aattatagacagaatgaataagacctagcatttggtagtacaacagggtgactacagtcaacaataatttattgtacatttaacaataactgaaagagtataattggaatgtctgtaacacaaataaatgataaatgcttaaggtgatggatatcccacttattgtcatataatcagtacatatcacatgcctatattaaaatatctcatgtacttcataattgtgtacacctactatgtacccataaaaaataaaaattttaaaaaggaagataaatttctttctatgagtacacaactaataaatggagaatctaagatctatctcaagtagttctggctccagaggactgactgttaaccacccttatgtgatgccatctttyagacagggttaacatactctaagtatccactctgtgatgtaacgtcaggttaatttacttcaaatcatgtccaattattgttcacctttcttttgaatgataagcaaggactattaaaaaatggaacataattccttgagcccaattttactatttaaagctgggctaggcaaatgatgtcctatgggtcaaatatgacccagaagttgtttttacaaataaagttttattggaacaaagc

SEQ ID NO: 339907 - DNA, 617 bp, Homo sapiens
ctcatcagtgaagaaaaggaggtttgcaaatcctcacattcctgctgtttctacaaagtgcattacctaaggattatgaattctaaagattttacaaaccaggagaatttatcaggggacacaaagaaaaaaaactttcctgtcaaaaattgtaatttctcaagaaattaccaatgaattacagtcacttatgagatcccattttgcaatatgtaattaacagaccaaggcagggtcccaaccacaaccaaccacttcaagtacatagcccctgcacctatgtgcatgggtgactgatcaatttgtccttccccagtccccattcctgtaattgcattgctggctggcatgagaaggaatcaagctcatttggctcctgtttcttctagtcaaataragggctccttttcaaacaaatgacaagttgtttgagtacctaatgtgggctgcacatttatattactgttgcaagcacacagctcctggcaaaggaaacaagatatcatttcttcggcaaaaggctgctctatttgtatctatctggaaaaaaaaaaaaacccatatgccccaaataaaagggaactaggggaggataaaagaaatgtgaaagcaaaaca

SEQ ID NO: 339908 - DNA, 617 bp, Homo sapiens
ctcatcagtgaagaaaaggaggtttgcaaatcctcacattcctgctgtttctacaaagtgcattacctaaggattatgaattctaaagattttacaaaccaggagaatttatcaggggacacaaagaaaaaaaactttcctgtcaaaaattgtaatttctcaagaaattaccaatgaattacagtcacttatgagatcccattttgcaatatgtaattaacagaccaaggcagggtcccaaccacaaccaaccacttcaagtacatagcccctgcacctatgtgcatgggtgactgatcaatttgtccttccccagtccccattcctgtaattgcattgctggctggcatgagaaggaatcaagctcatttggctcctgtttcttctagtcaaataaagggctccttttcaaacaaatgacaagttgtttgagtacctaatgtgggctgcacatttatattactgttgcaagcacacagctcctggcaaaggaaacaagatatcatttyttcggcaaaaggctgctctatttgtatctatctggaaaaaaaaaaaaacccatatgccccaaataaaagggaactaggggaggataaaagaaatgtgaaagcaaaaca

SEQ ID NO: 339909 - DNA, 617 bp, Homo sapiens
ctcatcagtgaagaaaaggaggtttgcaaatcctcacattcctgctgtttctacaaagtgcattacctaaggattatgaattctaaagattttacaaaccaggagaatttatcaggggacacaaagaaaaaaaactttcctgtcaaaaattgtaatttctcaagaaattaccaatgaattacagtcacttatgagatcccattttgcaatatgtaattaacagaccaaggcagggtcccaaccacaaccaaccacttcaagtacatagcccctgcacctatgtgcatgggtgactgatcaatttgtccttccccagtccccattcctgtaattgcattgctggctggcatgagaaggaatcaagctcatttggctcctgtttcttctagtcaaataaagggctccttttcaaacaaatgacaagttgtttgagtacctaatgtgggctgcacatttatattactgttgcaagcacacagctcctggcaaaggaaacaagatatcatttcttcggcaaaaggctgctctatttgtatctatctggaaaaaaaaaaaaacccatatgmcccaaataaaagggaactaggggaggataaaagaaatgtgaaagcaaaaca

SEQ ID NO: 339910 - DNA, 624 bp, Homo sapiens
tgtggttggaaggcattactacagaaagatcagataaacttatcctttttctaagttttttttatgtttaaaatattaacacatggaaattatgttacatggtatgaagtagatatttaattctcaccttaaatcatgaatcacttgatccaaaattgttcactgaattacctaacgtttgtttactaattggaggtgccacttctatcaattacataattgttatatatctgggggtctgattctgacctttctggccttttcctttsatcagctgcatagattattttaccaactactaaaaaagccaccccatattgatgctgtttcttaaagctttcttggtcctctggcttcttattttgaatgaattataaatcagaaattcttgatcagaatgtgtaaaaggatgaaaaatattaaaagaatacggaacccatcaatgtccaacccaatgaattcaaaaggaatgacctcaatattgaggtttttaaagggttagatgaaaataaaagaaatgaaaatagataaggtagcctgatctgttagctggatgatcatattgtaagtgtttttattttaaacatacagagtaatcacatatgtaaaaattatcccaaggag

SEQ ID NO: 339911 - DNA, 531 bp, Homo sapiens
ttgtgggatgagtgaggaatcacacaagtaagaccatcaaagatgtgagggaaatattcattccaggatgtgagattgggaaaaggaatgaagaaataatatatttccacaggtcatgtgtcatcccacagtgcacaggatcaattcgtacagcagggtagcaagagctgaaatttcaaggaaatccaggaggcactggtacctagaaattgtacatgattcttggagaaaattgatgtaatgtggcacatcaatggaagggccaacraggtttttattttaatgatagaactgaattctgaaattaagcacagcaggtagaaaatggatctagcacagatgtcaaaagctatcattggttttgagataaaacactttttttttcttttccttaagcccaagccagtggactatgtaggtcaatgatgtccagcaggaaaaaacaaacatcctaagtgctagtgtctttctgaggaagttttgaaatgctgctgacattcaaagacctttttttttttttttagcagatct

SEQ ID NO: 339912 - DNA, 616 bp, Homo sapiens
aaaaaaaaaaaaaaatatatatatatatatatayatatatatatattcattaaaacctgctaatatttcagatttagtgaaacataacacaaaaaatgggaacgggaagaggaaacatatacatagagcaaaagatgaatttagtgagcgagaaaggtaaaagagagcaaaagggaacagtttatagagacatagatggagaaaaaccgaattggaattgttaagggcatataggagcagtattcccacatctagccgcctcctcccctgttgcttcttctccttattaagacaaaaacaaaaacattactttttggctcttatttgtaagatttaattattcatctcagttaaccctcacagcaaccctaattaagacaataatactagtgtaagttatagatgaggaataaaactgaaagatagtgaccaagagatggacctgtaatcctaactctggtacaatgctaacaacggttattctaacaccgccttgcttttattcttcttcaatattatccttcttacgagtgtatatttagatctttagaaaataacacatttcaacaattactgtagaatgctgtcatttgaaactctgcttgcctcttacact

SEQ ID NO: 339913 - DNA, 601 bp, Homo sapiens
tttaatattccagcccagctcactggaaacaaccaccacaaaaaactaaaatgacagagcagtgttctgtagagcaacatgatttgtctgctttaaatggagaataatggttttaagtttagagcagaactaaagggctcaattactattcatggattctgaattgttctactttagaaactcctttagcatgaaatgttcatcaaaatcaatgcatgaaactatagaaaaaaaataaaaacccagtttcccatatgaataaaggacttcccaactaagaaagtctataaaaaaaaaaagtatcaccagtttacacaaacccatcttaggcagtaggactaaacattttaaagtaataatttttggttgaatgttgataggyagaaaattttatatatataaaatccaaagtcgtcatatagaagactttagtactaagctaccattgattttctttaatctttaaaaactatactaatggttatccaaactatatggacatgctttttactgaaacaaaccattgtccttggaattgagtaggtttactgaagacaatagtgtaacagtaaattgaaaaaatatatgatttctttaacta

SEQ ID NO: 339914 - DNA, 469 bp, Homo sapiens
taaaaacataactatgactaaaagatgaaaatatattccataaactcaagaaaaccaaggaagacaattttaagtcctcaagcttttcactttaaaacatcttaaaattttattagcaatggtattctacgggaattgtgacaaaaaacatttgtacctacctgttagagcaataattatactttttcaacctagtttacatattttatttaatttatcttggaagatttaaccccttatcaacaagcamtatcagttaaaacattggtatactaattttttttcactaactgttacttaatgttaggttaggcttaaaacttgcatgagttcatcacatttgagtaccacagctgagcactatttgccatagaagctcatgagtgccatattgaagactgaagattgtctagtccagaacttttactttcagatgccagagtgtgatgtcaagtgagatactttataa

SEQ ID NO: 339915 - DNA, 516 bp, Homo sapiens
acctctcatatagttttaagagcaatagtttctcatagcctcctattggaaaccttattttttttttcacgttttctaataccactgaatggctgagccaccatattatgatgggttacttatattacatggtcaaaagtattgccatcaagaaggaaattacatgacctagacttgctaaaaatactaataattttcgaagggctttaggtggtgtatgagcattagcctacctgcataatacatgctactctttcttaccggaggaagagaacttttctcaaattacgggtttcccaatttatgtaagaaagaaccctattatcaaacaaccttctgttactctattaccaagcaayaccacctcaggtgctgctttcttgctcaaactaaaggcaaacattgagcttccccctgtagcattggagtcttctccctccctttattcctttagtaggcacaacattttctgggatattctcatactactatgattcatttgctccacaacagagg

SEQ ID NO: 339916 - DNA, 555 bp, Homo sapiens
taacaacttcctctcccagtggctggagagaatgatgccatagttctctcccctgtgcatcttgggggtctctgggagtcagaggaaacctaggagtcttttcctgtgaacaaatgcacccccatggcaaatgtgtgcagacacacacatatctacatacacagacccccttttgcctttttcggggtatttaggaggtctccagagaccacccatggttctcctaggactctgcaggcaggctctattcaaagccttttggtattctgggcttatcaactcctatcacccacaaagaattgagtggtgaggtggaatgttgggaactgtaagggaaatgcccgtgtcttttcacagtgcctgcttgagagagaaggggaggccrggtattcacagagcctgggttttagtagacagatatcaaagagtgtatgggaaagaaatctgtggattgtaggctttgggaggagattctcaaaaccaaaattctgcttgtataaccagtgatgatccaaagcaggaagaaaaagggaggaaacccagaataattaggac

SEQ ID NO: 339917 - DNA, 575 bp, Homo sapiens
cagtaccaccacaatcttggagcacgagccaktggggccagtgctttgtgtggactgcccactgaagcagaacccttcatgcaggaattcctactttcagcatcactggcttcaggagcctcaaaagccttggcagggcctccagatgtgctcctcttgcttggccaattagcccatgcacaacgctcagagctgtggcttttgttgcattcattgctcaaagctttgcaagctatttcctgccccacttcccacttgtctccatgaattagcatggacctgtcaggatgtatctgtaagctccactcttatcaatgggctgtgtgtcaggcactgtgggcatatcactgagaccacattatggcatttcccaggtgccctatgtgatcattggtagaactttttgaaaaacagtcatgcacaataaggactgggcatgatcatggggaagcaaatgacctgagtgagtgggtctctagaaacccatcactctcattcacaggggcccacctaggaaggactcaagcaactggtagtcaaaatatacttggcaaacaactgtcaagggacagtac

SEQ ID NO: 339918 - DNA, 540 bp, Homo sapiens
gtaactgtgcacaatcatttgcttaagtgaactggggaggaattaactgcacacagctggaatttgccccggccatgccttcactggctttgtgctcctacctgctggcacaggactgcagccccctttctactccctctgaaagatttggggaatctctagtaggcagggagttttctgacctcacgacgacccactgctaatgccctattcgttcattttactggtattggttaagcacctactaggcgccagatgctgttctgagtctgagggactcaacagagaacaaagcaaatgcctgacctcacagagccacgttccagtcagggaarcaaacaacaagcaaaatgaatggagactatattagtctgttctcatgctgctaagaaagacgtaagtgagactgggtaatttataaagaaaagaaggcttaatggactcacagttccacatgactgggaggcctcacaatcatggtggaaggtgaaagaggagcaaaagcacaccttacgtggtggcagggaagagagcgtgtgc

SEQ ID NO: 339919 - DNA, 591 bp, Homo sapiens
atgtggtgtcaccaggactttaatatgtttataatatattattatgcaatgcaggcctaattttggatcataattttccattaactgatctcattttacttagtaatatccacttaggtattcgagagcaataaaactacatttcttttaaatattatatgattcagttggttcactgatttagatttttactaccccccattccaaacgaatgagtcatacatctttttagagataacaaggaccttcaagatcatgcatgcttgtgctacccttcaagcatgcctagtaggggagaagaatgagcaagttctgagatggagatttgggcaagccactgcaatcctgacaatgctgtgtcttagaagagtttgcatagtttgcattttattcttcrgtatatcctaatctgtttaaattttccgactttgcttttatgtctttaaggaaaatcagtcaccgagatggtatgccatgtttgtctttgtacttcacgtactttagcagctcattgccttatagaggctgtatagcatagtgggaggaccactgcctggggagagccttcccaggactgaaatccagctactg

SEQ ID NO: 339920 - DNA, 574 bp, Homo sapiens
caacagcctcccagatgattttcctgtggctactcttacccattcccaaattattcattacacagtagccagagagagcttcaaaaatgcccatttgcatacttttgtttgttgaaagctcatcagcattgtstattgcactgaaagtaatattctaaaaagtcccacatgacaaggccactgcctaattcttcaataccatctcaagccatcctcccgcttccttaccaccctccagccacactggacttcttgtggctctgagaccatgttacctcctgcctcagggcctttgcatgtgctgttccctctgcctggaacacttttccatgctcttcacatggctctctccttccatcctttaaagctcagaggggccttctccaatcatctaacctgaagcatgctccccaccccacattagatttatttcatatcattctttttatgtcttttaaggcatttattatggcctgtaataatttcatttgtttcttgtctgtctcccacactacgctgggagctctgtaagagcagggactgggtcaatctcatattcccagtgtacagcaca

SEQ ID NO: 339921 - DNA, 212 bp, Homo sapiens
actgaggtccctgctttcctgctggctgtcatctggggaatgctcttggcaacaagaggctgcccaatctccttgccgcatggacagttcacagcatgggtctctwctcaggccaccagagtacatctctgtgacttccccttctgccatcagctagagaacactctgctttcagaaggttcatgtgattatgtcaggcccaaccaaccgat

SEQ ID NO: 339922 - DNA, 632 bp, Homo sapiens
agcatttgatttgttgagtttttaactgttttaactattcaggaaagcagaaggaggaccctggcatacaaggagtgccctgtgttcagctgtaactattgtctgcacctgattttgtcttttcaagctgctgagaaagataggctgggtgccaagaatgaacaaggagacctttcctgctggctgcactgtggccctaagtaatgttccctggccctttctagggacagcttgatcccagtggctggcaacagggcccctcagagggcargagaaacccctcctgatttactcccaacactcagctccagtttggggactttccctgttgacagatgatcacacagctgaccaggggaagaaggccttttttttttgtatttgattcctgccagcttcatttatcaaaaactggtcaccttggctagtccgtaaagcaaaatggtacagagccctcttgctgtagattgctacagggagctcatgagcaaaaagaaggaaggtcctttgccctcccaggtgctgtccttcgtcagcagggtagcatgctggggagttcctgattctctaagacagtttcctgtatcgagtaaaggggacaagaggagtgatgagctacccacaccactgcc

SEQ ID NO: 339923 - DNA, 476 bp, Homo sapiens
ctcctggaatgtccttccctgaactcctgtggcccagtcattataggcagagcactgggtccaaggaaaagccaggccccctgtatgggatgggccagtttgctgagaatgacacattactgttgcccctctaacttgaccctgggtttcctgtgggtaagcagctgtttcarcaaatcccagattcctgcaaaacagccttttaagtttttcttcatggaaagcttccagacattccagcccagcttgtctctccttggaattctgcccaatgaatcctgctgcctctgatagttatgagggatccctttcaaacagaggaactgcttcaactgtttgttagggctaacccaaatgttcagaccccttcagggacaccttccaagaaaaagcatcatttttttttccaagcagcaattccacacagaggactcttcggaagtgttgattgcaagaagagggcttgggaaaccata

SEQ ID NO: 339924 - DNA, 430 bp, Homo sapiens
aacaagtatttggggtgtcagccaaaccccagagcctgagccctgggcacaccagcaaacctcctctctcagagaccccttaactgtgttggtgcstgggtctagatgtatagcatgcacctgcccctacaggacaggcaggtgggagggtaagcagtgctctgcagtgtggagagagaggatatcaatcacaagaccctggaactattagtacagtctcccacaagagaacagggttcctgcttccctcagttatcactggctgtatcctcacacatggacatacacactcagacagacagacagacacacacacacacacagagagagagagagagagttccagaagcccgcagcagcctacaaaagctcatcctgaaaacagattcttctagtcccaagtggttgctcactgcttatagcaagagca

SEQ ID NO: 339925 - DNA, 550 bp, Homo sapiens
tggttctttaaaagtccttatctattttggatacatactgaaatatttttgatgaaatgatatgatgtctgggatttccctcaaaataactagagttaggtgggggattaggcagaggtaaagatgaaaccaaattggccataagttgacaatactgaaacaaggtaacaactgcaacgggatttattttactatctcactgtttttgtatatattcgatattgtccataataaagagttttttctcttttttccttaatttttttttcaytatttcttctaaaaatgggatacgagtgcagaacatgcaggtttgttccataggtatacatgtgccatggtggtttgctgcacctatggacccatcctttaagttcccttccctcaacccccaaccccctacaggccttcatgtgtgttgttcccttctctgtgtccatgtgttctcagtgttcaacttccacttatgggtgagaacatgtggtgtttggttttctgttcctgtgttagtttgctgaggatgatggcttccagcttcatccatgtcccc

SEQ ID NO: 339926 - DNA, 550 bp, Homo sapiens
tggttctttaaaagtccttatctattttggatacatactgaaatatttttgatgaaatgatatgatgtctgggatttccctcaaaataactagagttaggtgggggattaggcagaggtaaagatgaaaccaaattggccataagttgacaatactgaaacaaggtaacaactgcaacgggatttattttactatctcactgtttttgtatatattcgatattgtccataataaagagttttttctcttttttccttaatttttttttcattatttcttctaaaaawgggatacgagtgcagaacatgcaggtttgttccataggtatacatgtgccatggtggtttgctgcacctatggacccatcctttaagttcccttccctcaacccccaaccccctacaggccttcatgtgtgttgttcccttctctgtgtccatgtgttctcagtgttcaacttccacttatgggtgagaacatgtggtgtttggttttctgttcctgtgttagtttgctgaggatgatggcttccagcttcatccatgtcccc

SEQ ID NO: 339927 - DNA, 550 bp, Homo sapiens
tggttctttaaaagtccttatctattttggatacatactgaaatatttttgatgaaatgatatgatgtctgggatttccctcaaaataactagagttaggtgggggattaggcagaggtaaagatgaaaccaaattggccataagttgacaatactgaaacaaggtaacaactgcaacgggatttattttactatctcactgtttttgtatatattcgatattgtccataataaagagttttttctcttttttccttaatttttttttcattatttcttctaaaaatgggatacgagtgcagaacatgcaggtttgttccataggtatacatgtgccatggtggtttgctgcacctayggacccatcctttaagttcccttccctcaacccccaaccccctacaggccttcatgtgtgttgttcccttctctgtgtccatgtgttctcagtgttcaacttccacttatgggtgagaacatgtggtgtttggttttctgttcctgtgttagtttgctgaggatgatggcttccagcttcatccatgtcccc

SEQ ID NO: 339928 - DNA, 550 bp, Homo sapiens
tggttctttaaaagtccttatctattttggatacatactgaaatatttttgatgaaatgatatgatgtctgggatttccctcaaaataactagagttaggtgggggattaggcagaggtaaagatgaaaccaaattggccataagttgacaatactgaaacaaggtaacaactgcaacgggatttattttactatctcactgtttttgtatatattcgatattgtccataataaagagttttttctcttttttccttaatttttttttcattatttcttctaaaaatgggatacgagtgcagaacatgcaggtttgttccataggtatacatgtgccatggtggtttgctgcacctatkgacccatcctttaagttcccttccctcaacccccaaccccctacaggccttcatgtgtgttgttcccttctctgtgtccatgtgttctcagtgttcaacttccacttatgggtgagaacatgtggtgtttggttttctgttcctgtgttagtttgctgaggatgatggcttccagcttcatccatgtcccc

SEQ ID NO: 339929 - DNA, 477 bp, Homo sapiens
ggcactagggaatgaagaataacaacaatcatccagtcctaggagcagatagtaaaaggtcatcctggaggatgagatatctgtgtaagtgtcattataacagtagaccatattctaaagaggcaaatgattaygaatatcccaagatattctaaaatgccagtaagaaaccccaagtgggtaaagcttagatattcagagaaggagtcagtgacttgcagatatgttcaagtgggtgtctttccaacagcaaggcctttctgggagactctcttttctgtaatacatttctaacagctcaatccagtcaggagtgattcacagttggggcaagatggagaggagaggggtcttttctctggttgcctgctctggacaccacggtggggcactggctgtggttgtagtggcattcttcctcaccaccccctacttctttggtttccattccagaaaggtgaagacagccaagattca

SEQ ID NO: 339930 - DNA, 477 bp, Homo sapiens
ggcactagggaatgaagaataacaacaatcatccagtcctaggagcagatagtaaaaggtcatcctggaggatgagatatctgtgtaagtgtcattataacagtagaccatattctaaagaggcaaatgattacgaatatcccaagatattctaaaatgccagtaagaaaccccaagtgggtaaagcttagatattcagagaaggagtcagtgacttgcagatatgttcaagtgggtgtctttccaacagcaaggcctttctgggagactctcttttctgtaatacatttctaacagctcaatccagtcaggagtgattcrcagttggggcaagatggagaggagaggggtcttttctctggttgcctgctctggacaccacggtggggcactggctgtggttgtagtggcattcttcctcaccaccccctacttctttggtttccattccagaaaggtgaagacagccaagattca

SEQ ID NO: 339931 - DNA, 539 bp, Homo sapiens
ttttatttgtctttgatattctgtagttcctctatggtatatctaaatggggatatctttatatttacctcactttggatggcatgacttcttaaatctgaggattggtgtcttttatcagtttgggaaaattttaagccatcatttatttaaatatgttttttgcctaaccctccatactgttttctcagaaaatagaaatcctctctggagaaagaggatcatctccatttggaattataagatactaaatccacaatctcaattctacatgtctttcaacattttttcacaattttttctgggccctttgggctgattttgagtgatttctttagatctattttccagtttcttaattttattcctttaataatgtkcatgtagccgctctgcccatctgttgagcttttgtctttcttacatttttcatgtttgaaattccatttttatcctactatgactgattatttttatagagtcttgcttcttattcatattttcaatctcttctttttctaagtatataatataaccta

SEQ ID NO: 339932 - DNA, 539 bp, Homo sapiens
ttttatttgtctttgatattctgtagttcctctatggtatatctaaatggggatatctttatatttacctcactttggatggcatgacttcttaaatctgaggattggtgtcttttatcagtttgggaaaattttaagccatcatttatttaaatatgttttttgcctaaccctccatactgttttctcagaaaatagaaatcctctctggagaaagaggatcatctccatttggaattataagatactaaatccacaatctcaattctacatgtctttcaacattttttcacaattttttctgggccctttgggctgattttgagtgatttctttagatctattttccagtttcttaattttattcctttaataatgtgcatgtagcygctctgcccatctgttgagcttttgtctttcttacatttttcatgtttgaaattccatttttatcctactatgactgattatttttatagagtcttgcttcttattcatattttcaatctcttctttttctaagtatataatataaccta

SEQ ID NO: 339933 - DNA, 539 bp, Homo sapiens
ttttatttgtctttgatattctgtagttcctctatggtatatctaaatggggatatctttatatttacctcactttggatggcatgacttcttaaatctgaggattggtgtcttttatcagtttgggaaaattttaagccatcatttatttaaatatgttttttgcctaaccctccatactgttttctcagaaaatagaaatcctctctggagaaagaggatcatctccatttggaattataagatactaaatccacaatctcaattctacatgtctttcaacattttttcacaattttttctgggccctttgggctgattttgagtgatttctttagatctattttccagtttcttaattttattcctttaataatgtgcatgtagccgytctgcccatctgttgagcttttgtctttcttacatttttcatgtttgaaattccatttttatcctactatgactgattatttttatagagtcttgcttcttattcatattttcaatctcttctttttctaagtatataatataaccta

SEQ ID NO: 339934 - DNA, 539 bp, Homo sapiens
ttttatttgtctttgatattctgtagttcctctatggtatatctaaatggggatatctttatatttacctcactttggatggcatgacttcttaaatctgaggattggtgtcttttatcagtttgggaaaattttaagccatcatttatttaaatatgttttttgcctaaccctccatactgttttctcagaaaatagaaatcctctctggagaaagaggatcatctccatttggaattataagatactaaatccacaatctcaattctacatgtctttcaacattttttcacaattttttctgggccctttgggctgattttgagtgatttctttagatctattttccagtttcttaattttattcctttaataatgtgcatgtagccgctctgcccatctgttgagcttttgtctttcttacatttttcatgtttgaaattccatttttatcctactatgactgattatttttatagwgtcttgcttcttattcatattttcaatctcttctttttctaagtatataatataaccta

SEQ ID NO: 339935 - DNA, 584 bp, Homo sapiens
ttttgcggcttatttatccagccccaattcctaatggacataaatgcaactggagtagagaatgacatattgacgtttgggaatttttctcccctagttacatctttgccagggatagtcttaatagccagaagaaagaaatggaatttgatcccagtgtaagaaactgtctgatgtagtacctgtcatgaataattacaatggattaatgctatggtgtataaaactttgtaaaatggattatatgttccttttagtattgctattagttatatgagcacctatgaatttcttctaagtgaacttcaacctactgaatggattcacaccctttgggtatgatacagacagacacacatacaaataagtgtggtatatgattgagaatgaattgttgaaaaactgaatatatgtgtatatatattgtatatatatgtatatatatgttgtatatatacatacactrataatagtcatagttatctaactaatatactcatatctaatgtttattgagtattcagtgtcaggtgctgttataaatgcttcataaagagccactctgttatttcatacaacagtgt

SEQ ID NO: 339936 - DNA, 484 bp, Homo sapiens
atatttgattattagaaatacatctccagcacttccatattaacatcaaaaccacaaatatgtattcatttcatcatcagggtgcatacgctatataatgatcagaactattattaacatggagacaagctartttctttgcaaaatataaaccaagtttaaaagacaaatattgctaaatctactgacaatcttctttatccggccttgagttactaggcactgtctaaccaagctgacctgaggggttgacctggttttcaactgaagtagccaaattcttgacttcatttttttaaagcaggtctaaaaatttttacttaaaggattatatttccataatactacaatcgtgttgcactaaacagttggtacagaaatttctttcttccatactgattatagacataagtatttttctacaatgtaaacttttgcttatataatgacatgaaattaaaaagtgtagagtccaacttgagtc

SEQ ID NO: 339937 - DNA, 564 bp, Homo sapiens
gcatttgctagtaaagacacagaaaagcactcagagatgaaatttataacttggcagacaagacacctgaacattacatttttaaaagacagtgattcagtgccacaggtttataagcaacattattaatgtctccaaatgaaaataagtaagacattgctatgacacagtagcctatattcttcacattacaatgttgtctgctaaatttcctatagggagtgcttaagattgcattacaaratagtaatttctaggtaaaaatcctactgggaaagcatatatccatagttttaagcagacaatttgtctaaaaaatgatcaatctatgaattataaattcttacatttaattgactgaaaaatgcatatctcactgtattttctaactgctatattcatcttctacatctcaatgtagtaagactgccaaattgaacattttacagccatagtcatatatttagggtttcaactaaaattattcctatcttagaaaagcaaaagtctaattaatggtactgttagggctgacattgtccatatcatcttaatactttcctt

SEQ ID NO: 339938 - DNA, 564 bp, Homo sapiens
gcatttgctagtaaagacacagaaaagcactcagagatgaaatttataacttggcagacaagacacctgaacattacatttttaaaagacagtgattcagtgccacaggtttataagcaacattattaatgtctccaaatgaaaataagtaagacattgctatgacacagtagcctatattcttcacattacaatgttgtctgctaaatttcctatagggagtgcttaagattgcattacaaaatagtaatttctaggtaaaaatcctactgggaaagcatatatccatagttttaagcagacaatttgtctaaaaaatgatcaatctatgaattataaattcttacatttaattgactgaaaaatgcatatctcactgtattttctaactgctatattcatcttctacatctcaatgtagtaagacygccaaattgaacattttacagccatagtcatatatttagggtttcaactaaaattattcctatcttagaaaagcaaaagtctaattaatggtactgttagggctgacattgtccatatcatcttaatactttcctt

SEQ ID NO: 339939 - DNA, 395 bp, Homo sapiens
accaaaagagactagagttgccaagaagaagcaggtcaatagtaatgaattctgcacaacaatcaactcatacaaagcctgaaaataggcttcctgatcagacaaattaggagatttgtaaaagctgatgtgaaaagagtttccacagggtragcaaacaaattgaggcaatctgtctcaacgttaaaattattttggcagtagaggaaggcgtacaataagaaagtaccatcagggaaagtttggggacatgacaggagagataagggcatgcatgtatatggaatgaaaaaaaaaatctagaaatacaaaaatggcgccatgcaaaatcaaacttgtaccttgctctaactgagcccagattacttattgttagtattttctttattggctaa

SEQ ID NO: 339940 - DNA, 599 bp, Homo sapiens
gccacatatgcaatttaaaatttttctagtaatcacataaaactaaaaagttgaaattaattttatatattttatttaactcaatgtatcaaaatattcaatatgtaatcaataataaaaattgttaatcagatattttatacttttaaaaaatgaagtctttgaaatctagtgcattttatagcacatgtcaatccacactagccccatttcaagggcccaagagcctcatgtggccagagtctaccttattgatgacatagttytagataataaaaaaggatgaaataatttctacctcatcttgtgttaaaaaaaatatagctttgaaatcaaagctagacaagacctgtaagataaaagtaaattgcaggccagcccgctcataaacgatgatgtaaaaaattcctaagcaatattttggcaaactgaattcaagccgtattcataaaaatataaggaatcatgtcgaattgctatattctaccaattcacggttggtttaacattagaaaatatatacatacagtcatacctcattttatagtgcttcactttgcagatattgcactttttactaattgaacatttatggcaat

SEQ ID NO: 339941 - DNA, 599 bp, Homo sapiens
gccacatatgcaatttaaaatttttctagtaatcacataaaactaaaaagttgaaattaattttatatattttatttaactcaatgtatcaaaatattcaatatgtaatcaataataaaaattgttaatcagatattttatacttttaaaaaatgaagtctttgaaatctagtgcattttatagcacatgtcaatccacactagccccatttcaagggcccaagagcctcatgtggccagagtctaccttattgatgacatagttctagataataaaaaaggatgaaataatttctacctcatcttgtgttaaaaaaaatatagctttgaaatcaaagctagacaagacctgtaagataaaagtaaattgcaggccagcccgctcataaacgatgatgtaaaaaattcctaagcaatattttggcaaactgaattcaagccgtattcatamaaatataaggaatcatgtcgaattgctatattctaccaattcacggttggtttaacattagaaaatatatacatacagtcatacctcattttatagtgcttcactttgcagatattgcactttttactaattgaacatttatggcaat

SEQ ID NO: 339942 - DNA, 488 bp, Homo sapiens
aattattattcaataccatcaccctgtggtgctatcaaatactargtcttactcatgcttactaacaattttttgtaccattaaccatctccctggttcattgcttttaatatttgtatcagtaaagacattcagctccagattgccaacactccctactaagaaaaaggtattatctcataaaacagaaagtcccaaggtaaggaagctccaagacttgtccattctccaagtcagccatgtcctttaggacccaagttccttcatatttccactgtccaatattcacattttgcatttgattcccttttatggttgacagacagctgctgtaattctaggtcacatatgtagacctaattccaagggatggggcagggaaggaaaatgccatttaaccttataaagtagtccccccatcagacttgtcttcatatttcattgcaaggaaggggtcaagcatcacttttgaaaccagttattgttaa

SEQ ID NO: 339943 - DNA, 488 bp, Homo sapiens
aattattattcaataccatcaccctgtggtgctatcaaatactaggtcttactcatgcttactaacaattttttgtaccattaaccatctccctggttcattgcttttaatatttgtatcagtaaagacattcagctccagattgccaacactccctactaagaaaaaggtattatctcataaaacagaaagtcccaaggtaaggaagctccaagacttgtccattctccaagtcagccatgtcctttargacccaagttccttcatatttccactgtccaatattcacattttgcatttgattcccttttatggttgacagacagctgctgtaattctaggtcacatatgtagacctaattccaagggatggggcagggaaggaaaatgccatttaaccttataaagtagtccccccatcagacttgtcttcatatttcattgcaaggaaggggtcaagcatcacttttgaaaccagttattgttaa

SEQ ID NO: 339944 - DNA, 567 bp, Homo sapiens
ttagtaaatatgaagctatttctcaaaggagataatggattctttcttaatacaatctcaagaaacaaaattacggcctccccctcccataacagaaaatgtgtaacaccctggtttatatttcttgataaaaaactttttaaaacttcatacccttaagggacagctttgcatacaggaacaacactaagaaagggaaccagatgccatctttattgagatctcaaagaacagcatcctatgggaagacagaagaaaatgccaaggtcgcttccttcaggtaatgcaacactttcttgtgagaggcacaacggtaaacatgaagatgaytgataacttcttttaagacatataaaagggagttataacacagaagtacaatcctgaaccaaaaaagaagaaaagccaatttatagctacggaggcatgtttaaaagtgctacacagaaaatttctttgagtctatgtttttgcaaatgggagaggattttcaagtcagctcatgtggaagatacacttcattgccaaagggaatagtgggacaggcaccaggaaataccctaagga

SEQ ID NO: 339945 - DNA, 656 bp, Homo sapiens
gatagaaaccattaaaaatgaacacataatagaagttatgtttcatttcctaggaactgattctaaattaaaacatggattaaatttctgggaataactatacacattatttaatgtgtttcttaaatttaaaatatatgaagaaattattattcataaccttattgataactggccataaatrgcccataaatgtttgcttatactgtttaatatattatcctaaaaaaaatcactcaatttttaatagtttttttaatgtgttggctgacagtctatacattattttggattaaatgaagagaattaacctaaagaaatcaaaatctcaacagcaatgactgatttacctattataaaagttatccatgctttttgttgttttattcttaaatattctattaacttgctcattgtattatttgtactttatattgatgaggatcaataaatgttacttgacagtactgatgtacaatttaataaaattgatttatatattttcatctgctttcaggtgccctttctgaataaatttttatagtttatctgtgagaattattaaccatatttaatagataaccatatggtaataaaacagctaacagttattgaatatattctgtatgccaggaaatgtgccaagtgctctccat

SEQ ID NO: 339946 - DNA, 656 bp, Homo sapiens
gatagaaaccattaaaaatgaacacataatagaagttatgtttcatttcctaggaactgattctaaattaaaacatggattaaatttctgggaataactatacacattatttaatgtgtttcttaaatttaaaatatatgaagaaattattattcataaccttattgataactggccataaatagcccataaatgtttgcttatactgtttaatatattatcctaaaaaaaatcactcaatttttaatagtttttttaatgtgttggctgacagtctatacattattttggattaaatgaagagaattaacctaaagaaatcaaaatctcaacagcaatgactgatttacctattataaaagttatccatgctttttgttgttttattcttaaatattctattaacttgctcattgtattatttgtactttatattgatgaggatcaataaatgttacttgacagtactgatgtacaatttaataaaattgatttatatattttcatctgctttcaggtgccctttctgaataaatttttatagtttatctgtgagaattattaaccatatttaatagataaccatatggtaataaaacagctaacagttattgaatrtattctgtatgccaggaaatgtgccaagtgctctccat

SEQ ID NO: 339947 - DNA, 633 bp, Homo sapiens
gagggttttatgaaatgtaaagaactactgttttaaggtggagaaaggacttctataatcgtttgtttgctgacgataytcattttaaggttgaaatggttacttaattttaactaagtttctaaaaatagtgtgtatatgtgtgtctgtgtgtatttcgagcaagaaaatgaatttctgaaatctggcttgttttaagaatacaaacattagatattttaagtctctaaccacagaagactagcagtagctttgttgtagtagctcaatagtttaaactccaccttcccgtgatcagcctaaatattgaaaacactcatacctataacaattccaactttgtaaatcaatggctaaccagtagtaaatggtttacattagaactccttttactttaatatcaggattgggatattgtgattaatcaaatacaaggttatctagagaaatactttttcagtagttgactttgtcggaaacttttaattgatcaaaactgcattctcgaaaggatgaactgataacaggaatgaattcctctgtcctcaaattcccttggatgtgaggcagtgttctaagaaatacaatgtctgttgtttaattggaagttgtatgcatttgtgcaatgcagtt

SEQ ID NO: 339948 - DNA, 566 bp, Homo sapiens
cacctgacatctagatttggctattcatatttatttcattagatgaagtgttttggatactcacctactctcatttcaggctcccgctttctattttcctttttcttcttttttatgttttctggcggggggtggggtgggggaggtggacggagtgggggtcagggtctcactctgttgcccaggatgaagtgcagtggtgagatctgcaatatccacctcccgttctcaagcaatcctcccacctcagcctcctgagtagctgggattacaagcctgcgctaccatgcccagataatttttcttcttctcctttttttttttttttttttggtagacagggttttgccatgttgcccaggctggtctcaaactcctgggttcaagtgatacatccacctaggcctcccaaagtcctgagattacaagtgtgagccactgcatctcacccagttttccactttctaaggwtctgcagctgctgagactggccaacactgattcatgacattgtttgggctagtgacagcagtttaggtgacagcatagttcatcatcaacagtct

SEQ ID NO: 339949 - DNA, 538 bp, Homo sapiens
gatcaggcaggttgattagtttgccaaaaatacacagccagtaagtgaagtgggaatttcaacccaagtaagtctgatgcacgagcccatgttttatctacaatggcaaattttctcccattggagttagatgattgcacagatcggagagtactcgtttcttttcaataaagttacaatataaatacttcctaatatggagtgaaactagcccttattgaaggcagtatcattcagaatacttactggctatgtctctttggtcaagtcatcatgacaaatgtgtataccttttctgtagttcagtttttatatttacaaagtaagaacatatatatgatctctctacytatagagacattataacttaaaagggatgattttgaaacaactttgtaaattctttaaaatgtaaagtcttattgttgataatgttattgatgatgatgatgatgatgatgatgatgatgatgatgctagaccgcaggctccttctatagcattctctccagaaaagtcttatgtgggattgaaatca

SEQ ID NO: 339950 - DNA, 617 bp, Homo sapiens
atctgcctgcctcagcctctcaaagtgctgggattacaggcgtgcacggcccgcattttttattgaggtaaaatttacatacaatggagtatctaatccaatgactattggtgaatatactcacaaacccgtgtaaccacaagtcaagaaatagaacatgtccatcattccaaaatttcctcattagtttttccagtcaatccctatcttgagaggcaaccactgtttagacatctatcacagcagattagttttgccttttctttagcttcatatgaatgtgatcactagtttatgctattttgatgtggcttctttgacttaacacgttttgaaattcatctatgagtttacacacatcaatrgttcattcattttttattgctgagtggaattctatgtgtatgaatatatcacaatttgtttattcattcttgtacgaacggacacttggattattttcagtttcagctattatgaatatgttgctaacacattatcatacaagcatttttatggacatatgttattatttcttttgggtagttttgagtggaattgctaactcgtgtcttaagtatatgtttagctttataaaagaccagccagacagtttt

SEQ ID NO: 339951 - DNA, 617 bp, Homo sapiens
atctgcctgcctcagcctctcaaagtgctgggattacaggcgtgcacggcccgcattttttattgaggtaaaatttacatacaatggagtatctaatccaatgactattggtgaatatactcacaaacccgtgtaaccacaagtcaagaaatagaacatgtccatcattccaaaatttcctcattagtttttccagtcaatccctatcttgagaggcaaccactgtttagacatctatcacagcagattagttttgccttttctttagcttcatatgaatgtgatcactagtttatgctattttgatgtggcttctttgacttaacacgttttgaaattcatctatgagtttacacacatcaatggttcattcattttttattgctgagtggaattctatgtgtatgaatatatcacaatttgtttattcattcttgtacgaacggacacttggattattttcagtttcagctattatgaatatgttgctaacacattatcatacaagcatttttatggacatatgttwttatttcttttgggtagttttgagtggaattgctaactcgtgtcttaagtatatgtttagctttataaaagaccagccagacagtttt

SEQ ID NO: 339952 - DNA, 560 bp, Homo sapiens
tgatcatgaaattgggaataaatgggctttcataagctatttgggttattacagtattaaaccaattatttaacctaactggactcagtttttccctctgtacaatgaagaagagttggactaaaaagatctctaaattccttctaactaaaacatgctatgattcaaaataataaacaaaaagatgatagaatatagactaagttgcttatcttttctctctctcatgtctccacagtacaaaacagtagaatacatgaatatttttttctgtttaatgaaactggaagtctaattaaaattttcgtttgctttttaagataaagcagagttatctactgaaaatccatatccaaacccgtcagcttctatttgcagccctccatctaactaaaataaaatcgtttgacacgtaatcacatctcttacacttccacactataaaacttttacttyatacactaaccttaagcaattaaaatgttcacactttctatgtaggctttaaattccggtatgtacagacagccagtctttgaggtatacggtaagaggtggca

SEQ ID NO: 339953 - DNA, 606 bp, Homo sapiens
ctaaaataaaatcgtttgacacgtaatcacatctcttacacttccacactataaaacttttactttatacactaaccttaagcaattaaaatgttcacactttctatgtaggctttaaattccggtatgtacagacagccagtctttgaggtatacggtaagaggtggcaaatcgctttgccggttaaaactcgggaatggattgggtagaggaaggttggccaaggagttcttgtggagtaaaggcttacaggtggtttcaagattggcagaaccaaagatggacacttggtttttcaaagactaacataagagtaagaactcaatttttttaatgacttaaattataaattaaatgaaaggcaagagattaaatggtgtggagtttgggaatggagagaaaatcatgtktttctttttgtaaagtctgcttataggcatgtattaccaaacttcataatgaacacatgtgaatgtagttagctaaaagttacagttgcttcaaaatacatttcaaatttgattataatatggaagattaaggtatgaatttttaaatggtaaaaatgataaagtaccacatacattaaacaagttggaggcagc

SEQ ID NO: 339954 - DNA, 528 bp, Homo sapiens
atagactctctctctctctctctctttctgtgtgtgtgtgtgtgtgtgtgtgtgtgtgtgtgtgtatttctcttctgtatgttctcatcatgaaactcaattgcattgctttgtacgaaggctgcatgtttaagtccctcccttataccactctaacctgacctcatctgtaagatgtcttatgaaataatcttcacaaagatcaaataatatcattaagaattctgagcattctcactatgcagccataaaaaagaaggagatcacgtcctttgcagggacatggatagagggctagaggccattatccttagcaaactaacacaggaacagaaaaccaaataccacatgttctcacttataggyggaaactaaatgatgagaatacatggacacatagaggtaaaaaacacacagtggggtctcttgtggggtggagggtggaaggaggaagaggatcaggaaaaataactaatgggtactaggcttaatacctagataaagaaataatctgtacaacaaaccccc

SEQ ID NO: 339955 - DNA, 615 bp, Homo sapiens
ataaataaaggttttgtcaagtcattaatccttaaaataaaatgcatactgtgttactcaatatatgtttacctaccaataatatacttcattttttgcttcagcaatttggctggatgattttttttccttcaataatgaaaaccacccctccatcagtttytaagagaattttttttcaaaaatatacaaatgctggcattcactttcccatgcatacagcaaattggtgcagtatctattccaaaggaaaagcttcctttctctttctccctgtgtaaaaaaagaaatgaatgctgcagttgttggacaagggataacagttgatttggagtgaaccagccaaaaatgtcccaaacaaattaatagcatagaaacatctgctgctgttttattagagtttcacataaaaacctagtttgcaagctggcgcttggaatgcttttctttacactgaactcttaacgtagctgcgaaaggcaatcaagaccatatgtcttacatttttgcgtccaaattttcttgcatctcactccaacctgggacagttgcttgtaacatgaacactgaattatgaaacccattttaaaaatcaggattttttttttttttttt

SEQ ID NO: 339956 - DNA, 589 bp, Homo sapiens
tcttttaaaaaatatttcagatgataaattttatgctgtatgtattttaccataatacaaaattggttgaagaggagtacatataaacacaacaacgaagtgtttaactcatcaatttcagatacacagtaaaagaatgtatatgagaattggtcaaggacattctgaggctttaagcttcaagtcaagaaaaacaactgcctttctgaaaacttacaccgctcacagagtctggtgggctatgaatttgatggtacaacttctaacttgacagtgtggagatcaagggtataggaatgtaaaaagctttgaaaagtttsagagtggagtttgcacagctggacacagggcaccacaaacacaggtggtgcatttgtgcctttggtggacaaagtatcacccacaatgcacaggcgcttccctggctggacaataggtctctctctccatcccctctctctctgtttcaagagaagacattttacgtaggaccttccactctgaatatgaagggtatatcatttccctctcaaatccagactcctctagttgaatggctgacagccaacagaaggggtgtatgcaccct

SEQ ID NO: 339957 - DNA, 589 bp, Homo sapiens
tcttttaaaaaatatttcagatgataaattttatgctgtatgtattttaccataatacaaaattggttgaagaggagtacatataaacacaacaacgaagtgtttaactcatcaatttcagatacacagtaaaagaatgtatatgagaattggtcaaggacattctgaggctttaagcttcaagtcaagaaaaacaactgcctttctgaaaacttacaccgctcacagagtctggtgggctatgaatttgatggtacaacttctaacttgacagtgtggagatcaagggtataggaatgtaaaaagctttgaaaagtttgagagtggagtttgcacagctggacacagggcaccacaaacacaggtggtgcatttgtgcctttggtggacaaagtatcacscacaatgcacaggcgcttccctggctggacaataggtctctctctccatcccctctctctctgtttcaagagaagacattttacgtaggaccttccactctgaatatgaagggtatatcatttccctctcaaatccagactcctctagttgaatggctgacagccaacagaaggggtgtatgcaccct

SEQ ID NO: 339958 - DNA, 588 bp, Homo sapiens
ggatgtgtgtgtgtgtgtgtgtgcatgcatttgtgtgtgtgtacacaagtcccaagatgtacaggttatgttggcaagccaggagaaccaatggtgtagttcccgtatgaaagccagcaggctccatacccaggaagagctgacatttcagttccagtccaaagtcaggaaaaagccaatgtcccagtttgaatacaatcaggaaggagaagttctttcttattcaggggaaggtcgccattttgttctcttcgtgtcttcaactgactagatgagatccagttacatgaggtagggcaatctgttttagtcaatttatatttaaatgttaatctaatctaaagccaccctcacagaaacaccagaataatgcttgaccaaatgttgggtctcctcataacatacaaagttagccatcacgatattttcctggcatacactgtgaaaccactgacctggaaccctctgacttctgtcagctatttaatagataagtctttctaatcttgagtgtttgtaaagcagytggatataaatttgaaaatttttaaatgaaacgataaatcatgtgtgacctcttgagcctat

SEQ ID NO: 339959 - DNA, 591 bp, Homo sapiens
aaaaaatcatcccttcaaaattgagagaaggactcaatcctttccaaacaggtttaccccagttgacttcctttcctgtataacaaagagacccagaagctgaaggtggcttccttgcttcwtctccatgtgcctctgtgcagccatcccatcaaaactgatcactgagccttcctgtcctctaatgtaacttaccatcagagaaagaaagtaagaaggaaggaaggaaggaaggaaggaaggaaggaaggaaggaaggaaggaaggaaggaaggaagggaaagagagaaagaaagaaagaaattcacatgtgggtgatctccaagtggatgaagtttgctcatttgataaaagcaaatacattttatttttcagaagaaccctcttttagtagattttcttaaataatcttttggcgaaaccctcttctatgcttattttaaaccctgctacatgatatactatgctatgaatgcttgctatggaaaattcaaacaacactgaaaggtatgtataaatttataaaaggcttttataaatgaaaacagtatagtaaaatggagctatacacttcaaatgggtggatttatg

SEQ ID NO: 339960 - DNA, 528 bp, Homo sapiens
tcctgagatgaacttacaataaaatatctttcccttataaattttattgtaagatgaacttacaataaaatatttccctaaatataaggacaccaaaatcatgtttaaaaatattaaatgaattcctttttagtttattgtgtcattttgtaatgcgagctcaagttatgcttacttatttgggaggtagataaaaacatttcctctgcaatagcatgcatacattacaatggcaggaggcaatgacttcacgtttaatgcaatagtaatatgtgcatcatggatagaaattaaattcaggaatgaggcagatgagcttcctggaatcacgcatatcagatgtgattttcaccaaccatcaaaaggcctttgacttgcaggcttctgcaaggccacaggtaacaaccttacttatgtttccacrtgggcagcagagctgatcctcacattcacttgaagtggcattcgttgtggctgtcccacctgcaagtaccttagatgctggcactgaagtatctcacccagact

SEQ ID NO: 339961 - DNA, 528 bp, Homo sapiens
tcctgagatgaacttacaataaaatatctttcccttataaattttattgtaagatgaacttacaataaaatatttccctaaatataaggacaccaaaatcatgtttaaaaatattaaatgaattcctttttagtttattgtgtcattttgtaatgcgagctcaagttatgcttacttatttgggaggtagataaaaacatttcctctgcaatagcatgcatacattacaatggcaggaggcaatgacttcacgtttaatgcaatagtaatatgtgcatcatggatagaaattaaattcaggaatgaggcagatgagcttcctggaatcacgcatatcagatgtgattttcaccaaccatcaaaaggcctttgacttgcaggcttctgcaaggccacaggtaacaaccttacttatgtttccacgtgggcagcagagctgatcctcacattcacttgaagtggcaytcgttgtggctgtcccacctgcaagtaccttagatgctggcactgaagtatctcacccagact

SEQ ID NO: 339962 - DNA, 562 bp, Homo sapiens
ataaattttctgtatcatatttaagaatacagttaaatattggtgcatattagaaagatttcacttaaatatgactacatgaaagtagatttgtcttttctaaaaaataaacaagcatttgttttctaaaaaatttactggygtgcaccatttcatttcctaataattcagaataaatgaggtgtcaccgtggtccacttcaacagtagatgggcttatattcaggcaggaagcatgtcacctatacaacacagatgtgggtgattaatgaaaactaaatcatggggatgagatctttaagaagaagaaaaccaagttgtcttccagaagtgttttcagaaccccctgttttgaggttgtggatagacatgacggttttacaatgccaaaacagtctgttctaaagagaaaaagttcaatcaaccatttcacctgcattatgccgaagagctagtctttacagtcatggggctttaaaactattttgatagcctgtttgggctgcctctaaatatatcctccaaataaaaacctcagaaaatgtatcagagaaatgtacata

SEQ ID NO: 339963 - DNA, 562 bp, Homo sapiens
ataaattttctgtatcatatttaagaatacagttaaatattggtgcatattagaaagatttcacttaaatatgactacatgaaagtagatttgtcttttctaaaaaataaacaagcatttgttttctaaaaaatttactggcgtgcaccatttcatttcctaataattcagaataaatgaggtgtcaccgtggtccacttcaacagtagatgggcttatattcaggcaggaagcatgtcacctatacaacacagatgtgggtgattaatgaaaactaaatcatggggatgagatctttaagaagaagaaaaccaagttgtcttccagaagtgttttcagaaccccctgttttgaggttgtggatagacatgacrgttttacaatgccaaaacagtctgttctaaagagaaaaagttcaatcaaccatttcacctgcattatgccgaagagctagtctttacagtcatggggctttaaaactattttgatagcctgtttgggctgcctctaaatatatcctccaaataaaaacctcagaaaatgtatcagagaaatgtacata

SEQ ID NO: 339964 - DNA, 579 bp, Homo sapiens
gtcaactttgattttacatgtcccatccaacttgttaagccttctttgtggccattagtgtttactagagaataatatcatatttaattttctaattatgtgcgaaccttggagtcaggattagttgatatttttacaccttcaaatttataaacctagtatgaagtcccatctagactaacaaatgttttataatagaaatttaaatagtactccagttttgtttatgcatttgctgatggtctttcttgctatgaactttagaaactttaaatgtccatttactcacaatacacacacagcctcaatgacctaataagcagatttgcagagccataaccttgctggcttatgtcagctcgaagtaaarggggaggtggtagtggtgaatctgtttttattactcagtgtttaatcataatgaatcagaggcttttatgagaaaccttctacatcccatgaaagatttgctgatcaaagatgtagagatttctgttttattagaaaaaattgtttagcacctcattgtggatacagaagacattgtttgttgaaaagtttaagtctttttacgctaca

SEQ ID NO: 339965 - DNA, 591 bp, Homo sapiens
tctagtttaatgtacttgttgcttttccatggactttgaaaacatgaaggtctgtagccgtgttgttgcttttccatggacttggaaaacatgaagttgtgtagccgtgtgtctccagacttttaacagcccagaaatggtttcaatgttctgcattaaataaatcgagaagggttagacaaaacagtgtctgaaagatttcatgctgtgagggtgatgagggtgatgggtgacattaatgaatctgaaatggtcgtgactacaaacttgtttttaaaatgtcactttctctaagagaacaaaaacttgaaactcaatgttcatgaatacaagaaggccttttsaaagaaaggccacgggcactctcactaatacacacttggcatttgggtatatccctaagctgtggactgtgtttacatatattactctttcttctcatcactctttaaccaaattgttgagtgtccaagatgccacatggtcaatggattattaccctgtggattcaaatctgttaccaattactctaggggtttattgagtggtcctgcacacccactttcctttgtttttctaattatcgctgca

SEQ ID NO: 339966 - DNA, 601 bp, Homo sapiens
aacttggaaaagagctctccccttctcatccaaagaagtgatgacttctctttgttagtttacaactaacaaagtcccatttctggtttgaaagtcagatggaccttggcttatatttatttaacraagacgtggaatttctctaacagactgaaagtttattagaataacatctagcattaggcctggcaaataggaggtcctcgttaagagatctgatcagatttgacttctaatcccagatataaggtgtttattctttttgagccactatttcctcatctataaaataagaaatattcataactattccataatatgtattcttatatcctgtataataaaataactaatataggaatataataaataactaggaattataaataatataagattgtaataaatatccaaaatcaagggcctccttgaatttgttatatattgatttgttgattttttgagggcagtaatcaccacgtctgtccagatcagcgcggtgtccacgccccactcagcactgtgccttgtccatagcagatgctcagtcaatatttatctaatcagtgctgtttgtattcaaagagaatgtttaacttct

SEQ ID NO: 339967 - DNA, 561 bp, Homo sapiens
ttggcctctcttgccaggttggggaagttctcctggataatatcctgaagagtgttttccaacttggttccattctccccgtgactttcaggtacactaatcaaatgtaagtttggtcttttcacgtagtcccatatttcttaggggctttgttygttccttttcattcttttttctctaatctcgtcttcatgctttatttcattaagttgatcttcagtctctgatagtctttcttctgcctgatctattcagctgtcgatacttgtgtatgcttcgcaaagttctcatgcagtgtttttcagctccatcaggtctttatgttcttctgtaaagtggttattctagtaagcaattcctctaaccttttttcaagtttcttaccttccttgcattgggaggagcttgttattacccaccttctgaagcctaattctgtcaattcatcaaactcattctccatccagttttgttcccttgctggtgaggagtttgtgatcctttggaggagaagaggtgttctggtttttggaattttcaggctttttgcactgatttatc

SEQ ID NO: 339968 - DNA, 561 bp, Homo sapiens
ttggcctctcttgccaggttggggaagttctcctggataatatcctgaagagtgttttccaacttggttccattctccccgtgactttcaggtacactaatcaaatgtaagtttggtcttttcacgtagtcccatatttcttaggggctttgtttgttccttttcattcttttttctctaatctcgtcttcatgctttatttcattaagttgatcttcagtctctgatagtctttcttctgcctgatctattcagctgtcgatacttgtgtatgcttcgcaaagttctcatgcagtgtttttcagctccatcaggtctttatgttcttctgtaaagtggttattctagtaagcaattcctctaaccttttttcaagtttcttaccttccttgcattgggaggagcttgttattacccaccttctgaagcctaattctgtcaattcatcaaactcattmtccatccagttttgttcccttgctggtgaggagtttgtgatcctttggaggagaagaggtgttctggtttttggaattttcaggctttttgcactgatttatc

SEQ ID NO: 339969 - DNA, 578 bp, Homo sapiens
atagtgaggaggatgaggcatctattgttcttcccatttgatggatatagaaagtgaggccctgaaaggctagtcatggaggtgaataaccatctcagttgtttatcaccagggatcacttttcagcttgtgatgagattttgcgaagacagttttacagtatggaaaaagtttgaagatgcagactatgaggcatatgtttatgaggcaccaagagggatacaaatgaccaagattcactcagactaatggactgaaacttcagcagcatgggcagagttaattgcacaccccatgcgcatgtggccttgcacagggcacgtgcaatccttgatkggtctaatgagggcccctctgctgtgatcagagacccgtaattccttccttgtctggaaaacggggcttcaggctcccaatgttctcatgagtatctgtcacatgtggggtgcttttgctgtcttgagaagagttaaatctgtgctgcaatcttttctgatttttcattagatcttccatggcatctgtacaacttctgctttataaattgcattttttcaagtattttgcaaaatcttttg

SEQ ID NO: 339970 - DNA, 570 bp, Homo sapiens
ttcagcttgtgatgagattttgcgaagacagttttacagtatggaaaaagtttgaagatgcagactatgaggcatatgtttatgaggcaccaagagggatacaaatgaccaagattcactcagactaatggactgaaacttcagcagcatgggcagagttaattgcacaccccatgcgcatgtggccttgcacagggcacgtgcaatccttgatgggtctaatgagggcccctctgctgtgatcagagacccgtaattccttccttgtctggaaaayggggcttcaggctcccaatgttctcatgagtatctgtcacatgtggggtgcttttgctgtcttgagaagagttaaatctgtgctgcaatcttttctgatttttcattagatcttccatggcatctgtacaacttctgctttataaattgcattttttcaagtattttgcaaaatcttttgcattgcaatttgagagtgtttacttggctcgagattgtgaaaagttctactcttcctgagaagagaatctctgcttgagatttatcttagaagaaaaggaaacttacaagatt

SEQ ID NO: 339971 - DNA, 589 bp, Homo sapiens
tggggattctgatcatttaatttcctgaaattgccattgaaaaagaaaacacaatttggtgaatttagaattgcatacacgaaattatcatgtttattcttgagagaagaaaatttccatttgactagacatccayggaacttagtctcctggttaccttaccacatgtcgaatgcctggtagaactttccacaggctagcttttggctccatacatttcaaaacttgtcccatcaacactcatatgccattggtgcttgttgcacaaggacaaactcaggtcatcatacaatctctggcccttcatctttctggcatgacatcatgtgagtcagcacagtcggttttggcatatttctggaagccttttcaacactggaataccttacaataactttactagacatctcactatgccttaaatcaatgtatctttcactcaactttctctcagttcagattccgaaaatgttcagggccattccaaacctacttccacaagaggaatattttggacagaaaatcagagtgaaaaaaagactgccatcttagataattgtagtttaattatcttatcctgcatatttta

SEQ ID NO: 339972 - DNA, 589 bp, Homo sapiens
tggggattctgatcatttaatttcctgaaattgccattgaaaaagaaaacacaatttggtgaatttagaattgcatacacgaaattatcatgtttattcttgagagaagaaaatttccatttgactagacatccacggaacttagtctcctggttaccttaccacatgtcgaatgcctggtagaactttccacaggctagcttttggctccatacatttcaaaacttgtcccatcaacactcatatgccattggtgcttgttgcacaaggacaaactcaggtcatcatacaatctctggcccttcatctttctggcatgacatcatgtgagtcagcacagtcggttttggcatatttctggaagccttttcaacactggaataccttacaataactttactagacatctcactatgccttaaatcaatgtatctttcactcaactttctctcagttcagattccraaaatgttcagggccattccaaacctacttccacaagaggaatattttggacagaaaatcagagtgaaaaaaagactgccatcttagataattgtagtttaattatcttatcctgcatatttta

SEQ ID NO: 339973 - DNA, 474 bp, Homo sapiens
tgtcttcactgaggtgtgatggagagagatctccccaggccatagaggaaggaatgaatagtttggtctattcaaccagggcatcagcatattgcaagacataggctcccactttacagacatcattctcccgcaaagtgacattgtagcaccaattttcccccttttttaattggtctttactgccatgtctataagagaatggcttgcatctgaacacttcatttgtaaaggccggggacacatttttgtggtggtagctacacagggaagatcataagcaagagtccagcacacatgtggagttaaaaagagaaagaatggtggaagagaggcaccaagcccaacatcatgctttgatgctcttgttgggtttagasaggtaaaagacccagtaaaaagtgctgaattgtggaaataataggttgtccttgtatttaagggaagaaaaagctacaaagacataacaatgag

SEQ ID NO: 339974 - DNA, 493 bp, Homo sapiens
tcccataaaaaaactaaactacttccagttgtgtaaacacaacagattctttcagaccactatgccttggtgtatgtcaaccctcagctagraataacatttccatctctgtgattccattggcaatttctgctcaccttttcctaggttgaagtgccacttcttctgcaaaacttttcttgaatctcctttcctgttaccctcctgcacaattaaaaacttgcatccatttgatcccatagaatttatgctgtacttacatgacaggtacttacatcttttattttaactcatttatatcacttacaagactgtttttttctttaggacttggaatatgaccttttcatctttttcactgcagtctttttagtgtccagcatggagaaagtgctcaaaaatatttgttgagtgaatgacagtagagaaaataaaaatgtcctggattggaatcatgaaaactgtctacttatctctaatattaaaaagctca

SEQ ID NO: 339975 - DNA, 583 bp, Homo sapiens
ctgtctcccaggttggagtacagtggtataatcatagcccactataatctcaaactcctgtgctcaaagctatcctcctgtctcagcctcccaagtagctgtgactacaggagtacacaccatgcccagctaatgttttaatttttttgtagagatggggtcttgctatgttgcccaagctggtcttgaactcctgagctcaaacagtcctcctgcctcatcttctcaaagtgctgggattacatacatgaatgcacctggcctgaawgtactttttaaagaatactaaggctattgaatgaccacttggggtatcagagaggaacactgtgagtctgtggcactgtctgtataagggattatgtaagtaccactaagatggctctgttgaaaagtgagggagcatttagtttgtctgttttataagtagaggccatcagacttcataggaattcagacttaaaattcatgtgcctttgaatggggaccacatacatgtcacatcacactaacactaatgtttcattgattcattctatcccttcccaggaatcaaattctgattaagagaaagaccctaagt

SEQ ID NO: 339976 - DNA, 583 bp, Homo sapiens
ctgtctcccaggttggagtacagtggtataatcatagcccactataatctcaaactcctgtgctcaaagctatcctcctgtctcagcctcccaagtagctgtgactacaggagtacacaccatgcccagctaatgttttaatttttttgtagagatggggtcttgctatgttgcccaagctggtcttgaactcctgagctcaaacagtcctcctgcctcatcttctcaaagtgctgggattacatacatgaatgcacctggcctgaatgtactttttaaagaatactaaggctattgaatgaccacttggggtatcagagaggaacactgtgagtctgtggcactgtctgtataagggattatgtaagtaccactaagatggctctgttgaaragtgagggagcatttagtttgtctgttttataagtagaggccatcagacttcataggaattcagacttaaaattcatgtgcctttgaatggggaccacatacatgtcacatcacactaacactaatgtttcattgattcattctatcccttcccaggaatcaaattctgattaagagaaagaccctaagt

SEQ ID NO: 339977 - DNA, 530 bp, Homo sapiens
aggaaagggaagcctgagctattaaaaaaaacacattgcttcttacatrgtagtgctaaaggccaagcctgcatatccctgcaatctataaagtctgttttctctgacagtgtcagagttggaaagatcaataggtgtcactcacaccattcatcatctcagaaatgagaagatttaggaaaggagattgaaatgacttatgtggggtcacagaactagttattgttgagaccaaatttagagtcttgttcctggatctcagtattatactttaattatttcttttttaacatgtaacccaatttgctcctaatagacttggaatacacagtgcctgaaatgtaaagatgacttactcttggccttaaggcatcaaatctgccacacgaaattttaagataagcataatacatcattggaattactcctgcttcttgtacctctttcacatgagttaccatgaagtgaactctatcttttatggaggagaggatatggaggagcataggagaaaggtaccatgtgaaaga

SEQ ID NO: 339978 - DNA, 537 bp, Homo sapiens
atcttttcctcttaacattatttccatgtactacagttccctctccctaaagtggtctacttgcatttgtcaacactgaaagcaaaaacaaagttgaatatayacccatggtgcatattgttaataaagaagatggaggcaattcagtggtattctaattgtaatgataaaaacttacctatttcatcagttcctctcctttgcccctaaaccccaaatactcactttgtctcttagatatcttgaagtagagttaataactaacgagaataagcatctccatccatgaaatattttaaatatagtagtgtggacctaaaaagatagtgaaattggataggccatgaatagaacaagtcctcatgtcataggcaaacatccagaaagttgtgtgttttgcatttgtgttttgttgtttacatctgttgcataggaatgatcatagttacaacagctgacatttaatgaggacttttcatatgttagacactgtgctaagagctttatttacatgctttatctaatttaatctgtaca

SEQ ID NO: 339979 - DNA, 598 bp, Homo sapiens
ttatctacatataatctacattttggaatccaattgtcctttaaggtttgagttttataattaaatcattttgagatcatggttaacaaatacaagaataatagatgataatctgtagatgtcagctgggcgcagtggctcacacctgtaatcccagcactttgggaggctgaagtgggaggatcycttgagcccacgaagtcaagaccagcctgggcaacatagggaaaacccacctctacaaaaaaatagaaacaattagccaggcatggtgatgcatgcccatagtgccagctacttgaaactgaggtgggaggatcgcttgagctggagaggttgaggctgcagtgatctgaggtcgtgcccctgcactccagtctgggtgacagagtgagacattgtctaaattataataataataatgtgtagattttaagggttttaacaagtcagaaggaactttcttccaccttccacgtcacagtcatgcactggccttatgtttatgttcaactcccatcaagattcagccagcagatggtgaatttaaagtcaaacagcaaagaggaatctataattccaagatgatttatgcttt

SEQ ID NO: 339980 - DNA, 587 bp, Homo sapiens
catttcttgaatgtatgctatgtgatagacactgggctcaattataggaacaaagccatgaacagtaaaacacagtctcattcctaatagcgtataggctggatagtaagaaatattacataaataattacatacataatattctatatataaatgtaccaatgatggctggacgcggtggctcacacctgtmatcccagcactttgggaggctgaggcaggtggatcacctaggtcaggagttcgagaccagcctgaccaatatgatgaaaccccatctatactaaaattacaaaaattagccaggcatggtggagtgcacctgtaattccagctactcgggaggctgaggcaggaaaatctcttgaaccagggaggtggaggttgcagtgagcagagatcgcaccactgcattccagcctgggcaatagagcaagactctgtctcaaaaaacaaacaaacaaataaataaatataccaatgataactacgataaatgcagagtttagggagttatataagcacataccgaggacttaaaactcatcataaaggttttcccagatgctgatgggtgatttagaatt

SEQ ID NO: 339981 - DNA, 587 bp, Homo sapiens
catttcttgaatgtatgctatgtgatagacactgggctcaattataggaacaaagccatgaacagtaaaacacagtctcattcctaatagcgtataggctggatagtaagaaatattacataaataattacatacataatattctatatataaatgtaccaatgatggctggacgcggtggctcacacctgtcatcccagcactttgggaggctgaggcaggtggatcacctaggtcaggagttcgagaccagcctgaccaatatgatgaaaccccatctatactaaaattacaaaaattagccaggcatggtggagtgcacctgtaattccagctactcgggaggctgaggcaggaaaatctcttgaaccagggaggtggaggttgcagtgagcagagatcgcaccactgcattccagcctgggcaatagagcaagactctgtctcaaaaaacaaacaaayaaataaataaatataccaatgataactacgataaatgcagagtttagggagttatataagcacataccgaggacttaaaactcatcataaaggttttcccagatgctgatgggtgatttagaatt

SEQ ID NO: 339982 - DNA, 564 bp, Homo sapiens
ttttctgaatataatggaggatttaaattgaaataatttggtaattgagtaagacagacatttagttccatcagtattcagtgaaagaagagatagtttctggaagatttcttctcatcgcatctaatgtttgagcagtttatattttagtattttctttcttttttctttacgaggcttggctttcccgtttatatttcctagaagtgacacctcctaggaataagaagtcttggctaccgaaacagtttactgaattgtagcttgaagctgcagtcaataaaattcaatcatgttcaaagggacatttaycaatcattgttagtcataattttaaaattcaaaaatcagtcactgtgaagatacatgaaagaagacaaagaatgtgcccattctttaaatatccacaaactagtaaaaattttctgtaatttctctgttgtttccttctccctccaccagatttcccttgatatttcataacatgtataaattttggaggagagagttttgtgtatacacacaaaaaaattattacttatgaataagtaggtcacctattat

SEQ ID NO: 339983 - DNA, 550 bp, Homo sapiens
agcattgtgatgctttctaaaaggaatatcttataaaccctatttcacagcagaatttccaaatctgtatagagactaccacaaaattggacaaggattggcaattctttgtaaagaatttgtgaacggtgtataaatctcttctaacatttaataaaaatttattttagcctaacaaaaagaatgttaataatttattataaatgctatatatagattaacattattgattatatattagtaatatttagtactatatattgctaattagtattaatattactgacttactctttatataggactatatattctataggactatacatagtrgtaatatatagtcctataaatagagtaatatatagtcagtaatatcaatctaaaatgttatatagaattatatattatagaattatatattatatcatatataataattatataatatgatatataatacattatcataacatattatgtattattaatatgataatattacatgttattaatatatgttattaattttttatataatattataatc

SEQ ID NO: 339984 - DNA, 549 bp, Homo sapiens
ttcagctcttctgaataaacaggacatagtctcttctcagtatattaagaaaggcccaggaacactatccagtaaagaccacggctgaaatacagtttctactgatacacgtgatagaaattacaggtgggaaaatgagttgaaattaaatatttgtaaacaaaataaacttctccccaattcatttgtcaattttttttcctttatgatcacattcccaactagaagtcagcattttttggagttaatttagatttccaaggatatttcccaaaattgccatgagattcattactcaatatgcaagaaaaattaatgtactaagtttttacttacatgagtgcaattttaatatttaaagattatggggaagaaatatcattgtacttttctaccatattctgtggaaawagaaattgagagcattttctgcaagttttagaaatgtctcattggaaaagttaataaaaccaaagaatcaacacaattctatagttttcttgaggctaaaattgtgagctatgtgtttcctttttaagacagaaacag

SEQ ID NO: 339985 - DNA, 527 bp, Homo sapiens
tctgctaggcgcatctcttttgcttyttgggatattgattacattcggtcctgtacaccattggtagactcccaaaagttgaatgaagtatggaataggcacttgtgataatagcttcaggtccgtgtcaaagtgcttgaatgacaagcagcaaaaagtgaccagcagctcattggcaagagctttaaagaggctgtgttcacctcgatccagtgagtttttctggagttggatcattggatcatatttctctattaagagaggaaaaaacatataaggaagacagtaaaactctaggatgtttttcgttgatatcaataagtatacatttaaaaataaaatagacagatgtatttgacattaaaaaagaaacaaacaaaataaaagagagtccgttatagggcacagaattaaaaagttcgtctgcaaagaatcacagtgcataattcaggactatgtaaattaaacactttgttatggagaatttgctatgttactctgttttgcagattaactccaaagtatga

SEQ ID NO: 339986 - DNA, 527 bp, Homo sapiens
tctgctaggcgcatctcttttgctttttgggatattgattacattcggtcctgtacaccattggtagactcccaaaagttgaatgaagtatggaataggcacttgtgataatagcttcaggtccgtgtcaaagtgcttgaatgacaagcagcaaaaagtgaccagcagctcattggcaagagctttaaagaggctgtgttcacctcgatccagtgagtttttctggagttggatcattggatcatatttctctattaagagaggaaaaaacatataaggaagacagtaaaactctaggatgtttttcgttgatatcaataagtatacatttaaaaataaaatagacagatgtatttgacattaaaaaagaaacaaacaaaataaaagagagtccgttatagggcacagaaktaaaaagttcgtctgcaaagaatcacagtgcataattcaggactatgtaaattaaacactttgttatggagaatttgctatgttactctgttttgcagattaactccaaagtatga

SEQ ID NO: 339987 - DNA, 580 bp, Homo sapiens
tctgcctctcgggttcacgccattctcctgcctcagcctcctgagtaggtgggactacaggcgggcgccaccatgcctggctaattttttttgtatttttagtagagacggggtttcactgtgttagccaggttggtcttgatctcctgacctcgtgatccatccttctcggcctcccaaagtgctgggattacgggcgtgagccactgtgcccggattattatacccattttaaagtgaagaaacagactcaatgtgattaactcgtttcttagagagcaaagtttgcaaatccatgttggttcaaacacaaatctcttgttctaaattackttgcaatgataaatttctccgtgactgtggcttcttaggtttaaatccattcatttcttcatgacccatctcaaggtcactttctgcacaaacatttgtaattcccccaagcacatcactcctagattttaaacctcttctttccttatttacttcactcctgaaacccttgtcatttctcttcttgtattatttgcccttattttctacattccttgatgagctgtttgtgacttccctgaagacc

SEQ ID NO: 339988 - DNA, 580 bp, Homo sapiens
tctgcctctcgggttcacgccattctcctgcctcagcctcctgagtaggtgggactacaggcgggcgccaccatgcctggctaattttttttgtatttttagtagagacggggtttcactgtgttagccaggttggtcttgatctcctgacctcgtgatccatccttctcggcctcccaaagtgctgggattacgggcgtgagccactgtgcccggattattatacccattttaaagtgaagaaacagactcaatgtgattaactcgtttcttagagagcaaagtttgcaaatccatgttggttcaaacacaaatctcttgttctaaattacgttgcaatgataaatttctccgtgactgtggcttcttaggtttaaatccattcatttcttcatgacccatctcaaggtcactttctgcacaaacatttgtaattcccccaagcacatcactcctagattttaaacctcttctttccttatttacttcactcctgaaaccyttgtcatttctcttcttgtattatttgcccttattttctacattccttgatgagctgtttgtgacttccctgaagacc

SEQ ID NO: 339989 - DNA, 526 bp, Homo sapiens
aaaatagttgtgaattacattgtgagacaatgattcccttttcaatttctttcaaacttctgatcaaatcaggcagaagcctcagtctggtgacaggagtctttcaaaattccctggcattgctaaactctcttctttaacccagaggaagaagatctcaaattcagagcctgggcaggtgacagcatttagccagaactctataacactgcttgcactgagattatttttaargtcactttttttgtggcaattgatatgttttcacacacaggtgttatacaatatttcttttatgatagaaaatacaaaatgatgggtcaatatatggaaagaatgttaaattatagttcatatattcaaaaagagcaaatatcaggaagatggtatccaaatgactgaaattggtgaactcatttaggcaaagtgccagtcactttccatcttatctactttaatgaaacatttattatactaaatatttattattattattattattattattacaattttgagatggagt

SEQ ID NO: 339990 - DNA, 322 bp, Homo sapiens
tcaccatgttggccaggctggtctcgaactcctgacctcaggtaatctgcccgccacggcttcccaaactgctgggattacaagcgtgagccaccrcacccggccagcattcagtttctaggaaaagggttctctatctcttttggccctatgtcctcaaaaaaagacagtggagatttgtgcattgctcattgttgatttcagaagtggacaccgtgttggagtctataaaatatttgagcagctgacttgcttaggtaagaaaaaagacaaatttttgtcagttaaaaacaaatgtccaaattctctgcatagaaaaaga

SEQ ID NO: 339991 - DNA, 582 bp, Homo sapiens
actataccttgagaactcctgggaaagaaaatagaatggaggcaggcaggaccaaaccagaggctataactcaaagccatctctcctttttatagaaaatgtttacttaatcctctcaataacctttaacaaagttagtgtttgccatcagtgagttttttacattattattccttttctaaagaaatacatcatctacttttctttttgagacggaggctcactctgtcacccaggctggagtgcagtggtgctatctctgctcactacaacctctgcctcctgggttcaagcgattctccctgtctcagcctccctagtagcggggattacaggtgccccaggcgcccatcaycatgcccggctaatttttgtatttttagtagagatggggtttcgccatgttgaccaggctgatctcaaactcctgacctcaggcgatctgctcgccttggcctcccaaagtgctgggattacaggcatgagccactgcgcctggcccatcatctacatttttagaggttagagtaagaggggaatttttttcaaaaaacatgcatataaacatatgcgtgtgtgtgt

SEQ ID NO: 339992 - DNA, 533 bp, Homo sapiens
tagggataatgaaacttgatgcttgtcagctataagaagaaagaaagataacatgtacaaagtacctaaaacatatcacctgctcagttaactgttgccaatattataataatatagacgaatggcttgagtcctaggattctggtaactgctgtgtcctttgatcactactttgggttccagttctattctactttcctattttgtactatatttaatctattaatttcattgtgctatatagaaggagagagtacaataacttctaaataagtaattgaacaatgaagatgtaggaatttttggatgtctctgtgtgtgtgtgtgtgtgtgtgtgtgtgcrtgtgtgtatatatatatatgtgtgtgtgtgtgtaaaacaagaacatatccatgacatctgaatgccaataggttccttactacatttcactcagcttatatgacaaataggacttctcagaaagttttactgactagttttacagttctgtaaaattcctctgttataattccagtgctttttaaatctc

SEQ ID NO: 339993 - DNA, 533 bp, Homo sapiens
tagggataatgaaacttgatgcttgtcagctataagaagaaagaaagataacatgtacaaagtacctaaaacatatcacctgctcagttaactgttgccaatattataataatatagacgaatggcttgagtcctaggattctggtaactgctgtgtcctttgatcactactttgggttccagttctattctactttcctattttgtactatatttaatctattaatttcattgtgctatatagaaggagagagtacaataacttctaaataagtaattgaacaatgaagatgtaggaatttttggatgtctctgtgtgtgtgtgtgtgtgtgtgtgtgtgcgtgtgtgtatatatatatatgtgtgtgtgtgtgtaaaacaagaacatatccatgacatctgaatgccaataggttccttactacatttcactyagcttatatgacaaataggacttctcagaaagttttactgactagttttacagttctgtaaaattcctctgttataattccagtgctttttaaatctc

SEQ ID NO: 339994 - DNA, 402 bp, Homo sapiens
ccaagacagaatgagcctgccattgtatgccccaggactcagaggagatctatgcaaaggtgaaggaagacctattccttactgactcctccttgtcctcttctctacttttggattttctagtgcaggacaatgaatgaacaggattcctagatatatttaccattgtcttcatagtcctagcactgttcaaataaagatagcagaaaagctagaaacagaataaaggtaattaaagaaatctagaactcaaaagtacctstattagtataatgtgtttaatatggtattgtgatatatgcaggtataacataacaaatttctgccttaaccagattgtgggaaaggaagccagcatctgctgaacacctgcctcatgcctgtcaccctgttccatgccag

SEQ ID NO: 339995 - DNA, 480 bp, Homo sapiens
acccaatctgtggaaatctgctatagcagtttgtgtaagccaatgtatctttttatttttcttcagcagtcaatcctttaaagtaggagagatctattgcactgtgtagccatctggccatcctttctyttcccattccctgagaatatctttattcccccgatccccaccttagagagattggtgtgagtgggaaatatgtctgagaggtttatctggatcattctcatgttcagaaattctctttccctttgactaaatctccctcttgtacctgttgtgtgaatgtggagtggagcaaagtatggggtgtgtggaggacaaatcctaaggactatgcctcttttttgtacaaataataacttctcattccatgttaacacacattttcctgttttgagaatgccacagcctcggtggctttcttggctattccttcctggcttaatcatcacagttctgtaagtgccagagaagcat

SEQ ID NO: 339996 - DNA, 480 bp, Homo sapiens
acccaatctgtggaaatctgctatagcagtttgtgtaagccaatgtatctttttatttttcttcagcagtcaatcctttaaagtaggagagatctattgcactgtgtagccatctggccatcctttctcttcccattccctgagaatatctttattcccccgatccccaccttagagagattggtgtgagtgggaaatatgtctgagaggtttatctggatcattctcatgttcagaaattctctttccctttgactaaatctccctcttgtacctgttgtgtgaatgtggagtggrgcaaagtatggggtgtgtggaggacaaatcctaaggactatgcctcttttttgtacaaataataacttctcattccatgttaacacacattttcctgttttgagaatgccacagcctcggtggctttcttggctattccttcctggcttaatcatcacagttctgtaagtgccagagaagcat

SEQ ID NO: 339997 - DNA, 425 bp, Homo sapiens
ggtgtgagtgggaaatatgtctgagaggtttatctggatcattctcatgttcagaaattctctttccctttgactaaatctccctcttgtacctgttgtgtgaatgtggagtggagcaaagtatggggtgtgtggaggacaaatcctaaggactatgyctcttttttgtacaaataataacttctcattccatgttaacacacattttcctgttttgagaatgccacagcctcggtggctttcttggctattccttcctggcttaatcatcacagttctgtaagtgccagagaagcatgctgaactcaatgatttgtgaatcctgttcctgtatacaggggcaagtgtgaaatgaggtgaatagtcacttggggctacaactgatattttatagagtacctaaaatcaagcacatcttgccacgt

SEQ ID NO: 339998 - DNA, 425 bp, Homo sapiens
ggtgtgagtgggaaatatgtctgagaggtttatctggatcattctcatgttcagaaattctctttccctttgactaaatctccctcttgtacctgttgtgtgaatgtggagtggagcaaagtatggggtgtgtggaggacaaatcctaaggactatgcctcttttttgtacaaataataacwtctcattccatgttaacacacattttcctgttttgagaatgccacagcctcggtggctttcttggctattccttcctggcttaatcatcacagttctgtaagtgccagagaagcatgctgaactcaatgatttgtgaatcctgttcctgtatacaggggcaagtgtgaaatgaggtgaatagtcacttggggctacaactgatattttatagagtacctaaaatcaagcacatcttgccacgt

SEQ ID NO: 339999 - DNA, 489 bp, Homo sapiens
tttagctcccacttataaatgagaatgtgcagtatttagttttctgttcctgtgttaattcatttaggacaatggcctccagctgcatccatgttgctgcaaaagtaatgattttattcctttttatggccacatagcattccatgatttatatgggccacattttctttatccaatcaactgttgatgagcatctaggttgattccatgtctttgctaatgagcatagtactgtgatgaacatacaagtgcatgtctcttttttaatagaacaatttatattcctttgggtatattcccagaaataggattgctgggtcaaatggtagttctattttaagttctttgagaaatctccaatctcctytccacaatggttgaactaacttgcgttcccaccaacagtgtgtaagcattccgttttctcaacaactctgccaatatctgttactttttgactttttaataacagccattgtgactggtgta

SEQ ID NO: 340000 - DNA, 489 bp, Homo sapiens
tttagctcccacttataaatgagaatgtgcagtatttagttttctgttcctgtgttaattcatttaggacaatggcctccagctgcatccatgttgctgcaaaagtaatgattttattcctttttatggccacatagcattccatgatttatatgggccacattttctttatccaatcaactgttgatgagcatctaggttgattccatgtctttgctaatgagcatagtactgtgatgaacatacaagtgcatgtctcttttttaatagaacaatttatattcctttgggtatattcccagaaataggattgctgggtcaaatggtagttctattttaagttctttgagaaatctccaatctcctttccacaatggttgaactaacttgcrttcccaccaacagtgtgtaagcattccgttttctcaacaactctgccaatatctgttactttttgactttttaataacagccattgtgactggtgta

SEQ ID NO: 340001 - DNA, 489 bp, Homo sapiens
tttagctcccacttataaatgagaatgtgcagtatttagttttctgttcctgtgttaattcatttaggacaatggcctccagctgcatccatgttgctgcaaaagtaatgattttattcctttttatggccacatagcattccatgatttatatgggccacattttctttatccaatcaactgttgatgagcatctaggttgattccatgtctttgctaatgagcatagtactgtgatgaacatacaagtgcatgtctcttttttaatagaacaatttatattcctttgggtatattcccagaaataggattgctgggtcaaatggtagttctattttaagttctttgagaaatctccaatctcctttccacaatggttgaactaacttgcgttcccaccaacagtgtgtaagcattccrttttctcaacaactctgccaatatctgttactttttgactttttaataacagccattgtgactggtgta

SEQ ID NO: 340002 - DNA, 499 bp, Homo sapiens
cattctttccttgctttgtttgtgcattttgtccagttctttgttcaagacgccaagaacctggacaccttcaactggtaacatattttggtgagccttcaaccagtaacaacactttttgatctttgccaatcctacaggcagttctgtgctaaataytatagggtcagaaactttttcccacccactaaccaagtcctttacctctagcacttcaaatccctattcacaacttccctcgcctcacagatgctccttggcctcccccccgggactatggtgctcatcctggtgacccagtagcctgctagatgacagactcagggctggtggccacacaggcctggaagcaggctctggcctttggggcagggaaccccagggtccctcattcagagcgtgatctaaaaggttgtgtgtgtgtgtgtgtgtatgtgtgtgtgtgtgtgtgtgtgtgtgttgtgtgtcccctgggtgagcacatcgcctggaggtagcc

SEQ ID NO: 340003 - DNA, 499 bp, Homo sapiens
cattctttccttgctttgtttgtgcattttgtccagttctttgttcaagacgccaagaacctggacaccttcaactggtaacatattttggtgagccttcaaccagtaacaacactttttgatctttgccaatcctacaggcagttctgtgctaaatattataggstcagaaactttttcccacccactaaccaagtcctttacctctagcacttcaaatccctattcacaacttccctcgcctcacagatgctccttggcctcccccccgggactatggtgctcatcctggtgacccagtagcctgctagatgacagactcagggctggtggccacacaggcctggaagcaggctctggcctttggggcagggaaccccagggtccctcattcagagcgtgatctaaaaggttgtgtgtgtgtgtgtgtgtatgtgtgtgtgtgtgtgtgtgtgtgtgttgtgtgtcccctgggtgagcacatcgcctggaggtagcc

SEQ ID NO: 340004 - DNA, 533 bp, Homo sapiens
tatggaagcacaacccaccttggactctaatgtgaacaagaaataaactttaccatgataagctagtgagagctcagtattgttaccacaagtgaggcaattctacacagactaatgcaattattaatagcatattgagatccaatttttttgtaccattaaatataataaaagtatttatgtaatattgtttatttcatctttttgtcacaattttaaatttccattttccatgtcttataatatatgtaatgtatttctacagtagtgtawctatatatctgtttggattgcatgctaaaggtactttttcttgataaccaaataatagaaaacatttggagataattaacttaaatatatgctttataaacaaattttcatcaccaactgcttaaatagccataggatacctttagacttattctcacaaaactatataatatatttaagctctaagcaacaagaaatgaatgtcatttacatcttacatccacacacctctcctaatctttagttgatatgggtcacca

SEQ ID NO: 340005 - DNA, 533 bp, Homo sapiens
tatggaagcacaacccaccttggactctaatgtgaacaagaaataaactttaccatgataagctagtgagagctcagtattgttaccacaagtgaggcaattctacacagactaatgcaattattaatagcatattgagatccaatttttttgtaccattaaatataataaaagtatttatgtaatattgtttatttcatctttttgtcacaattttaaatttccattttccatgtcttataatatatgtaatgtatttctacagtagtgtatctatayatctgtttggattgcatgctaaaggtactttttcttgataaccaaataatagaaaacatttggagataattaacttaaatatatgctttataaacaaattttcatcaccaactgcttaaatagccataggatacctttagacttattctcacaaaactatataatatatttaagctctaagcaacaagaaatgaatgtcatttacatcttacatccacacacctctcctaatctttagttgatatgggtcacca

SEQ ID NO: 340006 - DNA, 534 bp, Homo sapiens
caataagttgactacatgatatagagaggtagagacaggtttcgttatgcttaaaagcctcttagtttgaatatcagctagaatttcctgagaattgtcactttaaagtatttgtaytcaaaagatactactcatatcacctagttaattttttaaagttcagtgaacctatattatatcctttgattgtgtataacacaaatttgagttttccttatatgacctaacttattcaggaaaacatttttgacttctgttttaatattcatgacccatggaagtagtaattttttttagtaactgattatgtgggggcagggcgggggcggataaatgccctgatttgtagcatttgcccatttaggtggtgtagataatcctcccatggccaatttcaagctactaacatgacatcattaaaagcagagtgggagaggatgtctcatagtaaaccaaacaatacatagtgttctgatcatgcagataccatggacacataatttcattactaggtattttgcctaggtattttat

SEQ ID NO: 340007 - DNA, 534 bp, Homo sapiens
caataagttgactacatgatatagagaggtagagacaggtttcgttatgcttaaaagcctcttagtttgaatatcagctagaatttcctgagaattgtcactttaaagtatttgtattcaaaagatactactcatatcaccwagttaattttttaaagttcagtgaacctatattatatcctttgattgtgtataacacaaatttgagttttccttatatgacctaacttattcaggaaaacatttttgacttctgttttaatattcatgacccatggaagtagtaattttttttagtaactgattatgtgggggcagggcgggggcggataaatgccctgatttgtagcatttgcccatttaggtggtgtagataatcctcccatggccaatttcaagctactaacatgacatcattaaaagcagagtgggagaggatgtctcatagtaaaccaaacaatacatagtgttctgatcatgcagataccatggacacataatttcattactaggtattttgcctaggtattttat

SEQ ID NO: 340008 - DNA, 407 bp, Homo sapiens
attactaatcacgttcatcttgagagaggatctttgcaagtgctttatgtgcaatatctcatttaatcctcacaccaagtccacaaagtaggaactgtgattgtccccatttttcagataagaaaactgaggcttagcaaagttaagcacgctgctcaggtttacatagctagaaaggaaagagttccactctgaacccatgagtgttaccaatgcccctgttctccacctctcctctctatttaatctatacaatcactctgccagccagctactgtggtcactcccattttacagayatggagatggaaagcccagggaaattatttgcactcaattcctgcactattcactaccatgttgggaccgacaactcatatcctgactcgttactgtgctttccatga

SEQ ID NO: 340009 - DNA, 648 bp, Homo sapiens
cttccgtcttgcttagttaatctaatctgctttatgtagcacaaaataaacacaacccctaattagcaggttcatgctgcagctgaattctcaaacgcgcttcacagattccagcctcagcattcccagagaaggcccaggatctccctgagaggcccagttggtgtttgtggaatcatcactcctctggtgatcacgcagtttgcctcactttctaccatggagctctttgctaaaggacattctcctccaggtcagtgctccagccagccagccccagcctggagggtctgcttaaatgagatgggaggggtaacatggtgcattgacatgctgggctgaatctcaaaccaaggcaggggcagccttcctgaatgtcaaacctggaaaagggggattctgtcattccttcwttcattcagcaactagttacagagcacgcactctctgttaggtggcagagggagctagagctacatcatcagggttcaaaccctggctctaccgtctccgagctctgtggccttgagcaagggacttactgctttgtgcctcagttgctccacccataaaatggtgataatgaaagcacacatgttaaaaggaaacgtgaagattaaataaggcataaagagttaggacagcccc

SEQ ID NO: 340010 - DNA, 525 bp, Homo sapiens
catcactcctctggtgatcacgcagtttgcctcactttctaccatggagctctttgctaaaggacattctcctccaggtcagtgctccagccagccagccccagcctggagggtctgcttaaatgagatgggaggggtaacatggtgcattgacatgctgggctgaatctcaaaccaaggcaggggcagccttcctgaatgtcaaacctggaaaagggggattctgtcattccttctttcattcagcaactagttacagagcaygcactctctgttaggtggcagagggagctagagctacatcatcagggttcaaaccctggctctaccgtctccgagctctgtggccttgagcaagggacttactgctttgtgcctcagttgctccacccataaaatggtgataatgaaagcacacatgttaaaaggaaacgtgaagattaaataaggcataaagagttaggacagcccctagcacacaataagcaccttacgagagcccatgctgcatgaaggcagaactgt

SEQ ID NO: 340011 - DNA, 648 bp, Homo sapiens
cttccgtcttgcttagttaatctaatctgctttatgtagcacaaaataaacacaacccctaattagcaggttcatgctgcagctgaattctcaaacgcgcttcacagattccagcctcagcattcccagagaaggcccaggatctccctgagaggcccagttggtgtttgtggaatcatcactcctctggtgatcacgcagtttgcctcactttctaccatggagctctttgctaaaggacattctcctccaggtcagtgctccagccagccagccccagcctggagggtctgcttaaatgagatgggaggggtaacatggtgcattgacatgctgggctgaatctcaaaccaaggcaggggcagccttcctgaatgtcaaacctggaaaagggggattctgtcattccttctttcattcagcaactagttacagagcacgcactctctgttaggtggcagagkgagctagagctacatcatcagggttcaaaccctggctctaccgtctccgagctctgtggccttgagcaagggacttactgctttgtgcctcagttgctccacccataaaatggtgataatgaaagcacacatgttaaaaggaaacgtgaagattaaataaggcataaagagttaggacagcccc

SEQ ID NO: 340012 - DNA, 525 bp, Homo sapiens
catcactcctctggtgatcacgcagtttgcctcactttctaccatggagctctttgctaaaggacattctcctccaggtcagtgctccagccagccagccccagcctggagggtctgcttaaatgagatgggaggggtaacatggtgcattgacatgctgggctgaatctcaaaccaaggcaggggcagccttcctgaatgtcaaacctggaaaagggggattctgtcattccttctttcattcagcaactagttacagagcacgcactctctgttaggtggcagagggagctagagctacatcatcagggttcaaaccctggctctaccrtctccgagctctgtggccttgagcaagggacttactgctttgtgcctcagttgctccacccataaaatggtgataatgaaagcacacatgttaaaaggaaacgtgaagattaaataaggcataaagagttaggacagcccctagcacacaataagcaccttacgagagcccatgctgcatgaaggcagaactgt

SEQ ID NO: 340013 - DNA, 466 bp, Homo sapiens
aggaacacaggaatgaataagtcagatgtgatctctgctttcatttatcagatgagaggaatgttaaacaactaataaatgtttgctgaatgatcaagcgaatgaactaattacatgattatttaattacagctgtgaaggaaaagcccaacaaaaggcagggtactttgttctaactgaggatgtctactgacacagccaagctgtwaagcagaccacggacggcagtgcagcggggagaacaactctacatctggttggaggtggagtaatgtccagtctgggcacagagagatggcaggtgtgcagctgcactcagcatgggatagaggtacctgatctaaccacagagaaggggtgggtcaggagagcttcctgggctgaatgttaaataacagaattgaagtcaattgagccaaggcaagggtaggctgtttcccctttacttcctgtgaatctcaacatt

SEQ ID NO: 340014 - DNA, 477 bp, Homo sapiens
gaagtggtttcctgatgggaagggaaacagagagtttatctrtttcctttggaacctgtccatgcaaagcaatgtcaaagactgggctggggtacaaaaggcattaggcagggacccagagggcaatgtgcagaattctggccacagcccccagaatgtgttgttactggctatgtccattcttatttggcaagcagtctttggacaggcgtttggttttcaggctgggcttgatgtgtcctgggtcaggagggaaaggctggtggccatgctggatcacagggcttgaggctggggggaggctgcagagcttggcagggttccagcagtggtgcgggctgaagggagtcaccaccgggaacccaggcccgggcaacaagaggttctctcattctggcttctccctccagcaccacctgccaggccagaacagaaagaagggcgacggagactggcagagaaacagcaattactgct

SEQ ID NO: 340015 - DNA, 477 bp, Homo sapiens
gaagtggtttcctgatgggaagggaaacagagagtttatctgtttcctttggaacctgtccatgcaaagcaatgtcaaagactgggctggggtacaaaaggcattaggcagggacccagagggcaatgtgcagaattctggccacagcccccagaatgtgttgttactggctatgtccattcttatttggcaagcagtctttggacaggcgtttggttttcaggctgggcttgatgtgtcctgggtcaggagggaaaggctggtggccatgctggatcacagggcttgaggctggggggaggctgcagagcttggcagggttccagcagtggtgcgggctgaagggagtcaccaccgggaacccaggcccgggcaacaagaggttctctcattstggcttctccctccagcaccacctgccaggccagaacagaaagaagggcgacggagactggcagagaaacagcaattactgct

SEQ ID NO: 340016 - DNA, 619 bp, Homo sapiens
tctgccaacgtaattaacctcctctcacctgtttcctcacctgtacaatttggaataaaaatatttacacccttgtgaggcatctgctaggatcgcccgacataagggctcagcacagagcctggctaatgataaacaatgaattgcagccactgtgattaatgctgtcatggttgtaatgattactgctgttatcagagaaggagacaagaaatcagtatggagaactggctctcatgtaggtttcaggacagcatccacaacctctctggaccccagtttcctcatgtttaaaatagacataaaaatagtagcaaactcatagtgtaactgtgagggttaatgacttcacacacttaatgtgcttagaacagagagctatggatttatcactggatctcctaagacagtttccctcatcccctcacagatccacaaccactcctgtgtttcttcctctsacgttctcctctatacaatctctcttggtccctgttttccatttaaaaggttcttctggtatttctccaacttgcataatagcttctagttttccaatctcatcgaacagtctgtttgcacctgcaaaagtcaaagaactgaaatatttgatagatcc

SEQ ID NO: 340017 - DNA, 595 bp, Homo sapiens
ttcccagctcacttgcatggttgttggcatgaatcagttccttgcaggctgttgcactaagggtcttagtttctcactggctgttggccagaggttgctctcagttcttgccacatggacctatgtaacatggcttctgacttcaccaaagcaagcagtccaagaaggctatagaaagagttccgcaggatgcaagtcacagccttttgaaacctaatatggaagtgacatcccatctctgtcaccatgttcttcatcattttttcaatccttcctcatatggaagcaagttagaagcaagtcaataggggagaggattacccgaggggtgaatactggaggcagggatcattggaaacgtgtcaaatgttgcttattacagagtatcagctccttttcccattttgagaagctgttactttaccttatgaggaacatttttaacaggaatgcctttcagcactgaatcaacagatccacttcaaggtgaccttgcaagtgatgagtctttacattctaaaattgttaagtcagttctactggctgcatcctstctctgcttcagacccaggctcagagagcaggacagctggaa

SEQ ID NO: 340018 - DNA, 573 bp, Homo sapiens
ttggctttgtagtccagaggctatactgggcaaacatcagaggaagggtgttttgcacctgttttcagggctactgtggggtgatgcttttgctgtatctcattcctgaagggctgcctcaccctattgagaggaacaaacstcaagggcagtgccaagcttgtctgctggcatcaggtggagggtgcatggtggaggaggctcttgcattcatttctgcccagcctcttttctcctgccctgcaatcaggttcaagctttccctgtatactgtaataacacaagcctggcaatggcacaattgggaaacaagtcatgtttgttccatggcatctttattccatagtatcccacccctggacactctaccctgtaactcggatccatcccctggtctccccacactagctcttggtctctttctttccttttaaaaaaaaaaatccttaatagatcctcccatataaaaactcatcctacctcttactgtcctttcaagaatcttttccatgggaagaaaatttaacctaatgggcattaatgggtgggaatgagtttgttgaattgccttcc

SEQ ID NO: 340019 - DNA, 573 bp, Homo sapiens
ttggctttgtagtccagaggctatactgggcaaacatcagaggaagggtgttttgcacctgttttcagggctactgtggggtgatgcttttgctgtatctcattcctgaagggctgcctcaccctattgagaggaacaaacctcaagggcagtgccaagcttgtctgctggcatcaggtggagggtgcatggtggaggaggctcttgcattcatttctgcccagcctcttttctcctgccctgcaatcaggttcaagcttkccctgtatactgtaataacacaagcctggcaatggcacaattgggaaacaagtcatgtttgttccatggcatctttattccatagtatcccacccctggacactctaccctgtaactcggatccatcccctggtctccccacactagctcttggtctctttctttccttttaaaaaaaaaaatccttaatagatcctcccatataaaaactcatcctacctcttactgtcctttcaagaatcttttccatgggaagaaaatttaacctaatgggcattaatgggtgggaatgagtttgttgaattgccttcc

SEQ ID NO: 340020 - DNA, 609 bp, Homo sapiens
ttactagaggctcaacacaggagcagcaagggtccatggaggaaattcatcttgcagttgatcctggagctgatgtcttcctttttgtagggaacgtagatgggcttcagtttcactatctataaaatggcaataatcatggtacttgccttcttgggttgttgtgaaaatgtaatttagttagattatattaaatgtaaagttctgggcataatgcttacccacagcagactttcaataaatggattataaatttaaaattacaaacacataaagttattatccttctttgtkaaaagcagtaagaatcttccacctgagtcagacctcctatttatttgcctgggattctgtctttgaaagtaacatgaaggggcatgctgtggatgacagtatgaaagtcatcttaactgaccttttactattaaagtgcctgaggtccaacaagcgttcagtaagggatagattccatcttgtccctccccacctttgtgggccaactgtgagacattgtagatatttagtggcctttaagcaccttggtatgcatgaaatatcaatacactcaactacagagtatattttttgtgtatctcaaggcacagccag

SEQ ID NO: 340021 - DNA, 622 bp, Homo sapiens
ttccttcacccatccttggtcatctttaagatagggccataaaaagcaatataaatttgaaggtcagaaagccctgggttcaaatccctgctctgccatttccgatatgggtgacttaaagcaaattgattaacctcgtagaagctcagtttccttgtctataaagtagagataaaaatgactgcctggtrtggtagtcagtcttcctcttttggaagtttgggcttcctgctgaaagtcctttcaaaatatatctatgaagttccaggaactagggcttgaactgccgatgatgcatgctgtcaaccaacgtaacagtaatcattgctatcatcagtgaaatgtcactgggctttttgtgtttgtttgcgtggtcctgtatctattctttttcttttatcgcaccaaatctcaccttatctcactgacacagcctctcctcctcatcttcctcttttgggaaaggttcagaatggcatagggattaaaaaacgttcaatttggagtcagatattttgccatttttgactgtgtaactttatccaagatagctaccctctatgagcttgccttcctttgtctataaaaaaggagtgaaaatacctacctcccttcataggat

SEQ ID NO: 340022 - DNA, 622 bp, Homo sapiens
ttccttcacccatccttggtcatctttaagatagggccataaaaagcaatataaatttgaaggtcagaaagccctgggttcaaatccctgctctgccatttccgatatgggtgacttaaagcaaattgattaacctcgtagaagctcagtttccttgtctataaagtagagataaaaatgactgcctggtatggtagtcagtcttcctcttttggaagtttgggcttcctgctgaaagtcctttcaaaatatatctatgaagttccaggaactagggcttgaactgccgatgatgcatgctgtcaaccaacgtaacagtaatcattgctatcatsagtgaaatgtcactgggctttttgtgtttgtttgcgtggtcctgtatctattctttttcttttatcgcaccaaatctcaccttatctcactgacacagcctctcctcctcatcttcctcttttgggaaaggttcagaatggcatagggattaaaaaacgttcaatttggagtcagatattttgccatttttgactgtgtaactttatccaagatagctaccctctatgagcttgccttcctttgtctataaaaaaggagtgaaaatacctacctcccttcataggat

SEQ ID NO: 340023 - DNA, 499 bp, Homo sapiens
ctgcgctctaagccaggaggcaacacaaaataaaggtggccagagggaactaatgctgggttagagtcttctaagggcctgaaatcgtgctatgacatctacgtgcaggcatttactttattcagaaagcaactctgataattagaatttagaattttaatttgagaaatgaggagagtgtggctcagagaggtaaatcaactgtgctaaggccacacagctagccaatagcagagccaggattgagtttgggctgtctgatgccaatgcccacactaggccaaccttacagtttgtgatttgtctctggatgttagagagcaggaagtgtctaaccctctgggggagacaccaggctccattgcccagctcctccccactcatggggtaggcttttgttagaaaatgcrttgccctgaacccaaagctagtagaggcgcctcaaggaatggaaacactgctggtctggctttgtgttctagctctgctgtttgtgggc

SEQ ID NO: 340024 - DNA, 525 bp, Homo sapiens
tcaagcttttggggcatctctgggggctccgggcatcctttagggcaggataagatacttacaataaactctctctttgagacatggattgggtcttcacttaatgtttttgactcttcatatttttttttcagtttcaagttttgacagccctggagcttaggcactaaatcagcaacagaataggattctaagatgtttgattagggattagacctctgacacatggcttgcccagagctggctgatctaatacatctcagaatccaggaagaaagggaccatgtaccacaaagcctaatgcctcattgtgaagagaaaaatgaaggccctgtgctggtgtggatttacscagcactaaagcaatagttctcaggtcagagcccaggttttatgtctcctagtctatagatctgcatcagtagcacctacaagacagggttgcttcataaccaagttccattcagagccaatcatatgtattaatggtgtggtcagtaagatgtcaaggaatctctgtctatc

SEQ ID NO: 340025 - DNA, 617 bp, Homo sapiens
gagaaccgccactacaatggaagatctggagttaagcttgcctgggttcaaatctgggctctgccagttaccagatgtatgaacttcagcatgcctgagcttcagactcctcctgtaacatgaagagaatagtaataactacctcacagggttattgagagagttaagggaggtaaagcaggaaaaatgcttagcattgggcttggcaccttgcaaataaatattaagcaaatcaattaaagcaaagcaaatatatttaataaattaaatattgaacaaataaatattagctgctactgtaatgtcgttctttagatacattccctgtcttcacctgttcacatggaggccagctgcagcctctgcaatcaggagcccgtccccacctgaacccccgacccctacccctccagggaagatgagcggctgtgagaagcctggcctacccattctgtggcgggggcttyggggagtgcagtgacaagagccaccagcagggggaagcataaacacatttcagggcatagcgctggtgatccttgagggtggggcgctctctgggggaatgggctgaggctgggatcagcgtttcttctcgaattttccccccactgtgg

SEQ ID NO: 340026 - DNA, 617 bp, Homo sapiens
gagaaccgccactacaatggaagatctggagttaagcttgcctgggttcaaatctgggctctgccagttaccagatgtatgaacttcagcatgcctgagcttcagactcctcctgtaacatgaagagaatagtaataactacctcacagggttattgagagagttaagggaggtaaagcaggaaaaatgcttagcattgggcttggcaccttgcaaataaatattaagcaaatcaattaaagcaaagcaaatatatttaataaattaaatattgaacaaataaatattagctgctactgtaatgtcgttctttagatacattccctgtcttcacctgttcacatggaggccagctgcagcctctgcaatcaggagcccgtccccacctgaacccccgacccctacccctccagggaagatgagcggctgtgagaagcctggcctacccattctgtggcgggggctttggggagtgcagtgacaagagcmaccagcagggggaagcataaacacatttcagggcatagcgctggtgatccttgagggtggggcgctctctgggggaatgggctgaggctgggatcagcgtttcttctcgaattttccccccactgtgg

SEQ ID NO: 340027 - DNA, 510 bp, Homo sapiens
ctagtgtgtgcccagtatgttgccgggatccatcgctgtccttttacatatgtttactcctacatcaatcaaatctgtaaagcccagtggctgaggttaaagcccatgcttttcttcctactccrcactgcctcgaaacccttggaagtactcttctcctatttccctaatctttcaaattattcaaattcccatttgttctccaattaaaggtcccctcctccctcttcatccaagagtcctttggtgagagcttcggtagtggcttgatcacattctgaatttgagatttgcttgtaattagcagtcttgaaaacaccagttctttgctaggctctgctcccaggaacccaggagtcaggacatctgaggaagggctacatgcatcactgatctctcccttaaccacccctttcataggtatctggaataagctcaaatttcattgattttcctatggtgataaattgacagcccgccttttttttccacagaaattaatgccagtaa

SEQ ID NO: 340028 - DNA, 510 bp, Homo sapiens
ctagtgtgtgcccagtatgttgccgggatccatcgctgtccttttacatatgtttactcctacatcaatcaaatctgtaaagcccagtggctgaggttaaagcccatgcttttcttcctactccgcactgcctcgaaacccttggaagtactcttctcctatttccctaatctttcaaattattcaaattcccatttgttctccaattaaaggtcccctcctccctcttcatccaagagtcctttggwgagagcttcggtagtggcttgatcacattctgaatttgagatttgcttgtaattagcagtcttgaaaacaccagttctttgctaggctctgctcccaggaacccaggagtcaggacatctgaggaagggctacatgcatcactgatctctcccttaaccacccctttcataggtatctggaataagctcaaatttcattgattttcctatggtgataaattgacagcccgccttttttttccacagaaattaatgccagtaa

SEQ ID NO: 340029 - DNA, 510 bp, Homo sapiens
ctagtgtgtgcccagtatgttgccgggatccatcgctgtccttttacatatgtttactcctacatcaatcaaatctgtaaagcccagtggctgaggttaaagcccatgcttttcttcctactccgcactgcctcgaaacccttggaagtactcttctcctatttccctaatctttcaaattattcaaattcccatttgttctccaattaaaggtcccctcctccctcttcatccaagagtcctttggtgagagcttcggtagtggcttgatcacattctgaatttgagatttgcttgtaattagcagtcttgaaaacaccagttctttgctaggctctgctcccaggaacccaggagtcaggacatctgaggaagggctacatkcatcactgatctctcccttaaccacccctttcataggtatctggaataagctcaaatttcattgattttcctatggtgataaattgacagcccgccttttttttccacagaaattaatgccagtaa

SEQ ID NO: 340030 - DNA, 558 bp, Homo sapiens
gcctgctcctcccactgcctggcaacacagtcagcttgcccaggctgctgccttccggatgtcagttgaacactcctgacaatatgctccatggcttaggtcagggtccagggtccgtgtcgctgaactctaagatcagggactggaagaggccttaaagccctcmgtcccttcttatttggcagacggggaaactgagacttggggatatggcatcagcttgccatattccttgctcagccacccttctctgcaatagagattggaattttgtcatccctttgctgtagtactctatctgcaacctttcggcttcaatattttatatcttgacaaaaggacttgacctggggcaaaagattaaacaggaagctctggagtgttcattttggggaaacagcatggcttttggggaagagcaagaaagcttggacagcccagggcaaccccgtcttgttagtaataataatgacttccatgtttttaaggtagttacatggtggtcagcacatagatgccagaaccagtctgtctgagtttgaactccaactctcccac

SEQ ID NO: 340031 - DNA, 585 bp, Homo sapiens
aactggaaggtctttgaagtcagggattttgaccattttgttaatgatgttttctccagcgctcagcacacagccaagcacatrgtatggactcaatgactgtggcatgcgtgagtatataggtgggaaggaggatttcctggcgggttctgattttagaatttacctggtacagctgagcttcactgagctgctaccctgtgccagccgcgggcagtgcctgacatctgccatttcacttcatcttcacagaagccttatggatgggaaagctaggtcttagagagattaagaaacttatctggtcaccagcttataggtaggtggtagagcctgaggactgtgctttcttctcctggacagaaagtgctgcctgagccctcccctgtacccagcctgtcagggaggcctccctgggtggtttctgagctggctgctttgcagggctagaaggcccatccctcctcacctgcctgtgtctgtgggaggctcttggcaagggtgctgtgtcaggcggcccaagtgctttcagcacttgggggtggcaggctaatttactggcctgctgagcagctggtggatgac

SEQ ID NO: 340032 - DNA, 585 bp, Homo sapiens
aactggaaggtctttgaagtcagggattttgaccattttgttaatgatgttttctccagcgctcagcacacagccaagcacatagtatggactcaatgactgtggcatgcrtgagtatataggtgggaaggaggatttcctggcgggttctgattttagaatttacctggtacagctgagcttcactgagctgctaccctgtgccagccgcgggcagtgcctgacatctgccatttcacttcatcttcacagaagccttatggatgggaaagctaggtcttagagagattaagaaacttatctggtcaccagcttataggtaggtggtagagcctgaggactgtgctttcttctcctggacagaaagtgctgcctgagccctcccctgtacccagcctgtcagggaggcctccctgggtggtttctgagctggctgctttgcagggctagaaggcccatccctcctcacctgcctgtgtctgtgggaggctcttggcaagggtgctgtgtcaggcggcccaagtgctttcagcacttgggggtggcaggctaatttactggcctgctgagcagctggtggatgac

SEQ ID NO: 340033 - DNA, 493 bp, Homo sapiens
acacagccaagcacatagtatggactcaatgactgtggcatgcgtgagtatataggtgggaaggaggatttcctggcgggttctgattttagaatttacctggtacagctgagcttcactgagctgctaccctgtgccagccgcgggcagtgcctgacatctgccatttcacttcatcttcacagaagccttatggatgggaaagctaggkcttagagagattaagaaacttatctggtcaccagcttataggtaggtggtagagcctgaggactgtgctttcttctcctggacagaaagtgctgcctgagccctcccctgtacccagcctgtcagggaggcctccctgggtggtttctgagctggctgctttgcagggctagaaggcccatccctcctcacctgcctgtgtctgtgggaggctcttggcaagggtgctgtgtcaggcggcccaagtgctttcagcacttgggggtggcaggctaatttactg

SEQ ID NO: 340034 - DNA, 585 bp, Homo sapiens
aactggaaggtctttgaagtcagggattttgaccattttgttaatgatgttttctccagcgctcagcacacagccaagcacatagtatggactcaatgactgtggcatgcgtgagtatataggtgggaaggaggatttcctggcgggttctgattttagaatttacctggtacagctgagcttcactgagctgctaccctgtgccagccgcgggcagtgcctgacatctgccatttcacttcatcttcacagaagccttatggatgggaaagctaggtcttagagagattaagaaacttatctggtcaccagcttataggtaggtggtagagcctgaggactgtgctttcttctcctggacagaaagtgctgcctgagccctcccctgtacccagcctgtcagggaggcctccctgggtggtttctgagctggctgctttgcagggctagaaggcccatccctcctcacctgcctgtgtctgtgggaggctcttggcaagggtgctgtgtcaggcggcccaagtgctttcagcacttgggggtggcaggctaatwtactggcctgctgagcagctggtggatgac

SEQ ID NO: 340035 - DNA, 534 bp, Homo sapiens
ggcaagggtgctgtgtcaggcggcccaagtgctttcagcacttgggggtggcaggctaatttactggcctgctgagcagctggtggatgactggggattgtctgaagtctgcctagaaccatggcctggggcagggctccttccagcaacttccctggagagctggctgcaaggcagggccaaaccagccatcatgatagtgtgaagggcattttctgtcaaaagaggatgttggacaagagttggaaagacttgagttctgatcctggctttgccactagctagttgtataaaactgarcaagttactgagcattcctggttcccactgcttacaaaatgggagcagtaatcatgcttacctcccaaacttgttgggaaaatatatgcaatgtgattagcccaggtgcaaaaataaatgttagatattttatgtttattatgatttattattagctacagcccccctcatctgtaaaatgagaggtttcattcagtaaccacaggcctggcactattgagcagtaggtgctca

SEQ ID NO: 340036 - DNA, 543 bp, Homo sapiens
gagggagcaggacacatacattccttcttcctctctccatggactgcttcatgacagtctgccttgcmgctcatccagctgaatcccacgtgtcatgctgaaaggtcttgtgcagtgaccttctgggtgtctccatggctgtttgtgacataatagccatcaaggaaacacaccacttagtgtggctttgcatccttctttgcctcgcttccttgtgtctcacctttgctgccatggatttgcatcttccaaatgaaacatctcactttcaatttttgccccaggctctatcttctagagaagctagcctaacatacatataggaagggcagccttcccactcagcccagggtgtggtggaacttcatttaggctgcatgtgaaaattggccacctgctttgctgtaaatgtgatttgtggttctctactgtccaactgctgtaggaatggcccccacctgagagatgcaatggccattccagcttgctggccagtacaggccttccttcttctctctctccccactccatctgcatgacccg

SEQ ID NO: 340037 - DNA, 543 bp, Homo sapiens
gagggagcaggacacatacattccttcttcctctctccatggactgcttcatgacagtctgccttgccgctcatccagctgaatcccacgtgtcatgctgaaaggtcttgtgcagtgaccttctgggtgtctccatggctgtttgtgacataatagccatcaaggaaacacaccacttagtgtggctttgcatccttctttgcctcgcttccttgtgtctcacctttgctgccatggatttgcatcttccaaatgaaacatctcaytttcaatttttgccccaggctctatcttctagagaagctagcctaacatacatataggaagggcagccttcccactcagcccagggtgtggtggaacttcatttaggctgcatgtgaaaattggccacctgctttgctgtaaatgtgatttgtggttctctactgtccaactgctgtaggaatggcccccacctgagagatgcaatggccattccagcttgctggccagtacaggccttccttcttctctctctccccactccatctgcatgacccg

SEQ ID NO: 340038 - DNA, 628 bp, Homo sapiens
agcaatgagttttcctgtcagggggttcctgacctgtgcccaccaggattctcctctgaggacagaggtcagtcccaccaggggcagagaaaagaatgagttgccctagtcctaatcagaagcctgcagcaccacaacagcccggggggtcagctgctggaggctaacccagaatggggagaggagggtagtggagccccaaagaccagccatgcaggctctcattctacactcagcagccttcctcctgtagggcaggctatgcagggcaagtgttcaggaatctaggtcatccagtggttttccaccaggtttcacatcagtattacatcttccagagactcaggaaacmcggggtggggtctttgtatccttataattaataagctccacagatgactctgatgcatgacctgcgttgagaacgtctacatttagatcacaagttttgcaccacacacatataggtttcacccctggctcagctacaatgatatgtgtggcattaattctgtgtcttagtttctttatctgtaaaatggggacaactttactgggaagtgggaggattaaatggcatatcagcctttcctaacaaagagcacatattcattagtgtgtagtaaat

SEQ ID NO: 340039 - DNA, 628 bp, Homo sapiens
agcaatgagttttcctgtcagggggttcctgacctgtgcccaccaggattctcctctgaggacagaggtcagtcccaccaggggcagagaaaagaatgagttgccctagtcctaatcagaagcctgcagcaccacaacagcccggggggtcagctgctggaggctaacccagaatggggagaggagggtagtggagccccaaagaccagccatgcaggctctcattctacactcagcagccttcctcctgtagggcaggctatgcagggcaagtgttcaggaatctaggtcatccagtggttttccaccaggtttcacatcagtattacatcttccagagactcaggaaacccggggtggggtctttgtatccttataattaataagctccacagatgactctgatgcatgacctgcgttgagaacgtctacatttagatcacaagttttgcaccacacacatataggtttcacccctggctcagctacaatgatatgtgtggcattaattctgtgtcttagtttctttatctgtaaaatggggacaactttactgggaagtgkgaggattaaatggcatatcagcctttcctaacaaagagcacatattcattagtgtgtagtaaat

SEQ ID NO: 340040 - DNA, 519 bp, Homo sapiens
aggtgctccagtgatagagacattaaggagytgaggtgagacttagaatctggtccagccccaggcttcacctccggaactctaagccactgacttaggatgtaccgtgtcacatctaacctctcctccctcggtgaaaatataggcatccatttgcttttgtaataatacgagtattgaatatctttgtccatgtgactttaagcatttgtcttattatagcctttggataaaatcctgaaagacaaaatttttaagtttttataaaggagagcctttatatctattgggatttgcttttgctaaataggacagaggaagtcaaaatagcaattgtttaaatagacaaatgtttatttttatataagaagttgggaggtgggcagagctgatactgtgccccatgaagtggaagctggccccttccagcttaccctctgatttccctagaatacggtttttatcctcatagtacaagatggctgctagaactacagccatcacatccaaatttcaagc

SEQ ID NO: 340041 - DNA, 581 bp, Homo sapiens
aagacagggaaaattacttaccctctgagccgcagtctcctcatctataacatgggtctcataacgttacattgcaggctcatttgggggcctaaatgataaaatctgtgtcaagtacctagcttgttctctccttttttcccctattttctccctagaagtctaggtaatacagatttctgactggagcagcagggcaacaccacatgtttcttttctttctaggaaaarggctatttatttctgatgacctagttgagaggcagcagggtcagggaaaggatgtatctttgaaaatggtttcttttagcttcctataacttgagggtaatttctcatgccctagttaggtgggtgttaggaggacatcttaggaggatgttggcagctggagtaggggtaggttggaattctgcagaaagcatacaccttccttcccaacaggtttataagccagtaatcagccctctgtgggtatatcagctattaactgtctggtaatggggggataacaggctgcttgctgctctgctttgaggattctgtactaaagaggacagacacaggcctgccttcaaggg

SEQ ID NO: 340042 - DNA, 525 bp, Homo sapiens
tctctgttttaattccagcttcatgcccaagctgcggaagtctaaacaagtgggcatttttagctgaaggaggtggggaggatcggggatgcgtgaggaatgtctgcacagaactgcgagtttcactggggtgcgtgtgtttgtctgagatgagtggaggaatggccgtggccatttctcacctctgtaaagaaaatcctgggcccctgtcttgagctaaggacagggatggggccctgctctcaagggcaggtgggtctgggacatagcattctctgcacagagagaccacggggcagctggcctccagttatgacccatgccaatggcatgcccttcygctgccctggggggccaggccccagccactgaccagctcagaggcagatgccgccgccccctgacagtgacaggcacagccagatggaagagcggcttttgggagcagggagaggggagggagtgtgccgtctcttctgcaagggcagtgccccagcctcagccacacttctgatctgcagtcca

SEQ ID NO: 340043 - DNA, 605 bp, Homo sapiens
ttgctttattgcagttaggaataatctgtgactggcttcttggcagcaaaagccaaactcctttgtttggctgtgaagactctgcaaagcctgagcctacttactggtttgttatttcaaagtgtattggatattggatactattacatgccaggtaatttgctggatgctttcacatwtgttgctttatttaaccttcaccctaatcctggggcttaaatgttacactactcatttatagataaagaaactgaggctcagaggtgtcagcttgccccaggtgttaaagctgatgagagtaagagctttgactcagtgtccagtgctcctcgctgacctcacttctccattttccacttttttctcccttaaccgtcctctcctcacctgcccctcccaactgcttcagctaaactctgcccagtcccagctccttgcctttcctcttgctgttgttccaagcaggcactcaatgttagtctcatccaaatctccaagccctgtcctattccctgttaattcttcaaagtgcccacagagggggacctcaaaggtcacttggaagtggaagcactctaaattacctctgccaagagatatgacac

SEQ ID NO: 340044 - DNA, 605 bp, Homo sapiens
ttgctttattgcagttaggaataatctgtgactggcttcttggcagcaaaagccaaactcctttgtttggctgtgaagactctgcaaagcctgagcctacttactggtttgttatttcaaagtgtattggatattggatactattacatgccaggtaatttgctggatgctttcacatatgttgctttatttaaccttcaccctaatcctggggcttaaatgttacrctactcatttatagataaagaaactgaggctcagaggtgtcagcttgccccaggtgttaaagctgatgagagtaagagctttgactcagtgtccagtgctcctcgctgacctcacttctccattttccacttttttctcccttaaccgtcctctcctcacctgcccctcccaactgcttcagctaaactctgcccagtcccagctccttgcctttcctcttgctgttgttccaagcaggcactcaatgttagtctcatccaaatctccaagccctgtcctattccctgttaattcttcaaagtgcccacagagggggacctcaaaggtcacttggaagtggaagcactctaaattacctctgccaagagatatgacac

SEQ ID NO: 340045 - DNA, 602 bp, Homo sapiens
cttaacccaacactgcaggcttcctgccacatcagctgattgtaccccttgccccaaaggaaggartaagcagttacttcttgcacactgtctccactcatggctcagctcttttccttgtcagtcttggagtctctaatgaaagggtatggctggactgagaatacttttgagggacagggaagtaaacagactcatggagcaggatttgagatgggaactcagattacagacttcataatcacagcttggaagagaagcgtcgtgtgtaaagggaaccaagaagaaaaggtacatcatgtcctttcgaaacatttcagcaaagattcttcaaacaagataactgaccacagaaccctagtcttgcttctttattattcttactattatgctagatcaggaggctaaatgcaatcccaagagctactgtgtattgatggcttactttgatccagggactgtgctgtgcacatcaatgcattatctcagtgcaaaaccagaacctcccccaattctcccattttacagctgaagaaaaaacaataacaaccctggttacccatcaatagcaggcagttttcaaattcatctctggcctcaaa

SEQ ID NO: 340046 - DNA, 493 bp, Homo sapiens
ttacagacttcataatcacagcttggaagagaagcgtcgtgtgtaaagggaaccaagaagaaaaggtacatcatgtcctttcgaaacatttcagcaaagattcttcaaacaagataactgaccacagaaccctagtcttgcttctttattattcttactattatgctagatcaggaggctaaatgcaatcccaagagctactgtgtattgatggcttactttgatccagggactgtgctgtgcacatcaatgcattatctcagtgcaaaaccagaacctcccccaattctcccattttacagctgaagaaaaaacaataacaaccctggttacccatcaatagcaggcagttttcaaattcatctctgrcctcaaagacttctctgcaccaccacgctctgcattccagcagagcaaatgagaggcttggggactgttcagagctctgttgttcaaataaacagaactcatgctttcactgcacgaacatagg

SEQ ID NO: 340047 - DNA, 551 bp, Homo sapiens
atacaaaatatatcaagaatgagtctgtagaaacacaatgaacaccttctgcagaggggagagagagaggtagagagggaagaagagcaggtgaagggagggtgaaggtaaggaaaagtattacaggtgagggaatagcatgggcaaaggtctaaaggcaagatggagccatcaccagttcattcatcctggcgctgcagttggtggtttgtaggttagtctttcctggagacactaagtgccttgaagacaggaatcatgtgtaccccaagggctaagcagagactaaccactgcatgcctcacccagccttaactgcggagggaggrggttattaccattaaatatctagaatcaattgaacaaatgattattggccatgcaagcctctgtgttctcaaaggttctactctacactcaaagcttgagaggaaggtagaaagagttgctcagtgggtccatattggctctagtgccaagactggacctctgtttaagtcatgcgtcactgaaatctaccagtaataacagctaactataactgagccctt

SEQ ID NO: 340048 - DNA, 564 bp, Homo sapiens
ttgattccaaaaaaggatttgaggaggcttaaaatatataagttaacaaaagataataacctatatttggatgaggaagtcagaataaagaggaaaataaagggatggggaaatcagattttgcctaaggcagtgggtgccacgggctcattcatgctacatagatgtgggctacagttgcagctctgagctttctatacaatgaattccctttgaagtctcagaaatctcttactgctttataatgcaggtataagcagaaacaacttttcacaggtaacatgcatcagagcttgaagagctttgtcacagcctgttgatatccagttytcaaatgaccatcagtcttagggaggaagtctagaggtcaatcagcttcagagcagcagaatgtgggcacttgttccatttccagcaaatggatggatggataagtagatggatggatggatggatggataagtggatggatggatggatggatggatggagcagtgggtggatggataagtggatggacagatggatggatggatggggcagtggatggatggatggatggat

SEQ ID NO: 340049 - DNA, 581 bp, Homo sapiens
ttcaataaataccatccatcatcaccaaaacataggggcaatgtcttctacagagtagctggcatgcaagaaatgttgataagaaagccacaatggaggaagcaccatactacaaatccagagaacctaggtctccattctgacagatacacgtgactcagccaaccaacttcatttcactttggtcatatctgtagcattgtatttattcacttattggattgcattcgatccatttatacctgtgtctcttcctaacacatatcctctaaggggagggatcactatttctttctgataggactacagttggtgcttcataagcatttgctggaataaagttgttttgaagggttttagttggattgggtaaggagtmtatttaactgggtattgataataagaaactaaactaaggtcagttacaggaatattgcaataatccagatgagggatgataggaaaccaagctatagggagattgaagtggagataaaggaactaattgtgtagataaatttatgttacaagtgacaagaattggtaagtaatttagttgcaaggaaagagtcactaaggat

SEQ ID NO: 340050 - DNA, 581 bp, Homo sapiens
ttcaataaataccatccatcatcaccaaaacataggggcaatgtcttctacagagtagctggcatgcaagaaatgttgataagaaagccacaatggaggaagcaccatactacaaatccagagaacctaggtctccattctgacagatacacgtgactcagccaaccaacttcatttcactttggtcatatctgtagcattgtatttattcacttattggattgcattcgatccatttatacctgtgtctcttcctaacacatatcctctaaggggagggatcactatttctttctgataggactacagttggtgcttcataagcatttgctggaataaagttgttttgaagggttttagttggattgggtaaggagtctatttaactgggtattgataataagaaactaaactaagrtcagttacaggaatattgcaataatccagatgagggatgataggaaaccaagctatagggagattgaagtggagataaaggaactaattgtgtagataaatttatgttacaagtgacaagaattggtaagtaatttagttgcaaggaaagagtcactaaggat

SEQ ID NO: 340051 - DNA, 634 bp, Homo sapiens
aatagacacaataacatttatttttacaaaaagaaaagaaaggccagatgcagtgtctcacgcctgtaatcccagcactttgggaggctgaggtgggtgggtgatgagatcatgagttcgagaccagcctgaccaacatggtgaaaccccatctctactaaaaatgcaaaaattagctgggcgtggtggtgcatgcctgtaatcccagccactcaggaagctgagggaagagaatcgcttgaacccgggacacagaggttgtagtgagccgagattgtgccactgcactccagcctgggcgaccgagtaagactctgacaaaaaaaaaaaaacctgtcagaaccagactcacaaagccattttgagttgccaactgtcttagagaagataaaaagatrtgcttctactctgccaacagactcctagcacagagactcgagcacagaaaacaatttctaaaaacggtctgtcagtcctcagttgtgttactcaagtgggcagatcattgtctgtccctctttgctatctttctatatctattgagaggcaaaaaataatcagaggaagaatgaagagaggagggggatagttgtcatgcactgacaatggcagtataagctgagatgagtagacc

SEQ ID NO: 340052 - DNA, 612 bp, Homo sapiens
ctttagtagatattgacaatttttaaaagtatttgtaccatagctttaccaactgttaatctttatcattttagcaacacaagtgagtgtatatttaaacatattcaagatttatttctgcttaagtgtgtcatacatacatcatatttgatcattggtcaaactcaaaagagaaatgtctataacatggtagattttttactaaatggagcaatgaatggtggccaatgaagtaatgaacggatggtgaatgtgattgtagaacacacaagaatcatatcttccgatctattaatcaaatctgaaagtatttatcgagtctctgtgagtgcccgtacagaatggtgctgattaatatgccagggcatgtccccatctgttgtcatctgcttcccaaacctcctacacatttacatgtgtgcacacaataagcaktttgcccatatttacacagtaaactttttaaaatgtagtaaatacagtatttcacaacatacaaaatttcacattttgaatggaagacattttccagagaatagggagcctttgatgtaagagaaaggaaaacaaacaaataaaaaatctgtcctttgtgatatggggcattaatca

SEQ ID NO: 340053 - DNA, 562 bp, Homo sapiens
ttagaaatcaaagtctgggctccagggatctccttgtcactggggactcattgcctcttggcccttaagatgggcagagcacatacatacacacactcataaacacacacatacccacatggatacatatattcatactgatacacccaagaagaggatacttcctctcttcttttcattcgtaktttgtttctgcattctctgcagtgagaacactggtttccatgaacaatatacttagttccttgattaatcctataatactcaaaatccagcaatactacacccatacccagcaatactattccaacaagaaacttaacaaattaatatttctttgggattcattttacttttaaaatatattccactaagggaagaaagctagagctccatctataaaatctacctggactactatttttttcttctttgtagttattttataaatttgctgtatattttgggtcatttaatcttgggggttttccttcacccttttaaatttatttctcctattggaatacgtaaaacattaatatggctcaaaataaaatctaca

SEQ ID NO: 340054 - DNA, 606 bp, Homo sapiens
tttttcacggacatggttgggggaattgtgcaggggggagtggggatggtttcaggatgaatctgttccacctcagatcatcaggcattagctggagcttgcaacccagatccctcacatgcacagttcacaatagggttcatgttcctgtgagaatctaatactaccactgatctgacaggaggcagaactcaggcagtaatgctcacttgcctgccacttactttttgccatgcagcctgsttcctaacaggccacagactggtaccagtctgtggcccagcagtggggacccctgtggtagaccaaacaatggtccctaaagaatccaagtcctaattctcagaagctgtgaatgttcccttacatggtaaaagggactttgcagatatgattaagtgaagaaccttgagatggagagattatccaggtagatcaaatgaaatcacaagggtccttaaaagagggatgtaggaaagtcagacagagaagaaggccatgtgatgacagaagcggaaagaaagatgatgagctaaggaaggagcacagcctctagaaactagaaaagagaagggaagggattatcccctagagcctccagaagtg

SEQ ID NO: 340055 - DNA, 648 bp, Homo sapiens
aatgtgacagaaaagaaaaacccattttctagggagaaattcaagcagctgcagaaatttgcataagtaacaaggagccaaatgttaatcaccaagacaatggagaaaatgtctctaaggcatgtcagaggtcttcamggcagcccttccaatcacaagcctggaggcccaggaagaaaaaatagtttcatgggccaggcccaaggccttgctgctttgtgcggtctcgagatttggtgtcctgcaacccagccatggctaaagggggccaacttactgctcaggccattgcttcagagcaggcaagccctaagccttggtggcttacaagtggtgttgggcctgtgggtgcaaaggattcaagaattgaggtttgggaacatctgctgagatttcagaggatgtaaggaaatgcctgatgtccaggcagaagtgtgatgcagggatggagccctcatggagaaactctgctagggtggtgcagaaggaaaatgtggggtcagagcccccacagaaagtccccacaggggcactgcctagtagatctgtgagaagaagagggccactgtcctccagatcccagaatgacagatccattgacagcttgcaccatgtacctggaaaagccacagaaaatcaacaacagcc

SEQ ID NO: 340056 - DNA, 528 bp, Homo sapiens
ctaggttcagcacagaggatttttagggcagtgaaactatcatttgtaataacgtaagggtggatwaatgacattatgcttttgtcaaaacccatagaactgtacaacacagagtgcaccctaatttaaaataggtattttagttaacaatatgtatcaatactggttcataaattgtaacaaaccacttcatgcaagatgttaataacagagaaatccataaataagagagagacgaggtacatgggaactccatattatctgctgaatttcctgtaaacctaaaatttttccaaaatagtcttaattttaaaaaacccacttccaaaatcaggttaacaaggaaatgataaggaaaattagaaaatattctgaattatatgaaaataaaaacataaaatttcaaaacttttgagattcaactaacgcatatttagaggggaaatttacagctttgaacccttattcaagaaagaaaaaaacatgtatctaaaatcaattatctaagcttctatcttaaaaagctag

SEQ ID NO: 340057 - DNA, 588 bp, Homo sapiens
attgtctgaattgcaaaaatcattaaaagtctctttctctggattgatgaagcagaaacaaacttaactttatttttaatagaaaatttccttgattttacccaggaaatttgtgagtcaatgcctctgtataggtttttacaaagattgttaggaattagggtatatttgaggctcagggtagtggaaagaatcaatatacttgggtcattaaaagcaagtcctaacccaaatctcctgcaccacaaagggaacttccaactcaatttccaactgaatatggttgatagacacatacaaaaaaaatgatgacacattctttcttgctaataattgttgtaaataccccatctgcacatgatatcagcaggtgctctgcaggcagaggtaattgaatatgatgtatcaagtttagattcctgatttggaatactaaacctctggcartatgatctaattctatattttcttgcctcattttctgcctccttctacctacctacatcttatccataacagaaacaaaaccagtctccaaatattcctctaagccttattcttcaggctgtcccctatgagacatacagc

SEQ ID NO: 340058 - DNA, 568 bp, Homo sapiens
ctaccttaaagatcttccctctttctctctggcgcgcgcgcgcgcacacacacacacacacacacacacacacacacacacaygcaaacatggcctttaaaattcataagaaattagttctaccgatggtgatgggtaacaagagagatactttggtagagcatacctactctcaagatagatcccatcaacatagatgcccagagcaagagaattttacctagtctgaataatcagtttaaagtgcctttcttagatcctcacagaaaacaaaaatagtgttttcataataagaagagagaataaaaccagggcagtaagtcaacatgccaggaaaaaaatctgaaagttgtagatattagagctgttccatcttgagaaacttgaagggaaaaacaatacctagcacccagacatattaaatgaaaccctatgtcactgtgtacaaaactgagggaaccatattttgtctattttttagttgtttactaaagcaagttttaagcgtagtttattctccattacttgaggtagatattcaatattgttctcttctgtcctgaaattg

SEQ ID NO: 340059 - DNA, 528 bp, Homo sapiens
gagcaaaagtttgtaatatgaatgagattcaatttatcaatcttttyttcctatggttcatgcattttgtgcctttcaaaaaaatccttgcctaactcaaggttaaaaacaattttctctcatgatttttctggaagtttcatcattttagtttttatatttaagtctttggaagtttattaaccataatctatataacagtttgaatttcatatttaattctataaatgtttttcaaaccacttttacacccacacgagtggaagttatatatattaaattcctagtgcctcaatactctttctcttggattcttctgttaatggattacctatgatattgaaggtttttcctatgccagcattagcattcaatttctttttgaaatatataaatattgtgtgtcaatcacaggtgtctgatagtgagcaatagaaaacaactccacttctttaagtaatttattgggagaatatgagggagctgaagaaacagttttcacatagaaggaaacagttagttccaaag

SEQ ID NO: 340060 - DNA, 549 bp, Homo sapiens
atctgtgcaataatgacaaatgatccctgtggcactataagttcacaagttgttttcatatgcactaatttatttgatatacataaaaatcccagaaagaaatatgacatgcataattattattccccatgttatagataagaaaactaggggttctgcttctgattataactgagtagttcctactaaagtaactcttctgcaaatagaaagtatacactctaagcaaaatattaaaaaaaacccagctatccaaaggcactaggcsttatctcatagcaagctgatcctggaagaagatgaacacttgcatgacagaaacagcataagaggagtttcccaccttttatggctttcagcctgaggtgagacttcagactaaatcaggggcaacaactaagactaaaatagaagcctatcatcttactggcttaaagacagagtacagatccagtacaaccatagaagctgaaaagtgaaggagaaaatcctggaaaaagaaagttagacagggagagctccaaattctgtgtctgcccaaatgtctgg

SEQ ID NO: 340061 - DNA, 549 bp, Homo sapiens
atctgtgcaataatgacaaatgatccctgtggcactataagttcacaagttgttttcatatgcactaatttatttgatatacataaaaatcccagaaagaaatatgacatgcataattattattccccatgttatagataagaaaactaggggttctgcttctgattataactgagtagttcctactaaagtaactcttctgcaaatagaaagtatacactctaagcaaaatattaaaaaaaacccagctatccaaaggcactaggccttatctcatagcaagctgatcctggaagaagatgaacacttgcatgacagaaacagcataagaggagtttcccaccttttatggctttcagcctgaggtgagacttcagactaaatcaggggcaacaactaagactmaaatagaagcctatcatcttactggcttaaagacagagtacagatccagtacaaccatagaagctgaaaagtgaaggagaaaatcctggaaaaagaaagttagacagggagagctccaaattctgtgtctgcccaaatgtctgg

SEQ ID NO: 340062 - DNA, 611 bp, Homo sapiens
tgaatgtatgacaaatttcatctggaaaggccagtttgataacctgtttcttggaaccacttaatttaaatcctcttataatttctataaatctgtgttttaagccactaagtttgtgataatttgttacagctgcaatagaaagctagyatatcaactaacaactattgtttggggacagccaccttttttcatttcactgaatgactacagaatagttatacaacaagacagtttaacattttttgttttcactattatttggtggggatacagctcttggaaacttcggaagagaatctaaagagcatttttcatcatgcagttgtttatactttttattgagtgcctattatgcacccaacaccctttatatattattttaaaaattataaccctggaaaattaatgctattattcctcattttagagctacagaatctaagacttggaatggtaaagttacttgctccaggtcatatggttaatatgtgccagaaccagaagttaaatcccaaagccatcaaaatcaaaagtccaagttcatttcatgacacatgtggcacccagaagagcctgtgtatatatcaacaattaatgcacattgagta

SEQ ID NO: 340063 - DNA, 407 bp, Homo sapiens
gcgtattctctgataaatccttaccctagactggagcttggcagttctcagatggctgcaactattcctgttcatctttgcacaccccrcagagcctatttgttgccttgcacacagatcatcttcagaggtgttttggttgttgagatccccatcaatataaataactgaaccataaacagtgatttcaggaagatatttgatcctgatttgagggtatctttatattcagaagctaaatgcaaaaacatttttaaaaagccaagagcaaaagctacagcttctttgatagcatcctgtttgcaagtctcatttgcttctggtattcttcctgttagtagtcaatacaagtcatctgtaagtcaaacaaaattgaattgataaaatgataaattgacatgagtcga

SEQ ID NO: 340064 - DNA, 579 bp, Homo sapiens
tgtttcccccagaactctttgtcaataattttccaatttgtctttcttagtcattgagcagtaggtcagtgtgttagcccctgcccagaagtcagcgtagatttgcaccttaggccatctctcttttaacacaaaatggacaattcaacccaccattctaagttctgcccactgggataatttcccttcatcaatacccaccttccccagcacaaacagtgagactgtrgtatagtggttttttcctagcatgtggggcagaaagacctataattaggcccatgcttttccctgtcccttggctggccagagggaatcagttatggtgtcatagatgtgaattgaggaggagacggtaaagcatcaggggcaggtagcacaagaatcggagccacctgatcatgcagtttacttttccttttatatctgctcagacctggtctctatattcaacttccattttataatggaatgttgctagacatgtccaattttatggtccaatggattcaataacaccagtgtatgactggcagttgaggttgcatactaacttgatgaccagagtcattgatttag

SEQ ID NO: 340065 - DNA, 573 bp, Homo sapiens
caagttgagagacattctgcataattcctagccagtactattcaaaattgtcaagatgatcaaaaaagtctgataaaaaaagaaaatctgagaaactgtcacaatctagaggaggctaaggagacttgtcaactaaatgtaatattgtattctggataggatcctgaaacagaaaaaaaaattaggtaaaaactaaggaaaccaaataatgtatggactttaatttaaaagatctatatgttggcttactagtgacaaatrtcttataccagtgcaagatgtggacaatagtagaaactaggtgtggggtatagaggaacagtctgtacaatctttagaactcttttgtaaattcaaaaatattctaaaaaacgtttatttaaaaatgcatgtgtgtggagaggggaagcacttcttaaaatctaggtaatacagtgtttagggttttgttaggtcctgttgttttgctaaagagaagtagttggttcagaacttgttaaatgatcatcagtcagcactttaatatcttatatcttctcaggaaactgtttttgtatttcttccaatttgtca

SEQ ID NO: 340066 - DNA, 636 bp, Homo sapiens
ttcatgcttttggtaagagcactactgtagaaccagagagttattatagaaagtctcaactattccatatctatttgctatcaagacagtgttgtgtgcatacacatgcacatgcatgcacttacacatgcacatgccatactgcaaacacacacacaccacactgctcatgtgtgtcaacaggctagctgcaggtactcagtatgctgagggcacaaaagggaatggacagttgcatttcattcagagtcagctaagtggcgtatataggatacatttatcagatttctgtgccaattgtttgctgagactttgagagaatagagcacatgacagttaagttttagtgtaagaaagtgtgattgttgtaagcaggcttagggaccataaggaattgcccaagagggaaattcggggtatgaagttagcatgagaatccctgaatattcagggggcagcagtacaaggctttataacaaatgtcaacaagtgaaaagcagacacttagaattaaaygccacaaaggcaaacattccattttccattttttttaagaaaaacttgagggtggtcttgtagacagagtaactgatttcaagacaagaataggatattttaccttcctttgtctcatat

SEQ ID NO: 340067 - DNA, 473 bp, Homo sapiens
ttttttttacttaattctcttgccaaattctgtgtttgaattttgtactttactcattctatagtttgtgaatgtttgggctgttttcagtttttgtctattatgaagcattctgtaataaacactcttgtataatttttgctgtatatttacattcattgctatggtatatatatctaggagtggaattgcttgcttataggatttatgcatatacagatctagtatatattgcgaagggttttccaaagtggttatattaattccaaagtggttgtattattttaaaatcccaccagtatataagagttatagttgctccgcattctcactaawacttgggattgttattcttgtttgttttttttaaagctattttaatagatggatatcatgttttgttgttgctctaatttggatattcctggtgactaatggcactgaggattttccagttgttttttttttttttt

SEQ ID NO: 340068 - DNA, 526 bp, Homo sapiens
tggactaacaatgttctcaggatctggatggtatgcctgtgacatatagagctgaagaggcatgtcacaaataaacacagttgcctaagtactgactgtgtgtcagtccgtgcacccaataaactaggcacaaaaatatactcggcacgattatcaaggctgctgggctggctgggaaatgtgtaactaatgtttagattgtaacaaatttattattttaggtaatactcacatctaatctttcttctccctctgtttttrgtagccccttctatttcctcctagagattccatcagcctcctactctcaagctactcagggccttggagaaatttcctttaggctgttcttgtccccatgtattagcctgctatcatgctgctaataaagacatacctgagactgggtaatttgtaaaggaaagaggtttaattgactcacagttctgcagggctggggagacctcagcaaacttacaatcatggcagaaggggaaacaaacacgtcttacatggtgacaaacaa

SEQ ID NO: 340069 - DNA, 571 bp, Homo sapiens
ttaaaatttgattattatggttgtttccagctatagctatatatctctctgtagagaagatagagaagactaaagaagagaaacacttgtcattctggcactgtaattggaatttgaaggactaggactcctgtacttggagccaagaatagtcttagtgtgtgaacttgtaattttttgtcttatccttagctggtatacttgagtgaaaatcttgttcaagtaatggactcagagttcttgccctgtgcaataggaactttccagttggcagagctctttaaggagagttatttactttccagatcccctgtcgttatcatgtgtttttgcctacaatgttcatcaaaaaarcaaaacaaacccacaaaacacttgcactattttataaagctataaagctgacagataggaaaagagaaaggcaaggtttagaaatgttctaacttagtgacaatcaaacttttatactcataaaccccctaaaagaatttttgaaaatattcacacattttttagacatgtgaatatttttgtcataaatttttgtcataagtttaaataaatacag

SEQ ID NO: 340070 - DNA, 469 bp, Homo sapiens
actttatttgttgatcaaggaatggagaagggcagctcaagctcaaagcaccttcctaggggatgtggtgaagggggacttctaagatctcttagggtatgaaggtggagactgcgggcgagcatttccggaaagatgcggggccttcgagggagaagtggagtgtgtgtagtcttcyttcttttgcactggaccctgtgtgtgcctagcaaagtgcatctcttcctccacctccatcccctgcagagattttataatggtagtgaagggaatattcaggtaggggtagcactgatgagctcagttctcatcttttcatttggctcattcgtggttactggcggtcagcctgcccttggtttctgtaagcaagcacagctgccagcacaggtttatttcaaaggttctggggctatttaaaagaattgaggtcatgttgttgtgatgttactattattcacatttgata

SEQ ID NO: 340071 - DNA, 580 bp, Homo sapiens
tgtgtgttgtcccttgtgaaatctcatttagaaaatggttgctaaggcattcccataccagatatcacatcccatcatgctgctatgagtatgcagcacttagcctgcatgtgggtttccaatacctctgcaatgccctcttggtactgggattgggcagctggccctgccctgctacatttgggcttggcatggttctcccatgccaccacatcccatgcccttggggacatttattttgtcagcctccaccctctcgttgcagttcacatctctttacttatctctgttctttcctcaaatggatcccttatgtcccttatttactggtgtaccttagtgcctggcacagtgcctgacatacggtgtgtgagcagcaattgtgaaagggtgcaaggaaggaaggaagggagtgagggaaaatgaagaattttttttgcttggctttgaggtgatcaagatgagaccatcccattctcactaatgataaagtcacaaggacctccctttcctcagacagctgagyatggcattgcttaacaatgtaggctttgggatataatagacctgcagttccatt

SEQ ID NO: 340072 - DNA, 583 bp, Homo sapiens
gtagagggaaatcttgacattggtcaggctattattttattttatttttgagacacagtcttgctctatcgcccaggctggagtgcggtgrtgcaatctcggctcactgcaactgctgcctcctgggttcaagcaattctcctgcctaagcctcccaagtagctgaaactacaggtgcatgccaccacacctagctaatttttgtatttttagtagagatagggtttcgtcatgttggccaggcttttctcaaatgcctgacctcaagtgatccacctgtctcagcctcccaaagtgctgggattacaggcatgagctaccacgcctgcccaattattttaaatatgacttcaaaatcacaggcaacaaaagcaaaaatagacaaatgggattgcatcaaactaaaaagcttctatacagcaaaggcaacaaacagagtgaagagatgatctacataatgggagaaaatatttgcaaaccatacttctcataacaggttaatatctacaatatgtaaggagctgaaataactcaacagcaagaaaataaataagttggaaaatggtcaacggacatgaataaa

SEQ ID NO: 340073 - DNA, 544 bp, Homo sapiens
ttttatttttgagacacagtcttgctctatcgcccaggctggagtgcggtggtgcaatctcggctcactgcaactgctgcctcctgggttcaagcaattctcctgcctaagcctcccaagtagctgaaactacaggtgcatgccaccacacctagctaatttttgtatttttartagagatagggtttcgtcatgttggccaggcttttctcaaatgcctgacctcaagtgatccacctgtctcagcctcccaaagtgctgggattacaggcatgagctaccacgcctgcccaattattttaaatatgacttcaaaatcacaggcaacaaaagcaaaaatagacaaatgggattgcatcaaactaaaaagcttctatacagcaaaggcaacaaacagagtgaagagatgatctacataatgggagaaaatatttgcaaaccatacttctcataacaggttaatatctacaatatgtaaggagctgaaataactcaacagcaagaaaataaataagttggaaaatggtcaacggacatgaataaa

SEQ ID NO: 340074 - DNA, 583 bp, Homo sapiens
gtagagggaaatcttgacattggtcaggctattattttattttatttttgagacacagtcttgctctatcgcccaggctggagtgcggtggtgcaatctcggctcactgcaactgctgcctcctgggttcaagcaattctcctgcctaagcctcccaagtagctgaaactacaggtgcatgccaccacacctagctaatttttgtatttttagtagagatagggtttcgtcatgttggccaggcttttctcaaatgcctgacctcaagtgatccacctgtctcagcctcccaaagtgctgggattacaggcatgagctaccacgcctgcccaattattttaaatatgacttcaaaatcacaggcaacaaaagcaaaaatagacaaatgggattgcatcaaactaaaaagcttctatacagcaaaggmaacaaacagagtgaagagatgatctacataatgggagaaaatatttgcaaaccatacttctcataacaggttaatatctacaatatgtaaggagctgaaataactcaacagcaagaaaataaataagttggaaaatggtcaacggacatgaataaa

SEQ ID NO: 340075 - DNA, 562 bp, Homo sapiens
aatcccaataaaaggtgggcaaaggacatggacagacagttctcaaaagaagacgtgcaaatgggcagcaggtaaatgaaaaaatgctcaacatcactcataatctggtaaatgcaaatcaaaaccacaatgatacatcatcttaccccagttagaatggctattactaaagagacaaaaaataacagacactagtgaggatgtggaaaaaagggaactcttatacattgttgatgggaatgcaaatacagccactatggaaaataatataaagatttctcaaaaatataaaaacagaactaacatatgatccagcaatcccactactgggtatctatcctamagaaaataaatgagtatatccaagagataactgcactagtgcatttattgcaacactattcacaagtaactagaagagaagacttgaatttttcccaatacataaaatgacaaatgcccaaagtgatgaacaccccaaatacccagacttggtgactacattacacattctgtgtaagtaacaaaatatcccacgtactccacaaatatataacatatt

SEQ ID NO: 340076 - DNA, 550 bp, Homo sapiens
aataatttttttaaacactaaaactaaagtagtgtgattaagataacagaaaagtccaatccattgggtaaggctggaagatgataaattccttctgtttacttagcatctaccaggtgttctgattcatactacagcctatcatttctccaggctcaacatgtagtcccaatccaggatcttttcttggaaaaggtgtaagaaggttctttcgcagaaaattcttcttgctgcaaagaaagagatacttacaaattcctaccctgtagcacacatgtgaagttacaaaggataacaacacattctgttcaaccatacatgccacaatttaaatgatacttaaaaaaawtttttaaaggcattttagctaatatatagcaataaattatccttaagtctgcagttcatctctctttaagacgggataaaatggcactgggaaatgctgttaaactcttagcagcaaatatgcaagtccaaacaatattgctattttggtgtttaaaaatcctgtggattttacaatgcaatgtaccatcactccaaatct

SEQ ID NO: 340077 - DNA, 567 bp, Homo sapiens
atgccctgctccaagaagcatttgcttagtggcagttccttcccatcttctgagtgccccaagcccttcctgcatcttctgccctgaacagcactctgtaatccacagggcaggggcttgctgagcaatcttaatgtctaaccagtgtctgaccacagccccaagacctgagagttctagagggtttttaggaaggcatctgaagccttcagagcatctcttctagcaaccccagcagagtcctaagaccttgaacccattcttttccaagtatatactttytcaatattcaacaaacattcttcgaatacatatgttgtgctatgttccatgaaaaagcacaagacaggaacatgaacaagagacacagtccccgccctcatagagcttacattcgaatgaaggagacatactggtaaagaaataattgtcattcagagtgacaactgtgattatagacagcatttgcaatagggatttaaagatgaggcatcccttacagcctggaaagccctcctagaacaagtgacatttaagtcaagtcttaaatgttgagtaggaatttct

SEQ ID NO: 340078 - DNA, 564 bp, Homo sapiens
aggcacattactcagcaaagagaatgccacagtgcagtcccagcaaactctggaggacgccaagaggcttgggggctgttccctgtatccccatcaatgaggttctcctggaggtagcactggagggatggtggtgcagacctcaggcaaatcacttcatttctctgagtctcagtttcctcttctataaaatgcgtatgaaaagaatgyctgccttataagattgctgtgagagttgaatgacttaacatgtgccatgctcagtacagcaccaggatgtcagcagccaccatgagtgtgctgtgactattattgtgattttcagctgtgggaggcatcaggactactccccaccatccccaccatcttctctctggatccagggatcattgcacctccttcttcccttgaatcaggcacagatgggtggattgttgggaaaacacctagaggattgtcctgaatagtcacccagaccagcaacagaatttgcatgaacacgaaatagacatcaactgagtgaaagtcatgagacttgggcattgtttgttactgcagcagagc

SEQ ID NO: 340079 - DNA, 590 bp, Homo sapiens
taagcctggtggtaagaatctctgtggagcccctcatgaaatggtgacaacataaagggtgctgcttcccatgatattccaagaaatggcctccaatatatgtgctacttcaagcgtgtggattcactgctatgtcttcagactctttcaactaaaacttcaggtctcagtttcacccttagcagatacttttccaacagaataaattccaaattctaagatacccaaagattgacagaaatatgaaatatttgtgctcaaatgtgctatgcttaggaatgaggaaagtaaaacctagaggggagaacaggcttgcccaaagtcacacaaatagtactaaatgtgaactgaaatgccwtctgaatccctcttctaggaaaagtccatatttagcctaaaacatataaatccactgcacacaactctacttcttatttttactggcaaagtccacatctgtgtattcatttctctatccctagcactaggcctaatgcctgacacttattagatgctcactaagtgtctgttacattgaattaaattaacagaagtaccaaggtggaacctttggaagtcattgtgattat

SEQ ID NO: 340080 - DNA, 534 bp, Homo sapiens
gatccaaaaacctataaagcttaatgtacaattaatatcatgcctcacttctgtcataggctcattgttctacactttgactgtcttgacaagtatctcaactttgaccttctgagctgatgagactacaaaagaaagtagtcagagaagaaaaaaaatcaaaattatggcaaatataaaattcaaaatgcaacagtctattactgttctgtcactcagagaacccagaagcatcatttctttcttgcttcagaattgaaaggtaggcagggctgagctgctgcacacatcacatggaattcctgataccagtgattttaaattatagtagtatttgaccaaaayagacattagagcttgccagacctcattggctccccataaaataggatatattcatgcgaaggcactaaacttttgactgtccaaggggccatttgttaatcctatacagttctcctgctatctttttatctcctgctggtctaaggagataaatcagtaagtgtacaggcacacacatatacccatggg

SEQ ID NO: 340081 - DNA, 448 bp, Homo sapiens
ggcaaatataaaattcaaaatgcaacagtctattactgttctgtcactcagagaacccagaagcatcatttctttcttgcttcagaattgaaaggtaggcagggctgagctgctgcacacatcacatggaattcctgataccagtgattttaaattatagtagtatttgaccaaaacagacattagagcttgccagacctcattggctccccataaaataggatatattcatgcgaaggcactaaacttttgactgtccaaggggccatttgtkaatcctatacagttctcctgctatctttttatctcctgctggtctaaggagataaatcagtaagtgtacaggcacacacatatacccatgggctgtaaaggtgttgagaagaaatatttatagtgagttaaaactttcaaccaaagcacacagtgagggggcatttaatttcca

SEQ ID NO: 340082 - DNA, 616 bp, Homo sapiens
tgattttggccagggatgggcacctctcacggtggtattgggacaacggtggtggacagtccagtggatgtacctcctgcctctcatatctgctgtatacaaaagcttctctacttatcarcttctggcttctaaaaggtgactatcatgtggaatttttaaaaatataggctgcaaggacaaattttcctagaatcaaatgctggcttctccacatacaggctggcgttggccaaatcacacagcttctctaagcctcagttttctcatctctaaaacattgacaaacttaaatagttgtaaacaaagcagtgaatcagagtaaaaccccatcagctttgaccacaaccaacagatggcaggaatcatcattgatgtattattgcatctttagacttttgatgaacaactgttttataaactgaatttagaaagccagttcataaagaaacttccatattggggtctctaagaacttcaagaaatgcatgttacagctggatatcaatagctagatatctatcttactggcttcctaactaagttctactaagcactagagtaccaaaaggagctacagaagtctttaaaagttgggccaagaagagaagaaatg

SEQ ID NO: 340083 - DNA, 574 bp, Homo sapiens
  misc_feature (1)...(574): n = A,T,C or G
aatgtgacatgtgaaacagaccgaggtggtaagaaggaatcccaaatttctcacctaagacactaggttcacaatggtgccattttatgacatgtcagtgtatgatttgggcagaaacaggtttggtagagaaggccacgatgccatggatgtgttaagtgtatgatgttttgagttatcaactgaagatgagtcagcagccatttcatctctggaaaactcatagaaactataaatctgttgctattatagagggacagaattctatacattaaagagcaatattatttactcctaaatgtatggaaaagaggctagacatttaatgtatacacanctggaatgaagatagtatattagaatataaragtatatttagaatatgggttttagaatgagacagacctagaagtgccctgccatctactctaatgaccatgcacaatttactctacctctataagctcagtttcttttctgtaaagtgggaatgctattatatgcttataaaattgatgaatagattacataatataaatgatcacatatcattattgcgttaatattgaccatt

SEQ ID NO: 340084 - DNA, 556 bp, Homo sapiens
gaagccattgaacttgcaatgtcgaagatattgagatgtctttgcagatcaatttactgtcctgctgaactctatttcctgcctgttctttgattcatgtgcacttgcccgcccacagaaagttgcagagcttccgatcctttggattgctggcacttgggacaaagaagtgcttgtttttttgctctcctcctttttacaatgcacttcccccacctccaagtgttaacctgccctaccagagccagggagagggaattaaagagaacatgtaaaaaaaatgggagggtgatggctgtgcccagatttcagcttttgttctcatcttaggccttaactgcttgctccattaactttgaggaattggagacagaagaaggaaagaattggtacttgctgatgttatcgasatcttacccaccaaagacaccatttaggacctggcctgctcagaattaccttgtcctgtaggtcaagtgcaccaaaagggttggccacagctcgacaattaattagctgggattcttctcaagatatcacacgtaatggtcaattc

SEQ ID NO: 340085 - DNA, 597 bp, Homo sapiens
tgctgttattgtaatccgtgtcaaaaatctttcagaggatgaattctagagctttgtggagtggaaaaaggatagaatttgaagctacagagaagaaattcccaatctgcttggtaactctggcagcaagtagcaaagacaatgcactggcactatgttcccaaacccatttcccattcctcctgggcacacagagactgtcctgcagattcatgatgcttatgacagacttccagctcatggaatataggcagatgtgatatagaccagtcacttccagcctggctctacccagattttttcagaagaccctttgggctctcttctcttccctgtctgcattagcagagtatcctctgcagacctctgaggccatggaacagaccaacagacagaaggaactgggtctccaaatctctacttggagtgccattatttccaatcagatcatgatgtgagtaagaaatagatactgtacaatgctgaaayattgagtttctattgcggtttgtcacagaagttaggccaccctgcttagttcagcaaattacttaacttctttgagccttactttcctatttatattatagttcttag

SEQ ID NO: 340086 - DNA, 552 bp, Homo sapiens
tctcactcctggaggagccactctctgcggtcctctagtgccctgcatgtatctgtagcactgaccaggttttgctcttttcactgctagactcagagttttttaaggtctagttcttcattatctctggaatgtctgcaatgagcatatgtctggcatgtaataatctatcaatgaatatttattgtgtttaagtgaataaatgaattcattaatacaggaaggaaggaattattttaaagtgtggatcatccattctctggcttgataggacactgacatgttggacttcagaggacattggctaaattatcttttcatggtcattgtcaagaytgaaaaataaacagtaagaaaaaacttccttcaaagtcctctgccttttgagtctattttcttctttcttgctgagaatcctgcacaaagataaagatgagcatgagaagcttccatgtttatctatttgtatcaaatacatagccccttatattttttggctatgagaatgtgcacatctttttctactccagaaagatgcagtggaaagaaaat

SEQ ID NO: 340087 - DNA, 552 bp, Homo sapiens
tctcactcctggaggagccactctctgcggtcctctagtgccctgcatgtatctgtagcactgaccaggttttgctcttttcactgctagactcagagttttttaaggtctagttcttcattatctctggaatgtctgcaatgagcatatgtctggcatgtaataatctatcaatgaatatttattgtgtttaagtgaataaatgaattcattaatacaggaaggaaggaattattttaaagtgtggatcatccattctctggcttgataggacactgacatgttggacttcagaggacattggctaaattatcttttcatggtcattgtcaagattgaaaaataaacagtaagaaaaaacttcctkcaaagtcctctgccttttgagtctattttcttctttcttgctgagaatcctgcacaaagataaagatgagcatgagaagcttccatgtttatctatttgtatcaaatacatagccccttatattttttggctatgagaatgtgcacatctttttctactccagaaagatgcagtggaaagaaaat

SEQ ID NO: 340088 - DNA, 547 bp, Homo sapiens
cagctcatacacatcacttccaaacacagctcattggtcagtgctatttgtgactgaactgtgaggaaagctgaaggatatagagaagcacattaaatatttggagagcaataactatctattctatagtattatttaaaatatgattctatgaatccttggaaagttgaagtgtttgcccaaaatcattgtgrgaagaggcttgcctagatgccagttatcctgagtcccagtccagcatctcatctgtttgactgataaacatatttaaaaaatctgtcctctgctgacttgaagcccagtttgtcattgctactattgccaatatctttaaatgcttctaaagagatttctgttttatttaatacattgctgtattccccatccttgaattctaataataacaatctgtattaaacaataaaatgtcaacttgttaaagactgacttctcaacagatactatgttaagtgtctatatatataattatatctataaattcgtttataaaaatatatataacttcatttaatcctaatagcatata

SEQ ID NO: 340089 - DNA, 547 bp, Homo sapiens
cagctcatacacatcacttccaaacacagctcattggtcagtgctatttgtgactgaactgtgaggaaagctgaaggatatagagaagcacattaaatatttggagagcaataactatctattctatagtattatttaaaatatgattctatgaatccttggaaagttgaagtgtttgcccaaaatcattgtgagaagaggcttgcctagatgccagttatcctgagtcccagtccagcatctcatctgtttgactgataaacatatttaaaaaatctgtcctctgctgacttgaagcccagtttgtcattgctactattgccaatatctttaaatgcttctaaagagatttctgttttatttaatacattgctgtattccccatccttgaattctaataataacaatctgtattaaacaataaaatgtcaacttgttaaagactgacttctcaacagatactatgttaagtgtctatatatataattatatctataaattcrtttataaaaatatatataacttcatttaatcctaatagcatata

SEQ ID NO: 340090 - DNA, 583 bp, Homo sapiens
tgtcagcaaggttggttccttctgcggctctgaggagagagtgcaccccatggttctttcctagtttctggtgattgtcagtgagccttgacattctttgacttttaaagatgtcactacaatctcggccttcattttcacatgatcttcccctctatgtctctatgtgtctcaaatatccctctttttttcttcagtctgaatttaaggctcttcctaaaaagccaggataatctcatcttgagatctttaattaaattttcagggaccttatttccaaataaagtcacattcacaggcactgagggctaacacttggacatatctttcttggagacacaattgaacctgaaacagacaacagtcttcaggggcagttgaataacagccaatgagagagactcattcctattcagctgggctcagcacatgatcatgggggcatgcatttttagattttaacttttgttgtkttttgagacagagtcactctgttgcccacgctggagtacagaggtgcaatcttggctcattgcaacctctgcctcacaggttcaagcgattctcatgcctcagcctactg

SEQ ID NO: 340091 - DNA, 583 bp, Homo sapiens
tgtcagcaaggttggttccttctgcggctctgaggagagagtgcaccccatggttctttcctagtttctggtgattgtcagtgagccttgacattctttgacttttaaagatgtcactacaatctcggccttcattttcacatgatcttcccctctatgtctctatgtgtctcaaatatccctctttttttcttcagtctgaatttaaggctcttcctaaaaagccaggataatctcatcttgagatctttaattaaattttcagggaccttatttccaaataaagtcacattcacaggcactgagggctaacacttggacatatctttcttggagacacaattgaacctgaaacagacaacagtcttcaggggcagttgaataacagccaatgagagagactcattcctattcagctgggctcagcacatgatcatgggggcatgcatttttagattttaacttttgttgtgttttgagacagwgtcactctgttgcccacgctggagtacagaggtgcaatcttggctcattgcaacctctgcctcacaggttcaagcgattctcatgcctcagcctactg

SEQ ID NO: 340092 - DNA, 588 bp, Homo sapiens
aacccactaccctcaaagagaaaactacatatttacttacttcatagttgatgactctgtatgtttcaggcatggagagtctgaaataattttaactacaggytttaggttgctttgctgaaggaatgctacaaaacagagtttcgggatcttagaacaattaagacataacttctcaccagtgtgtgggggcctgtggaaactgactcaacatttcctgcagggaaacagcatattatttcagggagagccgtggatgtaaaccttgagagtatatttcagccagagattttgaagcactttaggaacatgaatacccttattcttcttattcataaaacacacatctattgatgctgatcataatatctcttgttaagcattcctatatacccacactcgctgatgcattttctcaatggagtctagcctcccttgtggtctccattcttgggctgtaactcagtaacactaccctttggagtgtgctttggccaccttcaggaacagtgatttctctgtttagatcaagagagcataatgaaacattgtctgccacaatatcaaatgtgaagtttccgctaaact

SEQ ID NO: 340093 - DNA, 588 bp, Homo sapiens
aacccactaccctcaaagagaaaactacatatttacttacttcatagttgatgactctgtatgtttcaggcatggagagtctgaaataattttaactacaggttttaggttgctttgctgaaggaatgctacaaaacagagtttcgggatcttagaacaattaagacataacttctcaccagtgtgtgggggcctgtggaaactgactcaacatttcctgcagggaaacagcatattatttcagggagagccgtggatgtaaaccttgagagtatatttcagccagagattttgaagcactttaggaacatgaatacccttattcttcttattcataaaacacacatctattgatgctgatcataawatctcttgttaagcattcctatatacccacactcgctgatgcattttctcaatggagtctagcctcccttgtggtctccattcttgggctgtaactcagtaacactaccctttggagtgtgctttggccaccttcaggaacagtgatttctctgtttagatcaagagagcataatgaaacattgtctgccacaatatcaaatgtgaagtttccgctaaact

SEQ ID NO: 340094 - DNA, 592 bp, Homo sapiens
aattgccattttgtaggtctaaaagtgtagaacaatgataacttcacatgattcaatataacaccttatgcagtatttagtgggaaacaactgaacacacggcttataattggaaatacaaaaatacacccttaaacaatctttaaaaatgaccaatagacttgagtttmctcatttagaatattgaatttaagaattatatgaaattataggaattttaaaaatatgtaactttgttttctctagatacatgcattttaaaggaaattatttgaatgatgttaaacgagctaaacatcagtttttcagtctctgaggagaagaaaatatgtcacttttgtttgtcaaatgccagtattttagttcagtaaacctatttaaggtactatgattttatagttttaattaaggacacaattaagcataaaccattaaaatttgtccttgcaaatcttccaaagagagagctgctttcaaacaaccgaatgttcataatcatcaatatggagaacaacaacgatttgttcatgtcttttgaattttgcatgtaactaaaagaacaagataattacctccaacctattccatttat

SEQ ID NO: 340095 - DNA, 592 bp, Homo sapiens
aattgccattttgtaggtctaaaagtgtagaacaatgataacttcacatgattcaatataacaccttatgcagtatttagtgggaaacaactgaacacacggcttataattggaaatacaaaaatacacccttaaacaatctttaaaaatgaccaatagacttgagtttactcatttagaatattgaatttaagaattatatgaaattatargaattttaaaaatatgtaactttgttttctctagatacatgcattttaaaggaaattatttgaatgatgttaaacgagctaaacatcagtttttcagtctctgaggagaagaaaatatgtcacttttgtttgtcaaatgccagtattttagttcagtaaacctatttaaggtactatgattttatagttttaattaaggacacaattaagcataaaccattaaaatttgtccttgcaaatcttccaaagagagagctgctttcaaacaaccgaatgttcataatcatcaatatggagaacaacaacgatttgttcatgtcttttgaattttgcatgtaactaaaagaacaagataattacctccaacctattccatttat

SEQ ID NO: 340096 - DNA, 624 bp, Homo sapiens
ctctgtttcagtcatgataatgctgagagcgctattaaatgagatgtaaagtaggcagttgaatatagtggaacagagagcaaagtctgagctcttaaaatatacactccagkcatcagtatataagtaatagtgaaagtgaatgggctaactaagatcatttagggaaaagagtataaaaaataaattaaaaaagaaaagacaagactaagtacatagcttgaaacactccaacatttaaaagtagaacgtcttctgcttctgctcataaagggttaacagctacaaaaacggtcttcttgtgaaaaataactagaaaatgaaataaaatatgcaaaacaactcttttcagacattgcacaataggcagtgtctaactgcaaaaacatgattcctacgaaaggagaaacaataaactgagccttagctctagaaattgcccagcttagcacttgcagcaagtttctaggctgaagaatagagatgggaactcagacctcagaagtcttactaatttgggaaggcagagactagatttcagggagacagaagcagctagaatgtgtggagctgaataatgaagaggagagtgctttagaaggagagcctcgaaagcttgcagaa

SEQ ID NO: 340097 - DNA, 591 bp, Homo sapiens
gaatgtgtggagctgaataatgaagaggagagtgctttagaaggagagcckcgaaagcttgcagaagggtgttctagattatcctaaataaattactcctagaagaaagactggtatcctgacaaatcttaagcgaaaatctgaaaatgatctagctaatcacaaatcacttaaccatacaactgaataaagtcttgcactctttaaagaaatacaacaaaatccagcacccaacaacataaaactcacaatatttgcaatcccataaaaatgtataagacatgcaaagaggcagggaaatatgatccataataagaataaatttgaataaacagaaacagaatcacaaagaatggaaatgatgaaaaatgacataaaataacagattaagtaagaaattccatatcaaaaaaacataaaaatggacactataaagattagtatgtaaattctagagataaaaaatacattatctgaaattttgtaatggtaccccctagtaaattaacacaactatatgtttgttaggtatttcctttgttttatggctttgttaaaacatgtttttatagcttattctttataaaattc

SEQ ID NO: 340098 - DNA, 509 bp, Homo sapiens
ggacctttaagtcagctcttcaaaagcacaatttcttcaataaaaatcagtctattcaaattttccttccctctttgactcaaacattggatgatttaaaattttatagacaattatccgtctcacagagattttcacaagacctctcaggttgataataaaatttatttcaattgtgtatatcacttacttatttgtagttattttcactctaatttatattttattattggcgtgagtttttttaaatatttaggttagmtagtgttgatttatgcattttattgttgtgttgttatgacccacattgttctttatttgcggtactttttaaaaataacatatgtgctggttttattcaccgtttccttgtaatttataaatgatgattttttaactcgttatttggaaataatgagaaatttgtagactttgcaagacaacaaataatgcaaggaatgcccctacaccctgcatagaaaatcacatattggtaatgcattttactc

SEQ ID NO: 340099 - DNA, 612 bp, Homo sapiens
cacttacttatttgtagttattttcactctaatttatattttattattggcgtgagtttttttaaatatttaggttagatagtgttgatttatgcattttattgttgtgttgttatgacccacattgttctttatttgcggtactttttaaaaataacatatgtgctggttttattcaccgtttccttgtaatttataaatgatgattttttaactcgttatttggaaataatgagaaatttgtagactttgcaagamaacaaataatgcaaggaatgcccctacaccctgcatagaaaatcacatattggtaatgcattttactccatttgctctaccatttgctatcaattttttacttctttccacctaatcttgtatcatctacttaaatgtattttctgaaccatttgagggtaaattgtatatatcaaagccctttacttcttaaatacttcaagtttattaactaagaacagggctgctttttacacaacagtttactttttgattatcagcaaatgtaacatctaacccatatatttttcaagtatactatctatattccaattataattataattattaatttagttttctacacccttgagt

SEQ ID NO: 340100 - DNA, 609 bp, Homo sapiens
atcttgctccctcagcctctcctatttcagatctctgtctctttaactcagaaagactactggaatatttttgggtttgccttccatactacagcctggaaactgtttacagtcagtaagctggtacaatcatagggccactccatttgtttctttcctttctaggaacacagttatttgctcctgattgttccatgtcaaaaaaaggtcctttcatagattttgccactaggtacaattcccactgcatttaatcctgtatgggtggaaaacatttaatcttttctttcataatcagcttcgctggttttgccatttctacattatttagttttcaccrtgagttccccaagtttccaagagtcatttcagcagaacattagggcagcctccctgggacctagccatggtgctgaacactgagtcctgggagaatgcccccgtatgaataatgcctcccttatccaacttttgttccccttcaactgacactatcagaatctttcccataaatactctgctggctcttgccactacagttggctagatcctgcaatttcctggggatatgaaccctttcttctgtttctagaaccaacacttccccag

SEQ ID NO: 340101 - DNA, 316 bp, Homo sapiens
tcagaaatctcccatggagcaattcagatatattacaggaggcaaatgttgataatatgtggtgaataataatcagctatctttgctccttgatatgatcaaatggaaactgaataacaaaaaatcaatccagaccatgtawccaaagattctgcaattttaaaaagatacaatttatgagtatttttagttcatttctaaatctggtattctgtgattttcaagatagaaactttattttccatatttatccatacattgtaggacagtaattcacctacagtatgggagtcagattgaataacctttaacacta

SEQ ID NO: 340102 - DNA, 567 bp, Homo sapiens
tgatttcattcaagtccattcgataattgcattcgattccattctatgatgattccattcgagtccatttgatgattccattcaattcaagtcaatgatgattccattcgattccattcgatgattccattggattccattcgatgatgattccattcaaatccattcgataattcaattcaagtccattcgatgatgattgaaatcgaatccattcraagattccattcagttccattcgatgattcccttagattccattcgatgattccacttgattccatttacgatgattccattcgattccatgtgatgattccattcaattctattcaatgctgtttccatttgattccattcgaccatgattgcctttgattccattcaatgactccattcggttccttttgttgatgattccgttcgattccatttcattattccatttgattccattggatgagtccattcgattacattcgatgattattccattcgagtgcattagatgattccattcgagtccattcgatgattccattcgagtccattcgatgattccattcg

SEQ ID NO: 340103 - DNA, 457 bp, Homo sapiens
attccattcaattccattctccgatgatttcttttgagcccattcaatgcttcccctcgattccatatgatgatgactccattcgatgaaattcgatgatgattccattcgcttgcattcgatgatgattccacttgagtccgttagaagattctattcaattacattccatgacgattccgttcgagtccatttgatgattccattagactccattcgacgatgattccattcratgttattcgatgattccattcgatctcattcgatgatgattccattcaactccattcgatgtttccattcgagttcattctattattccattagattccattcgatgatgattccattcgattccatttgatgattgcattctatttcatttgatgatgattccattcgagtccactcgatgattccattcgagtccatttaatgaatccattggtttcaa

SEQ ID NO: 340104 - DNA, 457 bp, Homo sapiens
attccattcaattccattctccgatgatttcttttgagcccattcaatgcttcccctcgattccatatgatgatgactccattcgatgaaattcgatgatgattccattcgcttgcattcgatgatgattccacttgagtccgttagaagattctattcaattacattccatgacgattccgttcgagtccatttgatgattccattagactccattcgacgatgattccattcgatgttattygatgattccattcgatctcattcgatgatgattccattcaactccattcgatgtttccattcgagttcattctattattccattagattccattcgatgatgattccattcgattccatttgatgattgcattctatttcatttgatgatgattccattcgagtccactcgatgattccattcgagtccatttaatgaatccattggtttcaa

SEQ ID NO: 340105 - DNA, 525 bp, Homo sapiens
caattccattctccgatgatttcttttgagcccattcaatgcttcccctcgattccatatgatgatgactccattcgatgaaattcgatgatgattccattcgcttgcattcgatgatgattccacttgagtccgttagaagattctattcaattacattccatgacgattccgttcgagtccatttgatgattccattagactccattcgacgatgattccattcgatgttattcgatgattccattcgatctcattcgatgatgattccattcaactccattcgatgtttccattcgagttcattctattattccattagattccattcgatgatgattccattcgattccatttgatgattgcattctatttcatttgatgatgattccattcgagtccactcgatgattccattcgagtccatttaatgaatccattggtttcaattctatgatgattacattggattccattcgttgatgatttcattcggytccattcaatgatgattccattcaattc

SEQ ID NO: 340106 - DNA, 594 bp, Homo sapiens
cattcgatgaaattcgatgatgattccattcgcttgcattcgatgatgattccacttgagtccgttagaagattctattcaattacattccatgacgattccgttcgagtccatttgatgattccattagactccattcgacgatgattccattcgatgttattcgatgattccattcgatctcattcgatgatgattccattcaactccattcgatgtttccattcgagttcattctattattccattagattccattcgatgatgattccattcgattccatttgatgattgcattctatttcatttgatgatgattccattcgagtccactcgatgattccattcgagtccatttaatgaatccattggtttcaattctatgatgattacattggattccattcgttgatgatttcattcggttccattcaatgatgattccattcaattcctttcaatgtttccattcaattscatacgatgatgattccatttgatttgattcgacagtgagccattcgattcaattccatgatgattctatttgattcaattggttgacatttccattcgattccattcgatgatgat

SEQ ID NO: 340107 - DNA, 594 bp, Homo sapiens
cattcgatgaaattcgatgatgattccattcgcttgcattcgatgatgattccacttgagtccgttagaagattctattcaattacattccatgacgattccgttcgagtccatttgatgattccattagactccattcgacgatgattccattcgatgttattcgatgattccattcgatctcattcgatgatgattccattcaactccattcgatgtttccattcgagttcattctattattccattagattccattcgatgatgattccattcgattccatttgatgattgcattctatttcatttgatgatgattccattcgagtccactcgatgattccattcgagtccatttaatgaatccattggtttcaattctatgatgattacattggattccattcgttgatgatttcattcggttccattcaatgatgattccattcaattcctttcaatgtttccattcaattccatacgatgatgmttccatttgatttgattcgacagtgagccattcgattcaattccatgatgattctatttgattcaattggttgacatttccattcgattccattcgatgatgat

SEQ ID NO: 340108 - DNA, 373 bp, Homo sapiens
ggctgagatcacgccactgcactccatcctgggtgacagagtgagactttgtctcaaaaaaaaaaaaaaaaaaaggaaaaaaagaaaattgctaagaggagacatcaagtgtagtggcattcttactaacccctgaggaccaaataggattcttgctgaacgcaagctagggtgatcgggtattgcytgagggatggtgagggacgagaaatttaatcagatatccagggtgattagacatcaagggtggatgatggtctgtaaactgacagcaggattttccttaaaattgagctttgcaggcccaggagattgtggaccaaggtcaaggcctagtgaaaaagagcgcagtgaggagcttgactccgttgtg

SEQ ID NO: 340109 - DNA, 546 bp, Homo sapiens
taagtatatttgctatagtttttaataaatttttcagattaaggaagtttctctaggattgaaaattttttatcgtaaayagatcttcaatattatttgtcctttctgtatgcactgatttaaggttttgatgtttttatctttaatctgttaatgtggagaatgattttttttttttgaggactaaatagaatctttagggatgggggaaatcagtaagtgttatatctgttatgtgctgctgaatccagtttgctaatattctctttggattatttgtatctgtgctcataaatttgagcattttcctacccactactatccttgagagtttcttgtatcaagctatgtaaatcttatttttaaaattgcatatttctttttttctattgttcttcaagctttttctcccaagcatcaaacaaatacttaaagcttctaatattcatccagaaatggtccattcatttagtcagctaccaatattttgtttccaacaaagaagtttaacagcagagaaaatgtagtcaatttcggttttaaaag

SEQ ID NO: 340110 - DNA, 546 bp, Homo sapiens
tagcacacaggcactataaagcaaccacacaatcaagtctacataacaatcagctagcaacrtgataacagaattaaaatcacagatatcaatactaaccttgaatgtaaatgggctaaatgctccacttaagagacacagagtgcaagctggataaaaagatccaaccatctgttatcttcaagagacccatttcacattaagaacaaccacaggctcacagcaaaagaatggagaaagatctaacatgtgaacaaaaaacaaaaaagagcagaagttgctattcttgtatcatgtaaaatagactttaaaccaataaaaattaagaacaatgaagggcattacataatgataaagggtacaatcaaacaagaaaccttaactgtactaaatatatatacactcaatattggagcacccagattcataaaccaagttcttcattgcccatgaaaacacttagacaaccaaacaataacagcaggagccttcaccaccccactgacagcactaaacagatcattaaggaagaaaactaagaaagaa

SEQ ID NO: 340111 - DNA, 546 bp, Homo sapiens
tagcacacaggcactataaagcaaccacacaatcaagtctacataacaatcagctagcaacgtgataacagaattaaaatcacagatatcaatactaaccttgaatgtaaatgggctaaatgctccacttaagagacacagagtgcaagctggataaaaagatccaaccatctgttatcttcaagagacccatttcacattaagaacaaccacaggctcacagcaaaagaatggagaaagatctaacatgtgaacaaaaaacaaaaaagagcagaagttgctattcttgtatcatgtaaaatagactttaaaccaataaaaattaagaacaatgaagggcattacataatgataaagggtacaatcaaacaagaaaccttaaytgtactaaatatatatacactcaatattggagcacccagattcataaaccaagttcttcattgcccatgaaaacacttagacaaccaaacaataacagcaggagccttcaccaccccactgacagcactaaacagatcattaaggaagaaaactaagaaagaa

SEQ ID NO: 340112 - DNA, 536 bp, Homo sapiens
cacccagattcataaaccaagttcttcattgcccatgaaaacacttagacaaccaaacaataacagcaggagccttcaccaccccactgacagcactaaacagatcattaaggaagaaaactaagaaagaaactctggacataaactcaacactttaccaattggacctaatagacatctacaaaataccccagttaacatccacagaatatatattcttcccrtctgcacatggaacatattctaagatcaaccacatgctcaatcataaagcaaatctcaataaattcaaaaaaattgaaattataccaagcaaactcttgaaccatggtgaaataaaaatagtaatcaaaatcaagatctctcaaaactacacaaatatagggaaattaaacaacttactcctgaataactcttaggtgaacatcaaaattaaggtagatttaagaaaaattctttgaaatattgaaaataggaatgtgacttaccaaaatctttgagatgcagccaaagcagtgttaagaggaaagtttatt

SEQ ID NO: 340113 - DNA, 536 bp, Homo sapiens
cacccagattcataaaccaagttcttcattgcccatgaaaacacttagacaaccaaacaataacagcaggagccttcaccaccccactgacagcactaaacagatcattaaggaagaaaactaagaaagaaactctggacataaactcaacactttaccaattggacctaatagacatctacaaaataccccagttaacatccacagaatatatattcttcccgtctgcacatggaacatattctaagatcaaccacatgctcaatcataaagcaaatctcaataaattcaaaaaaattgaaattataccaagcaaactcttgaaccayggtgaaataaaaatagtaatcaaaatcaagatctctcaaaactacacaaatatagggaaattaaacaacttactcctgaataactcttaggtgaacatcaaaattaaggtagatttaagaaaaattctttgaaatattgaaaataggaatgtgacttaccaaaatctttgagatgcagccaaagcagtgttaagaggaaagtttatt

SEQ ID NO: 340114 - DNA, 516 bp, Homo sapiens
ggccaatgtccatgatgmacgtagacaaaaaattctcaatcaaatgttggtaaactgaatccagcagcatataaaacggttaattcaccatgataaagtaggctttattcctgggatgcaaggttggatcaacatatgcaaatcaataaatatgattcaccacataagcagatttaaacacaaaaaccatctgatcatctaagaaaatgcagaaaagctttcaataaaattcaacgtgacttcatgataaaaaccctcaacaaactaggcatcaaaataatatgactcaaaataataagggttgtctatagcaaacccagagccaacattatactgaatgggcaaaagctggaaccactcccctgtagaactgaaaaaaaggcaagcactctgaccatttcatattcaacatagtagtggaagtcacagccagagcagtcaagcaggagaaaggctactggaactaataaatgattttagcgaagttccatgatacaaaatcaatgtagaaaacat

SEQ ID NO: 340115 - DNA, 516 bp, Homo sapiens
ggccaatgtccatgatgaacgtagacaaaaaattctcaatcaaatgttggtaaactgaatccagcagcatataaaacrgttaattcaccatgataaagtaggctttattcctgggatgcaaggttggatcaacatatgcaaatcaataaatatgattcaccacataagcagatttaaacacaaaaaccatctgatcatctaagaaaatgcagaaaagctttcaataaaattcaacgtgacttcatgataaaaaccctcaacaaactaggcatcaaaataatatgactcaaaataataagggttgtctatagcaaacccagagccaacattatactgaatgggcaaaagctggaaccactcccctgtagaactgaaaaaaaggcaagcactctgaccatttcatattcaacatagtagtggaagtcacagccagagcagtcaagcaggagaaaggctactggaactaataaatgattttagcgaagttccatgatacaaaatcaatgtagaaaacat

SEQ ID NO: 340116 - DNA, 596 bp, Homo sapiens
ctccagtgggctaggaagaagtcttatgtagctttatatactcatgagagtaactatccctcatagtcacagatctgcccatccttgatgttggaattacaagggacatacacaccagggggtgaaactcttagatgtcatcttagaattctgcatacacaaattacaaaatggagagaaatgacaagaaaagcaatgtgtactataaatttgatgtttctgaagaaaatagcaaaacaaataaaatatgaatttttggctttaagatggtagagaacttttgacttctttctccttcaaaaaacacacagaacaagaaggagacacagttaagaattagctgaagtctcattctctaacttgtgagtgaaaaagcctcaaacaattgcagaaactagtaagaagcaatycaactttgcagaacaaatgaatttaggaatgaagactagtactactgtagttggtggtggctggggtgaaagttcacagaagaaacagaaaggacttccatttcccaattacatcccacagagtccagtacctattctttctagaatgaggcataagactagatatttattctctggagaaatatg

SEQ ID NO: 340117 - DNA, 602 bp, Homo sapiens
ccaaataccatctccaataagtgtgatgggtcctctatcttaaaaatgaataaatagccaagatttgacaataacctcaaacatgaaaggcagggatcaaggtgaaaataataataataataataataataataataataattgcragtaaatctataataaaagatacaatacaggcacaggaaaaaacttttaaaaatgatatgcagttatgttcagggagagaaaatgtataacacctatacatctcgaaggtagaggaagctgtaataagtaaaaaattcaaaaaataaaatacacaaaagcttttgaaaattcagaaatacaattgctaaaggaaaataagtcagtaagaagaattggaagtccagtatatttttggaataaatacccaaaactgatcaaaatggaggcctctggggtggaagactttccacagaaatgctccatgctggatggaaggcaatgaggcagtgactgcaaaattctgacagaaaggaaggtgaccctggaattctgaagccagtcatgtgttcttgcaagtgtaacggaagaaaacacccaggagctttacttctcactcttgacttgaaaacacgtca

SEQ ID NO: 340118 - DNA, 550 bp, Homo sapiens
agataattaaagacccagagatacacagactctaaagaaaatgaaaaaaagcagcatagtaagaaaggcaatgaacctgggtgtctcttatagtagggcatagagaagcagagaggctgagatctgcctaaaggttggttgcccatgagatgagctggaccatattctctcctccttttggtcmtatagatttctaaatgaattatcttcatcttacataggacatcttgggattttcagacattttgggggaagaatatttggaacacacaaatcaatgggtgggaaccagcaactctaaaatgtgatttttaaaaaatatatagatataagtgacaaatagagactacacatttcactttctgggcattacaaactattccaaccattacagacattttcatttgatggtgaaggtggtaagtgatattaatttcctcatcttaaaataggagtggatgaataactggcccaatgtcacacaaatagacagtggaagaaccaagctccaaacccgggttagtttgatgctagcactcctggttttaac

SEQ ID NO: 340119 - DNA, 550 bp, Homo sapiens
agataattaaagacccagagatacacagactctaaagaaaatgaaaaaaagcagcatagtaagaaaggcaatgaacctgggtgtctcttatagtagggcatagagaagcagagaggctgagatctgcctaaaggttggttgcccatgagatgagctggaccatattctctcctccttttggtcatatagatttctaaatgaattatcttcatcttacmtaggacatcttgggattttcagacattttgggggaagaatatttggaacacacaaatcaatgggtgggaaccagcaactctaaaatgtgatttttaaaaaatatatagatataagtgacaaatagagactacacatttcactttctgggcattacaaactattccaaccattacagacattttcatttgatggtgaaggtggtaagtgatattaatttcctcatcttaaaataggagtggatgaataactggcccaatgtcacacaaatagacagtggaagaaccaagctccaaacccgggttagtttgatgctagcactcctggttttaac

SEQ ID NO: 340120 - DNA, 621 bp, Homo sapiens
tttgaaaatgcgcaacaataaataaatagaatagatgaacttggggaatctatttatttagtcataaagactcaaacaatacaggtttgctgtacataaaatgatatgtataaaaattgcatggtatcaagaaaatagaatgaattttaaaatttatcttaaaatatatgtaaaacaaaaccaaattattttggctaaaatagacaaagtatataaaaaaagttttttaaaactcacttttaaatgaacatcaagaagtataccaattcttcaaatgatgaccaattctctagtaatgtattcatcaatgaacaaattccaaaggcttaccctcagcaaggcaggttaagaaaacaaagtagaaaaaaaaaggaatatatggtgagaaaaaaagtaggctgcaagcatactggagtttcttagcatttgtcttatgcattcttaacactaaaacatacrtattatttcaactttagagacaaagaagcaagatcagagaagtcctccaaattgcccatggttatagagttaattgcatgcagtctggatttgatcccagaaatatttagaggcaaatccagaccctgttccattctatcatttgaggccctggaatctgca

SEQ ID NO: 340121 - DNA, 552 bp, Homo sapiens
gaatggaatagtcatcaaatggaatcaagtggaatgatcgaatggactggaatggaatcatcatcgaatggatttgaatggaatcatcgaatacacttgaatggaatcttcatcgataggaaatgaatggaatcatcaaatggacacgaatggaatcattgtcgaakggaatcatatggaatcatcaaatggactcgaatgcaatcatcgaatgaactcgaatggaatcatcatggaatggaatcgaatagaatcattgaatggactcgaatgtagtgatcaaaaggactcgaaaggcattaacgaatggactcgaatggaatcattgaatggaccctaatggaatcatcatcaaatggaaaagaatggaatcatcaaatggactcgaatggaatcactgaatggagtcgaatggaatcatcattgaatggaatccattggaatcattgaataaaatcgaatggaatcttctaatggaatctaacggaataatcatcgaacggaatcaaatggaatcaacgagtggaatcgatagccataatcattgaatgg

SEQ ID NO: 340122 - DNA, 538 bp, Homo sapiens
acaaggagatttctctaatatgacatatctgaaccaaaacaacaagcataaaatgggtgattagtcattatataatattataaaaatctatagaaatctcttaatcagaacatttatgagaaatgtcataaatttaaagttaatgtgaattgcttttatattagtgtattgtttgtaagctgtctacccataatgttaattagcatggatatagtacaaacagagctacaatctgtactaatatttattctttgtataattctacttaaattattggatggaaaaagttatttccaatacaaacattgaaacataccctagaaatccgtctatgtagtacattcttgctctggttttgaaaaaaagcatatcaggttgtttaccaacggaataaaatgacagacgaaataatgaacatcctagattaacccaggcatctctacatgcatagttaaatgttattttaatatccggccrgatggcatgtaaaactgtagaatttaatgtctatctaaccataccaaactttccaaatatt

SEQ ID NO: 340123 - DNA, 578 bp, Homo sapiens
caattccatgatgattctatttgattcamttggttgacatttccattcgattccattcgatgatgattccctttgattccattcaaagatgattccattctagcccattcaatcattccattcgattctattcaatgatgattccattcatgtcgatttggtgattccatttgacttcatttgatgatgattcctttcaagttcattagatgattccattcgattccattttatgatgatcccattcgagtccattcagtgattccattcgtttccattccatgatgattccattccattccatgcaatgattccattcgattccgtttgatgatgatttcattcgagtccatttgatgattccatttgattccattcgatgatgattccattcgagtccattcgatgattctattcgaatccatttgatgatatcttttgattatagttggtgatgattccattggagtccattcaatgattccattcgattccaatcgatggtgattccattagagtccatttaatgattccatttgattccagtctctgatgattacattcgagtccatacgatg

SEQ ID NO: 340124 - DNA, 578 bp, Homo sapiens
caattccatgatgattctatttgattcaattggttgacatttccattcgattccattcgatgatgattccmtttgattccattcaaagatgattccattctagcccattcaatcattccattcgattctattcaatgatgattccattcatgtcgatttggtgattccatttgacttcatttgatgatgattcctttcaagttcattagatgattccattcgattccattttatgatgatcccattcgagtccattcagtgattccattcgtttccattccatgatgattccattccattccatgcaatgattccattcgattccgtttgatgatgatttcattcgagtccatttgatgattccatttgattccattcgatgatgattccattcgagtccattcgatgattctattcgaatccatttgatgatatcttttgattatagttggtgatgattccattggagtccattcaatgattccattcgattccaatcgatggtgattccattagagtccatttaatgattccatttgattccagtctctgatgattacattcgagtccatacgatg

SEQ ID NO: 340125 - DNA, 578 bp, Homo sapiens
caattccatgatgattctatttgattcaattggttgacatttccattcgattccattcgatgatgattccctttgattccattcaaagatgattccattctagcccattcaatcattccattcgattctattcaatgatgattccattcatgtcgatttggtgattccatttgacttcatttgatgatgattcctttcaagttcattagatgattccattcgattccatttkatgatgatcccattcgagtccattcagtgattccattcgtttccattccatgatgattccattccattccatgcaatgattccattcgattccgtttgatgatgatttcattcgagtccatttgatgattccatttgattccattcgatgatgattccattcgagtccattcgatgattctattcgaatccatttgatgatatcttttgattatagttggtgatgattccattggagtccattcaatgattccattcgattccaatcgatggtgattccattagagtccatttaatgattccatttgattccagtctctgatgattacattcgagtccatacgatg

SEQ ID NO: 340126 - DNA, 578 bp, Homo sapiens
caattccatgatgattctatttgattcaattggttgacatttccattcgattccattcgatgatgattccctttgattccattcaaagatgattccattctagcccattcaatcattccattcgattctattcaatgatgattccattcatgtcgatttggtgattccatttgacttcatttgatgatgattcctttcaagttcattagatgattccattcgattccattttatgatgatcccattcgagtccattcagtgattccattcgtttccattccatgatgattccattcsattccatgcaatgattccattcgattccgtttgatgatgatttcattcgagtccatttgatgattccatttgattccattcgatgatgattccattcgagtccattcgatgattctattcgaatccatttgatgatatcttttgattatagttggtgatgattccattggagtccattcaatgattccattcgattccaatcgatggtgattccattagagtccatttaatgattccatttgattccagtctctgatgattacattcgagtccatacgatg

SEQ ID NO: 340127 - DNA, 534 bp, Homo sapiens
gatgattccgtttgattccattcgatgaatcccttcgattcctttctttgatgattccattccattccattcaatgattccattcgaatctattccatgatgattcctttcgattccattcgctgatgtttcckttcaattccattcgatgatgattccattcgattccattcattgaggattccatttgattccattcaatgatgtttccgttctattccattcaatgattgcattcaattccattcaatgattatccccttagagtaaactcaacgattccattcaataccattcgatgatgattccttttgagtccattcaatgatttcattcaagtccatttgatgattcctttcaattccattctatgatgattccattcgactccattccatgattccattcgattgcattcgatgattccattatattccagtcaacgatgattccattcgagtccattcgatgattccattagagtacatttaatgattgctttgttttcaattcgaagatgattacattggattc

SEQ ID NO: 340128 - DNA, 534 bp, Homo sapiens
gatgattccgtttgattccattcgatgaatcccttcgattcctttctttgatgattccattccattccattcaatgattccattcgaatctattccatgatgattcctttcgattccattcgctgatgtttccgttcaattccattcgatgatgattccattcgattccattcattgaggattccatttgattccattcaatgatgwttccgttctattccattcaatgattgcattcaattccattcaatgattatccccttagagtaaactcaacgattccattcaataccattcgatgatgattccttttgagtccattcaatgatttcattcaagtccatttgatgattcctttcaattccattctatgatgattccattcgactccattccatgattccattcgattgcattcgatgattccattatattccagtcaacgatgattccattcgagtccattcgatgattccattagagtacatttaatgattgctttgttttcaattcgaagatgattacattggattc

SEQ ID NO: 340129 - DNA, 534 bp, Homo sapiens
gatgattccgtttgattccattcgatgaatcccttcgattcctttctttgatgattccattccattccattcaatgattccattcgaatctattccatgatgattcctttcgattccattcgctgatgtttccgttcaattccattcgatgatgattccattcgattccattcattgaggattccatttgattccattcaatgatgtttccgttctattccattcaatgattgcattcaattccattcaatgattatccccttagagtaaactcaacgattccattcaataccattcgatgatgattccttttgagtccattcaatgatttcattcaagtccatttgatgattcctttcaattccattctatgatgattccattcgastccattccatgattccattcgattgcattcgatgattccattatattccagtcaacgatgattccattcgagtccattcgatgattccattagagtacatttaatgattgctttgttttcaattcgaagatgattacattggattc

SEQ ID NO: 340130 - DNA, 534 bp, Homo sapiens
gatgattccgtttgattccattcgatgaatcccttcgattcctttctttgatgattccattccattccattcaatgattccattcgaatctattccatgatgattcctttcgattccattcgctgatgtttccgttcaattccattcgatgatgattccattcgattccattcattgaggattccatttgattccattcaatgatgtttccgttctattccattcaatgattgcattcaattccattcaatgattatccccttagagtaaactcaacgattccattcaataccattcgatgatgattccttttgagtccattcaatgatttcattcaagtccatttgatgattcctttcaattccattctatgatgattccattcgactccattcsatgattccattcgattgcattcgatgattccattatattccagtcaacgatgattccattcgagtccattcgatgattccattagagtacatttaatgattgctttgttttcaattcgaagatgattacattggattc

SEQ ID NO: 340131 - DNA, 501 bp, Homo sapiens
atgattccactcaaatccattggatgattccattcgtgtccrttcggtgatttcattagattccattcgaggatgattccattcgattccattcgatgattccattcaattccattcgatgatgattccattccagtccatatgatcattccatttgatttcattcgatgatgattccattcgattccattcgatgattccattctattccattcgatgatgattccattcgagtccattcgatgattccattcgagtccatttaatgattccattgggttcaattcaatgatgattacattggattccgttctatgattccattcaattccgttcattgacaatttgattccattcgatgatgattccatttgagttcattcgatgattctattcgattctcttcgatggtgattcaattctattatattggatgattccattcgattccatttgatgttgattcaattcgattctattcgatgatgattccattggatt

SEQ ID NO: 340132 - DNA, 453 bp, Homo sapiens
ggatttcacttgatgattctattcgattccattcaatgatgattcacttctcgtccattggatgattccatttcattccattygatgatgattccattcgattccattcgatgattccatttgattccatgcgacggtgagcaattcgattcaattccatgatgattctatttgattcaattagatgatgtttccattcgaatccattccatgattattccattggaatccattcggcgatgattccatatgagtcaattcaatgatgattccatatgggtccgttcgatgataattccatttgatttcattcgatgcttctattcaaatccagttgatgatgattccgttggagtccatacgatgattccatttgatttcatttgatgatgattccattcgattccattcgatgatgattacattggattccattctatgattccattcaat

SEQ ID NO: 340133 - DNA, 453 bp, Homo sapiens
ggatttcacttgatgattctattcgattccattcaatgatgattcacttctcgtccattggatgattccatttcattccattcgatgatgattccattcgattccattcgatgattccatttgattccatgcgacggtgagcaattcgattcaattccatgatgattctatttgattcaattagatgatgtttccattcgaatccattccatgattattccattggaatccattcggcgatgattccatatgagtcaattcaatgatgattccatatgggtccgttcgatgataattccatttgatttcattcgatgcttctattcaawtccagttgatgatgattccgttggagtccatacgatgattccatttgatttcatttgatgatgattccattcgattccattcgatgatgattacattggattccattctatgattccattcaat

SEQ ID NO: 340134 - DNA, 453 bp, Homo sapiens
ggatttcacttgatgattctattcgattccattcaatgatgattcacttctcgtccattggatgattccatttcattccattcgatgatgattccattcgattccattcgatgattccatttgattccatgcgacggtgagcaattcgattcaattccatgatgattctatttgattcaattagatgatgtttccattcgaatccattccatgattattccattggaatccattcggcgatgattccatatgagtcaattcaatgatgattccatatgggtccgttcgatgataattccatttgatttcattcgatgcttctattcaaatccagttgatgatgattccgttggagtccatacgatgattccatttgatttcatttsatgatgattccattcgattccattcgatgatgattacattggattccattctatgattccattcaat

SEQ ID NO: 340135 - DNA, 453 bp, Homo sapiens
ggatttcacttgatgattctattcgattccattcaatgatgattcacttctcgtccattggatgattccatttcattccattcgatgatgattccattcgattccattcgatgattccatttgattccatgcgacggtgagcaattcgattcaattccatgatgattctatttgattcaattagatgatgtttccattcgaatccattccatgattattccattggaatccattcggcgatgattccatatgagtcaattcaatgatgattccatatgggtccgttcgatgataattccatttgatttcattcgatgcttctattcaaatccagttgatgatgattccgttggagtccatacgatgattccatttgatttcatttgatgatgattccattcgattccattcgatgaygattacattggattccattctatgattccattcaat

SEQ ID NO: 340136 - DNA, 519 bp, Homo sapiens
tggattgaggccatatcgagaaaaaaaattcccgcaattcctcttttagctcatctcacttctcacattctttattggaggcaattaaaggaaccagttggtacattcaccactctgcctggaaattttctttgccagatttgcaagtttattagccacatttgctatcttccacataagaaggtggcagctttcctaatttttgtgccagtatcattaaggtcygtttgtttttagctctttctaacagtttcctcaaggtttttaggtccataacttccacctgatcataaagccattgctacatattttgatattttgttgctgaagcacctctgttctggtgtcattccatcttttgttaggcttcttccatggaacaaactacctttaaaatattgtggcttaaaacagcaatcacttgttatttctcatgattctgagggtcaggattttacagaggcagtgggcttatctacgctcccttcaatgcctgctgttactggaaaggctgcaaca

SEQ ID NO: 340137 - DNA, 534 bp, Homo sapiens
atcatcgactggaattgaatagaagcaccgaatgaaatcwaatggaattatcatcgaacggacccatatggaatcatcattgaattgactcatatggaatcatcgccgaatggattccaatggaataatcatggaatggattcgaatggaaacatcatctaattgaatcaaatagaatcatcatggaattgaatcgaattgctcaccaacgcatggaatcaaatggaatcatcgaatggaatcgaatggaatcatcatcgaatggaatgaaatggaatcatccaatggacgagaagtgaatcatcattgaatggaatcgaatagaatcatcaagtgaaatccaatggaatcatcatcgaatagaatcgaattgaatcaacatcaaatggaatcgaatggaatcatccaatataatagaattgaatcaccatcgaagagaatcgaatagaatcatcgaatgaactcaaatggaatcatcatcgaatggaatcaaattgtcaatgaacggaattgaatggaatcatagaacggaat

SEQ ID NO: 340138 - DNA, 534 bp, Homo sapiens
atcatcgactggaattgaatagaagcaccgaatgaaatctaatggaattatcatcgaacggacccatatggaatcatcattgaattgactcatatggaatcatcgccgaatggattccaatggaataatcatggaatggattcgaatggaaacatcatctaattgaatcaaatagaatcatcatggaattgaatcgaattgctcaccracgcatggaatcaaatggaatcatcgaatggaatcgaatggaatcatcatcgaatggaatgaaatggaatcatccaatggacgagaagtgaatcatcattgaatggaatcgaatagaatcatcaagtgaaatccaatggaatcatcatcgaatagaatcgaattgaatcaacatcaaatggaatcgaatggaatcatccaatataatagaattgaatcaccatcgaagagaatcgaatagaatcatcgaatgaactcaaatggaatcatcatcgaatggaatcaaattgtcaatgaacggaattgaatggaatcatagaacggaat

SEQ ID NO: 340139 - DNA, 534 bp, Homo sapiens
atcatcgactggaattgaatagaagcaccgaatgaaatctaatggaattatcatcgaacggacccatatggaatcatcattgaattgactcatatggaatcatcgccgaatggattccaatggaataatcatggaatggattcgaatggaaacatcatctaattgaatcaaatagaatcatcatggaattgaatcgaattgctcaccawcgcatggaatcaaatggaatcatcgaatggaatcgaatggaatcatcatcgaatggaatgaaatggaatcatccaatggacgagaagtgaatcatcattgaatggaatcgaatagaatcatcaagtgaaatccaatggaatcatcatcgaatagaatcgaattgaatcaacatcaaatggaatcgaatggaatcatccaatataatagaattgaatcaccatcgaagagaatcgaatagaatcatcgaatgaactcaaatggaatcatcatcgaatggaatcaaattgtcaatgaacggaattgaatggaatcatagaacggaat

SEQ ID NO: 340140 - DNA, 422 bp, Homo sapiens
atcatcattgaatggaatcgaatagaatcatcaagtgaaatccaatggaatcatcatcgaatagaatcgaattgaatcaacatcaaatggaatcgaatggaatcatccaatataatagaattgaatcaccatcgaagagaatcgaatagaatcatcgaatgaactcaaatggaatcatcatcgaatggaatcaaattgtcaatgaacrgaattgaatggaatcatagaacggaatccaatgtaatcatcattgaattgaacccaatggaatcattaaatggactcgaatggaatcatcgaatggactcgaatggaatcatcatcgaatggaatagaatggaatcatcgaatggaatcgaatggaatcatcatcgaatgaaatcaaatggaatgatcatatggactggaatggaatcatcatc

SEQ ID NO: 340141 - DNA, 500 bp, Homo sapiens
atccaatggaatcatcatcgaatagaatcgaattgaatcaacatcaaatggaatcgaatggaatcatccaatataatagaattgaatcaccatcgaagagaatcgaatagaatcatcgaatgaactcaaatggaatcatcatcgaatggaatcaaattgtcaatgaacggaattgaatggaatcatagaacggaatccaatgtaatcatcattgaattgaacccaatggaatcattaaatggactcgaatggaatcatcgaatggactcgaatggaatcatcatcgaatggaatagaatggaatcatcgaatggaatcgaatggaatcatcatcgaatgaaatcaaatggaatgatcatatggactggaatggaatcatcatcgaatggaattgaatggaatcatcgaatggaatcraatggaatcatcctcgaatggaatctaatgaaatcaccgaatggacacgaatggaatcatccaatggatttgagtggaatcat

SEQ ID NO: 340142 - DNA, 565 bp, Homo sapiens
actagccccatagaatgagattaaacacgttccttccacttttttaaaaatactttgggagtaggattggaatttattcctctttaaatgtttggtagaattcagcagtgaagccatcaggtccttggcttttctttattggcagactttttattacagcttttatcttgttactttgttatttattcaggtttggaacttgtttatggtccaatcttcgtaggttgtatgtgtttaggaatttgcccatttcttctagattttctaattkattggcacatagttgctcacagtagccaataatgatgcttccgagtatccattgcactgttttatttttcatctctgatattatttttatttctattattctgggtttttttcttagtctagctgaaggtgtgttgattttatttaacgtttaaaaaaacaacttttattagttgtatatattgttttctttctttcaattttatttatttctgctctgatctttagtattcctttttttagtaattttaggtttggtttgatcttgcttttctggttctttaatatgcatcat

SEQ ID NO: 340143 - DNA, 499 bp, Homo sapiens
atgaaatggaatcaaatggaatcatcaaatggactcgaatggaatcattggatgtactcgaatgaaatcatcgaatggactcgaatggaatcatcatcgaatggaatcaaatggaatcctcgaatagaatcagatggaatcrtcaaatggaatcgaatgtaatcatcatcaaatggaatagaatggagtgatcgaatggaatcgatggcaatcatcatccactggaatcaaatggaatcattgaatggaatcaaaggaaatcaatgtcaagtggaatcgagtggaatcatcgaaagaaatcgaatggaatcattgtcgaatggaatggaatggaatcaaagaattgaattgaatagaatcaccaatgaattgaatcgaatggaatcctcatcgaatggaatcgaagggaatcattggatgggctgaaatagtatcatcatctaatggaatcatgtggaatcatctaagggacacaaatagaatcatcattgaatggaat

SEQ ID NO: 340144 - DNA, 499 bp, Homo sapiens
atgaaatggaatcaaatggaatcatcaaatggactcgaatggaatcattggatgtactcgaatgaaatcatcgaatggactcgaatggaatcatcatcgaatggaatcaaatggaatcctcgaatagaatcagatggaatcgtcaaatggaatcgaatgtaatcatcatcaaatggaatagaatggagtgatcgaatggaatcgatggcaatcatcatccactggaatcaaatggaatcattgaatggaatcaaaggaaatcaatgtcaagtggaatcgagtggaatcatcgaaagaaatcgaatggaatcattgtcgaatggaatggaatggaatcaaagaattgaattgaatagaatcaccaatgaattgaatcgaatggaatcctcatcgaatggaatcgaagggaatcattggatgggctsaaatagtatcatcatctaatggaatcatgtggaatcatctaagggacacaaatagaatcatcattgaatggaat

SEQ ID NO: 340145 - DNA, 565 bp, Homo sapiens
ctttgattagacgactgtttaaatttttgtccagttttttaattgggttgtctgtctttacatttttggataaaatttcttcatcaggtatgtgtttcacaaatattttcttccagtctgtgcattttttaatactccaatagtgtctttcacagaacagaagtttttacttctaatgaagtacacctgtcattttttctttgaaagtgtttttagtgttttatcttaaaaaaactcctcactgcacccaaacttctcagttcacccacgcagattttctcttacatgtatttagacattttatagtttttcgttttatatttataagtatgatctgttttaagttaattttattgtaaaatttgtgtttgggttcttttattaaatatagawatctaattggtgatgcatcattttttgagaaaggctgccatcactccttcaactttcttttatgtccttgttaaaaatcagttgatcatatttattttgtcctatgtctatattctctttctttgatttatatgtttcttttaactgtatcatataatcttggttattatag

SEQ ID NO: 340146 - DNA, 520 bp, Homo sapiens
ctgcagtccggcctgggcgacagagcgagactccgtctcaaaaaaaaaaaaaaaaaaaagaattagataatatatattctatatatrttatatatgtgtgtgtgtatatatacatatatgacatctgacttgtcatctgacccatagaaggcgattaaataataggtgccattgctatttcctggcattcaggcatattctaggacatagtctaaaacttttctctgatgttgtttccagttattttatgaactcttgatgagtgtggcttacctggttacattgttagttacattccatgaatttaatcattaatatccctgtttcatgacagaataagtacagcacctaattaaaaagtttgtttataatgtagtggaaatttatttatttcaataatgactatagtaattcaagtgaaaagcaatccaaagggaactttatgaaaagtggaaagtatattattaataacaaaatttttaaaattcatgtatgtgaataaagtttgtactacataatt

SEQ ID NO: 340147 - DNA, 618 bp, Homo sapiens
tctgcaatctagtaaattgatcaggaataattaagaattgactacatatatttaaacagaacaattgaactgacagttctgctaaattcctgtaaagcctccattgaagctaacttgaataagattttctcttacaagatgatctgaaagtgacatttaggcaaaacttccacratggttatctttctaaatacttcttagctgaaaatatcttcatatctttgcactatgtgcacagtttaaaccatgtgtttgatatattctatatagatgtcattcaaatattatttgtatccttgtattataagtattatttgcttatttttggcctgctttcagaaattgtgaaatatttgactacagggatatagtattaatcctcagtctggtacataggggcaacttcattggctttatttacagcaatccatttatttgcagccctgaaaataagtgaggttgtgactgacattcaacaaatgtttaccaagttaaccactgccttaaaaataaaaccctttactactatttggcaggactgtttctactactggcaggattattatttcccccaccaccacctcactgcttatgtttctggtctcctcacttatgagt

SEQ ID NO: 340148 - DNA, 618 bp, Homo sapiens
tctgcaatctagtaaattgatcaggaataattaagaattgactacatatatttaaacagaacaattgaactgacagttctgctaaattcctgtaaagcctccattgaagctaacttgaataagattttctcttacaagatgatctgaaagtgacatttaggcaaaacttccacaatggttatctttctaaatacttcttagctgaaaatatcttcatatctttgcactatgtgcacagtttaaaccatgtgtttgatatattctatatagatgtcattcaaatattatytgtatccttgtattataagtattatttgcttatttttggcctgctttcagaaattgtgaaatatttgactacagggatatagtattaatcctcagtctggtacataggggcaacttcattggctttatttacagcaatccatttatttgcagccctgaaaataagtgaggttgtgactgacattcaacaaatgtttaccaagttaaccactgccttaaaaataaaaccctttactactatttggcaggactgtttctactactggcaggattattatttcccccaccaccacctcactgcttatgtttctggtctcctcacttatgagt

SEQ ID NO: 340149 - DNA, 625 bp, Homo sapiens
tattacagaatatttaacaagctatcaaattgtacatatttaaagtaaacaaaatgataaattttgacatagtcatatatggaaacatcatcaaaatacggacaatgaacatatacacaaaatccaaaacttttctcatgcctctttatgatttttcaaaaccatttcttcccaagtactcccccgtacytaggcaacaactgatatattttcttttgttaaaaataaatttgtattttctagaaatctatatgaatggaataagaaaatatatactacttttttctatctccttttaactcagcttaattattttgagatacattcatattgttgcatagattgaatatttaatttatttagttgctgaatagcatcttcgtatattagtattccaaactttgtttatccatttgcctactaatggacatttgggttatatttaggttttggataatacatgcaaatctgttatgaacatttgtgtgcacatctttgtgctggcatatgctttcattatcttggataaatacctagacacggaatgtcagagaatgttttccaaggtggttgtatcaatttgtatcccagcaacagtgtatgaaaattctagtatccctcagcc

SEQ ID NO: 340150 - DNA, 532 bp, Homo sapiens
tttaatttgtctattacctctaagaatttgtttaacattcttattcttatagtgcaagtctgctgctgctaaattaattcagcattcatagttctcctaatatattactttcatatttttttctgaaagaattttctctgagtatagcattttaagtttatgggttttattttttcttttaatgtactaaagatttttctccattgtcttttggggtgtgtgtgtgtgtgtgtgtgtgtgtgtgtgtgtgtgtgtgtgtatgttycaataaggtgtccgttgtcattcttatattattcctctaatgtggttttttatccctcttgctactgttactattttatttttaccatgattttaacaattgtattttaatgtattttggtatagttttcttcaagtttttcttttttaagtagtatattagtaaatgatctttccttcttttttttttatttcaatagtttttggggaacaggtggtgtttagttacgtggatatttttaatggtgatttctgagattttggtgca

SEQ ID NO: 340151 - DNA, 477 bp, Homo sapiens
tcaaaggacgcatttaaaggcaagtagccagtgagaaaatttagaaagttattgcatgattttgaacccaaaaataagcaagggcctttaaaagaaatctaggtaattaccataggaatagaggggatgatgtgaacgatattttataaactatattaggaagcttgtggaaaaaaaacatactctgaaggtctagataattattattttctctcctagatacatattttcaccaagggcaaaggtgtttaaattgtactgtttgggacactagtggtcctgaggaacttctgacatcaaacacatatgtatatatatacatgcatwcatatttacatatatgcacacacaaatacatgcattagatacttacatatttacatagtatgcttcaaagtataaattttgttaaaaaatcctgatatagccaattaggcaatgttttttacagctgcagcttattaagttgcaagattc

SEQ ID NO: 340152 - DNA, 595 bp, Homo sapiens
ctgcaataaactagaaaattaaatgtgcaactaacagattttaagaagcaatatatatattatttcattgtattcatttgtaattaaattgaatagcaagagattctctgttataatcaagatgttttatgaaaaagaatcagtctgaaatcttaattcacagatgaaattataagtagcaatcatttaaatttatatgtacttcaagaaggcctttgaatacatcactagaaaatcctcaagaacttaaaaaatatgaatattaggaaaactgatattctagtaacccccaactgattggaggataatgttaaacagacggtgatgacagatctggaattagcttgaacaagtggtatttcccagaggtcagacctggtttcagtttttaaaaatatctttttgatgacctgattgaaaaagtttcgagtgtgatttttacattttttgaaatgttttttgattgtgtgtgtgtttattaaaccaatgtaatttacaaacytaaacttacataattcaaacatttttataaacatcttttgaaaattatggtcattattcaacattgttcaaatatgtagtaatttaatataga

SEQ ID NO: 340153 - DNA, 515 bp, Homo sapiens
ttattagcttcatctgcctaaagttcttaacaagaacagttttaggtgtgttggagttgaatatggaagtgtaatgcattgagaaggcaacagcaggtgagaaaaygagtagagagtgcgagaaaactccttcacattatgttgcaaagggaatggaagaattgggtagaagtcaaagagttcattttgattgaaacaatgatccataaaggaaaaaaaaagatatgacataatcagaaaactgatcatcatcagtattttctagaatttgaataaagaaagaagtgtcagattgaggtaattaaagaattaagcaagggccaagaattataaagggaattttaggtatgacatgtagtatggagtttagcaatgaggagttattgataggctttaagcattggtacttcacaatcagaatttaatttaggaatgttattaacactgcaattgaagaatagattagagaagcacaagagagaaaaaagatagactgggtaagaggacaatgtggt

SEQ ID NO: 340154 - DNA, 515 bp, Homo sapiens
ttattagcttcatctgcctaaagttcttaacaagaacagttttaggtgtgttggagttgaatatggaagtgtaatgcattgagaaggcaacagcaggtgagaaaacgagtagagagtgcgagaaaactccttcacattatgttgcaaagggaatggaagaattgggtagaagtcaaakagttcattttgattgaaacaatgatccataaaggaaaaaaaaagatatgacataatcagaaaactgatcatcatcagtattttctagaatttgaataaagaaagaagtgtcagattgaggtaattaaagaattaagcaagggccaagaattataaagggaattttaggtatgacatgtagtatggagtttagcaatgaggagttattgataggctttaagcattggtacttcacaatcagaatttaatttaggaatgttattaacactgcaattgaagaatagattagagaagcacaagagagaaaaaagatagactgggtaagaggacaatgtggt

SEQ ID NO: 340155 - DNA, 579 bp, Homo sapiens
aagtacttggcccagtactttattctgtggcagctcttaaaattactattatggttcttattacccaagaatgtatgatcctgactgataattggaagtaagattaaaatatgtattttatttaagtgagaattaatctaaaagatttccaaaccagttgtttttgtgtactgaaagataagatgaatttgagaattcattcaktgtttattcaacaaacagcccttgtttgtattagttcattcttgcactgctataaagaaacacctgagactgggtaatttataagaaaagagattgaattggttcatggttctgcaggctgtacaggaagcatagtggcatctgcttctgaggaggcctcaggaagcttccaatcatggcagaaagcaaggtgggggcaggcacgtcacatggcgagaatgggagaaagaggtgaggggaggcgccacacactttcaaacaactagaccttatgtgaactcagagtgagaacacacttatcaccaaggggatgacccaagccacttatgagggttcctcccccatgacccagacacctccaccaggccacacctc

SEQ ID NO: 340156 - DNA, 557 bp, Homo sapiens
gattttattttcaccgttctgatgaaccaaaaagtcctgactgcgctttccccttgatctgccagtctttatttctgagatctgagtaatccttgagtagttgtgatcatcaaacctcacctagatattccctttccctgacttccggatgagcgatggagttggctggaaagrcttgtggggctgccgggggaattcatctccagggtaattacatagctgttcaaggggctgaggatcctaattggggtgtcagacatcttgagatgtgactcaagttctgccttcctgcttcatcaggaattaaaagttagtatttggtcatttttacctcctgagttttgctttctaaatctattttaccctttttttttttttcactttcatgttatttgagtaaagggttcctttaggctcatcttttaactcaattaacccacaagcactactttatagtctttccctaccagactgtcctcattatgtaattatggggaactgtgtggcttcttggctatgaggccaaatgtagccccccacaccagaaatgatttctt

SEQ ID NO: 340157 - DNA, 508 bp, Homo sapiens
gtgttgatctgctacagactattccgtcatattcaaaagcagaaatctttctgtgtttagttcttttggaatagagtgttatatcttgtaggcctgtgagtttctcatggttatattaatgtaaaaacgtamgacttgatccccagagttctttggtctcttgctaagtgttttccttcattaactgcttattcttgctatctgatgggaaagaattgtggaacttaaatacagttgacccttgaacaacatggatttgaatttgcagatctacttacacgtgattttcttctgcttctgccaccttgagacagaaaggtcgatcccttctctttctccttctcagcctactcaacgtgaagatgacaacaatgaagacctttgtgatgatccacttccatttaatgaatagtaaatattttttctcttccttatagttttcttaataacattttcctttctctagcttattgtaagaatatagtatgtcatacacgtaacacatgaa

SEQ ID NO: 340158 - DNA, 537 bp, Homo sapiens
aggggaaaatataaccacacaaggcactaataaagaaaaagctctgggaatgtaaatggatggcttcccatacccaaaatatctgataacatctgcaaagcacttcatttataccaacaattgtaaccttgctttaaaacataaattgctttaataattccgcagtttctttcctgggttaaaatcttacttggaaatattgaaatgtacagtgtcctagtttcctctaatgggtctttgatttgcaaggaactgtaaagcgttcttattcaccgaggcatcctactcaggtttggtttgaccctatcttttccactacttccatctctgtgtctctgttaggacacttcctccagcaacagaatcttcctccagcaacagaatcttcctycagcaacagagcatctcaggagagaaacatctactcttttctctacccactctttccaattctgcaagaggagacaataaataggagattgcaggcaaagggccagatttacagtgagtacagtcactgagtgttaaaagattaca

SEQ ID NO: 340159 - DNA, 261 bp, Homo sapiens
aatgctgccaccactgctgcaaatgctcacatggaggctctcaccctggcacctgctagcactctgccacaggtgactagcacgcaccctgccatgctgccactgccactgccactggtatgggcgaatgaggatggattctgctgycaccaccctataaagagctttggctggcagcactcatgggagtgttgtgactagcagtgtgggagcacctcaacctctctggtgcagcccattctcaaacataaggggtcagag

SEQ ID NO: 340160 - DNA, 317 bp, Homo sapiens
taaatcattccattgtaaagatacatgcagccacatgctcactgcaacacttttcacaatggtgaagacatggaatcaacctaaatgcccatcagactagawgaagaaaatctagtacatatacaccatggaatactatgcaaccataaaaaagaatgagataatgtcctttgcagaaacatggatggagctggtggccactatccttagcaaactaatacaggaacaaaacaaaataccatgtttttacttataagcgggagctaaaaaatgagaatacatggacacatagagggggaaaatgcacactgggtcct

SEQ ID NO: 340161 - DNA, 378 bp, Homo sapiens
aagtgagtataaatcattccattgtaaagatacatgcagccacatgctcactgcaacacttttcacaatggtgaagacatggaatcaacctaaatgcccatcagactagatgaagaaaatctagtacatatacaccatggaatactatgcaaccataaaaaagaatgagatmatgtcctttgcagaaacatggatggagctggtggccactatccttagcaaactaatacaggaacaaaacaaaataccatgtttttacttataagcgggagctaaaaaatgagaatacatggacacatagagggggaaaatgcacactgggtcctacttgaggggagagggtggggaagggagggaatcagaaaaaataatctattg

SEQ ID NO: 340162 - DNA, 619 bp, Homo sapiens
ggagctggtggccactatccttagcaaactaatacaggaacaaaacaaaataccatgtttttacttataagcgggagctaaaaaatgagaatacatggacacatagagggggaaaatgcacactgggtcctacttgaggggagagggtggggaagggagggaatcagaaaaaataatctattgtgtatcagagcagtgtatagaaaatatatactgttggtgtatatatttggtgtatatattgttggtgtacactgttggtataagcataaagttgttttggtatgcattgggcagtgcctatgaaaaattattaagaattttaatggcttttatactgactaagcaattcaattcccagatacatgtttaaagaacagctaggaaatgtgtgcaagaagtcttattcaaaaattttaattgtaccaatgttttaattaggccaagtttgaaaaacaaaacaatgccaaatacctgaatttctatcaataaaataatggttacataattwtagggtacaactatagttttgcatattataattcagttaaaaagagtaggttacgtctatcttacacataaagactcccaggacacattgttaaataaaaccagaaag

SEQ ID NO: 340163 - DNA, 643 bp, Homo sapiens
gtttgccaaatattttcaaaatctggtacattgaagtcttgtgcttcccttaaaaacatgcatggctgaagactggctgggctaaataatcgcaaaactaattagtggtaggacagaaatggactttaagggacctgactcccggtatagggttttatcccacttcaccctggtgcttccagaaaagataaaagagttttgtaataatcagaagtaaaaatattaacatatcagtcactgttctattagcttaaagcagcaaagggtaaattatgttgtttgccaatgttttacaatacttctcataacagctttaaagccacaaattcttggctaagtcctgctgattctacaaatattaaggtcctaggtattacagttttgaattagtcagaattctttgggctacaagttacagataactaacttgaatcagtttaaggtcagcagaggcatattggaaagattttaggacaagccactatctgtgggaagagctgacatgtgatgcctgctttggggcttagagtcttgatcactaataaccttcaagacttgctctttttcacccctggtttctctcctgtggcagastgatttgtcaacatggaggtaaaaatggtgaccaacggttcctgagcct

SEQ ID NO: 340164 - DNA, 543 bp, Homo sapiens
ctctcagtggaaaagggagctaaaaaggagacagagtgggaaggtaatcttcccccaaagtccagccgtccttagccagactcctctccaaagcaatgccgtcaaactgctcctttgaagtcaagctgcttctctttgaggtccaactgtagtctctggcatccagctgcttctcttcttctccctctgccagcaaagcctgggaattttatgggcacagaatggggggcagggtaggccatsggtgattttggaaaaggcagcattcaagtgggaaagcggggatgtgaagttctcactttgggctgtggttctagcttgagggtgaggtcctcgccagggacctgccctcttctgcccagaattcccctgcctcctgtccctgtcaacaggtaccaaaaggcctgttccttcaagacactcttctctgttgcagacatctcactctgaaccctcacaagggcaagcagagcaagtatgtggcagctaagcaagtattggtaaaggttagtatgatggcttgaagatatctcacagagacta

SEQ ID NO: 340165 - DNA, 591 bp, Homo sapiens
gaatgaattgcacagatttctctgaatggtcacatgagggaggtacaaaaacgaaagcattagtcctgttttgcgaactctgaaggcacaacacagctgctggactgctgatagaagtttgaacagtggccagagagagcgctggcaccttcagaaggttgtacccttacaccaacatcaatgttcttggcttcagacatggcagccatgagcaaaagtagtgagtggcattagaggtcgtggccttggtagcccctggcagaagagctactgcttttaatagtgatggaagacattagtccctgggaagcagagctgagagggaaaaaaatggaacccacaagggaatcaagaaaagtagttcrtgactcaataatctcaagtaccaaacatcactatgttctaaggtagttatttttgtgcactaggacctgtcttgaattgactgttgatcttgaaagttgatttgccttgcctgcagccatccagcttcctgcttttaaaaggattcttactggcattagaagatattttgtaatgagtcctgaaaacatcaataagaaaacagcaagttccaacgatgttccctta

SEQ ID NO: 340166 - DNA, 585 bp, Homo sapiens
ccctgtggggtctaggttgctccagattgtctgtttgccatattaggctccatagagaaagataatttgtttttaaagcaacagtttgctttgatttgtaaaaactacaggtaaccccttcacctgggatgatagtttatacatagtaagcatcagtaaatatttggtaaatattttttagacaacacaatttaaagcatctaaagttatmtaatggcatcatattctaactactaaaaacaaacaaaaaaaacactcctggaaagcttaacctgaagatctaaagtaatagtcatagccaaactactgtggtgcagagaagtagtggaatttggaaactggagatctagagttttgtcaccctttttctcttcctggaagataattttcttctgaaaaatcaatgtttcacaatacaatgcaatgcaaagagatttattaagaacaacacttttcttcatgctatacctaattatagttaacatacatacatgatagatttgctcctataaactaattaaatactagtgcaaggatatagaattgctgaacaagtgcaggatggttgatttaaagcttatgcgt

SEQ ID NO: 340167 - DNA, 571 bp, Homo sapiens
atattcatttggcactgggctccacaggcacatgmgtacacacacacacacacacacacacacacacacacacacacagacacctagaataagacaagacacatggggaatggaatagtgtgtgggtggaatataaagagcaccgggacacttaggtttgagtttcagccctatgagattttagctcttaacttctcttaatctgtttcattacctgtaatgaggattcaaataccactcctgcataccacaatgggcctgttaaaagaattgactgaaatgatataaaagtttgtaaaaagtaaaatacagttaagggttttaatcatatcatcatcatcttaattggtttacttggttcagttaatatcaactaatcttcatttccagaaggaagtattaagcatgtcagagaaactcattatcttttattctccaccaaaaactaggagggctttaatagtggatttgtgaagtttgtattcaagaattgcatgagtttagaaaaaaatgtttataatacactcctcataatataaatgagaatatcttggctattgtgtaaggaaga

SEQ ID NO: 340168 - DNA, 571 bp, Homo sapiens
atattcatttggcactgggctccacaggcacatgagtacacacacacacacacacacacacacacacacacacacacagacacctagaataagacaagacacatggggaatggaatagtgtgtgggtggaatataaasagcaccgggacacttaggtttgagtttcagccctatgagattttagctcttaacttctcttaatctgtttcattacctgtaatgaggattcaaataccactcctgcataccacaatgggcctgttaaaagaattgactgaaatgatataaaagtttgtaaaaagtaaaatacagttaagggttttaatcatatcatcatcatcttaattggtttacttggttcagttaatatcaactaatcttcatttccagaaggaagtattaagcatgtcagagaaactcattatcttttattctccaccaaaaactaggagggctttaatagtggatttgtgaagtttgtattcaagaattgcatgagtttagaaaaaaatgtttataatacactcctcataatataaatgagaatatcttggctattgtgtaaggaaga

SEQ ID NO: 340169 - DNA, 571 bp, Homo sapiens
atattcatttggcactgggctccacaggcacatgagtacacacacacacacacacacacacacacacacacacacacagacacctagaataagacaagacacatggggaatggaatagtgtgtgggtggaatataaagagcaccgggrcacttaggtttgagtttcagccctatgagattttagctcttaacttctcttaatctgtttcattacctgtaatgaggattcaaataccactcctgcataccacaatgggcctgttaaaagaattgactgaaatgatataaaagtttgtaaaaagtaaaatacagttaagggttttaatcatatcatcatcatcttaattggtttacttggttcagttaatatcaactaatcttcatttccagaaggaagtattaagcatgtcagagaaactcattatcttttattctccaccaaaaactaggagggctttaatagtggatttgtgaagtttgtattcaagaattgcatgagtttagaaaaaaatgtttataatacactcctcataatataaatgagaatatcttggctattgtgtaaggaaga

SEQ ID NO: 340170 - DNA, 590 bp, Homo sapiens
tgaaatgaacacactcatgttgctggaagaaatggagaaacaaaatgtcgatccatacaacagaatattattcagcaagaaaaaggaaaaagctactgatacatgctatatgatgaacctgaaaaacaatgcaaagaaagaagccagatgcaaaagatcagatattttatgattccattaaatgaaatttttagaaaaagcaaatccatagagatagaaagcgatctgtggttgtctgggcctgaggttgggagtgaaactgattgcaaatggcacacagcaactttttggagtaataggaatgacctaaacccagattgcaatgatggttgcccagctatatgagcttcctagaaatcatctaattatacaaacagtgagtgatttcataattgtacctcaataaagccactcaaaaaagaaaataagaagggaaggaaagggggaagaaaggaaagaaggaaaaaagacatgagaaaracaaaagaaaataaaaagaagagaaaaactcactgctatacaatgatcactcccagccctagccccacactgcttagcaccagctctaataccagctttgtgatcttggc

SEQ ID NO: 340171 - DNA, 590 bp, Homo sapiens
tgaaatgaacacactcatgttgctggaagaaatggagaaacaaaatgtcgatccatacaacagaatattattcagcaagaaaaaggaaaaagctactgatacatgctatatgatgaacctgaaaaacaatgcaaagaaagaagccagatgcaaaagatcagatattttatgattccattaaatgaaatttttagaaaaagcaaatccatagagatagaaagcgatctgtggttgtctgggcctgaggttgggagtgaaactgattgcaaatggcacacagcaactttttggagtaataggaatgacctaaacccagattgcaatgatggttgcccagctatatgagcttcctagaaatcatctaattatacaaacagtgagtgatttcataattgtacctcaataaagccactcaaaaaagaaaataagaagggaaggaaagggggaagaaaggaaagaaggaaaaaagacatgagaaaaacaaaagaaaataaaaagaagagaaaaactcactgctatacaatgatcactcccagccctagccccacactgcttagcrccagctctaataccagctttgtgatcttggc

SEQ ID NO: 340172 - DNA, 563 bp, Homo sapiens
aattcctttttaataggttctcttgacttgccgtaattccatccaccaagttgcactcctgggcttccagaatttagacttaattatttgggatgaccaaactgagaaaattctgcacttgattgtctgccagtagaccgtaccacttgacttggtgattcctgtaacagaatattaatcttgaagaattaccaccctgatattggtccatacttgggtgtggctctagtgttacaggatttcatgagtgctgctttgtcagctrgaaatctctgtagccaccactgcctctatccggccttgcttgggcccactgggctcactctacctgctcagccttgcaggttgtgcttggctcatgcccactcagatcccattcctgccacagctccacattcagcccactgctggactgggcatgccgtgaacagcttccatggtgggtgccagcatctagatgaggggaacatggtggcacccaaaaactcagagatgatagcaactgtggtgccccaaaggtgttacagctcttgctcaaggagtcccaacatctgagcctccag

SEQ ID NO: 340173 - DNA, 548 bp, Homo sapiens
cagagcactcttcacaataacaaagacatggtatcaacctaggtgcctatcaacagtgaactggataaagaaaatttggtacatatacatcatggaatactacgtaaccatgaaaaaaaatcatattctttgcagtgacaggaatgcagctggaggccattatcctaagccaattaatgcaagaacagaaaaccaagtatcgcatgttctcatttataagtgggagctaaattttgggtaaacatggacacaaagatggcaataatagaccctggtgactgctagtggggagaaggagggaccagggcaagggttaaaaaactaattatttgggcactatgctcaytacttgagtgattgaatcattcatactccaaatctcagcatcatgcagtgtacccaaatttgcatatgtacatttaacaaatttgcacatgtaccctctgaatctaaaataaaagttaaaatctttttttttttttttaatttcagcagggggccagaggtctgttttggtttatcacctctacaagttaaattaagatgct

SEQ ID NO: 340174 - DNA, 548 bp, Homo sapiens
cagagcactcttcacaataacaaagacatggtatcaacctaggtgcctatcaacagtgaactggataaagaaaatttggtacatatacatcatggaatactacgtaaccatgaaaaaaaatcatattctttgcagtgacaggaatgcagctggaggccattatcctaagccaattaatgcaagaacagaaaaccaagtatcgcatgttctcatttataagtgggagctaaattttgggtaaacatggacacaaagatggcaataatagaccctggtgactgctagtggggagaaggagggaccagggcaagggttaaaaaactaattatttgggcactatgctcattacttgagtgattgaatcattcatactccaaatctcagcatcatgcartgtacccaaatttgcatatgtacatttaacaaatttgcacatgtaccctctgaatctaaaataaaagttaaaatctttttttttttttttaatttcagcagggggccagaggtctgttttggtttatcacctctacaagttaaattaagatgct

SEQ ID NO: 340175 - DNA, 626 bp, Homo sapiens
atatccacacaatggaatagtatttagccataagaaggaatgtagaactgatatatgctaaaatatggatgaaactcaaaaacatgctgagaggaagaaattgcatgattgcattcatatgaataggtaaatccacagaaacagaaaacagatcagtggttgccaaaaactaggaaatttctagggaatgaggagtgactgttaaatgggtgtggggtcttcctctggggtgatggaaatgttttataactagatagaggccaaggttgtacaacattgtgagtttattaaatgccactgaattgcacactttaagttggctaattttacttgtgaattttaccacaattttaagaagatgagaaaacattcacaataataagacaatgcagaacaatttaaagtttttgaggagggaagtgacaggacatgacatttaggaaaayaatgttgccagagcatggaggtttcactggagagggaagaaatttcaaccacaggcagtgaccagctttttatgatatgatttatgataatgaaagtggtcatgtgtgtgtggagttgatatgaaattggaaggatgaaattaagaataggagtgaatcattccaatatattccttttca

SEQ ID NO: 340176 - DNA, 568 bp, Homo sapiens
gggcgcagtttctcccgtactgttctcctagtagtgactaagtctcatgagatctgatggtttgataagggaaacctgttttgcttggctgtccttttctcttgccgctgccatgtaagaagtgccctttgccttctgccataattgtgaggcctccctagccacatggaactgtaagtctattaaacctctttcttttgtaaatatcccagtctcaggyagctttatcggtagcatgaaaacagacaaatacacatactacatgtattttttttttgagacagagtcttgctctatccgccaatgcagaggtaagatctctgctcactgcaacctccgcatcccgggttcaggcgattcttatgcctcagccttccccatgtagctgggcttaaaggcatctgccaccacccatggctaatttttgtatttttaatagagacagggtttcgccatgttggccaggctggtctcgaactcctgacctcagatgatccgcccacctcggcctcccaaagtgctgggattacaggtgtgagccactgcacctggccatgtatttttattt

SEQ ID NO: 340177 - DNA, 568 bp, Homo sapiens
gggcgcagtttctcccgtactgttctcctagtagtgactaagtctcatgagatctgatggtttgataagggaaacctgttttgcttggctgtccttttctcttgccgctgccatgtaagaagtgccctttgccttctgccataattgtgaggcctccctagccacatggaactgtaagtctattaaacctctttcttttgtaaatatcccagtctcaggtagctttatcggtagcatgaaaacagacaaatacacatactayatgtattttttttttgagacagagtcttgctctatccgccaatgcagaggtaagatctctgctcactgcaacctccgcatcccgggttcaggcgattcttatgcctcagccttccccatgtagctgggcttaaaggcatctgccaccacccatggctaatttttgtatttttaatagagacagggtttcgccatgttggccaggctggtctcgaactcctgacctcagatgatccgcccacctcggcctcccaaagtgctgggattacaggtgtgagccactgcacctggccatgtatttttattt

SEQ ID NO: 340178 - DNA, 568 bp, Homo sapiens
gggcgcagtttctcccgtactgttctcctagtagtgactaagtctcatgagatctgatggtttgataagggaaacctgttttgcttggctgtccttttctcttgccgctgccatgtaagaagtgccctttgccttctgccataattgtgaggcctccctagccacatggaactgtaagtctattaaacctctttcttttgtaaatatcccagtctcaggtagctttatcggtagcatgaaaacagacaaatacacatactacatgtattttttttttgagacagagtcttgctctatccgccaatgcagaggtaagatctctgctcactgcaacctccgcatcccgggttcaggcgattcttatgcctcagccttccccatgtagctgggcttaaaggcatctgccaccacccatggctaatttttgtatttttaatagagacagggtttcgccatgttggccaggctggtctcraactcctgacctcagatgatccgcccacctcggcctcccaaagtgctgggattacaggtgtgagccactgcacctggccatgtatttttattt

SEQ ID NO: 340179 - DNA, 647 bp, Homo sapiens
tgctaattaagaaaaaggaaagccacctatactcatttgctcatgaaaaagaaacctagctgagaagactggcaggcaagaaacacagtggactagtattgcaggaaggagaatgttggaatagaaaagtttatttgttctctgagatctgctcttattgaagtggatcaaggatgaaaatacccaaatttgagtatcagaagaccttccagtctacttgatgcatgagctctacagttttaagaagcaaaactataaaacagtgtaagaagatatattttccctsacctctatttgtgatttcctctatttatccttaaaagcaactcttacaaaagcataaactttatacatatttgcatggtaggcacattcacatattgctgttgtgtttttcattttacaggaacaaaatatgttcattagtgggaaaataaaaaggaaccatagacaagcaaaaggcagaaaatagaaaacactcagaacctcactcacagaccactatcttcaactttgtgtgcccgcttctaaggcctaatcttttcttaaaaattatttaattttaaaatgcagacttaaatacacatttctacatgaacatgatcatatcaaacatatttttttcaaatattatttatttcaaaaaa

SEQ ID NO: 340180 - DNA, 556 bp, Homo sapiens
ctattccattggcagagcagcgtggtcattttaaaaatgtcatttaaactgatttatgcagggaacattttgaacaattatgctggccgtttaaagtaggctctgtcaacactgaactgaattatttcaatagtttattttctctctgtgtgactttctttgtgcagctagccaaaatgggggggataagatgggtccaacatttacattgaaattattccaattaggactttggcagtagaactacaatctctccagctgtggrttaagtgttttagagatatttgcatgtggtcaaggcatgcacatggaatgcctttggcaatgggtagaggccatccagagcatgataaattagcccgtgatctttattcactctgggttctggactaaaaatacttttgtcagctagaggactttaccatgttcactggagaactgatgatatcaaagttatatcatacccttttccatttatgacaatgccatgcttttatccaaattgatgtaaaggaatctggattgttaagaatagcaaaaaaagtcttagattctg

SEQ ID NO: 340181 - DNA, 602 bp, Homo sapiens
aagtgtaagattaaataatctgtagctctaattctggattatattagttagaattagtgtggctattatcaaaacagaaaaataaacaacacaaaagtttatttctctctcaccaaaaaagcttagggcgttgccattaggaatggtatgtcaggtctgttctgcagaaacctaaatgtctttcagggatacccaaggaatagccccattctcttcattcaagacagtggctggagtgccagagctccagccagatgtgacatctacacaccaggcatcagggacaaagtgacaaagaataatggtcaaagggctcacgggccatctcatgaggaaggtgccccatgacatttctatgcaytagacagaattactcataatactgctcctggctccaggggcagttggagaaatttagtctttatcctggagagtcacgtaccagcaaaaacatattaccattgttaaagaaaaacttcagcccaattaagtgtaaaggagtttaattgagcaatgaaagactcacagattgggcagtcctcagattcacagcagattcagggagactccagaacaaatctgtagacaaaaaaaaagggaag

SEQ ID NO: 340182 - DNA, 602 bp, Homo sapiens
aagtgtaagattaaataatctgtagctctaattctggattatattagttagaattagtgtggctattatcaaaacagaaaaataaacaacacaaaagtttatttctctctcaccaaaaaagcttagggcgttgccattaggaatggtatgtcaggtctgttctgcagaaacctaaatgtctttcagggatacccaaggaatagccccattctcttcattcaagacagtggctggagtgccagagctccagccagatgtgacatctacacaccaggcatcagggacaaagtgacaaagaataatggtcaaagggctcacgggccatctcatgaggaaggtgccccatgacatttctatgcattagacagaattactcataatactgctcctggctccaggggcagttggagaaatttagtctttatcctggagagtcacgtaccagcaaaaacatattaccattgttaaagaaaaacttcagcccaattaagtgtaaaggagtttaaytgagcaatgaaagactcacagattgggcagtcctcagattcacagcagattcagggagactccagaacaaatctgtagacaaaaaaaaagggaag

SEQ ID NO: 340183 - DNA, 597 bp, Homo sapiens
acacaattcaacccataacaccatgcaacatgctatagttttaactaattattttattttatttttggaaatggattctcactctgttgcccaggctggagtgcagtggtacaatctcagctcactgcaacctccacctgccaggttcagaygattctcctgcctcagcctcccgagcagctgggattacaggtgcctaccatcacacctagctaatttttgtatttttagtagagatggggtttcaccatgttggccaggctggtctctaactcctgacctcaagtgatttgcctgccttggcctcccaaagtgctgggattacaggcgtgagccaccactcacggccaacatactatatgtttaaattatcatgcttactgtttgttttcccccagttgacaagagggcagggattgtcagtcttcccaacctagctgaaaaaaaaaaaaggaatgaatgaacaaccaacaactggaacatgagctccttgaagacagggaatttgtcagatttggattctgttaaatcaccatcatctacaacagagtgtggcacagagtagtcccccaataaatgtttgttggatgaaccaat

SEQ ID NO: 340184 - DNA, 478 bp, Homo sapiens
ccataccactttatacacaatctctccttatgctgaatcttatattcagtcttgctgccctctatatatgggtctattgcatctgtgtgtgctcctaaaaagtttgcatgtgtgtctggaaataaaccattagattaagaatattcactttttagtttttattttttgttttgttttgttttgctcatctcttttcttcttctcacactctaacaatgatatcttcaaacagkaattaactttctgcatttctctctagcagctctttttttcacagacttgattccctcaggcttcaaactccagaaccttcacctctcacttggattccgatgatgctatagtagatttctaatctctacccacctctaatgacatcatcttaattgcttatgtaattggacattgttctttgaattcagaatttttaaagctagtagttacataagcagaatatgcaggtacaaaaaaagaaata

SEQ ID NO: 340185 - DNA, 616 bp, Homo sapiens
tttcaccttggttctgatgctgcactgaaaacctgatgattttattgtttttagatggccctattgaaagcaacacaaggaaaatacttagcatgtaaatccctttctttttcatttgaaaataacatcagttattgcatcatctgaaaagaagtaatctcttacagttaatcaatgtcattgcctttgaatattcaattcctgtcaacacagaatttgaaacttcaattaagttgtattagttaatgattatcaggcctactaaatgaccttctgtaacctgtyatctggggaaatggaaacaaagggatctttccagtaattgcagtcattgaaatgatttaatatatgcttagaattgaaaaaatttaaatatgttcatatatgataatatgcaaatttagatgattaaaataatgcagttgcatcaataatatgggattatcattaacttttgtaagccttaatgccattagtttagataaatttaaaatccctctaaaagtcaagccttccttacatttggccatcaatcaaacacttccttctgggttctccatcttggaaacagacatcagccttcttccaggtatccaagccagaagcatgttaacag

SEQ ID NO: 340186 - DNA, 616 bp, Homo sapiens
tttcaccttggttctgatgctgcactgaaaacctgatgattttattgtttttagatggccctattgaaagcaacacaaggaaaatacttagcatgtaaatccctttctttttcatttgaaaataacatcagttattgcatcatctgaaaagaagtaatctcttacagttaatcaatgtcattgcctttgaatattcaattcctgtcaacacagaatttgaaacttcaattaagttgtattagttaatgattatcaggcctactaaatgaccttctgtaacctgttatctggggaaatggaaacaaagggatctttccagtaattgcagtcattgaaatgatttaatatatgcttagaattgaaaaaatttaaatatgttcatatatgataatatgcaaatttagatgattaaaataatgcagttgcatcaataatatgggattatcattaacttttgtaagccttaatgccattagtttagataaatttaaaatccctctaaaagtcaagccttccttacatttggccatcaatcaaacacttccytctgggttctccatcttggaaacagacatcagccttcttccaggtatccaagccagaagcatgttaacag

SEQ ID NO: 340187 - DNA, 609 bp, Homo sapiens
acaaagtcttactctgtcacccaggctggagtgcagtagtaggatctcagctcactgcaacctccgcctcctgggttcaagcgattctcatgcctcagcctcccaagtagctgggattaacggcatgtactgccatgcccagctaatttttgtaatagagacagcgttttttaccatgctgcccaggctgatctcaaactctagcctcaaggaatctgcccacctcggcctcccaaagtgctaggattacaggtgtgagccatyttgcctggcctcatttttagactataaaatagtaagatagtcatcctatttaggatttgaagttgtgaaatcaatgtaggaatccatgcaatcaacaagaaccaaattctcagccaatgtctacttgatataaaagcattgctgtgatttcatctcttcccactttgctttttgtttaccatgttctggccccactggcctcctataatgtttcttagacaaacaaagctcacttctgcttcagagctttcacataacctgatctcatcatttagctctctgcttaaatgtcacctccctaaccaccctacttgcatcactgtctatccattaaactgccctact

SEQ ID NO: 340188 - DNA, 627 bp, Homo sapiens
gtattatacacagttgtttagtttttataaagtcaatcctgtcggcttcttcttttatcactgctcttgtcatgtttagaaaaccttgtggagaagagcttctaccccctcacctccaccctccacataatgctgttaagtacttaattcagacatgtgaaattaaattgtgcactagagggtccccagccttgctttttaccctgattattgctagcaagtaggctagttttaatttaagcttattctctcagcaaggggggatcaggaagatgcttgttgggacttatgtgtaacattttggtcccttcccctaggcaatgtatctacctttatggcagataattttgtctccattgagacccaagacagacttttatyttaagaaagagctgtatggaaccttttaccttacaaagtgccactgttttttaatgaaaaaaaaaaaaaagtcagcagaaagtattttttacctgtgcaaaacagaaaaattactatatatatgtagtaatttatatatagtaatatatatagtaatttatatatatagtaatatatatagtaatttatatatatagtaatatatatatagtaatttatatatatttagactcaagggaacaaaag

SEQ ID NO: 340189 - DNA, 518 bp, Homo sapiens
taacttcccttccaaggtcattctcctggcggggtggtgcgcgaggcccgcccacgtcctccggattggcgggggcgggagaggcgcaccctgcaaggggcccgaccagttgggctggaccgcgacccctgagcactgccagggagcmtggtgtgtcagccgctgctagcgggcatatgcttcgcctttccctatagccccgaggctgagttcccaccagcgcccaggcttggagcggagaccgctcggccctcccagcctgcacccgcaggtgagcgcaaccgcccgcgccccggctgtcccggacgcgtggtcggctgtcgccataggaacggctggtgcccagacggcgcctgcccaggctgggaaggggcggtgaaggcagctcagacctccaagaaccctggagccccctgtgtggccaggcggagccacagaagcctgatgaaaacgggaccccctccccctctctcttctcatttttgattgctcaggcgttggaggttaagcagagagag

SEQ ID NO: 340190 - DNA, 538 bp, Homo sapiens
tgcttgttggggcattatgttaacagtaacattttgaaacatactttcatgatagtccagcaaaaaacagcatcaaaactatttccattgtatctctttagaaggctctgtattcggtaaaaagtctagctggcgccattggaatatgggctgctaaagactcaatttctagttgatgtttgaggtgaggcaaaaataaagctaargtagaaaacttaagctttgtgggatttatttatgcgcctggcatgttgacttaaggaactcaaccttatgtacaggcttggcatttaaaaaaaactggtggctgggtgtggtggctcactcctgtaatctcagcactttgggaggctgagaggatcacttgagcccaggagttcaagactagcctgggcaacatggtgaaactccatctctaccaaaaaaaaaaaaaaaaaaaaaaaaaagttagctgggcatgtaatcccagctatctgagaggctgaggtgggaggatcacctgagtctgagaggtccaggattcagtgagccatagtca

SEQ ID NO: 340191 - DNA, 603 bp, Homo sapiens
agtacactttttaaaaaatcatttacagagagaaagatttcctttccagaatttttgagaatcttctttatttccttttggaggctacccaataatttaaattaatattcatgtgagaatgcatccctgccataactacttgctttcataattatatacaaaacaagtttagaaaaaccttgctaagctgtctttttttaaaaggaggaaaagagaaaataacttgggcagtattgaagtaaagtaaaaagaaaactggacagagacacctggtcattaactcaagttctgcatagttaactagctgtgtgactttagatttagctcctgtaggtcttattttccctaccaggaaaatgagggatagcctaaatgaaataatatgtcactctacctatgacgtgtgagcataycacactgcctggtatatagaatgggcatatatgtttttattaacaccacatttagaagctaaatgcaaagaagcttttcagattccaggcttctgaagacagtgggatacgttagatttaacagcctctttctcctattttctataagctcccattctttttttgtttctttatagggtgagactgtgtc

SEQ ID NO: 340192 - DNA, 592 bp, Homo sapiens
acacgaatcaacttgaaatttatcatagacttacatgtaagagctaaaactaaaactcttagaagaaaacataggtttaaatcttcatgaactttggattaggcaatagtttcttagatatgacatgaaaatctcaagtgacaggagaaaaaatagataaattggacctcattaaaattagtgccatgtttggttgtgtgtgcctgtcttcccacctacttaggaggctgaggtgggagttcacttgaggccaggagtttgaggctgcactgtgctatgatcgtgcctgtgaatagccactgccctccatcctgggcaacaaagtgagaccccatttctgaaaaataaaaaataaaaatttctgtgcttcaaggagttcattaagaaaatgaaaagatcacccacagaatgagaaaatatctgcaaatattggataagggacttgtactagaatgtgtaaagaactcttacatagctcaataataaaaagacaaaccamttaaaaatggccaaaatgttaatagacatttctccagaggtatagaaatacccaataaacacatgaaaacatgtccaacatcaatagttacga

SEQ ID NO: 340193 - DNA, 595 bp, Homo sapiens
ctacataattgaggctacaaagcaatcagctaagagcatcatgacaagatcaaacctcacatatcaatattaaccttttgttaattgtctaaaatgccccacttaaaaggcacagagtggcaagttggataagtaaacaaaacccaacagtctactgtcttcaagagactcatctcacatgtaacaacacccataggctcaaaataaaggaatggaaaaaggtctatcacacaaatggaaaactaaaaagagcaggagtctttatatattctgttatatcagatagaacagactttaaaccaacaacagtaagaaaggacaaagaaggaaattacataatgataaaggattcaattccacaagaagacctaactattctaaatatatttgcactcaacattggagcacctagattcattaaaaagtacttctagacctacaaaaagacttagagagccagacaataatagtagggtacttcaacacccccgctgatagcattaaacaaatcaccaaggcagaaaactagcaaagaaaytctggacttaaaactacacttgaccaattggacctaacatcaatctagagaatactc

SEQ ID NO: 340194 - DNA, 447 bp, Homo sapiens
tcacaccacagggggccacaaggggaataattggcatcagtcatgaggcagagggaagcgaggagccatgggcaagcacctttgttgtggtttctgcagaaaggagtgggagaagcagggtaagcaggyttaagattggctcatttgaataagttcagtgggctctgggtataggactatccctggttgtgtggtacctggccatggactgattagcacaggtggataatggccccaagtatgagaccccaacaagggcggttgttgggagtgtggacttaatcacctgctcaagaaaagaacttactggcccctagtcctggcctcaaagctggctccggacagcacttaaaaagtatatcacaccatccatccatccatccatccatccatccatccatccatccatccacccatccacccacccatttatctacctacccaccc

SEQ ID NO: 340195 - DNA, 304 bp, Homo sapiens
ctagtctcacaagctcaacctcaggccccaggctgagctggacagcagaggggaggagaaaacattgctgctgccagagtcatctctttgggaaggagtcttytatccaagcctgggattcagtccccagctatgaggatggagagccccagaagtcccaaccacatttcctcaaatgctcccgcttttatcggggtgcaagaatttctcttctaacttaaaaaatgttttcgtgggctggctgcaagtggctcatgcctgtaatcccagcactttggaaggccaagatgggcagatagcttga

SEQ ID NO: 340196 - DNA, 304 bp, Homo sapiens
ctagtctcacaagctcaacctcaggccccaggctgagctggacagcagaggggaggagaaaacattgctgctgccagagtcatctctttgggaaggagtcttctatccaagcctgggattcagtccccagctatgaggatggagagccccagaagtcccaaccayatttcctcaaatgctcccgcttttatcggggtgcaagaatttctcttctaacttaaaaaatgttttcgtgggctggctgcaagtggctcatgcctgtaatcccagcactttggaaggccaagatgggcagatagcttga

SEQ ID NO: 340197 - DNA, 559 bp, Homo sapiens
ggagtcttctatccaagcctgggattcagtccccagctatgaggatggagagccccagaagtcccaaccacatttcctcaaatgctcccgcttttatcggggtgcaagartttctcttctaacttaaaaaatgttttcgtgggctggctgcaagtggctcatgcctgtaatcccagcactttggaaggccaagatgggcagatagcttgagatcaggagaccagcctgggcaacatggtgaaaccccacgatatggtttggctgtgtccccacccaaatctcatcttgaattgtagctcccataattcccacatgttgttggagggagctggtgggagataattgaatgatgggggtggattcttccatactgttctattggtagtgaataagtgtcacaagatctgatggttttataaggggtttcccttttcacttggctctcatctttctctcttgcttgctgccatgtaagacgtgcctttcaccttctaccatgattgtgaggcctccccaatcacatggaactgtgagtccattaaacctctttttctttata

SEQ ID NO: 340198 - DNA, 430 bp, Homo sapiens
agagaaatttaacaaggagattagaataatttaaaaggatcaagcagaaattttagagatgaaaaattcaattgacaaactgaaaaatgcwtcagtctctcaatagcagacttgattaagcagaagaaagaattagtgagcttgaagacaagctatatgaaaatacagtcagaagagaaaaaataaaaagagaataaaaaagaatgaagtaaccctacaagatctagaaaatagcctcaataggcaaatctaagcattattggccttaaaataggaggtagagagcgaggtgaaggtagaaagtttattcaaagaaatagaaatggaatttttcaaacctagagaaaatatccaagtacaagaaggttatagaacaccaagcagatttaactcaaataagaccttaaggcatttaatcatcaaattccca

SEQ ID NO: 340199 - DNA, 585 bp, Homo sapiens
gattctccaattgttaagcctatgttacaggacaaatgccgccgctttgtaaaaactcgaagagcacattgctgctgagtacasaagacctctgcaaacacagaggggagattttctctgtaaggttgcaaacaaggtgagagctggccttcttatgtcttgtaaaacttataagctaccatttgaatgaaaccaagaatagagttgattgaggaagaaatggagcagaggaaacctcttctaagtcacgttctcatgctcctgttggtattttgttttattttgttttccctacggagaccctggtataagaatggaaacacccaggcatggtggcacgcatatgtcgccccagctactcaggaggctgaggtgggaggatcgcttgagcccaggagtttgaggccatagtgagctatgattatgccactgcactccagcctgggtgacagagcaagatcccatttctaaataaatgaatgaaagaccaaaactgatccttgaagccaggggtagggtgaataactagaatgaaaagatcagtatttttttttttaaaaagaaagggaacaaaattgtggtgtt

SEQ ID NO: 340200 - DNA, 585 bp, Homo sapiens
gattctccaattgttaagcctatgttacaggacaaatgccgccgctttgtaaaaactcgaagagcacattgctgctgagtacacaagacctytgcaaacacagaggggagattttctctgtaaggttgcaaacaaggtgagagctggccttcttatgtcttgtaaaacttataagctaccatttgaatgaaaccaagaatagagttgattgaggaagaaatggagcagaggaaacctcttctaagtcacgttctcatgctcctgttggtattttgttttattttgttttccctacggagaccctggtataagaatggaaacacccaggcatggtggcacgcatatgtcgccccagctactcaggaggctgaggtgggaggatcgcttgagcccaggagtttgaggccatagtgagctatgattatgccactgcactccagcctgggtgacagagcaagatcccatttctaaataaatgaatgaaagaccaaaactgatccttgaagccaggggtagggtgaataactagaatgaaaagatcagtatttttttttttaaaaagaaagggaacaaaattgtggtgtt

SEQ ID NO: 340201 - DNA, 585 bp, Homo sapiens
gattctccaattgttaagcctatgttacaggacaaatgccgccgctttgtaaaaactcgaagagcacattgctgctgagtacacaagacctctgcaaacasagaggggagattttctctgtaaggttgcaaacaaggtgagagctggccttcttatgtcttgtaaaacttataagctaccatttgaatgaaaccaagaatagagttgattgaggaagaaatggagcagaggaaacctcttctaagtcacgttctcatgctcctgttggtattttgttttattttgttttccctacggagaccctggtataagaatggaaacacccaggcatggtggcacgcatatgtcgccccagctactcaggaggctgaggtgggaggatcgcttgagcccaggagtttgaggccatagtgagctatgattatgccactgcactccagcctgggtgacagagcaagatcccatttctaaataaatgaatgaaagaccaaaactgatccttgaagccaggggtagggtgaataactagaatgaaaagatcagtatttttttttttaaaaagaaagggaacaaaattgtggtgtt

SEQ ID NO: 340202 - DNA, 585 bp, Homo sapiens
gattctccaattgttaagcctatgttacaggacaaatgccgccgctttgtaaaaactcgaagagcacattgctgctgagtacacaagacctctgcaaacacagaggggagattttctctgtaaggttgcaaacaaggtkagagctggccttcttatgtcttgtaaaacttataagctaccatttgaatgaaaccaagaatagagttgattgaggaagaaatggagcagaggaaacctcttctaagtcacgttctcatgctcctgttggtattttgttttattttgttttccctacggagaccctggtataagaatggaaacacccaggcatggtggcacgcatatgtcgccccagctactcaggaggctgaggtgggaggatcgcttgagcccaggagtttgaggccatagtgagctatgattatgccactgcactccagcctgggtgacagagcaagatcccatttctaaataaatgaatgaaagaccaaaactgatccttgaagccaggggtagggtgaataactagaatgaaaagatcagtatttttttttttaaaaagaaagggaacaaaattgtggtgtt

SEQ ID NO: 340203 - DNA, 482 bp, Homo sapiens
gggttgattccctatcttagctattatgaatagtgctgcagtaagcttgggagtacaaatatctcttcaacataatgatttcatttcctttggatatatacccagtagtgggatcaatggatcatatggtagttctcttttyaattttttgaggaatctccatactgttttctataatggctatacacacctcttattttgattccagcaggagctccttaattggtctgcttaacttcagtctctacaggttaatgtctactttacatccttgccatattcagtcctttattcaagaaatatttattgagaactaacaacatgcccagcactgttctaagtgctgtggatacagcagttcgtaaaacagacaaaattctcttctattgttcaagtaggaagagaacaataaaaataaattggcaaaacatgtatattagattgaggtaagtgctattaaataaaataatgaaggaggacag

SEQ ID NO: 340204 - DNA, 482 bp, Homo sapiens
gggttgattccctatcttagctattatgaatagtgctgcagtaagcttgggagtacaaatatctcttcaacataatgatttcatttcctttggatatatacccagtagtgggatcaatggatcatatggtagttctctttttaattttttgaggaatctccatactgttttctataatggctatacwcacctcttattttgattccagcaggagctccttaattggtctgcttaacttcagtctctacaggttaatgtctactttacatccttgccatattcagtcctttattcaagaaatatttattgagaactaacaacatgcccagcactgttctaagtgctgtggatacagcagttcgtaaaacagacaaaattctcttctattgttcaagtaggaagagaacaataaaaataaattggcaaaacatgtatattagattgaggtaagtgctattaaataaaataatgaaggaggacag

SEQ ID NO: 340205 - DNA, 493 bp, Homo sapiens
ttgagaacaactgatctagactattgtctgaaagataacaagagcytaataagcactggattaataaataaacggtaaatgaattaatgatctctaagttaagctggcatgtggcagaatgacctggaagaaagaaacacacaaagggatccaagttctagtctgagccctgcttctcattagctatgtgactccaaccccggggttgtagttttcctgcctgtgacatcgatccatccattcattcatctattctgtgacatccatccactcattcattcacctattctacaaatacttcttgagcaactattacatgccagactctgccctagatgctaaggatatgcaatgaacaaggcaacaaagcctgtgatcccatgaagcatatatgctactgggatgagacaggcaataacaaaaactaaaatcaatagccagataatgtcaggtggaatacattctatgtataacaaaaccatataatatgtca

SEQ ID NO: 340206 - DNA, 493 bp, Homo sapiens
ttgagaacaactgatctagactattgtctgaaagataacaagagccyaataagcactggattaataaataaacggtaaatgaattaatgatctctaagttaagctggcatgtggcagaatgacctggaagaaagaaacacacaaagggatccaagttctagtctgagccctgcttctcattagctatgtgactccaaccccggggttgtagttttcctgcctgtgacatcgatccatccattcattcatctattctgtgacatccatccactcattcattcacctattctacaaatacttcttgagcaactattacatgccagactctgccctagatgctaaggatatgcaatgaacaaggcaacaaagcctgtgatcccatgaagcatatatgctactgggatgagacaggcaataacaaaaactaaaatcaatagccagataatgtcaggtggaatacattctatgtataacaaaaccatataatatgtca

SEQ ID NO: 340207 - DNA, 570 bp, Homo sapiens
cttttaagatggatttgagattggtttgagatgtgccaaacataacaaaaagttataggctaaattkggtgtacttcacttataagatactccctcaggtcctcagaccctagttatctttatcttgtacacagttctaacaaagcttagttacgtagcttccaaacccacaccctcacttagaaggggaacaagaaaaatatgtccaaaaagcagcccaacccaaaaagttcatcaatacaatatttggtgtttgagtaaataaacgctccatattgacgttatcactaaagaactgtataattcatcaattatatagaaatatgaaaataataggaaaactcaaccagaagaaggcttcctcatttaataaagtgttctcacatatgttatcttactgcccattgtgaagtagatagagcacttattatttccattttatagatgggaatactgagactcaaagttcaagtggtttgcccggttccaaaactagtggttgccagagctaggaatcatgcacaagtttcccatctacaaatccagcattcttttcttatcagtaactgc

SEQ ID NO: 340208 - DNA, 567 bp, Homo sapiens
atctggattctcatccaaaaatgtcagggggaaagtttttcagtttgctgcttttgaaggttgtagccaactggagacttgccagggaaaatgctagagaatggacgagtttgtaacagatccaagctccaaagtgcctcacagcccaacctgctcagaattagcagctacagggaatttctatcagcatcactgcccagaccttcatttagcagatgatgaaacacaagatcagcagagatgctattttttcttggagatgaatctgtgagatgtccatccatccaattctattttttacaaaattccatggctctttaaaaattggttttattaatacaaacaggcatattttattccttctggacctgcaggtattttgcctttcacaaatcaaaarctagttttatattcagcagtctcactcattggaccttagaaatagtgcatgagcctcagtgcaacatctccataacaaagcaattgacagagtttggctcttcttttaaagcagttctatctttttccaaatgaccctttgctgaacttacataactagctaccttg

SEQ ID NO: 340209 - DNA, 610 bp, Homo sapiens
gagctgtgggtagtcaccactgccttttagagggtcattttatttttattcctgcattactaaaagcaacaccctcctagacattaggtctaaggagcttgcactttctcgcctatttctttccaggcaagacagagaatcctggaagatgatttcrtgtctgaaaactgacgagaaaggtatgtttggcagggagagtcattcttgccactccattgcactgagcagtcttctattttaagtttttattaatgaagtcatgtttcttttctagtcactaaccatcaccactagcatcatcatctctcatactcagagatgacaccaagcatctatatgtgtaaatggggctgaaaagatatacctttgagctggggtccccgtcacattgagggtcttttagtaattgaacttctagaaggcatttaagctcagttgagctcacctatctctcataataatcactgccagttactgaagcctgcactccaccagacacactgttaagcactttacatcatgttcacaacaaccctgagaggcagacattacgaaagtgatgtaatgtggtagtttgagcattgactttggagtgagagaccaaggttca

SEQ ID NO: 340210 - DNA, 392 bp, Homo sapiens
gatggtctaacgtcttttctccaactttcagagtcttcttatatttgttttacatataatgtcctggagagtaagagggaaaccaagaaagagagccagcgaaggagagtaaaacacagagacacagagacagagacaaagaggtgatatttggtctgctaattaggaactgataatggttagtaggggagtaagagcactatgcttccaggtgaattaatattctgaccaaaacagggtgagaaccacaaagatgtaggtgggttctcaccacttccctctgcctttttttctttttttttttttttgagacagaatctcgctctgtcacccaggctasagtgcaatggcgtgatcttggctcactgcagcctccactcctgggttcaagt

SEQ ID NO: 340211 - DNA, 604 bp, Homo sapiens
aggctaatgatactatacaatcttgtagagctgttgtgagaattgatgaaataatgcattgtgaagctgcttagcacagtgctaagcgttcaaaaaatgccagctagcatgtttcacatgactatactctcagacttctgggtggccatatcagaaagcactcatgtccaggaaaggcccctggagagtttcttactttcttctgtgaccttgggtaatcctctaactttcaacaactcacgttyccccttctgaagtgcagactatgcagtttatattacaaaatggttttagatggagatagcatgctactttgcaatgtaaagtgttttaaccataaataatagaggtaaggcctcccctaagagatgtcgagcttctccttggagatggaggaggcttcccctgagtgaatagcacacctcccccgagcatagagaaaggcaagtcacaggaaacagcttggggaaaacaaatgaaaaaatattgtttgtgccagtgagggcctgtgaaagatgaattcctgactaaacttgttaagcagattaggagtgatgctgttcataaatacatgcagccttccctgaataactaaataaagcaa

SEQ ID NO: 340212 - DNA, 591 bp, Homo sapiens
ttatgctaacttttacaagcttttccatatttattttgtttctatcttcaaaaagaatwagtattgtcaaaaaataagaggaaaaaatgaaagttatctgaactataggtataccactcggaagtacttggccagctctaaagaacaacatctatgtctcaggaaaatttagccccttatagcacaaagtatagaatgtgttctgtttaagaagagaagatgattgtggatacttatgtaaaagttataaaggtgacaccaaaacctccagcaacccaatctaaaaagttgtaaagatgaccccaaaaccctccagtagctgggacttacatttgggctgcagttggaacagcataaaatattttactgcaaaaggtaactgcactcaaaactgtaagcttgtttacacaggaattatgataacgctattaataaagttatccctacatgggtccaggactatcattttttcattcaaataaaggttaaaagtactcagaagtgctttgagagggctctgggtactttcacaagcagggcaaggagaatgtgggggaagagatgctagggaaagcatcttgtgttacgtat

SEQ ID NO: 340213 - DNA, 591 bp, Homo sapiens
ttatgctaacttttacaagcttttccatatttattttgtttctatcttcaaaaagaattagtattgtcaaaaaataagaggaaaaaatgaaagttatctgaactataggtataccactcggaagtacttggccagctctaaagaacaacatctatgtctcaggaaaatttagccccttatagcacaaagtatagaatgtgttctgtttaagaagagaagatgattgtggatacttatgtaaaagttataaaggtgacaccaaaacctccagcaacccaatctaaaaagttgtaaagatgaccccaaaaccctccagtagctgggacttacatttgggctgcagttggaacagcataaaatattttactgcaaaaggtaactgcactcaaaactgtaagcttgtttacacaggaattatgataacgctattaataaagttatccctacatgggtccaggactatcattttttcattcaaataaaggttaaaagtactcagaagtgctttgagagggctctgggtactttcacaagcagrgcaaggagaatgtgggggaagagatgctagggaaagcatcttgtgttacgtat

SEQ ID NO: 340214 - DNA, 688 bp, Homo sapiens
gtttagtgctgtgctgccccatccagttctcggcccaacttccaggctccttagaggcctgccctcccctttgatcttcacaaggtcacagttggtctgccccatttatcaagaggaggaggcatctgctatctcactgggagaaagaaggggacagcacctctctacagtattgagcatagcttatatgctaggcttttctaagcactgcagacccaaatatgaacatggcctaacctctgtcctggagaaacttactccttcttaagtgacaaagtaccttctcaaagggcagtaatgcaggtaggagactgctgtgtcctcaggcagaaggacctaaggactgattgcccagaaatgtaggcccctctctcagctcccagtatgactgtcggcaagccatttaacctccctgtgtgagagatgatgaaataacactttgatctttggagagaaaaaagctttakaaaaataccaaataagtccacccttactcggcacctcttaaattcatgtggagggataatgtgcctcataaaattccagtgcgtccttagttacaaggccacgttcctagacctggactcccaagttttcaatcataatattgtgtctagttttgtgaagtgcctaaagcaaaaataacccctgagatttcttatagagccttttgtctaaagagcttaag

SEQ ID NO: 340215 - DNA, 529 bp, Homo sapiens
aaatcaaaggacaatagctatttgcacattcccctttgttggtgcaggcaaggaagaaaagaatcactctaggagttgagagatgagtgagtttcaaggctttaaggaaataagaaattgaaaagagaggtaccataaaatatgtaatatcacttttctaagaagtgatagaaaatatagctagggtattgtacaccctataagacagaaattattgagcgtattaaggtaaccctacctgctatctcaagatatcagtgatttaaagcaatagaaatttatttctatgtcatattagagttcaatgggtggcaagtgacaaggtatgaactctgctccacacagttatttaagttcccaggctgataaagggtacatcacaygggttccaaggtcaacctggactatcagctagctcttggtaggagagagagaaagagtggataaccatgcaagatatttctatgttcaacattctgttagccataactcagtcatatatggccacacctaattgtaagaaaggcta

SEQ ID NO: 340216 - DNA, 619 bp, Homo sapiens
ctcaaatttgcatcactatgctaattattcagtttttgaaacactaaatagcaataatagtttgtatatttaggtagatatttggatgtatgcatgtaaagatgcagaatgtggatatatacctgacaaagttggcacttagaatgcttaagggctttcagaacaaaccaagaatgactgtaaaagaatatctgatagtttatagaaaaaaatgtgttatttcctttgatattctgatgaagccagaaaggagaatttaagagtggtttttaatgagaggtttgctcacttttcagccattcttgcttttatattgaaatatcaagctgcttttattaaacaataattacatgggcttcccagtctcctagaatgtttctttgggcagtatttcaagtgtccctgctaacatcccatttgtctgtgttctgtgcttttttacattctctcccaatacactgtctcctcacacaaataacaaaagagtatagcttctttttctaattctgtttcttaactctgatcagtctctgtggctggcattctttagtaaaagcttatttactggatgcattggttcttaaccagyggctgaatgcattaggcaagtcatggacaa

SEQ ID NO: 340217 - DNA, 621 bp, Homo sapiens
aacaggaaaaaagtaccccatgattagataatgtgatgtgcatatagacttgcagttcagaggaaatggaagtgtgtggggggcagatagcctgtggaggaagaggaaattatgactgcgatgtagtagttgttaggtttgtctgaaactgtccagttttctctctttagtgccttcatatttgaatctcagcattaacattgctgcatttctgtggacttcacaattactatattgttgggggaacaatcagtgatacgttttttcaattgactagaaataaacacatttttcttttgggggctgttacaatgattattcctcaacaatatgcatgcatatttaattttttttttcgtggggatggtggtagttatttcaatccatcttattctcttggaaagaggccctgagctcctactttaattatkccactcttgtttgcttaaattgattttgaatattattgtgattgtgttttattatgaatgtacctactcctggttgaaagtaaggtagcccatgaacctcatgttcttctcatggggctgcttcctctttgatttatttatttttatccatggaatctgaaatgtaaataggcaactacaactgtcaata

SEQ ID NO: 340218 - DNA, 577 bp, Homo sapiens
ataattatagctaccatttaagaagggcctaccctgtactatgtactctgctaagtgctttctaagcactgtctacttaatcctcaaaaccactctataaagtagctgttattatcctcattttgcacaggaaattgaagttcatagaggttaagtaatttatccatgtcacgcctaacaggagactgaactaagatggaacccaggtccatctgtctccagaatttgagctatcacactccagaccataaaaattgagtctgttttaaaataatgtcatatcarcaatatatatttcctgatctaaatatgtatttacttggtgctttaaaaataaactgtaaacaatttgtgtccaaaaatcatatgtaaattttattatcactcctgacattattctggtcttcaattatttttcccactagagaaacaaaatattatttgatggtgaaattttctcagcactaaaatctaatatgttatatagaagagcacttctactagttagaaattatagatggcagatgtccagtgctaattcattgccttttaaatgaaatagcaaaaacatctttga

SEQ ID NO: 340219 - DNA, 583 bp, Homo sapiens
ggcaatgtcgggaaattaccctatatagcctaaaaaggggaggaaccctcagttctgggaattgcccacccctttcctagaaaactcatgaataatccattccttgtttagcatataatcaagaagtaaccataaaaatgggcaaccagcgatccattccacagctctgcctatrgagtaatcattcttttattccttgactttcttaataaacttgctttcactttacggactcactcactttgaattctttgcgtgagatccaagaatcctcacttggggtctggaatgggacccctttctggtcacacaactagtcaataaatcaatcaactaattgatcaatactttacattataatttgtgtgtcagggattgtacttgttgctgatgttacactagtgaacccaatgaatcatacagtgacatcatttcacactctctgtgggtcccttcactgacaacacctccttggaacaatagctgggaaataggcttgtgaggggttgggggaagaggcaaagtttcacggtggtcccgctttctcctctgtttttccttgtgcttaagtccttggattctc

SEQ ID NO: 340220 - DNA, 583 bp, Homo sapiens
ggcaatgtcgggaaattaccctatatagcctaaaaaggggaggaaccctcagttctgggaattgcccacccctttcctagaaaactcatgaataatccattccttgtttagcatataatcaagaagtaaccataaaaatgggcaaccagcgatccattccacagctctgcctatagagtaatcattcttttattccttgactttcttaataaacttgctttcactttayggactcactcactttgaattctttgcgtgagatccaagaatcctcacttggggtctggaatgggacccctttctggtcacacaactagtcaataaatcaatcaactaattgatcaatactttacattataatttgtgtgtcagggattgtacttgttgctgatgttacactagtgaacccaatgaatcatacagtgacatcatttcacactctctgtgggtcccttcactgacaacacctccttggaacaatagctgggaaataggcttgtgaggggttgggggaagaggcaaagtttcacggtggtcccgctttctcctctgtttttccttgtgcttaagtccttggattctc

SEQ ID NO: 340221 - DNA, 583 bp, Homo sapiens
ggcaatgtcgggaaattaccctatatagcctaaaaaggggaggaaccctcagttctgggaattgcccacccctttcctagaaaactcatgaataatccattccttgtttagcatataatcaagaagtaaccataaaaatgggcaaccagcgatccattccacagctctgcctatagagtaatcattcttttattccttgactttcttaataaacttgctttcactttacggactcactcactttgaattctttgcgtgagatccaagaatcctcacttggggtctggaatgggacccctttctggtcacacaactagtcaataaatcaatcaactaattgatcaatactttacattataatttgtgtgtcagggattgtacttgttgctgatgttacactagtgaacccratgaatcatacagtgacatcatttcacactctctgtgggtcccttcactgacaacacctccttggaacaatagctgggaaataggcttgtgaggggttgggggaagaggcaaagtttcacggtggtcccgctttctcctctgtttttccttgtgcttaagtccttggattctc

SEQ ID NO: 340222 - DNA, 582 bp, Homo sapiens
ccatcacctattttattttactttttttttttttgcaggaaagaagtgtcaggaaattaataatacagggttctgtttgtactttccttgattaaaacaaataatttatttgttccaagtaaaagaatttgcattgattggggcttttggtggtcatgaatcacrtgtatttgaattttcaggataaccagtactttctcatgctgagagttgtaatgaaatgtacagtcagtcttaaactaataatcaactataatttatgttagaagtgtaattataaaggtaaccttagtttataaattgctaattaatattttcctccctgctgaggatattagcttgtttcctggtccctcttgtctttgcctacctggctggggatggggaatctttggatgctgaaagacttatgcacagctgtagttctttctgaacatggatgacattaaaaatgaccactttagtatctctacagaaagcttgaaataagcctcaggcttatttattccatgtagagtctttgaactatttcagctgtttggatcattttatacaaagctgacaaagggctggggggaatgc

SEQ ID NO: 340223 - DNA, 605 bp, Homo sapiens
aatgaattatgggtgtggttgatgcaagaaagatgaagcagagttccaaccaggggatccatactagaaatgaagacagtgggtctccatcaaaatattgatgagtgaatacaaatatacatgtttttaaggtaagtaaaatcttgaatgtgtctttttaaaataattcytattttaagcaacttcttcagttaacttctttaaccaactactgtcttgattgaattagattaatggacttctgatgctactttagacaagcaaaacacagagatccagtgattcattcttaaagtaaatcctttataaacatggaaaaaacatgacttggttgaactggacagtgactttgatttttgttgttattggtgtaaagtctcatcatgtaattattggaataggaacaatgttacaagagcatcaaccacaaactttcctttaaggcaggctgcttatcaattcctaaatagatgagaatctctgcattaaagtttcccttggaatgcttttctcataataagagttttgctgtagtaaattgtaactttacattcaccagtgtaggctgcatgaatatggttaagaagtagttaaataattaaact

SEQ ID NO: 340224 - DNA, 507 bp, Homo sapiens
gtgaaacatgattaatggcctaatgttctctactagatggaagtgtttttagctgttggagctcaagcaacccaaggccaagagtattggaattatcctaaggaatgcaagctcctaaagaaaacttactcatcctacaaatttgttggcctagtaaaatagatttcaaggtatgagtattcatttttcccasaaagtgtaaaagtagaaacaaagaataatgatcccataaagattttgatggcctaatccccagaacctgtgaatatgttacctttgcagatgttgatgatggccatacatagtgagacgggaagattatcataaattatccaggtgggcccaatctaatcatagaagccgttagaagcacaggacttttcccagtcttggtcagtgagagagagagatgtgatgacagaaacaagatcaaagagatgcagcgttgctggctttaaagaggaatgaagaaagccatgagccaaggaatgcagacggcctcaagaa

SEQ ID NO: 340225 - DNA, 599 bp, Homo sapiens
gtgaacatctgcccaattttgtggaattttttctgaagcaccataagtcttctctatttgtattagaatatgtgtgaattttgaaatttctcctgaataaaaaaaggtttttaaaaaatgtttataggattttatgagtatcctgatattgtatamaaatttaaaagattatattccatttattacgtttcaagaaaagacttggagatatctaatttcaataaaaagtgataagtaatatgagctgctacaatgtaaaattctcacttatataagcacaaaccataacaatttgtcttctacagttttcccactacctcagtggtataattgttctttcgttaagccactctaatgttagccatttgtattaatccttttatttgcattaccacatccaaaccatagaaaatattctaatctggaaatactaggttgcaaggaatatacatccatgaaaataacttaggaagatcaggaaagagggttgaaataatgaaaaaaatatctaatatataacagctaatatttgctcctctccaactttcacttgtacatgatagctgtgatattgacactggttccaatgttatattagt

SEQ ID NO: 340226 - DNA, 599 bp, Homo sapiens
gtgaacatctgcccaattttgtggaattttttctgaagcaccataagtcttctctatttgtattagaatatgtgtgaattttgaaatttctcctgaataaaaaaaggtttttaaaaaatgtttataggattttatgagtatcctgatattgtatacaaatttaaaagattatattccatttattacrtttcaagaaaagacttggagatatctaatttcaataaaaagtgataagtaatatgagctgctacaatgtaaaattctcacttatataagcacaaaccataacaatttgtcttctacagttttcccactacctcagtggtataattgttctttcgttaagccactctaatgttagccatttgtattaatccttttatttgcattaccacatccaaaccatagaaaatattctaatctggaaatactaggttgcaaggaatatacatccatgaaaataacttaggaagatcaggaaagagggttgaaataatgaaaaaaatatctaatatataacagctaatatttgctcctctccaactttcacttgtacatgatagctgtgatattgacactggttccaatgttatattagt

SEQ ID NO: 340227 - DNA, 554 bp, Homo sapiens
aagcactattctaagtgttgttcagacagtaactcacttaattctcataactactttatgagaaaggtactgttattatttctgcttcayacataaggaaactgatgcatcaaaggttaaatagtgtgcccaacatcacaaaactagtaagtgaaaccacaaaaatttttactctggtactatcgtaactgctaccctatacttcctcttgggaattacctacttcaagagtcacagtgactcctcttgtcataaaaccaatccacaattcccaggtgcctccatggtctttctcacacatctctccataatttaagtttcctttctttattttaccttgtttcacactctgttccactctgttgtcccttgtctcattagaagtaaacatctcccacatcattgacaaagaaactggtgagatctccaatagtcagattactgcagggaaaaagcaattgtagaaagtcctcgtgtatatcaccataatgataaacatggagacattccttggtggattggtcttggcatgtgtattaagaagaaacccagtg

SEQ ID NO: 340228 - DNA, 554 bp, Homo sapiens
gctacaactattttttcaaacctgaatattaatgtgttgtgaaaaaagcatgaactccataagcagaaagatcatcaacagggggactaaaaagccctcaaaagcctctccaaagagccattagaaattgtcaaggaatcagaaaattccgtagtaaatgacccaaatgactttgagagatgaaaaataaggaagctgaaatagcaaaataataayagtacttgctacttacataatagctttcttgagagaattctgaaacactttccaaacattaatccaataattttttgtcattagtctacacagcacaagggagccttttatattatttctcactgagcacttgggggaaactaaggcttagaaagacaaagatagtgtgactttaatagatttgctcctgatgttggaaagtcagttctagaagagaattctcagagaaaatacaatgcaacttcattttacattctagtattactagacagcattgattcagaattaacttgataagttaataaagagaactgatataaaagttttgtcaatagtta

SEQ ID NO: 340229 - DNA, 592 bp, Homo sapiens
ttgtgtttgaataatatttttcacagctttaggcaaaacaaagccagaagcaggtagttgggacaagtgctggaaaaggagtgaaacaaacagaatttacttatttatcaaagagaaaaacaatgcttctcaaaaacctatcccaaaaatcttatcaaggggtatgtgagtcacacggccatacctagcaacaaagagactgggaaggtaataagttggcttcttacagtccctccggtgggaggcagaacaaggacaaaggaagttaggtgtagctcttagagacaagacaatgaatggtctctttcactcctaggtattacataaagttttttagataacgtcacatgtccagatagattgtgacttttccgttgtcacaggggtaatatgcagtatcctagggacttaaataaaggtttttttttcaccctatcctctaaaatttccactgtaccgtgaaagccatgtaactgggccttgtttctaaatttttcagatgtacagtaagaagaagggtccctggggaaattatttattttgttacaactttttttttttwaaaaaaagggaggaatataataaaaagtat

SEQ ID NO: 340230 - DNA, 611 bp, Homo sapiens
caggaacctctctgaagatctttcttatagcttgatccaagtcatctgtctaattccatgtgtaaacttcatgaaggaggaaatttgggaaaaaactttagaactaggatgggaagaagagttggctaaacaagagcaggtagtacagctgcgggcctttttcagataggaaatattgcagaatcaaattaaaactttattcttttagccctaaaagatcatccctgccttttaataagtacaatgatctaaatttttgtagctcttctatcctttaatttattccctatgtaacaagtatagcaggatagaaaaaaatatacgttattactagttgccttcaactctatgcctagggaaaggattgccatgatttaggggtgcttgataagttkctggtttcttgaagcttggaagaaaacagcagataaggagaaatggggatttgaggctttctaatttcttatgtggtggggaggtgtatgggttagaaacaaataattctctgtcctgccagattttagaaaggaagtcatgtatccaattcaatctaacaagcaccctaccggcgtggagtacagatttgtagctacaaaccctgcccccacaga

SEQ ID NO: 340231 - DNA, 565 bp, Homo sapiens
tgaaaatcttttgtactctatctatgaatactagttatctccagacaatatatttaagaattttctgaaatatgttatttatttatatacttatttaaatgtatttgtccatatccatatgtactcatcaatctatatctatttatgcattcatccattcatctatctataaaggtatattctaaaaaactgtgtgaattaggtgtacattcaaaatgtttgaacaccaccaatatggaaaacaaacagcacaagctcattgcatcttgtaacctcatgttgtcttttcaaacaaattgatagagcacattttctctacctcaggatggtggcagaatcccctgtcaaaagataagattttcatactgaggaagcaataacttcctccaggaaaattaagagcaatcaaagggcctggaaaytgttctgagagggggttgagaaaagttaagacatttcatggataagagggtgaggatgtttgtgatagaagattatcctagtgtcatctaaacttagagataattatttcatccatccattccttaatcactccaaaactatg

SEQ ID NO: 340232 - DNA, 568 bp, Homo sapiens
tctatgtaatagccatacgggatacaccaattatcttattgaagccccatttyccttgtgttgccagatcaacagagtagcaatggctgaactaggcccttgactaatcatgggcctgagacacaccccagtttccttcaaagaatggtagggaagcatgacaatactaatagaggactggcagacctgcatacgaataaggaggaggaggagtcaggtcagattacttagagctgattgctgaaggtcatggcagaactgtgaacctcagcacacctgttagcatatgatgacaacagccaattgaagcaaagtacaccacaatcacaaaaaacaccggagggtggtcataagccagaatacccccttccatgatgctatgtatgcctaaaaagataccaccctgggaaagtgaaaggtcaaggatttgatgtcactgagttatcatttccttagaaagatttttaatctaacagagtctgagttacacttctggttacaactaaggttccttgcataaagtgaaaataggaacatattagctaagtaaatttttatttatagataa

SEQ ID NO: 340233 - DNA, 598 bp, Homo sapiens
tcaaaatacagtacaaagtcatagtaaccaaaaatagcatagtactggcattaaaacagatgcatagactgatggaatataatagagaacccagaaagaaatccacacatttacagccaattgattttcagcaaagtcaacaaaaacacacatggggggaaggacagttttcaataaacagtaccgtgaaaactggatatccacatgcaaaagaataaaattagatccctatttttcaccctacacaaaagtcaactctaaatggattaaggactaaacygtaataatcaaaaccatgaaactactggaagaaagcctaggggaaatgcttcatgagttgaactgggcaaggatttttaaaataagacctcaaaagcacagggaacaaaagcaaaaataggcaaataggattatattgaatgaaaaagctactgtaccacaaagtaggcaatcaataaagagacaaacctacagaatgggagagaaaattcaagaactgtgggacaatgctgaatgatctaacgtaaatgaaattgaagtcctagacagaaggaaatttgaccaagaatttctcataagtgagtgaagacatcaaacc

SEQ ID NO: 340234 - DNA, 607 bp, Homo sapiens
attcttaaattgaggaagtgtttttacatgaatgaagaaataagtacataaataaatgaattaaatatctgttaataaattatttaaaataattaaaatactctgatgcaatggmaaattatatacctgggctgggcgcactggcccatgcctgtaatcccagcactttgggaggctgaggtgggcggatcacgagttcaggagttcgagaccagcctggcctacatggtgaaaccccgtctctactaagaattcaaaaattagctgtgtgtggtggcgtgtgcctctaatcccagtttctcaggaggctgaggcaggagaattgcttggacctgggaagcagaagttgcagtgagccgagatcacaccactgcactccagcctgggcaacagagcaagactccatctcagaaagaaaaaaaaatgaaaatgaaaattatgtaccaccccaaatcactgaggcacgtatttatgtaggaaaaacataaaatatatatatatttttaggtaaaagcaagttttagaatacatcttttctatttgtttaaaattttcaatgttatgaatactcaattaggagcagatgagggccacattgatacgcctt

SEQ ID NO: 340235 - DNA, 609 bp, Homo sapiens
gctattatgccatattattatgacagttaaggttataatttaatgtcactcccttttaattcaataaagttattaatatattagaaatattttactagtaaagatttactcgagccaagtcttttctttctcttgatggtgtaaaaattatctgctcagataaaaagtaacctcatggcttgagcgacaaaactaggtattaaatttagattctaaacagatatcaattctcaggggtcttggtaattctcttaaattttgaccygtgcatattctctctctctctctctctctcagtctatccttccacctctctctctcttcctttctgaaacacttgttcactgcttcaccaaggttgcttatttttaaaatttctctcgccagttattctatctttgtgcattcgctcttttgacatcatccaactgtgttcccttcatgcccagactggagctgaagggaaagcatatatgggcatgagacaaaggtctagacagaaaaagaaaaagaaagataaagaagctattgtgataatgttggcagcttgccaagtctctactattttgatgtgatttcccctgagtctggctagaagattgctggtgc

SEQ ID NO: 340236 - DNA, 609 bp, Homo sapiens
gctattatgccatattattatgacagttaaggttataatttaatgtcactcccttttaattcaataaagttattaatatattagaaatattttactagtaaagatttactcgagccaagtcttttctttctcttgatggtgtaaaaattatctgctcagataaaaagtaacctcatggcttgagcgacaaaactaggtattaaatttagattctaaacagatatcaattctcaggggtcttggtaattctcttaaattttgacccgtgcatattctctctctctctctctctctcagtctatccttccacctctctctctcttcctttctgaaacacttgttcactgcttcaccaagkttgcttatttttaaaatttctctcgccagttattctatctttgtgcattcgctcttttgacatcatccaactgtgttcccttcatgcccagactggagctgaagggaaagcatatatgggcatgagacaaaggtctagacagaaaaagaaaaagaaagataaagaagctattgtgataatgttggcagcttgccaagtctctactattttgatgtgatttcccctgagtctggctagaagattgctggtgc

SEQ ID NO: 340237 - DNA, 521 bp, Homo sapiens
aaagaagctattgtgataatgttggcagcttgccaagtctctactattttgatgtgatttcccctgagtctggctagaagattgctggtgccttagccactctaaatcccatggcaacccctcctagcagtctccttcttcattagagcactgagccccaggtttatagacagcactgcaggtcaattcaagctctccaaagtaagtaaaaataccaactcagcttcgattcagtaaatcagtcacctagactagtgcttctcaaaattttatgtgcccattaatcacctggtgatctggtgaaaatgcaaattctaattgggtaggtctggaccggggatgagattatgcatttctaayatgctcccagttgaatctgatgctactgactcctggaccacacttgctattcaaacaaggactcagactatcatctatacccctaaacataaccccactaagacactatctgaccttcttctctacctttctttcccacttctcctggatttccacatttt

SEQ ID NO: 340238 - DNA, 589 bp, Homo sapiens
gcaaaagcatacatttgagtactttttaaaatactcaatatttgccaagtaaattgggccaaaatttatgcttaaagagtcataaacaaagcaagtgagccttgttaaaccacactctccatatgggaaggaaacacgaactgtgtgaattgcataatgcaatccatacttattttattacataaggacctaagtgttatttgcctaagattagtgatacatcatgattattactctcttcctaggaaatcactatatgaaacagttcaatgtcacaacaggagcattgctgcttttgatggggataatactaggtaaagtaattacttccagtgaccttcctgcttttgtgtttcatagtgtatgttcaacataatatattgtctacaactaaagttctcttcattacttccatttataaacaaaarttttcccagttatgtgcaccagtcatttgaattctaaaaattcaaaactgtgagctatttacattcttagccacaaaataactgcttattattttatttattggtgttattggtgttcctatatatttttgctaatgctaaactgtaagaagaaagtaata

SEQ ID NO: 340239 - DNA, 603 bp, Homo sapiens
aaactttataagcattccaaaatgaattatggggagatagaatggcaactcaataataataacagcaacaacatgataccattgcatggaaatactatagagtgttaaaagcgcaggctctagagttatacaggtttggagcggaaacctaactttgccagtgtaaactccctgcatcttctatgtaaaatagggatataataggacctatgcacagtgctcttagggctaacatagataawatatgtaaaatacttagtgcttggcacataacactcagtatgtcttagctattcattatgagtactgatattttacacaatgctccatcttgaagaagagagtgacagagtatgttgagcattaatgcaagtattatttcaggctataagccattagatggtctttggtgcagaaaacccacaggcccctttggatctggtatccatagaaggacatacacaagactcatgatccccatattctttcatggtttcctcatggatccctttgaccttgtttaaaaaaaaatgtgagatgccttatgaattccacctcaagccacaaaaccaaatgttctaaagtcctgctcatactacaaac

SEQ ID NO: 340240 - DNA, 541 bp, Homo sapiens
atatatgtaaaatacttagtgcttggcacataacactcagtatgtcttagctattcattatgagtactgatattttacacaatgctccatcttgaagaagagagtgacagagtatgttgagcattaatgcaagtattatttcaggctataagccattagatggtctttggtgcagaaaacccacaggcccctttggatctggtatccatagaaggacatacacaagactcatgatccccatattctttcatggtttcctcatggatccctttgaccktgtttaaaaaaaaatgtgagatgccttatgaattccacctcaagccacaaaaccaaatgttctaaagtcctgctcatactacaaacatgcctgcgaattccacgctggggttgtccttcttatttctttcagatgatgatttattttcacctattcccttgttctttccaggataggttaatgtggacttgtaaatccagtcaccttcctcaaagaagccttttctgaccaccacagtctaagctgatgtccctcccatgtact

SEQ ID NO: 340241 - DNA, 552 bp, Homo sapiens
ggtggaaaccttgctctgtgccactctgagaagggcctcaggtactcataccaaccaaattaattattattacttcctttcatgatccttggctgtgtgactcacctttgctctgatctttgacttctagttcttatctcaggtcctgccattaaacaccttatttggtcatgtttatctgaactgaccctcagccctgtctttaggacagaactttatatttaatttcagcctctgtgtgcttttcaccttaacactgtattccccaggggagagttgaatcagccctatacagcattctggaagggaaaaggggattagaaagatatatctttcttgccattagattgaatcctaactcacttagcctctgcccctcactacctgtcygctgatggaagaagttttagaaggaaagagaaactgactgttaagaatcagattaacttatgactgtgcaatctttgcttagctaagttgcaatatatattctcttctctgttctattacctcctttcactttttctctcagaataaattcaaattaaggcc

SEQ ID NO: 340242 - DNA, 552 bp, Homo sapiens
ggtggaaaccttgctctgtgccactctgagaagggcctcaggtactcataccaaccaaattaattattattacttcctttcatgatccttggctgtgtgactcacctttgctctgatctttgacttctagttcttatctcaggtcctgccattaaacaccttatttggtcatgtttatctgaactgaccctcagccctgtctttaggacagaactttatatttaatttcagcctctgtgtgcttttcaccttaacactgtattccccaggggagagttgaatcagccctatacagcattctggaagggaaaaggggattagaaagatatatctttcttgccattagattgaatcctaactcacttagcctctgcccctcactacctgtctrctgatggaagaagttttagaaggaaagagaaactgactgttaagaatcagattaacttatgactgtgcaatctttgcttagctaagttgcaatatatattctcttctctgttctattacctcctttcactttttctctcagaataaattcaaattaaggcc

SEQ ID NO: 340243 - DNA, 471 bp, Homo sapiens
ttggcatttcctcatatcttttgcatattacctcttcggaaagtagctaatactgcagagtaaagaagaaaaaaaaaaaaaaaaacctctcttgtctgagttacaagggatacatactgtggccttagttattaattaaatgttttaaaacattatttatcagtgtgctttttcactgtcaraatgccttagggctccgcacagcaggtcctccacagctttcagggaaaagctgccaaaagtccttgcccagtgttcacggctatatttgttcattctattacaatatatactttgcttctcctagtgattttactttaatctatgtagcaaatcatgcaaaaacataaagatatttcagtggagtagatagcaaagaaattgagattatgtaaattggacattttctcttcttcctcaagaaaacaaaatatttatatgcctgttcattaaaaattgtccagaggaaat

SEQ ID NO: 340244 - DNA, 471 bp, Homo sapiens
ttggcatttcctcatatcttttgcatattacctcttcggaaagtagctaatactgcagagtaaagaagaaaaaaaaaaaaaaaaacctctcttgtctgagttacaagggatacatactgtggccttagttattaattaaatgttttaaaacattatttatcagtgtgctttttcactgtcaaaatgccttagggctccgcacagcaggtcctccacagctttcagggaaaagctgccaaragtccttgcccagtgttcacggctatatttgttcattctattacaatatatactttgcttctcctagtgattttactttaatctatgtagcaaatcatgcaaaaacataaagatatttcagtggagtagatagcaaagaaattgagattatgtaaattggacattttctcttcttcctcaagaaaacaaaatatttatatgcctgttcattaaaaattgtccagaggaaat

SEQ ID NO: 340245 - DNA, 591 bp, Homo sapiens
ggaggaaatctgaaggtcaggagaagttaggagaattctttttttttttttttttgacagagtcttgctctgtcacccaggctggagtgcagtggcatgatctctgctcactgcaacctctgtctcccatgttcaagcaattctcctrcctcagcctcctgaggagctgggactacaggcatgtgccaccatgcttggctaatttttgtatttttagtagagatggggtttcaccatgttggccaggctggtcacgaactcctgacctcaagtgatccacctgactcggcctcccacagtgctgaaattacaggcatgagccactgcacccagccaagaatttttttaatcgattgagatatataagtatatctgatgctaatgagcatgattcagtagataggaaaacctggtattgcaggagtgagagaagataactgagtcaatgaaaggaaatgggacaggtgcacatgggcaggaaggagtggggacggtggagctttttcctgtgtagcagcatgtttagtacaccttcaataagaggagaaaagaaagcatatgtatgtacacatgctgctaagtgggtaaaca

SEQ ID NO: 340246 - DNA, 587 bp, Homo sapiens
caaatactgtaggaaataaatctctgtaggtctgtgttggaaggtgatgctcagagtagatgttgagtagtgctaaatatgagagtagccattaaggttcccaaggggaactttggtgttaaaatgagggcacactgtatcacagagrcccactgtgttttatgagcatgaggaaaggagaatggccagttggaagaaggagtgtctttgaaatctgccccaacaatgtgattgatggtcaagcattctggatataagatgttttattttcaagtctttgcttgaggttctcatttatgagcacacatattgctccttgcaaaaaaaaaaaaaaaacaatttgatagtgccaatagttttctttcattatggaagactcaaataagaagtttcacaagatgctaaccttaaagattgagaggtgatcaatatattaaacaataaatatccaatattcagcaaatgatgcatgatttcaccagtggaatatgttagatataaatagtcagtatactgttgccagaaaaatgcttattggcatgtgaaataatcaagtaaaattcttgaaagatgaattacattcttga

SEQ ID NO: 340247 - DNA, 579 bp, Homo sapiens
catgcttatacattaataacattacttggcaatctgatgtttcaagacccagggtgaattacttattaaaaacccatatacagctatctgtctttatctttctttctgtatgagccataatggctctgattgttttcaaaattatatttggacaggatatgactgctacatgagacctctcaaaccaatatcatttccctcactcataaaatacattatactgctgtgtgcattgagccaaatcattaatgaaggaagcataccctaacctttgtgyctctgatttgaccagtagttacactgaagcaagctaacatcttggaaattgtttaaaaagtgaagctaacacgattatgaatatttatggtacattcacttatttcttgaaaattcatcctgccatctgaaccatttcattattcttaactattttctaagaggcttaactttgagatagaaaaactatctgaatcttacattatttgtaaaaccaaataactgtattcctggagtacaccccttctctgtacttatttaaacatgcaatagctacaataactagttaaaatctgtgaaatg

SEQ ID NO: 340248 - DNA, 574 bp, Homo sapiens
tgacatggaaaagcagcttctatacaaaattggaaaatgggctaaaggtattgattagttcaaggaaaatagagaaagaaaagctttaaatcaaatcaaggaaagcctgtagtatgtcaagattaaaccagaaactgaaaactctgatataaattagarcaatgttttgtgagccctcatgaaaaacaagaacactacgactcagtttggcattctaaagaacaattcagctaaatcatttcctttgtttttgtagaagatcattcaaataataaatttggacatcacctacattgacttatccaaacatctggcactttttcttatgatattgtagataatatgcagaattatagatgtggacattttatggatttataattatttcaacaataatatccccaaagactgagtcaaacaacaagtttaatgtagaaggagagcacagtgatgtgtcatcaagctttctccccatgataccaagatagtgcagcgtctaaggagcataccagttaccatggtgataagagaatttactgatcacacttcatcagggctcattgaccagtgcaac

SEQ ID NO: 340249 - DNA, 574 bp, Homo sapiens
tgacatggaaaagcagcttctatacaaaattggaaaatgggctaaaggtattgattagttcaaggaaaatagagaaagaaaagctttaaatcaaatcaaggaaagcctgtagtatgtcaagattaaaccagaaactgaaaactctgatataaattagagsaatgttttgtgagccctcatgaaaaacaagaacactacgactcagtttggcattctaaagaacaattcagctaaatcatttcctttgtttttgtagaagatcattcaaataataaatttggacatcacctacattgacttatccaaacatctggcactttttcttatgatattgtagataatatgcagaattatagatgtggacattttatggatttataattatttcaacaataatatccccaaagactgagtcaaacaacaagtttaatgtagaaggagagcacagtgatgtgtcatcaagctttctccccatgataccaagatagtgcagcgtctaaggagcataccagttaccatggtgataagagaatttactgatcacacttcatcagggctcattgaccagtgcaac

SEQ ID NO: 340250 - DNA, 574 bp, Homo sapiens
tgacatggaaaagcagcttctatacaaaattggaaaatgggctaaaggtattgattagttcaaggaaaatagagaaagaaaagctttaaatcaaatcaaggaaagcctgtagtatgtcaagattaaaccagaaactgaaaactctgatataaattagagcaatgttttgtgagccctcatgaaaaacaagaacactamgactcagtttggcattctaaagaacaattcagctaaatcatttcctttgtttttgtagaagatcattcaaataataaatttggacatcacctacattgacttatccaaacatctggcactttttcttatgatattgtagataatatgcagaattatagatgtggacattttatggatttataattatttcaacaataatatccccaaagactgagtcaaacaacaagtttaatgtagaaggagagcacagtgatgtgtcatcaagctttctccccatgataccaagatagtgcagcgtctaaggagcataccagttaccatggtgataagagaatttactgatcacacttcatcagggctcattgaccagtgcaac

SEQ ID NO: 340251 - DNA, 691 bp, Homo sapiens
cctgttcatctcagcaagcccattttctgcacagggcttccacctgtgtggtttgaaaagtgacctcaggtggaaagcctgatcactcacacgggtggaaaaatatcaaaagtgcattttaaatgagtatactttaatggctaaaggctaataaaatgcaaacctccagtaaaatatataatggtctcaccattgcaaaacaggctaagttttaggtttgatgaactgctttcactctcttggtgttgtcatagcatcataagtcacagatagaggaaatgtaatacaggtactatgacaatgataaaataacttaatacagatgtttttgtaaaaaaatgttaggctggaaccagaaaacagaaacacaaggaaatgtaagaaaaaatattagagatattcgaaggtgaataatctttgtgcgtagttttccatcaaattacccaactcagctcctgattagctgtttccctagtacttcagtgaaaagttaattgaaaactagaatatactaatacttaattttaaaaaatcttttttatcacctttgagtgatcagaaatactatgagaacttctacaagttttacagtttgcatttgtaacmgttgtcacaaatggttaacagcacaaaaaagtgctttttattttatttttcttttaaatgatagaaaacattacaacaacagggt

SEQ ID NO: 340252 - DNA, 576 bp, Homo sapiens
taggcatatgcacgtatagtttaaagatatgactgcagaatgcaaaactgaccttctatccaatatttttttatatatagctgtcaacttcaggagtctttgggtagttgtatttattagtccattwttatgctgctgataaagacatacccaaaactaggaaatttacaaaagaaagaggtttattggacttacagttccatgtggctggggaggcctcacaatcatggtggaaggtgaaaggcatatctcacatggtggcagacaagagaaaagagcttgtatggggaaactcccctttttaaaaccatcagatgtcatgagatatattcactatcatgagaataatatgggaaagacctgcccccatgattcaattacctcccacctggtccctcccacaacacatagaaattcaagatgagatttgggtggggacacagcgaaaccgtatcattgtattaatccctggtgacctcagttgactgaaattgttttctagtcactgaaaccaccatattctcctctcttttttcctggtatcatccacttggtctgtttatcaacaatcacttc

SEQ ID NO: 340253 - DNA, 516 bp, Homo sapiens
ttttctctacaattaattttcaacttactctacatattggccatcaattgctcatactagctaaaatctatcattataaattaatccttttggattttgaaagctacttattttcaagagtactttactaaaatgaaagtttttcaggtagaggaaactctttaaaaaattatgccatctgtgaatgaggccataaggtatgataatggcttacaagaagggaaagccaaatatggcttgattcacacctctgcgtatggttctcttattatcacaaaacaaacaaacaaaatctaaatgataatatacttccacctgtgtatgcattgratcctgctaaagttacgtaaaaatcgattaaacaaaagttctgtatctcgactccttacaaaggaacacagttaagaaagttataggaggagttaatggatcccaagaacaggactagaattaggctgtaatgtgctggaaaaacttagtgatttatttggggctgggaggcataagcaggcagga

SEQ ID NO: 340254 - DNA, 516 bp, Homo sapiens
ttttctctacaattaattttcaacttactctacatattggccatcaattgctcatactagctaaaatctatcattataaattaatccttttggattttgaaagctacttattttcaagagtactttactaaaatgaaagtttttcaggtagaggaaactctttaaaaaattatgccatctgtgaatgaggccataaggtatgataatggcttacaagaagggaaagccaaatatggcttgattcacacctctgcgtatggttctcttattatcacaaaacaaacaaacaaaatctaaatgataatatacttccacctgtgtatgcattgaatcctgctaaagttacgtaaaaatcgattaaacaaaagttctgtatctcractccttacaaaggaacacagttaagaaagttataggaggagttaatggatcccaagaacaggactagaattaggctgtaatgtgctggaaaaacttagtgatttatttggggctgggaggcataagcaggcagga

SEQ ID NO: 340255 - DNA, 591 bp, Homo sapiens
cataagcaggcaggaacaacattaaaaaaaatcggtgaaatttagttttccttttaggaaaggaatgagaatataatgtatatattttaaatatgcatattaaagactaaattttaaatttccaacyattcattgtgaaacagcaacatagagataccatggacatcccaaaatctaaacaaatccccaaactaagactgcaaatgaaacagagctctacctactttaaagagcactttaacagtgctcttcacagtacattatatagtccaagagaagagaaagtatattcttccccacacaacatgttattggttcttataaaatgctcccttgcaaataaaatttcaaatttgatcatggcctacatataatttccagctttgaaatcttggtagggagagacagacagggaaatggaagataagaaaagttattaatttttttctattttagttcagtaattattgaatataattgatacagaaaattagcatgctacatcctcacccatgtttgtttatctattcattcagtcaacaatgatttatttattgcctactttgtgccaagcactatgtatacatattt

SEQ ID NO: 340256 - DNA, 587 bp, Homo sapiens
atcatagacatatatgaccttgaaagaattggcaaaactgcaagaatgctcacagtaatctcatgctacttccatgtattcagtgtccataaaatgcaagatcaactgtctgcaaatgcccagtgtgaaactgatcctgtagaccctggccaacagtggctgactctgcagccaaaaatttacagtgttctttggattttactggctttttcaygaaatctaacctctcattaccaaatgtaactttttttcctattctttaattttctgggtctgtccttatgttgcaagtacatttatattactatgacaacagatttacaaagcaaaaaattgacttggtttcttatctaagattatattttctaacaaaaatatagatagtttctttcaagttccataaagaattctgtaacttttaaaaggattgtaaatgcctgcaattcttgatattaatataaccataaagctataagtacaagcataaagataaaaagtatgccttaaatatataaaatatctaaatatctcaaaactacagctctaaaatatcattgggactttattcattctacaggcaaagtgaa

SEQ ID NO: 340257 - DNA, 569 bp, Homo sapiens
caggttgcaggttggacaagcttggtcttaacattcccctcagattgactagacttttgacaggtctttccttcttccttccttttttccttctttttttccttccttcctkcccttttttatccttccttcccttttttcttctctccttcctttcttcctaccttctttcattccttccttcctttgttccgtcctttcttccccttccttctttccttccttccttttcttcctttcttcccttcttctttccttccttcctttcttttctttttttcttttcctttctttctttctttttttctttctttctttccctccttccttccttccttttcttttcttccttctttttcttttcttccttccttccttccttctctctctcccttccttactggtattaaagatcacaagtttctttctgatttaggcacttgacttcccttttctcagatcactcacatagagaacttgcagttgtaaattctttctctacctctttgacatgtaaatcttctcccagcctctttccagttttacaacccaagaatgtctttctcaat

SEQ ID NO: 340258 - DNA, 569 bp, Homo sapiens
caggttgcaggttggacaagcttggtcttaacattcccctcagattgactagacttttgacaggtctttccttcttccttccttttttccttctttttttccttccttcctgcccttttttatccttccttcccttttttcttctctccttcctttcttcctaccttytttcattccttccttcctttgttccgtcctttcttccccttccttctttccttccttccttttcttcctttcttcccttcttctttccttccttcctttcttttctttttttcttttcctttctttctttctttttttctttctttctttccctccttccttccttccttttcttttcttccttctttttcttttcttccttccttccttccttctctctctcccttccttactggtattaaagatcacaagtttctttctgatttaggcacttgacttcccttttctcagatcactcacatagagaacttgcagttgtaaattctttctctacctctttgacatgtaaatcttctcccagcctctttccagttttacaacccaagaatgtctttctcaat

SEQ ID NO: 340259 - DNA, 569 bp, Homo sapiens
caggttgcaggttggacaagcttggtcttaacattcccctcagattgactagacttttgacaggtctttccttcttccttccttttttccttctttttttccttccttcctgcccttttttatccttccttcccttttttcttctctccttcctttcttcctaccttctttcattccttccttcctttgttccgtcctttcttccccttccttctttccttccttccttttcttcctttcttcccttcttctttccttccttcctttcttttctttttttcttttcctttctttctttctttttttctttctttctttccctccttccttccttccttttcttttcttccttcyttttcttttcttccttccttccttccttctctctctcccttccttactggtattaaagatcacaagtttctttctgatttaggcacttgacttcccttttctcagatcactcacatagagaacttgcagttgtaaattctttctctacctctttgacatgtaaatcttctcccagcctctttccagttttacaacccaagaatgtctttctcaat

SEQ ID NO: 340260 - DNA, 528 bp, Homo sapiens
ccctgtcttcagccctggatgttttctgaagattctctggtacacttaaatgagtcatctactaagcgtctccctccactccctgcccctgacccccatccctaacttcctccaccagtttctgctaaggggagaagatgatatagagctctatctccacactgatacaagttacagcatctctatttgaggacagaaacagctacaattagtttgagctttaaatatctttctttcctattacattttattaaactacacagaaaaaaatcacataagcagctttatattcataatgggggaagaagtggttgtaaaaatatagaggaagaaatatgttgtttgattcttcctttatcttttccaaacatatmggctttgggctctttttgatcataacaatatccatattttgttctgactaaacagtccaaaaagttcaaggcaagtgagtgattactatgcattagtatctttttcctctaagaattgttcactggacctggatccacctaaaaatggatattc

SEQ ID NO: 340261 - DNA, 606 bp, Homo sapiens
gtgtctaaatgctttacatatacccacccatgaataatgagttgccatgggtagagtaacaagaaacgagaaatatttctataaatacctactgatatggctgccactggggtgggtgatggagggtgacaaggagggtatggctgtgcatccagggctctgagacctcacactgcagccacaccctgtgcttgaatgagagtagttctactttcgtgttctatgtaagatttcattaggaaaaaaacaatggagctctgcatgctaaaaatgtaacgaagtccgtcagcttagtaatttgaggaaggaatgacctcatgagcaaaattttccagtggtaagaaagaaggaatgaacaagattatgggaacattcacaaatggataagaagcaggatgagttattgggtatttatggaggaaaaaaggtatgaatggcttttaggattgcccccttgaggttartggtcatgaatttgaagtgagagctgtcagcatgtcattacctactctgtgatatcccaggaaagcaaacatgaaaaggtgttgcctctgaagttaaggaaggaaatgaattggatcttactctttatacattacgttgctt

SEQ ID NO: 340262 - DNA, 643 bp, Homo sapiens
ttatttttttgaaaatgtagaaaactgtagattatatatattatcatgtttatttcatttgattgctcttcatcactgggttaccattgaaacagaatagttagcttatttgactatgtttctttatattttcaaaactggaatattctcatgttccagtaaatacttgattttgatttttctttgagaccaacttaacattttgtgaagtcacaacatctaccattaacttgtagaaagtcactgagtagtatcgatttaagccatatggcaagacttgctatgctcagtgttccatctgacagtgtagccttcacaatatatctataattttaataaggttgcgtaactgacatattgaaagtgaagcactcaatgagtgaatcatgatgcaatttcattcctccctgactattcttcaaacctcttctggaaatcacttatttccaggcaggtcccttaacactcctgatcctttttggttgcagtgtcatttcaggcactaaaatgaccagtcccytttaatataataccctaatttgaaatttacatccaggctaagtcttccattttccaagctagggcttgtctccggcctgaaagcctgaggtggggagtgtaatatggtattttcttctttctt

SEQ ID NO: 340263 - DNA, 576 bp, Homo sapiens
ctagtctgtggtctacaacacctggggaatagccaacagctaactatctaggcaagcttttgaaacatagaaggatacttgagagctagcttcttctaaaatcaaagaaattcttcttgacctattagacaccaactccttatattgttgccccattagggataagctgaaatttatctataaagtcagcaaaatctaaattaataataaggcaaacagttttaatttaagatggaaaaatatattttatctcattaagtcccaccgtcctaatgagtagcagtgatggcctagaagagttaatgcaaagtcagtggaacaagagttaagtttttttaaaatgtcattttccatcctgaaaaagtctgtgtgcaacagtacatttctcactttttgtaagtcttggaaagacatgatatttttctggtttcgtcagcagtgaaaatgccttcacacaggcctgtagctgatgacattgtagtgaaagctctccaaacactaattggaaatttwaaaaaaaatcttgacaacacctcactgcatcatagttatgtttcatcaccttagacattcatt

SEQ ID NO: 340264 - DNA, 607 bp, Homo sapiens
gtctttggacatatactcagaagtgggattgctggaacatatgataattctagttttcattttctgaggaccctccatgctgttttccaaaatggctgaaccaatctacattcccaccaacagtgtgcaaggattcccttttctccacatacttgccaacatttatctttcatactgttgataatagccaatctaccaggcgtgaagtaatatttcattgtggtttttattcgcatttctctgatgattaaaaatgttgatctgagctttgtcagcaacaagtaaaaataaataaataagaaatgttgagcattttttcatatatctgttggmcatttgtatgtcttcttttgagaaatgtctactcaggtcctctgcccattttttaaatagggttgttttcttgttttgagtagtttgagtttcttacatattttggatattggctccttatctgatttatcatccaaatagtttctcccaatatgtgggttatgtcttcactgtgttgtttcctttgctgggcagaaggcttttagtttaatacaatattattcccctatttttgcttttgttgcttgtgctttgggagatcatatccaataaa

SEQ ID NO: 340265 - DNA, 574 bp, Homo sapiens
tgtttgtctgagaaagtctttatcaccccttcatttttgaaagaaaagatttctgggtatagtattcttggttgacagggttgttttattcaggatttttaatataacatcccacccccttctggcctacaaagtttctgctgagaaatctgctgataatctaagggagggttctcttgtgtgtagcaattcactatttcctcactgtttttaaaactttctctgtctttttgcatgtatggcagggggagggtggtgagtattctggtttcttccatcctatggtgaaggtgaatgccagtatttatctctccctctctctgcactaagctggagagataatctgtgacaaatgcctatacttgtgtccaaactgcaccctctgatcctggygagatagctgcttgatatggttagaatctgtgtccccatccaaatctcatgtcaagttgtaatccccaatgttggcggtggacctggtgagaggtgattggatcacgggggtaaatccttcatgaatggtttaacatcatctctttggtgctgttctcatgatagtgagtgagatgtggtt

SEQ ID NO: 340266 - DNA, 574 bp, Homo sapiens
tgtttgtctgagaaagtctttatcaccccttcatttttgaaagaaaagatttctgggtatagtattcttggttgacagggttgttttattcaggatttttaatataacatcccacccccttctggcctacaaagtttctgctgagaaatctgctgataatctaagggagggttctcttgtgtgtagcaattcactatttcctcactgtttttaaaactttctctgtctttttgcatgtatggcagggggagggtggtgagtattctggtttcttccatcctatggtgaaggtgaatgccagtatttatctctccctctctctgcactaagctggagagataatctgtgacaaatgcctatacttgtgtccaaactgcaccctctgatcctggtragatagctgcttgatatggttagaatctgtgtccccatccaaatctcatgtcaagttgtaatccccaatgttggcggtggacctggtgagaggtgattggatcacgggggtaaatccttcatgaatggtttaacatcatctctttggtgctgttctcatgatagtgagtgagatgtggtt

SEQ ID NO: 340267 - DNA, 612 bp, Homo sapiens
cttttggaaatatgaacagtggtggatgcatagatctatgctgggtcgcttctcacagaccttgattcctgaaatgatgcaggagcagggtcaatgaaaccatgcacctatagagcagccttctcaagcttgaagctcctccatggccccagaaccaaggcacccctgccaccacgactctcctggactcttcagggaacttccttccagcccatcaccaatcctagtgattggcagtatcttaaatcctgtctccctgccctgcatctcaccccagtagacttcaatgcctgggcttcctggactctcgccatacacctgcattcagaactctgtctccccattaatcatggtgaagtcacccccatagaatctatggtctgaccctgagagctcaaagaagcctgagacatttccaaaccctcccctagtctccagaatttgcagagcccagaaaagaagatgaacttgcctctcatccctccttctcctctcctctccrtcactgtccctagtatcgcttcccaccaccactctcctggctcctttgatgttatacttaactttgccctgtatactccaacttttcattgcttatgtcctttttaccct

SEQ ID NO: 340268 - DNA, 432 bp, Homo sapiens
aactttgccctgtatactccaacttttcattgcttatgtcctttttaccctacacttatacccatttctacacctacacctaccctcataaccacttctagatgttcactcctcacaaatgtgcataaatcaaagaataattgtsttgctttcccattggattctcagccctggttcacctttcactatgggatgtaccatttgtctctaagtactgggagcaaacaacaaaagatgtaggttcccccttcattcccactactattcccagggccaggtaaaggggttggagggccatggtttgggacagcccagagtctgcacagcattgtggtcagagctggatatgcagaaaggttgcaagtcctaggtcctactcagactggacacagctcctccattccccctacccaactctccatcacccatcca

SEQ ID NO: 340269 - DNA, 541 bp, Homo sapiens
atcttacacagacaaacaaaaactaagaattcattactactagactgatcttacatgaactgctgaagggagtcttatatctggaagtgaaaagacaatagccaccatcatgaaaacataaaatgataaaactcactagaagagccaatacacaaaggagaaagagaatcaaatcttaccactacagaaaaccacctacctgcaaaaataataagagagaaagtaaggaacaaaggaactataaaagaaccagaaaggccgggcgcggtggctcatrcctgtaatcccagcactttgggaggccaaggcgggtggatcacgaggtcacgagatcgagacaagcctgaccaacatggtgaaacccagtctcgctgagatcgtgccactgcactccagcctggtgatggagtgagactccgtctcaagaaaaaaaaaaaaaaaagaactagaaaacaacaaaaaaaagatgagtaagttctcacctatcaataataaccttgagtgtaaattaattaatttccccatttaaaaggtttagact

SEQ ID NO: 340270 - DNA, 498 bp, Homo sapiens
tgcacccaataccacaacactcatatttataaagcaaatattattagatctaaggggatagaccccaatacaataatcactggggatttcaacaccccactttcagcattggacagatatctaaacagagaatcaacaaaaaaactttggtttaaaactgtaccatagaccaaatgaacctaacagacatttacagaacatttcatcctgtaactgaatgatacacattcttttctttggcatgtggaacattcttcaggactgatcatatgttaggacatgaaacaagtaacaaaaagtactcatctgacaaagggctaatatccagaatctacaaagaactcaaacaaatttacaagaaaaaaaaacccatcaaaaagtgggcgaaggatatgaacagacacttctcaaaagaagacatttatgcagccaacagacacatgaaaaaatgctmatcatcactggccatcagagaaatgcaaatcaaaaccacagtga

SEQ ID NO: 340271 - DNA, 469 bp, Homo sapiens
ggaatgtttgtccattttttatttcctgtctgatttccttgagcagtggtttctgctaggaatccaggctagaaccactgagcccagccttcttcttatgcctttgcactttaatarcttagctccccaaagcccaacttttttaacttgtgctgctcttggtggattcaagggtggttgtggtggtggtagatgattccagagaagagactttacagtgatacaacctgggcttccttactccatttgcttcttcctaaataacattatttctctatcttcctccccccacctccaaccagagaaaatatctacacttctgtcctagatgtattttctaggaacctttcttcctcttagttttagtcacataaaccttactgtatataggaggaagagaaaacagtaaactctgtgtctggctagctcagttgcacctgtttttatgcttctcacttcttttatgctt

SEQ ID NO: 340272 - DNA, 469 bp, Homo sapiens
ggaatgtttgtccattttttatttcctgtctgatttccttgagcagtggtttctgctaggaatccaggctagaaccactgagcccagccttcttcttatgcctttgcactttaatagcttagctccccaaagcccarcttttttaacttgtgctgctcttggtggattcaagggtggttgtggtggtggtagatgattccagagaagagactttacagtgatacaacctgggcttccttactccatttgcttcttcctaaataacattatttctctatcttcctccccccacctccaaccagagaaaatatctacacttctgtcctagatgtattttctaggaacctttcttcctcttagttttagtcacataaaccttactgtatataggaggaagagaaaacagtaaactctgtgtctggctagctcagttgcacctgtttttatgcttctcacttcttttatgctt

SEQ ID NO: 340273 - DNA, 469 bp, Homo sapiens
ggaatgtttgtccattttttatttcctgtctgatttccttgagcagtggtttctgctaggaatccaggctagaaccactgagcccagccttcttcttatgcctttgcactttaatagcttagctccccaaagcccaactyttttaacttgtgctgctcttggtggattcaagggtggttgtggtggtggtagatgattccagagaagagactttacagtgatacaacctgggcttccttactccatttgcttcttcctaaataacattatttctctatcttcctccccccacctccaaccagagaaaatatctacacttctgtcctagatgtattttctaggaacctttcttcctcttagttttagtcacataaaccttactgtatataggaggaagagaaaacagtaaactctgtgtctggctagctcagttgcacctgtttttatgcttctcacttcttttatgctt

SEQ ID NO: 340274 - DNA, 568 bp, Homo sapiens
ccattttcacaatattgatttttttctatccatgagcatggaatgtttgtccattttttatttcctgtctgatttccttgagcagtggtttctgctaggaatccaggctagaaccactgagcccagccttcttcttatgcctttgcactttaatagcttagctccccaaagcccaacttttttaacttgtgctgctcttggtggattcaagggtggttgtggtggtggtagatgattccagagaagagactttacagtgatacarcctgggcttccttactccatttgcttcttcctaaataacattatttctctatcttcctccccccacctccaaccagagaaaatatctacacttctgtcctagatgtattttctaggaacctttcttcctcttagttttagtcacataaaccttactgtatataggaggaagagaaaacagtaaactctgtgtctggctagctcagttgcacctgtttttatgcttctcacttcttttatgcttttatacttctctagctggactctggaacgaccactatgttatctggtattttgtggctgt

SEQ ID NO: 340275 - DNA, 478 bp, Homo sapiens
tattattttctctctgggcatttgatttcctaactgcaaaatgagcaaatgatcctgacagcccacccaaatgtgttttttttttttttttttttagatggagttttgctcttattgcccaggctggagtgcaatggatggcgcgatctcggctcgccgcaacctctgaaccctctgaacttcttgaaccctcccgggttcaagtgattctcctgcctcagcctcccgagtagctgrgattacaggcatgcgacactatgcctggctaattttgtatttttagtaaagatggggtttctccatgttggtcaggctggtcttgaactcctgacctcaggtgatacacccacctcagcctcccaaagtgctggggttacaggcatgagccactgcgcccggccaacccaactgttaaaacttcttatttgagcaatcctccctcttcccactccaagcaaggttagcccctgatcaattt

SEQ ID NO: 340276 - DNA, 578 bp, Homo sapiens
tattttctctctgggcatttgatttcctaactgcaaaatgagcaaatgatcctgacagcccacccaaatgtgttttttttttttttttttttagatggagttttgctcttattgcccaggctggagtgcaatggatggcgcgatctcggctcgccgcaacctctgaaccctctgaacttcttgaaccctcccgggttcaagtgattctcctgcctcagcctcccgagtagctgggattacaggcatgcgacactatgcctggctaattttgtatttttagtaaagatggggtttctccatgttggtcaggctggtcttgaactcctgacctcaggtgatacacccacctcagcctcccaaagtgctggggttacaggcatgagccactgcgcccggccaacccaactgttaaaacttcttatttgagcaatcctccctcttcccactccaagcaaggttagcccctgatcaattttctctatcttaggatgtcaaaacctcttyttttactacccccaaggaccaaggacaggattagattccttacggtggtttgtattttgcaacacaggctactt

SEQ ID NO: 340277 - DNA, 557 bp, Homo sapiens
gaagatgaagaatcttagaagaaatcccagcttggcagacttcatggtgcagcaagcagcaggcaggatagttgtggtatcacctgatgttatattttgggcttgatacttgagacggttcagctcacctaccccaagggccaggactggacattactaggtgttgagttgaacagtgagtgcttgggtacccagccatgaagctgaaggccccaaactgattagacccttgatagtgagtcccatgttcatctagaagcaatagaaacttaaggatcagagcttctgcatatatttaatcatgaagggtagaatcatcagagcgaggaattaaaaagggatttcttcctttctctttttgaccttttatgcacagaaraaactaatcatggcacaagagaaagagtgcaatagcactataataatagtaacagggttagttataacctagagtactacttaattccaggtgctatttttaagtaatttgtatatactttatcatcatatacaccctatgaagtaagtacagttattaccatcatttaaggatgaaa

SEQ ID NO: 340278 - DNA, 586 bp, Homo sapiens
gcaagctgaaatactagttgaccaaactgcagaaatggcagycacccctccccccaggtcctggaaactcccccagtctcaggcagactccgcctactgccactgtggctggaactccaagccagcaggtcccaacttgtgaggtgctgtggaagtggggcctgcagaatgatgctgcttggctccctggattcagccaccttcctaggggaatatacagatggatctgcccccttgttggggatcccgaggacagagtatgtaaaactcctgggtctctgtgtgtgctggattgctgctctgctgagactccacacagctctgtgcattgaatccaaggcgctgctcatgtaggctcatgaggggatctcgtcatctgcaggttgcaaagatctgtgcgagaagtgtggtttcccaggcagggtcgcacaatcactcactgcctcccttgtttggggatgggggttccttcggctccatgttgctccaggtgggccctcaccccaccctgcttttcttcgctctccatgggttgagctgattgcttagtcagtcccaatgtgagaacctggatatttcagttgaa

SEQ ID NO: 340279 - DNA, 586 bp, Homo sapiens
gcaagctgaaatactagttgaccaaactgcagaaatggcagccacccctccccccaggtcctggaaactcccccagtctcaggcagactccgcctactgccactgtggctggaactccaagccagcaggtcccaacttgtgaggtgctgtggaagtggggcctgcagaatgatgctgcttggctccctggattcagccaccttcctaggggaatatacagatggatctgcccccttgttggggatcccgaggmcagagtatgtaaaactcctgggtctctgtgtgtgctggattgctgctctgctgagactccacacagctctgtgcattgaatccaaggcgctgctcatgtaggctcatgaggggatctcgtcatctgcaggttgcaaagatctgtgcgagaagtgtggtttcccaggcagggtcgcacaatcactcactgcctcccttgtttggggatgggggttccttcggctccatgttgctccaggtgggccctcaccccaccctgcttttcttcgctctccatgggttgagctgattgcttagtcagtcccaatgtgagaacctggatatttcagttgaa

SEQ ID NO: 340280 - DNA, 620 bp, Homo sapiens
ttctgaaaatcatgtggacttggtgttttctgttttaggagattgtttctacttagtaaacttgtttaatgacttcctattccttcttcttcttcttttkttgaaatggagtctcactctgtcatccaggctggagtgcagtggcgtgatcttggctgactgcaacctctgcccactgggttcaagcaattctcccatctcgacctcctgagtagctgggattacaggcgtgcaccactacgtctggctaatttttgtatttttagtagagatggggtttcaccatgttggccaggctggtctcaaactcctgacctcatgatctgcctgccttggcctcccaaagtgctgggattacaggcatgagccactgtgcccagcccctattctttcttttttcaaattttattttattgtggtaaaagcacttaacatgaagtctactgttttaacatatttttaagtgtatgatacgtttttgttgactataggtacagtgttgtatactagatccctagagcttatttcttttgcttgactgaaactttatgcctgttaattactaattatccatttcacctccacccaggccctggcaaccactgttccactattgattc

SEQ ID NO: 340281 - DNA, 620 bp, Homo sapiens
ttctgaaaatcatgtggacttggtgttttctgttttaggagattgtttctacttagtaaacttgtttaatgacttcctattccttcttcttcttcttttgttgaaatggagtctcactctgtcatccaggctggagtgcagtggcgtgatcttggctgactgcaacctctgcccactgggttcaagcaattctcccatctcgrcctcctgagtagctgggattacaggcgtgcaccactacgtctggctaatttttgtatttttagtagagatggggtttcaccatgttggccaggctggtctcaaactcctgacctcatgatctgcctgccttggcctcccaaagtgctgggattacaggcatgagccactgtgcccagcccctattctttcttttttcaaattttattttattgtggtaaaagcacttaacatgaagtctactgttttaacatatttttaagtgtatgatacgtttttgttgactataggtacagtgttgtatactagatccctagagcttatttcttttgcttgactgaaactttatgcctgttaattactaattatccatttcacctccacccaggccctggcaaccactgttccactattgattc

SEQ ID NO: 340282 - DNA, 567 bp, Homo sapiens
ggaatgatggaggaggaggcaatcaggtaatgagaggccattctgagcttgtgggaatgtagtgcccctggtgaggctacaggaagaaagtgagcatccctgggaatctcacatgaggaaggcsagaccaaatccctgtacttacaaaatgatctaggaaatatgcctcagttggcaggcatgatgacttctgagcccttgtgtttgattctgtagaagaaaaatattttcaaatattaactagtgaagttttacttttagagatatatatttttctttcaattacttccaccattaatattagaccatgaagctcagttctcttgccatagggaaggcagaacctcaaaaaactcaatgacaccaaagagttatatttatgcttctgcattccaatgtagagcattgaaagatgtggaatttaattgcaagggctagtctcttcaaagagaagtggttgcctaatccccaaaattcacagcaattatgttggcaagtaatgttttaaagcttacatggattgtctattttaacctcactattattgttccagtcttaaggatgagg

SEQ ID NO: 340283 - DNA, 567 bp, Homo sapiens
ggaatgatggaggaggaggcaatcaggtaatgagaggccattctgagcttgtgggaatgtagtgcccctggtgaggctacaggaagaaagtgagcatccctgggaatctcacatgaggaaggccagaccaaatccctgtacttacaaaatgatctaggaaatatgcctcagttggcaggcatgatgacttctgagcccttgtgtttgattctgtagaagaaaaatattttcaaatattaactagtgaagttttacttttagagatatatatttttctttcaattacttccaccattaatattagaccatgaagctcakttctcttgccatagggaaggcagaacctcaaaaaactcaatgacaccaaagagttatatttatgcttctgcattccaatgtagagcattgaaagatgtggaatttaattgcaagggctagtctcttcaaagagaagtggttgcctaatccccaaaattcacagcaattatgttggcaagtaatgttttaaagcttacatggattgtctattttaacctcactattattgttccagtcttaaggatgagg

SEQ ID NO: 340284 - DNA, 563 bp, Homo sapiens
atagcatgtagatgatgctgtgtccttctcaggatatcatatatggaggcacacaatgtctatccatgttatctttctctgtctcagtttctccatttgaataacataaacaataatttattccatagagggatagtgttggcatgatgcaggggcatgatttgggcagggaacccatccaagcaagacaaaggtgaaagcttttacaggctcacacttccagccccaggaccctgacccccacctacctttgaagatgttggagttggaggtgctgaaacctatttgactggtggctcttcttccttgcctctaggaaccatggagcccctrcacagtgagtaggtggtgagcaaaaccagtcaattatgcagatcttagtcatgcttctggttgtggcagatctgtaagttctgtcccaaaccataagttgggtacatatagaacattgtccctgaattcctattcaaggagtactttcttctttttgctgcaggcaatatagatagagacagaacactgtggacctgcagaatcctctgctcccctaacacacacacaag

SEQ ID NO: 340285 - DNA, 466 bp, Homo sapiens
gagttggaggtgctgaaacctatttgactggtggctcttcttccttgcctctaggaaccatggagcccctgcacagtgagtaggtggtgagcaaaaccagtcaattatgcagatcttagtcatgcttctggttgtggcagatctgtaagttctgtcccaaaccataagttgggtacatatagaacattgtccctgaattcctrttcaaggagtactttcttctttttgctgcaggcaatatagatagagacagaacactgtggacctgcagaatcctctgctcccctaacacacacacaagtctggctgattgtggacactcagacacaagtctgggtgattgtggagtggaaggaggatctacatatctattttttttctaacattgtgtgaggaccttcataaagtctcatccatctttatattaatttctccattgctagcatcagcctaacaccaccttatc

SEQ ID NO: 340286 - DNA, 581 bp, Homo sapiens
attgttaagcttagaaaaggtttcttgtctgagttgtgaatagacggaccctgctaacttcttccatctcagttctagatatgataagagaaactgagcagtgctgggtacagcctccatataagtactgtgagaaaaggtgtactaaaataatgacttgtgtacgtccaaatcatacatgctgctggacctactgtggaaacatctgcttagacaacgagtgagttggttggggtgggaaggctagggcctgggcatgcttcatcactggtccttaccgactattcaaaagaccgcagccacccaaatcctggttaaagaaataggcagcaaaagacaatgtcctcctatctccaaacctaggctgctcctcactgcaaaataaaccaagacaccaacatgaggtcctctacttttttcttcactcttattcagttccctttgcttccctcaacatatcacccaacagttcatacatccctcctttatccaaagttccaattactaaccccttagttgggcgtctccatgggcsctctactctcagccaggcccaaggagacctggtatctatctgtctg

SEQ ID NO: 340287 - DNA, 621 bp, Homo sapiens
aaatgtaatctagctgttttctcaagaagaacagaaaatgggatttggcaagtacttggcaatctgtgacctgtctactcatgcaaagccagactcctcaacacagacccaagaccctggcctccatatcaccctgtccaatgaaatacatttaatcaaattgttaaaagcctaggttaaggaaggaattctgaaagcagcaagagmaaagcaactcatcacatataagggaacccccatacaattatcagtggatttctcagcagataacttgcaggccaggagggagtaagacaacataatcaaagtagtgtgagaaaaaacttgccaactaagattactatacctagcaaaattatcctttaaaaataaagtactgataaaacatttcctagacaaaaactgggggagtttgtcaccactagcctgccttataagaaatctttagagggttcttgaaattgaaatgaaaggttgggcacagtggctcacacctacagtcccagcactttgggaggctgaggtgggaggattacttgaggttaggagtttgagaccagcctggccaacatggtgaaacctcatctctactaaaaaaaacacaaaagttagctgggtatg

SEQ ID NO: 340288 - DNA, 577 bp, Homo sapiens
catcagcttaaatataaatatataaatatataaagcagatattgacagatttcaaaggagaaattgatagcaatcctgtaataggcmacttcaatgctcactttcaatgatgaataggatttccagacaggtaatcaataaagaaagagctaactggagcaacactgtttaccagatggacctaacagacatatacagaacattctacccaacaacagcagaatacatattcttctcaagagcaaacagatctttctccaagattgattacgtgttagattagaaaacaaattttgacaaatttaagaagatttaaattatgtcaagtgtcttttcagaccacagtagaatgaaactagaaaccaacagcagaaacaaaactagaaaacttttaaagatgtgaaaattaaataacattctcttgaacaaccattgcttcaaggaggaataataaatacaattagaatataccttaagacaaatgaaaaggaaaacacagcataccaaaacttatggaatacagcaaaagcagtaccaagagggaaattcatagtaataaacatctacatttaaaaaa

SEQ ID NO: 340289 - DNA, 585 bp, Homo sapiens
tcaataacctaactttatacctcaaagaactagaaaaagaagaaaaactaagcccacagttagcaaaaatgataaaatcagaacagacataaacaaaatagagaatagaaaaatagtaaacatgargtcaataaaactaagaattggatttttgaaaagataaacaaaatggacaaatccttggccagcctaaaaaagaaaaaagtagagaacattcaaataagtgagaaatgaaagaggagacattacaactggtgccacagaaatttttatttaaattggctaacctagaagaaatgaataaattcttagaaacatacaatctcccaacaaagaaaaaaattctcaacaaagaaaaacccagaaccagatggttttactgaataatcctaccaaacatttaaagaatagggaatatgaatccttctcaacttcttccaaaaaaacagaatcagagaaaacttccaaattcattatatgaggccagcattaccctgataccaatgccagacaaagatactacaagaaaagaagactacaacccatatccctggtgagtattgatgcaaaagtccttaccaaaat

SEQ ID NO: 340290 - DNA, 585 bp, Homo sapiens
tcaataacctaactttatacctcaaagaactagaaaaagaagaaaaactaagcccacagttagcaaaaatgataaaatcagaacagacataaacaaaatagagaatagaaaaatagtaaacatgaagtcaataaaactaagaattggatttttgaaaagataaacaaaatggacaaatccttggccagmctaaaaaagaaaaaagtagagaacattcaaataagtgagaaatgaaagaggagacattacaactggtgccacagaaatttttatttaaattggctaacctagaagaaatgaataaattcttagaaacatacaatctcccaacaaagaaaaaaattctcaacaaagaaaaacccagaaccagatggttttactgaataatcctaccaaacatttaaagaatagggaatatgaatccttctcaacttcttccaaaaaaacagaatcagagaaaacttccaaattcattatatgaggccagcattaccctgataccaatgccagacaaagatactacaagaaaagaagactacaacccatatccctggtgagtattgatgcaaaagtccttaccaaaat

SEQ ID NO: 340291 - DNA, 610 bp, Homo sapiens
acaaaataaacactcaaaagtcagttgcatttatatagtaacaatggacaatccaaatagattttttttaaaatcgcatttacaatagttaggaataaacttaaccaatgacttgtacactgaaaactacaaaacattgctgaacaaaattaagagagaaaaacaattggaaagatatcttrtgttcaaggattggtagacttaatattgttaaaaatatttacactacccgaaataatgtacgaacttaatgcaaaccctatcaaaatccaaatggcatttattgtagaaataggaaaaaaattctaaagttcatgtgaaatcttaaaagactccaaatagccaaaacaatcttgagaaagaagaataaagctagaggcatcacacttcttgatttcaaaacatatttccaaagtcacagtaatcaaaacagtataacactgacataaaaacagatacgtagactgatagaacagaatatagagtccagaaataagccctcatatacaaggtctaatgatctttaataagagtttcaaaactgtacattggggaaagggtagtttcttcaataaatgttgttagtatggacccttataccatacacaaa

SEQ ID NO: 340292 - DNA, 521 bp, Homo sapiens
tggggcatctgtaggggccacagtgagctctcaatgatcatctgtagtggcagcaaaagaggtaggatccctgggcatttgttctggtttatttgacagggacaaggggttcagacagtagagagggcggcattcctgttgatgttcttatgctggtgacttgaggtccttgtgcttcggatgtgggcacagtcttggatagaggagttgggaagcaggatgcacatccmagcccactctcccactcacaggatgctcatgcaaacattcccacagtaggtagaacagcatatgttatttgcttgacaatctcggtgagattcacataagtgtttgcatagatatagtttaggctgctgctggcagactttgatttctggggatagctgtgtttctgacaaggagaatagaacggtaaataaacgcagtttcctagagaacatttttctcaagctgaagcctcctccaagacccttgaacccaggtctcagtcatgatactcctggattccttcttcatag

SEQ ID NO: 340293 - DNA, 521 bp, Homo sapiens
tggggcatctgtaggggccacagtgagctctcaatgatcatctgtagtggcagcaaaagaggtaggatccctgggcatttgttctggtttatttgacagggacaaggggttcagacagtagagagggcggcattcctgttgatgttcttatgctggtgacttgaggtccttgtgcttcggatgtgggcacagtcttggatagaggagttgggaagcaggatgcacatcccagcccactctcccactcacaggatgctcatgcaaacattcccacagtaggtagaacagcatatgttatttgcttgacaatctcggtgagattcacataagtgtttgcatagatatagtttaggctgctgctggcagactttgatttctggggatagctgtgtttctgacaaggagaatagaayggtaaataaacgcagtttcctagagaacatttttctcaagctgaagcctcctccaagacccttgaacccaggtctcagtcatgatactcctggattccttcttcatag

SEQ ID NO: 340294 - DNA, 537 bp, Homo sapiens
acccaggtctcagtcatgatactcctggattccttcttcatagaactaccttcctgcccatcaccaaatcctagtgattggtcatattttaaatcctgtctctccactgtacaccttaccccattagaccacaatgcctgggcttcctggaccttctccacacaccagcaatcagaactccatctcccttactagtcatggccttggtgaagtcaccaccaaagaatctacagtctgatcctgagagctcaaagaagcatgagacatctttcaaactctctcctagtctctgaatagtagaattcagagatgaggatcaacwtgcctcttgtctctccctctcttctgctcactgtcactgtctctagtcttcctgccccttctttagttccctttccaccaccactctccttgcccctttgatgataaccttaacttggctctgtgtaccccaacttttgcttgtcttatgtcctatttccctacacttatacccattctacacctacacctaccgtcataaccacttctgaatct

SEQ ID NO: 340295 - DNA, 537 bp, Homo sapiens
acccaggtctcagtcatgatactcctggattccttcttcatagaactaccttcctgcccatcaccaaatcctagtgattggtcatattttaaatcctgtctctccactgtacaccttaccccattagaccacaatgcctgggcttcctggaccttctccacacaccagcaatcagaactccatctcccttactagtcatggccttggtgaagtcaccaccaaagaatctacagtctgatcctgagagctcaaagaagcatgagacatctttcaaactctctcctagtctctgaatagtagaattcagagatgaggatcaacatgcctcttgtctctccctctcttctgctcactgtcactgtctctagtcttcctgccccttctttagttccctttccaccaccactctccttgcccctttgatgataaccttaayttggctctgtgtaccccaacttttgcttgtcttatgtcctatttccctacacttatacccattctacacctacacctaccgtcataaccacttctgaatct

SEQ ID NO: 340296 - DNA, 480 bp, Homo sapiens
gatcaatcatgaaagagaaaacaataaaggacatcaaaattggaaaagaggaagtcacatttaccctgtttgcagacaagctcttatgtagagaaaaacttagactctaccaagaaacctgtagaactcataaagaaattcagtaaagttacaggatacaaaataaacatacaagtcagtggtgtttctatgcacaatgaactagttaaaaaaagagaccaagagggcaatcccatttataacagctacaaataaatacctaggaataaatttaaccaaggagataaaagacttctacattgaaaactacaaaacactgataaaagaaattgaagaggatacaaacaaatggaaaaacttcccatgctcatggatggaargagttaatattgttaaaattaccatactaccctaaaccatctacagagtcaatgcaatccctattaaaataccagtgacattcttcacagtaatataaaa

SEQ ID NO: 340297 - DNA, 693 bp, Homo sapiens
tacatctttatgttttaagcctatcaatacaattgaatgattataatcattgttttatacagttgtcattccaatctgttaaaaattattaatatcagattttatatttacctacataattacttttatctgttctctttgtttcttaatgtagatctcattactacctgatgtcttttctttttagctttaaagcttttctctagtatttcttgaaaggcagacctggtagcaacaaattctctcagtctttgtttttctgggaatgtctttattttaccttcatcaggaaaggatagctttgctrgatatagaattattggatacagtatttcagatactgcactgggaaattcttaactaaaatagaagagtatacagattgtcctaaattctgcatagcttgatccagaatcatgagtggcaggagtccttggcactcctgggctactcattagtgactgtgctcctcagctctccagcagctgggccacacagagcaaaagactatgatcgtcatgcatggaacatcattttgctgccatataaataaatatcttagaaatccataattcaatcactctaggtttggcaccattttcagtccctgtcaaaatttccttcagtttgttcccacacctttttaccttggttccaaagctctttgtatctgtactggtccaccttcctcag

SEQ ID NO: 340298 - DNA, 693 bp, Homo sapiens
tacatctttatgttttaagcctatcaatacaattgaatgattataatcattgttttatacagttgtcattccaatctgttaaaaattattaatatcagattttatatttacctacataattacttttatctgttctctttgtttcttaatgtagatctcattactacctgatgtcttttctttttagctttaaagcttttctctagtatttcttgaaaggcagacctggtagcaacaaattctctcagtctttgtttttctgggaatgtctttattttaccttcatcaggaaaggatagctttgctagatatagaattattggatacagtatttcagatactgcactgggaaattcttaactaaaatagaagagtrtacagattgtcctaaattctgcatagcttgatccagaatcatgagtggcaggagtccttggcactcctgggctactcattagtgactgtgctcctcagctctccagcagctgggccacacagagcaaaagactatgatcgtcatgcatggaacatcattttgctgccatataaataaatatcttagaaatccataattcaatcactctaggtttggcaccattttcagtccctgtcaaaatttccttcagtttgttcccacacctttttaccttggttccaaagctctttgtatctgtactggtccaccttcctcag

SEQ ID NO: 340299 - DNA, 693 bp, Homo sapiens
tacatctttatgttttaagcctatcaatacaattgaatgattataatcattgttttatacagttgtcattccaatctgttaaaaattattaatatcagattttatatttacctacataattacttttatctgttctctttgtttcttaatgtagatctcattactacctgatgtcttttctttttagctttaaagcttttctctagtatttcttgaaaggcagacctggtagcaacaaattctctcagtctttgtttttctgggaatgtctttattttaccttcatcaggaaaggatagctttgctagatatagaattattggatacagtatttcagatactgcactgggaaattcttaactaaaatagaagagtatacagattgtcctaaattctgcatagcttgatccagaatcatgagtggcaggagtccttggcactcctgggctactcattagtgactgtgctcctcagctctccagcagctgggccacacagagcaaaagactatgatcgtcatgcatggaacatcattttgctgccatataaataaatatcttagaaatccataattcaatcactctaggtttggcaccattttcagtccctgtcaaaatttccttcagtttgttcccacacctttttaccttggttccaaagctctttgtmtctgtactggtccaccttcctcag

SEQ ID NO: 340300 - DNA, 594 bp, Homo sapiens
gcagtggggcgatctcagctcattgcaagctctgcctcccaggttcacaccattctcctgcctcagcctcctgagtagctgggactacaggcgcccgccacaatgcccacctaattttttgtatttttagtagagatggggtttcaccgtgttagccaggatggtcttgaagatcttatttcttcttcatttttttttttgacaggctctcattctgttacctagtctggagtgcactggcacaatcatggctcactatagcctcracctcccagactcaaccaaatctctcaccttcttttggctagctgggactacaggcacacaccatcatgcccagataattttttatattttggtagagacagggtctcactatgttgcctaggctggtcttgaactcctgggctcaagtgatcctcccacctcagcctcccaaattactgggattacaggcatgaaccacgacattcagcctctccttcatttctgaaggataacgttgctgggtatgatattcttaattggcagagttttatttttatttcagtactttaaatatgtcataccattttctcctgacctgtaaggttt

SEQ ID NO: 340301 - DNA, 594 bp, Homo sapiens
gcagtggggcgatctcagctcattgcaagctctgcctcccaggttcacaccattctcctgcctcagcctcctgagtagctgggactacaggcgcccgccacaatgcccacctaattttttgtatttttagtagagatggggtttcaccgtgttagccaggatggtcttgaagatcttatttcttcttcatttttttttttgacaggctctcattctgttacctagtctggagtgcactggcacaatcatggctcactatagcctcgacctcccagactcaaccaaatctctcaccttcttttggctagctgggactacaggcacacaccatcatgcccagataattttttatattttggtagagacagggtctcactatgttgcctaggctggtcttgaactcctgggctcaagtgatcctcccacctcagcctcccaaattactgggattacaggcatgaaccacgacattcagcctctccttcatttctgaaggataaygttgctgggtatgatattcttaattggcagagttttatttttatttcagtactttaaatatgtcataccattttctcctgacctgtaaggttt

SEQ ID NO: 340302 - DNA, 416 bp, Homo sapiens
tctttttattattgacatatttytttcacatttaaattgtgttcttaccattttcaagaaacgtttcattaatttcagtgacattaaggcaggtatttcaagagactgttttataatccttgacatcttttcagcaactttcgctctcagcttttactttcatcgcctggagtcttaagtaaattcaataaaactatgtaaaagtttatgtttttcacaaaacttatgtcttcccttagttgtatttgcttgtttattttatagcagctggaatgaaagaaatgtctttataggcctaaggtctcaagtttatggagaaataatgattatcatttttgaaaatgttgactgaaattttgatagaaacatttgttttccttgacaagggccaatttttaaaatgcttaaattcattt

SEQ ID NO: 340303 - DNA, 624 bp, Homo sapiens
ttactactgttatctaatgataaggtgaacaaatgaatcatgatagatattgagcaagtagtttaatatcaaataaatttaaaatatgaagatttaagggaggtaaatgtgagatggcaagagatggaattactgagacagaaaacacattgtgggagtggggaggcttgtgtaacaaccttagagagtcaagcttttctgttttagaagatgtggagatayggtatatttttaaagtagggaaattagctgtttctattacattctagtgactgtggaaagataagaacactttagagaacattgtagcaattcaaataaggcgagacataaacctgattccattgaattagcaaaggtggaaagaattacatttacatgaaaaggaatattgactttttcatagatgagatatgggtacaacaagaggggaaaacagaatttatggaatagatcatggatgatggtacactagtatataagaataagagcatgctttagagagaaggtaaaattactgtggtcttggagacattgtgtttacaatatccatgagacatggaaggtgaaatacatacaagtggtcattaggagaccaagagtatgtaaaattagactgtggaa

SEQ ID NO: 340304 - DNA, 599 bp, Homo sapiens
atatatttccaatcccccttgccattctttgtgatgttattttcatactttttactattacattgttgttgtttyctttatacagtaataaacattttaaagcaattaaaataaaaaaatactatttttttctatttttcaatactcattggtttgttctgatccacctttctgactggtacaatgtctcttctgtctggagaaatttcttataaagtctgtattttaggaacggaatctctcctttttgtgtttgtctgaaaaagacactatttctccttcaatgtaaatggtaattatactgcataaataattctacattagcaaatttgtttttgtttttttaatccccattcttatggttttctgccagtgtcgttacatgagagtttttgttggtctttcccctgtagattaaatattttgttctacaggggcatggagtagctgggctaaatgaggtgttagcagtgcctgctattttcctctccctgtacagcaccatgagagagaaaaaaaaaaatcaggattcttccccatctttcctgtgagctcctggcttgatttgtgtgaaagaaaactccccaaaatacacggat

SEQ ID NO: 340305 - DNA, 599 bp, Homo sapiens
atatatttccaatcccccttgccattctttgtgatgttattttcatactttttactattacattgttgttgtttcctttatacagtaakaaacattttaaagcaattaaaataaaaaaatactatttttttctatttttcaatactcattggtttgttctgatccacctttctgactggtacaatgtctcttctgtctggagaaatttcttataaagtctgtattttaggaacggaatctctcctttttgtgtttgtctgaaaaagacactatttctccttcaatgtaaatggtaattatactgcataaataattctacattagcaaatttgtttttgtttttttaatccccattcttatggttttctgccagtgtcgttacatgagagtttttgttggtctttcccctgtagattaaatattttgttctacaggggcatggagtagctgggctaaatgaggtgttagcagtgcctgctattttcctctccctgtacagcaccatgagagagaaaaaaaaaaatcaggattcttccccatctttcctgtgagctcctggcttgatttgtgtgaaagaaaactccccaaaatacacggat

SEQ ID NO: 340306 - DNA, 556 bp, Homo sapiens
ttgcacaatttaattagctcaatctgtctggcatcaaatagttgggattttgtgggggatccacataagtgcctgtatctccccagatttcagcttacttggttggcatgcattctcarttttctaatggcttaagaaaatcactaatatgcatattgcccaacttctttttatgtaatttttgtatgagtgggagcagcactctttctagctttctacatttctgagctgaaactgaaagtccaaacatttttaatccccaagatactttgaatattactttgactgaagtagttttgattccttttattcctcagatatctgttaaaaacacacttgacacaattattttcataaaataagatatattttattataggacctaaacactaactcatagaatgaagtcgctttcagtggaaataaaataatcttcatcagtccttttgttttgacattcaaaaacatgtcttgttgctcaaggcactctttgttggcttctaaaaggtagattctgccttagtcagctctggctgctgtagcaaaataccataga

SEQ ID NO: 340307 - DNA, 556 bp, Homo sapiens
ttgcacaatttaattagctcaatctgtctggcatcaaatagttgggattttgtgggggatccacataagtgcctgtatctccccagatttcagcttacttggttggcatgcattctcaattttctaatggcttaagaaaatcactaatatgcatattgcccaacttctttttatgtaatttttgtatgagtgggagcagcactctttctagctttctacatttctgagctgaaactgaaagtccaaacatttttaatccccaagatactttgaatattactttgactgaagtagttttgattccttttattcctcagatatctgttaaaaacacacttgacacaattattttcrtaaaataagatatattttattataggacctaaacactaactcatagaatgaagtcgctttcagtggaaataaaataatcttcatcagtccttttgttttgacattcaaaaacatgtcttgttgctcaaggcactctttgttggcttctaaaaggtagattctgccttagtcagctctggctgctgtagcaaaataccataga

SEQ ID NO: 340308 - DNA, 634 bp, Homo sapiens
ttcagtggaaataaaataatcttcatcagtccttttgttttgacattcaaaaacatgtcttgttgctcaaggcactctttgttggcttctaaaaggtagattctgccttagtcagctctggctgctgtagcaaaataccatagatcgagtggcataaacaacagatatttattgcgcacatttctggagtctggggagtccaagatcaaggtgccagcagtttctgcactcagggaaggccctcttcctggcttgcagatggtctccttggcaccatgtgctcacgttacctcttctgtgtgttctcagaaagaaaagggtctctctttctacttctttaaggatactaattccattatgagggrtggaggaccccccatcatgacctcacgtaacctaattaccaagcgcttatctcctataccgtcacagtgactatgaaggcttcaactcacaaatttggtggggccacaaacgttcaattcataatagaagcattcttaaatacatttttacacatttaagtggaggatctagaggacccagtgcactgactaaatgagtaaatccactatagtgagaagcctcaggacacaggctgtgcaaacactaatgagcaaactgatatataatc

SEQ ID NO: 340309 - DNA, 467 bp, Homo sapiens
agttttgcttttcaatactacacatgaaagctgctgaaatgtcagatatttaaaaggggtttattttaattaatgatgcttcttaatgggacattaacaaaaattctactgtttgtcctgtaaaaacaatattaaacttcccttagcataggtagatattaagagagatggatagattgatagagtgagatgtcagaagatcccctagaattatgaaaattactacttacaattatgtaatttatttaaaatgcatttcacaatttaactatatcctctttcaaaaagtgaagaaaacaaagcatgaaaaataaatggtttttattcycattgatttgaatcgaaggcagatgtgtttgtacctttaaatgtatttatatattcagtcatataagttcaaggcttttccacaatgttgaaactaaacaatagagctgctgctaactgttaagtccatagtagtttat

SEQ ID NO: 340310 - DNA, 625 bp, Homo sapiens
tcagtctatgtttgtctttataggtgaaatgtgtttcttgtaggcaacagatcaatgagtctttttcaatccattcagccactctgtatctgttgattggagtgttcagcccatctacattaaatattagtattgataattaagtacttactcctgccattttgttatttgttttctactgattttctggtcctctcttccttccttccttcctgtttttatattagtgaagctgattttctctggtgatataatttagtttttgcttttcattttgtctgtattcattgtatgttttttgatttgaggttaccatgaggcttgcaaatactcttataaatcattattttaagcttatataataccataacactttgcataaagaaacaagcaagcaaaatgaacactaataaacaacctacaccttaacttcakcccctgctctttaacattttgttgtttctatttatatcttattgtacggtgtatatcttgaaaacttgtcaaatattgattgtttaacctttcaatctttctacttagcataagagtacacactataaagtgttataacattcttgttttcctgtatatttactattaacaatgagctttgtactcccag

SEQ ID NO: 340311 - DNA, 544 bp, Homo sapiens
tcagcttgtggtgaatgctgccaggccagggattcattcttcagggaagtgggctttcctctggcccagggcaggtccagaaatgccatccaagagccgcatcctggaatcagggaccccaagggcccattttatgttctacccacttgtggccaagctggtatgtaaagtgcaaaacaaagctccctttccttttccatctgcatttctcaagcagagggaatctcatcctgtagctaccatagatgcaactatgctgagtctcacctaaaggcagttagtctcagaatcttacccaaagccctcaacatagtacctgggtattgctgttagttattcagggcccaagggctcttcagttagcaggtgatayattctgcaaagattgggtctttctcttcaaagcagcatattcccttctggccaagggtgtgcctagtatgtgcctagtagtgtcatccaggatctagggaatatagagagggaccctcacaactctgaccagtggcccgtctgctgtggtttaactggcatcccagatgca

SEQ ID NO: 340312 - DNA, 608 bp, Homo sapiens
ttttttgacataataatgagtctacatagtactgaagtgaagaaccacacatataaaaccaaaaaatcaaagagagtcatctaggaataaactagcatttaaaattactaattaaggtcctatcttgtttcacaaaaatcagctactaaaagatacgtgctgatgcagactctaggtcagtttactaagtattaaatataaagtaaaaatacactttagaaatggacacaaatttaaagtattacatgagtagggattatatgttctgatgtgcttgagctagcacaaggcatgctgtttcctggtgtaaccattagcactaattcctttcattctcagcaatgccctgstgtgcacagaaatttgtgtagtcacctttactgatgacaggtcaaagttaaaccactttcagatatttccaaattgacttttacttctgtagggtgttaagggtgcccatgcaacgttgctctatctccaagcatttttaggaaaaaaaacaacactgtatgtgtgaacttacatgtgtgaataacattctaattttagccaaaccacctttgaactcatttttacttttctgtatggctacaactctgagttagctc

SEQ ID NO: 340313 - DNA, 608 bp, Homo sapiens
ttttttgacataataatgagtctacatagtactgaagtgaagaaccacacatataaaaccaaaaaatcaaagagagtcatctaggaataaactagcatttaaaattactaattaaggtcctatcttgtttcacaaaaatcagctactaaaagatacgtgctgatgcagactctaggtcagtttactaagtattaaatataaagtaaaaatacactttagaaatggacacaaatttaaagtattacatgagtagggattatatgttctgatgtgcttgagctagcacaaggcatgctgtttcctggtgtaaccattagcactaattcctttcattctcagcaatgccctgctgtgcacaraaatttgtgtagtcacctttactgatgacaggtcaaagttaaaccactttcagatatttccaaattgacttttacttctgtagggtgttaagggtgcccatgcaacgttgctctatctccaagcatttttaggaaaaaaaacaacactgtatgtgtgaacttacatgtgtgaataacattctaattttagccaaaccacctttgaactcatttttacttttctgtatggctacaactctgagttagctc

SEQ ID NO: 340314 - DNA, 555 bp, Homo sapiens
ttgttttctactattagtcattggccttcttgtattagagcactagcaaaatggatttttcctcacaaattgatgtggatgkcctgtggcttcaggcttcatattcaacagtatctcctctttcttaaaacgagttgtcaatgattaaactgctgatttctttggatacattgatctcataaacctctcctaagcatctattatttcaccatttttccacccaagctttactttaccataagtttgatgtctgttcttgtttcaatttcagcagaattcacattgttctgataggggctcttttcagaatgatgtcctatcctattcagtgtctaaaactggatcctatacagatatgttatgacaagtgagtaaaagtttattttgatgcaaaaacatttttaaaattcagacagatttttttttcataccaagcttttttcatggactttttgaagtcccctcgcctaatctgcttcctgtaggaggcgtaactggtatgttatgtgagatgtgagagtggagaaagtgaccaggaagaggggattccaagaa

SEQ ID NO: 340315 - DNA, 555 bp, Homo sapiens
ttgttttctactattagtcattggccttcttgtattagagcactagcaaaatggatttttcctcacaaattgatgtggatgtcctgtggcttcaggcttcatattcaacagtatctcctctttcttaaaacgagttgtcartgattaaactgctgatttctttggatacattgatctcataaacctctcctaagcatctattatttcaccatttttccacccaagctttactttaccataagtttgatgtctgttcttgtttcaatttcagcagaattcacattgttctgataggggctcttttcagaatgatgtcctatcctattcagtgtctaaaactggatcctatacagatatgttatgacaagtgagtaaaagtttattttgatgcaaaaacatttttaaaattcagacagatttttttttcataccaagcttttttcatggactttttgaagtcccctcgcctaatctgcttcctgtaggaggcgtaactggtatgttatgtgagatgtgagagtggagaaagtgaccaggaagaggggattccaagaa

SEQ ID NO: 340316 - DNA, 436 bp, Homo sapiens
gctggagttgctaccaagatgatattccagttatatactactagaaatcagggataacaattttytgatgatcctaaggtcttgaaaaaaatataatgtcttcatccctttggcttctttactggaaaagtatgagaaatttacatataagttcttcagctgagctgttccttactttggctctaaaggataatgggtaagtttgggcaatgagttggtagaatctatctaaatttttaatggatctgcttcacatatattttctgtgttgtgaaaggtttagtcatagagtgtcaagtatggtgttaagttccttatcaaggatgtgcatcacatataatggagaagccaaagtatatccagagcagaaacaatccgtgaatagcagagtcctcaagaaatcatccctctggtgtgcatttaatattgtaattct

SEQ ID NO: 340317 - DNA, 520 bp, Homo sapiens
tcagctgagctgttccttactttggctctaaaggataatgggtaagtttgggcaatgagttggtagaatctatctaaatttttaatggatctgcttcacatatattttctgtgttgtgaaaggtttagtcatagagtgtcaagtatggtgttaagttccttatcarggatgtgcatcacatataatggagaagccaaagtatatccagagcagaaacaatccgtgaatagcagagtcctcaagaaatcatccctctggtgtgcatttaatattgtaattctatttatagatgctttgacattatagtaagaaaatacattttaatggatcattatataatagatgattaaaaatgaaatacttcaaaagttctcaaatttatcaaaaattctatctgcctagaatggtcaggagtgggtcaagaactggcagattccctattttttgtccctgactccatccaactcaggaccgaccagagaagtccaaatatgttcctcaagacaattatatgagatcc

SEQ ID NO: 340318 - DNA, 520 bp, Homo sapiens
tcagctgagctgttccttactttggctctaaaggataatgggtaagtttgggcaatgagttggtagaatctatctaaatttttaatggatctgcttcacatatattttctgtgttgtgaaaggtttagtcatagagtgtcaagtatggtgttaagttccttatcaaggatgtgcatcacatataatggagaagccaaagtatatccagagcagaaacaatccrtgaatagcagagtcctcaagaaatcatccctctggtgtgcatttaatattgtaattctatttatagatgctttgacattatagtaagaaaatacattttaatggatcattatataatagatgattaaaaatgaaatacttcaaaagttctcaaatttatcaaaaattctatctgcctagaatggtcaggagtgggtcaagaactggcagattccctattttttgtccctgactccatccaactcaggaccgaccagagaagtccaaatatgttcctcaagacaattatatgagatcc

SEQ ID NO: 340319 - DNA, 561 bp, Homo sapiens
acttgagtccaggagatcgagaactacctgggctaatggcaaaactccatatctacccaaaattaataaatcagtcaggcctagtggcatgcacctgtggtcccaactatttgggaggctgagatggaagaatgcactgggcctgggaagtggaggctgcagtgagctgtgattgcaccactgcactcaagcctggacaagagagtgagaccctgtctcaaagaagaaaaagcaaaaaattaatctttcagtttattggaatgagaataacaagctccctgtttatatttacctatactgtatttactatgatgaataaaatacgtcagcttagattagctgttcagaatcatctacatttccatttaaccagtattatactatatgccttttaaagagaacaataatcactttattaagttaaakacaagatgaaataaaagattacttctggaatctcaatcacttacacataagcttctttttccatgctaacataaagttcagttagtggtggagatggtggattgagaagagattctgatctttccagttatttat

SEQ ID NO: 340320 - DNA, 561 bp, Homo sapiens
acttgagtccaggagatcgagaactacctgggctaatggcaaaactccatatctacccaaaattaataaatcagtcaggcctagtggcatgcacctgtggtcccaactatttgggaggctgagatggaagaatgcactgggcctgggaagtggaggctgcagtgagctgtgattgcaccactgcactcaagcctggacaagagagtgagaccctgtctcaaagaagaaaaagcaaaaaattaatctttcagtttattggaatgagaataacaagctccctgtttatatttacctatactgtatttactatgatgaataaaatacgtcagcttagattagctgttcagaatcatctacatttccatttaaccagtattatactatatgccttttaaagagaacaataatcactttattaagttaaatacaagatgaaataaaagattacttctggaatctcaatcacttacacataagcttctttttccatgcwaacataaagttcagttagtggtggagatggtggattgagaagagattctgatctttccagttatttat

SEQ ID NO: 340321 - DNA, 482 bp, Homo sapiens
taatttactgtgttagtccattttcacacgattgataaagacatacctgagaatgggaagaaaaaaagattttaacggactcacagttccatgtggttgaggaggccacacaatcatggcggagggcagggagaagcaagttgtgttttacacggatggcagcaggcaaagagagcttgtgcagggaaattcctctttatagaaaccatcagatwttgtgagacttatttactatcactagaacagcatgggaaagacccagccccatgattcaattatctcccactggggccctcccacaacacgtgggaattatgggagctacaagatgagatttggatggggacacagagacaaaccctatcactgtccttcccccaacacacataaacattatctgcaccatgccgctgctgttgggggcgggggcggtggtgtcagcaattcaaggctgttttctctatctcttccatgtctctttc

SEQ ID NO: 340322 - DNA, 482 bp, Homo sapiens
taatttactgtgttagtccattttcacacgattgataaagacatacctgagaatgggaagaaaaaaagattttaacggactcacagttccatgtggttgaggaggccacacaatcatggcggagggcagggagaagcaagttgtgttttacacggatggcagcaggcaaagagagcttgtgcagggaaattcctctttatagaaaccatcagattttgtgagacttatttactatcactagaacagcatgggaaagacccagccccatgattcaattatctcccactggggccctcccacaacacgtgggaattatgggagctacaagatgagatttggatggggacacagagacaaaccctatcactgtccttcccccaacacacataaacattatctgcaccatgccgctgctgttgggggcgggggcggtggtgtcagcaattcaaggctgtttyctctatctcttccatgtctctttc

SEQ ID NO: 340323 - DNA, 550 bp, Homo sapiens
ctcacaggcctgctgtggggtcgggggagggggtagggatagcattaggagatacacctaatgtaaataaggagttaatgggtgcagcacaccaacatggcacatgtagacatatgtaacaaaccttcatcttgtgcacatgtaccctagaatttaaagtataataataaaaaaaagaaatatttgagaaaaagtttcagctrgctcagaaatacatttaaacctctcatttaaaatgagagattatgagaacccagagtatgaggtattttatcagatagtaggatggaacatacttaacacaccaacagactcaaaagacacatggtacagaacagagtccaaaaatagaaacaaaccttctcttcagtaggtgattaagatgccatgccaaatcattgtgacaaagatgtgctcttctattgccagtgatggtacaactgggtaaacaccttggtaaaaataaacatggatccacacctacactcgacagcaggacatatacaaaagattcaaacattttggtgaaaaattgaaacaagagagaact

SEQ ID NO: 340324 - DNA, 550 bp, Homo sapiens
ctcacaggcctgctgtggggtcgggggagggggtagggatagcattaggagatacacctaatgtaaataaggagttaatgggtgcagcacaccaacatggcacatgtagacatatgtaacaaaccttcatcttgtgcacatgtaccctagaatttaaagtataataataaaaaaaagaaatatttgagaaaaagtttcagctggctcagaaatacatttaaacctctcatttaaaatgagagattatgagaacccagagtatgaggtattttatcagatagtaggatggaayatacttaacacaccaacagactcaaaagacacatggtacagaacagagtccaaaaatagaaacaaaccttctcttcagtaggtgattaagatgccatgccaaatcattgtgacaaagatgtgctcttctattgccagtgatggtacaactgggtaaacaccttggtaaaaataaacatggatccacacctacactcgacagcaggacatatacaaaagattcaaacattttggtgaaaaattgaaacaagagagaact

SEQ ID NO: 340325 - DNA, 559 bp, Homo sapiens
ttttggtgaaaaattgaaacaagagagaactgtataaaaatgtagcagagttttgttagaggtttttttttcaatgtttgtaggctttttgtcacaaaatgctgaagtgttgttgttctatctaccagaaayttgaaaaaatatttcttgcccatgaaaaaccacaaacaaaagtaaaataataattaaaaactggaaaatatttacaactaatatcgaattatatttcttctttttaagaagctccttgaaatgaataccgagaatacccaaaccaaaatagattgataaatctttagagcccaaagcaactccacaaattttaataaaacacatttatcaaagcacaaacttatttataataagaatattataatataaatgccatgtaaatactctccaaaagcttgaatgcacttcatgttggtcaagccttgcatgggcaggatcttactagcattactgctacagtatgatatcatctcataggataatagtttgggatatttacataaattatgaatgaagattttcacttctttttaagatgtagagagtt

SEQ ID NO: 340326 - DNA, 559 bp, Homo sapiens
ttttggtgaaaaattgaaacaagagagaactgtataaaaatgtagcagagttttgttagaggtttttttttcaatgtttgtaggctttttgtcacaaaatgctgaagtgttgttgttctatctaccagaaatttgaaaaaatatttcttgcccatgaaaaaccacaaacaaaagtaaaataataattaaaaactggaaaatatttacaactaatatcraattatatttcttctttttaagaagctccttgaaatgaataccgagaatacccaaaccaaaatagattgataaatctttagagcccaaagcaactccacaaattttaataaaacacatttatcaaagcacaaacttatttataataagaatattataatataaatgccatgtaaatactctccaaaagcttgaatgcacttcatgttggtcaagccttgcatgggcaggatcttactagcattactgctacagtatgatatcatctcataggataatagtttgggatatttacataaattatgaatgaagattttcacttctttttaagatgtagagagtt

SEQ ID NO: 340327 - DNA, 620 bp, Homo sapiens
gactaatttgccaccaggtgagatcaacagtgtgctctcaacaaaacatcatatggcggggtaggggatcaggggtgagccagcaaacacaggtagctaatgwtcacactaggccacattcaccatgggggaggcagagatttgtcttcactgaaatagacagatgttacggatatggggttgcttccccttcccataacactttctgccagcacctgtcatccacttttgtatggaatgtcttatttacagtcatggtattacttagaacatttcttctgatgaaaaaccttattttgcacgaaacaaaatatgccttatcctcagaggtgttaagaagtctcagccctttgtgagccccttttttgagatttctaaattttaataattctaatttcttcccattgttttgcagccatttttgaaatgataaatatcttcaataataatttaaagttatatttgtatatttgtgtaataactttatgatatagattatcaaataatttgaataaattattttataattagttgttcaaataattgctgttgtttttgtctcttcagaggactctgactaatacatcatgttttaattggtggcattattttgctcttgc

SEQ ID NO: 340328 - DNA, 569 bp, Homo sapiens
tgcttccccttcccataacactttctgccagcacctgtcatccacttttgtatggaatgtcttatttacagtcatggtattacttagaacatttcttctgatgaaaaaccttattttgcacgaaacaaaatatgccttatcctcagaggtgttaagaagtctcagccctttgtgagccccttttttgagatttctaaattttaataattctaatttcttcccattgttttgcagccatttttgaaatgataaatatcttcaataataatttaaagttatatttgtatatttgtgtaataactttatgatatagattatcaaataatttgaataaattattttataattakttgttcaaataattgctgttgtttttgtctcttcagaggactctgactaatacatcatgttttaattggtggcattattttgctcttgctttgcacacaaaattatgtctcttattgatggcagctttatttgatgatatttaacatttagcataatagtattaattcaattttacacagtcaattgctgatacaaggactaagtatttttttaaatga

SEQ ID NO: 340329 - DNA, 596 bp, Homo sapiens
gaatgtgtctagtatccatattctccacyaatatgtaaactaagtgataaggctctatatatcctactcaccattttccttcacgtttccagattattttcttatacttaatggttcacgcacaataatacaatttctgtacaaataaatgcacatacgcaaaatggcagtttgtaaaactacaatttgtaaataataagtaaatgtagaaaggagacagaaaacatcaggagaaatgttgctaaaatgattatttcaaatctaaaattgagaataaaatttaattgtccagcaaaatattttgacactcctaccccagttattcttcatcattcttctctgtttcagtaaaacaaggaagaagcaaaatgtggattttttttttaatttcagcacatgcatatccaaccaattatagtgtacacacattacagtggccccccataagtcactcctttgtatctccaaccactagaatatggtaaagatgatgtgatagtaattgtcataattagactgacttttgtcacaaaagtgataggtgatcgcttgcttgattagattgttataccaaaaagctaatggtatgtaactac

SEQ ID NO: 340330 - DNA, 596 bp, Homo sapiens
gaatgtgtctagtatccatattctccaccaatatgtaaactaagtgataaggctctatatatcctactcaccattttccttcacgtttccagattattttcttatacttaatggttcacgcacaataatacaatttctgtacaaataaatgcacatacgcaaaatggcagtttgtaaaactacaatttgtaaataataartaaatgtagaaaggagacagaaaacatcaggagaaatgttgctaaaatgattatttcaaatctaaaattgagaataaaatttaattgtccagcaaaatattttgacactcctaccccagttattcttcatcattcttctctgtttcagtaaaacaaggaagaagcaaaatgtggattttttttttaatttcagcacatgcatatccaaccaattatagtgtacacacattacagtggccccccataagtcactcctttgtatctccaaccactagaatatggtaaagatgatgtgatagtaattgtcataattagactgacttttgtcacaaaagtgataggtgatcgcttgcttgattagattgttataccaaaaagctaatggtatgtaactac

SEQ ID NO: 340331 - DNA, 475 bp, Homo sapiens
tatgggatacatgtaatattttgttctgttgttggtgggtgggccggtttgacttcgccaaacagaatttgaaagtgagtccaaagtaagagtaagcaaagaaatttatggcaaaacaaatgcatgctctgagagagagggagagagagagagagagacagagtgagacagagacagagagagagcccctagtgccttgagggaaattccctttatgggaactgtacatgcatattcatagaatactgatgaggtcaagtatgtaaaggcagacctgcaattggaatgtgggctcagggtctatgtgccctaacacacatcacatgtatcattagggtataaaatctctacctagggatgatttttttactattaaaatgagggaaagtttactataagctaaaccttgagcctagctgcayaggcaggaccctggaaaaactcctagccaaccccaaggcaggaatttgtagct

SEQ ID NO: 340332 - DNA, 497 bp, Homo sapiens
aatgtactatcaaattgtaggccttactaaatctttatgttttgtacctattaaataaacccaccttcctccagtcccacactaacttctcagcctctaataccatcctgctactctccatgttcaatgtttaattggtttgatttttagacccacaaagaagtgagaacatgtgatgtctgtctttctgtgcctggcttatttcacttaaccaaataatctccagttccatccatgtcgttgtatatgacagaatctcattcttttatatggctgaatggtttctgtttcatatttgtatcacrttaacattactcattcatatgttgacaaacacttaggttgcttccaaatcttgggtgttgtgaacagtgctgcagtacacatgggagtgcagatatctctttaatatgctaatctcttttctttgggtatattcccagaagtggaattggtggattatgtaatagctcaatttttagtgttctgaggaacct

SEQ ID NO: 340333 - DNA, 497 bp, Homo sapiens
aatgtactatcaaattgtaggccttactaaatctttatgttttgtacctattaaataaacccaccttcctccagtcccacactaacttctcagcctctaataccatcctgctactctccatgttcaatgtttaattggtttgatttttagacccacaaagaagtgagaacatgtgatgtctgtctttctgtgcctggcttatttcacttaaccaaataatctccagttccatccatgtcgttgtatatgacagaatctcattcttttatatggctgaatggtttctgtttcatatttgtatcacattaacattactcattcatatgttgacaaacacttaggttgcttccaaatcttgggtgttgtgaacagtgctgcagtacacatgggagtgcagatatctctttaatatgctaatctcttttctttgggtatattcccasaagtggaattggtggattatgtaatagctcaatttttagtgttctgaggaacct

SEQ ID NO: 340334 - DNA, 549 bp, Homo sapiens
ggcctactctattctttttcaaagccatttttggaggtagtagaatgtaccaagagaagagaagacaggagatttccctttacctacaacattctacattatttacatataaaaatatgatgcaaaatgatacaatattaatatttgttagtcctgggcagtgactagtctcctgtttgttatattcatcttgsctcctttttaatattgtgactttttttttttcaaaataatagcaatgaaagctctgctgataactcagggtaaacagacctggaggcacagagcagtttccctttgacttgtctttcttgcctccacttgccttcaatcagaaatcatgtcaagagatgaaacaagtactcatgaacttttgcaccttaatttaaaactacttttggatatgatttttaacacttttttaaaattaatttccatgcaataaaattcactctttttgatgttcagttcaatgcattttggtgaatgcagtctgtagccaccacggtcaagttacaagatggctccatcaccttttgtactcaactc

SEQ ID NO: 340335 - DNA, 449 bp, Homo sapiens
tggaccttggggtaaaattatatttcatagttcccttgttcccaggctgtggttaaaaaaaaaagagattgatgtctgaaatttcaagtgtatttgtcttacaaatttgtttgattctcttgagaataattatctcatatcatttgaaggttagtaaytccttaggaatgacccttctgttataattagtaacttacatgcagctaagaaaagtgaaagttaatggacttagtttcttgcattgctgttttattaaactgctaatctttgaaacaaataacagtcctagagacactgctcagaggagtaatcatgtttcctttcatttgctgagaataggtaatgtggacatatatggtaacataacaatggtcagtaagaaaaacctcattatataatactacatctatatatacaagggaaaggtgtgtccaatggctgttgggagg

SEQ ID NO: 340336 - DNA, 449 bp, Homo sapiens
tggaccttggggtaaaattatatttcatagttcccttgttcccaggctgtggttaaaaaaaaaagagattgatgtctgaaatttcaagtgtatttgtcttacaaatttgtttgattctcttgagaataattatctcatatcatttgaaggttagtaattccttaggaatgacccttctgttataattagtaacttacatgcagctaagaaaagtgaaagttaatggacttagtttcttgcattgctgttttattaaactgctaatctttgaaacaaataacagtcctagagacactgctcagwggagtaatcatgtttcctttcatttgctgagaataggtaatgtggacatatatggtaacataacaatggtcagtaagaaaaacctcattatataatactacatctatatatacaagggaaaggtgtgtccaatggctgttgggagg

SEQ ID NO: 340337 - DNA, 449 bp, Homo sapiens
tggaccttggggtaaaattatatttcatagttcccttgttcccaggctgtggttaaaaaaaaaagagattgatgtctgaaatttcaagtgtatttgtcttacaaatttgtttgattctcttgagaataattatctcatatcatttgaaggttagtaattccttaggaatgacccttctgttataattagtaacttacatgcagctaagaaaagtgaaagttaatggacttagtttcttgcattgctgttttattaaactgctaatctttgaaacaaataacagtcctagagacactgctcagaggagtaatcatgtttcctttcatttgctgagaataggtaatgtggacatakatggtaacataacaatggtcagtaagaaaaacctcattatataatactacatctatatatacaagggaaaggtgtgtccaatggctgttgggagg

SEQ ID NO: 340338 - DNA, 588 bp, Homo sapiens
ataagtgttagagagagcctcactggttacatttaggctccaaaattagtatggtcattcatattagtttagctcagcagttctattccaggggagggggtgcaaacgggcttagtgatgacagtttctttttactagtcatttaaaaacagctgagtttttttttactttatttattttattttattttattttttgcttttcttgaactcattcctctccaaccccaacctttccwctaaccccacaatgaaattcaaacattaatgtgttaaaaacaattgagaagttatgactgggtaaacacaccagggtgatcacagctgataatcaatttagcttgagcagagtgaagagattcttggattatatttatttaaggctaatgacttctttaaatttctaggttttggataatggcaaaaaatggaaacattgcatggggtggctacatctgctacatgaacaatctaatgatagacaacatatttaggattgattacactgtagttgtttctgtttttgttgttgtggggttttgtttttgtttttgtttttctaaaaaaactagttaagattcaaaatttc

SEQ ID NO: 340339 - DNA, 588 bp, Homo sapiens
ataagtgttagagagagcctcactggttacatttaggctccaaaattagtatggtcattcatattagtttagctcagcagttctattccaggggagggggtgcaaacgggcttagtgatgacagtttctttttactagtcatttaaaaacagctgagtttttttttactttatttattttattttattttattttttgcttttcttgaactcattcctctccaaccccaacctttcctctaaccccacaatgaaattcaaacattaatstgttaaaaacaattgagaagttatgactgggtaaacacaccagggtgatcacagctgataatcaatttagcttgagcagagtgaagagattcttggattatatttatttaaggctaatgacttctttaaatttctaggttttggataatggcaaaaaatggaaacattgcatggggtggctacatctgctacatgaacaatctaatgatagacaacatatttaggattgattacactgtagttgtttctgtttttgttgttgtggggttttgtttttgtttttgtttttctaaaaaaactagttaagattcaaaatttc

SEQ ID NO: 340340 - DNA, 593 bp, Homo sapiens
ccactccctgccctcaagtaatttacagtgccataggtgagagacatgtaaaacaaatcataagacatcttatctggtaccaaatctgtagattttcccatccaacctttggatatttgttgtctagaawgggattcctacgtgtggaaaaggtaatccattacaattttgcaaaaaggacctcaggacttaaagagaggcaaagctaatcatttaaaccaatgctggatttaaaaggcagcattaaacaagcatgcaaggatataacctcaatgagggcaaggataaaatctgtcttgtttgccatggtatccctaggcattagcatggtgcttggcatatagtgccttgtgttgggaatgtctgtctgttggttggttgtttggatggatggctgcttggatgggtagctggatgaagagatggacagtcaggtggatatagataaaaggatacgacgcctgccaggtacccaagcattaagggccgggccatgtctctctgctctgtgagtgagccaaaacagctaaggcagagttgagtatgccctgggagaattctatgggatacaatgttgctttcaaaagtatgcc

SEQ ID NO: 340341 - DNA, 593 bp, Homo sapiens
ccactccctgccctcaagtaatttacagtgccataggtgagagacatgtaaaacaaatcataagacatcttatctggtaccaaatctgtagattttcccatccaacctttggatatttgttgtctagaaagggattcctacgtgtggaaaaggtaatccattacaattttgcaaaaaggacctcaggacttaaagagaggcaaagctaatcatttaaaccaatgctggatttaaaaggcagcattaaacaagcatgcaaggatataacctcaatgagggcaaggataaaatctgtcttgtttgccatggtatccctaggcattagcatggtgcttggcatatagtgccttgtgttgggaatgtctgtcwgttggttggttgtttggatggatggctgcttggatgggtagctggatgaagagatggacagtcaggtggatatagataaaaggatacgacgcctgccaggtacccaagcattaagggccgggccatgtctctctgctctgtgagtgagccaaaacagctaaggcagagttgagtatgccctgggagaattctatgggatacaatgttgctttcaaaagtatgcc

SEQ ID NO: 340342 - DNA, 626 bp, Homo sapiens
ctggcttaatttcatttaattaaaccattttatgacagacacattaaaaagctcagttccttttaacattaaattwaaaaatgcccataaaattagctttctgtgtgtgctataatttaaaatacataacaatttaaatgttttctaaatagatggggggatctaacatccaaatctatcttcttatatcaattcatatttggttaacatactgtaccaattcctttcattaaaataaacttattactttgaaattaacatatacagtttttactcagtttttttctagatgctagtttgaaacactaaaataaagatctatactgaaaaacttaacatacctttaatgcattcacattcttttcggtgttacatttttgagctaacatctctaataactaaggccgttaccattgttaagaaaaagagaacaaggaactcaaatgtagtaataaaatcatgctgggaaaagcattatttaaatcccacatttatttttcagataaatttcgagtttttatgagagaaaaagaagtacaacttggctaacaattagagaagattatttagtaaaaggacaaagtgactttgagttgttggaactatttacacagaagtaacccaaa

SEQ ID NO: 340343 - DNA, 626 bp, Homo sapiens
ctggcttaatttcatttaattaaaccattttatgacagacacattaaaaagctcagttccttttaacattaaatttaaaaatgcccataaaattagctttctgtgtgtgctataatttaaaatacataacaatttaaatgttttctaaatagatggggggatctaacatccaaatctatcttcttatatcaattcatatttggttaacatactgtaccaattcctttcattaaaataaacttattactttgaaattaacatatacagtttttactcagtttttttctagatgctagtttgaaacactaaaataaagatctatactgaaaaacttaacakacctttaatgcattcacattcttttcggtgttacatttttgagctaacatctctaataactaaggccgttaccattgttaagaaaaagagaacaaggaactcaaatgtagtaataaaatcatgctgggaaaagcattatttaaatcccacatttatttttcagataaatttcgagtttttatgagagaaaaagaagtacaacttggctaacaattagagaagattatttagtaaaaggacaaagtgactttgagttgttggaactatttacacagaagtaacccaaa

SEQ ID NO: 340344 - DNA, 560 bp, Homo sapiens
gctgatatgcaaccctaggtagtcctagaaacaaaacatttggcactgtaccagacatataataagcattcaatatcaataagtaactcttatcatcattgttcattcagaaaatatgaatcaaaacttgagaatatacatttgagtcagacatgacctttggcctcaagttacttttatccaatctgctgagaaagatagatattaaaatttatgactccgatgcatcatggtgttgtgatagacacagccactcgaggcttcrgtttctgacatagtaaatggaaataattacaccaccctcaaaaggaagattcaaggattaaggtggatagtatgtgcaaagtgcacagaacaatgccaggcatacggtaaatgctgtcaacattaataataatttctttaacttttctttttttatataatactggtacatatttatagaatatatgtgaaattttgatgtaagcatacaacatatagtaatcaaacatgggtaactgagctagccatcacctcaaatatttattatttctttgtgtgggaaacattccaaacct

SEQ ID NO: 340345 - DNA, 636 bp, Homo sapiens
ttaaaataaccacattaaagaaatgtatacaatgtcctaatagcatctaaatatcacacttctattagcatcctacagaactggatgtcttccccttgatataaaaaaaataattaacttgggacattaagtttccaaaataattttgctgatctgagccaaagttttccttaattcgttagtcatcaccttagcctctgcatttaaactgggggaaggctttttcatgaaatacttagaactgctaaggagaataawtttgcctctggcttttgctatacattttctccaggttgggagaaactagagaagtgtactagattgttcagagaaagtaagtctacaagtgctgattttgttaacattagacaatgcccacatgtggatcaacagggactgtgggttggcagacttttgctctaagatggctgctttccccaacatgtggcaatcacctgatacggcataattgcttttaaacatgaaagagttgtgctgtagaaatagatctccaacttgttaaagtttatatctagactgttttcagttgggagtgatgtaccaaagtgggagaaaggcaccaacaaggatgtttttcaaggcaggaaacaggagatatcaaccaggacccaccat

SEQ ID NO: 340346 - DNA, 559 bp, Homo sapiens
gtccattaaaattattcagggattatgataatttagttccacaccaccattcttcctattctctatttctagaatttgtctgcatgctggacttttgctttctattctgtgtgctgcttaaactcttgtgtgttccatctttattttctgaatctctctctgccattatctagataatttccccaaatccatctcctaattaattctctctttaggagtggctggtttgcttttaatgcagtcattgagtttttaattcagtgcctacatttttattcgtagaagttttatttggttctgttcaaaatgttttagttaatttcattgtattctattacttcattatggtttctacttttttctttgttttttaacaatgttaaagagggcttattttatagttcttttaacattattgaactccgattatcctattagttaagtctgatgactctcagttattgtggattttttccttattgctttatggttttcttagaaggtactcattattagtagggattttttttttwaaagcagttcagtacatcctagatta

SEQ ID NO: 340347 - DNA, 551 bp, Homo sapiens
aatacattaaactcaaagtcattagatgggataacagtgagattcacttcaaagagaaaatgacaacacatatcaagaaactcaaagaattatactgtcaaagagcggtccaatgaatttactcgggtttctctttgaaagtcagagaagtgctgataatcatatttcgaaagaaatgggaatggaggaagaatacgtgattgaaatttatcaggaaccaatggggtcattcaacagtttagatattctttttattatttttcttctgccctcaatctttaaaaatgtttttgtaatgtgttcaaaatgaaattgagactggaaacccatcttttttttttttttttaaatgaargcaagtttattagagaagtggaggaacaaaagaatggcaaccccgtaggcagagcagccctgagggctgctagttagctattttcatggttatttctttttttttttttttttgttttttatctttttttttttattatactttaagttttagggtacatgtgcacattgtgcaggttagttacatatgtacacat

SEQ ID NO: 340348 - DNA, 551 bp, Homo sapiens
aatacattaaactcaaagtcattagatgggataacagtgagattcacttcaaagagaaaatgacaacacatatcaagaaactcaaagaattatactgtcaaagagcggtccaatgaatttactcgggtttctctttgaaagtcagagaagtgctgataatcatatttcgaaagaaatgggaatggaggaagaatacgtgattgaaatttatcaggaaccaatggggtcattcaacagtttagatattctttttattatttttcttctgccctcaatctttaaaaatgtttttgtaatgtgttcaaaatgaaattgagactggaaacccatcttttttttttttttttaaatgaaggcaagtttattagagaagtggagraacaaaagaatggcaaccccgtaggcagagcagccctgagggctgctagttagctattttcatggttatttctttttttttttttttttgttttttatctttttttttttattatactttaagttttagggtacatgtgcacattgtgcaggttagttacatatgtacacat

SEQ ID NO: 340349 - DNA, 551 bp, Homo sapiens
aatacattaaactcaaagtcattagatgggataacagtgagattcacttcaaagagaaaatgacaacacatatcaagaaactcaaagaattatactgtcaaagagcggtccaatgaatttactcgggtttctctttgaaagtcagagaagtgctgataatcatatttcgaaagaaatgggaatggaggaagaatacgtgattgaaatttatcaggaaccaatggggtcattcaacagtttagatattctttttattatttttcttctgccctcaatctttaaaaatgtttttgtaatgtgttcaaaatgaaattgagactggaaacccatcttttttttttttttttaaatgaaggcaagtttattagagaagtggaggaacaaaagaatggcaaccccgtaggcagagcagccctgagggctgctagttagctattttcatggttatttctttttttttktttttttgttttttatctttttttttttattatactttaagttttagggtacatgtgcacattgtgcaggttagttacatatgtacacat

SEQ ID NO: 340350 - DNA, 616 bp, Homo sapiens
caaagggtgtggactgcgactgctctccttacttaaatagcccagtgccacatgcatggggctatttaataaatattgtttaatgatgattgctctcccagcatgggagtgtggggctctcagcgtgcccctgggagccatgtgccgggcctggcccaccagacgcagcacacagactgctcacagtaaataatatttgctgaactctccttttgggcagtgagatcctgcaccaacttttgtgggaagtaataagaacatagaactcacgattattctccctcaaagctgcttacgatctaatataaatcttagacccacagtttgcagaaaatgagggcagagctgaacaaacasatctatgcggaaatgactctaataaaaattatgaaaatccacacactcggtcactgtcttcaaagtactcatattttgctgcttcattctgatgcacgagagcatttgaagaactgacactggaaagtgagtgtgtggtgaaaattcctggtaggaagaaaagcatcactctctaatgtgtgtgtgattaagctcctctgtaggaagaaaagcatctggaaggaggtatctctttctgtgaattcaattctttcaccta

SEQ ID NO: 340351 - DNA, 616 bp, Homo sapiens
caaagggtgtggactgcgactgctctccttacttaaatagcccagtgccacatgcatggggctatttaataaatattgtttaatgatgattgctctcccagcatgggagtgtggggctctcagcgtgcccctgggagccatgtgccgggcctggcccaccagacgcagcacacagactgctcacagtaaataatatttgctgaactctccttttgggcagtgagatcctgcaccaacttttgtgggaagtaataagaacatagaactcacgattattctccctcaaagctgcttacgatctaatataaatcttagacccacagtttgcagaaaatgagggcagagctgaacaaacacatctatgcggaaatgactytaataaaaattatgaaaatccacacactcggtcactgtcttcaaagtactcatattttgctgcttcattctgatgcacgagagcatttgaagaactgacactggaaagtgagtgtgtggtgaaaattcctggtaggaagaaaagcatcactctctaatgtgtgtgtgattaagctcctctgtaggaagaaaagcatctggaaggaggtatctctttctgtgaattcaattctttcaccta

SEQ ID NO: 340352 - DNA, 574 bp, Homo sapiens
ttcccagacctccaaaaggtgttttccaaacactcaagagtcaaaagggccaaatactggatccttaggtgtgatgtgcctggaaagcatataatcaggtcatctgttaaaagccactaatatgaaagaggaaaagatatayaaatggtttataatagaaaaagtagcgaatatagacaaggaatcagagaagcaaatactctcaccctatcaggggagtgtaaactgatataacctttctgagggtaaattaggcaaaattaaaagcttttaaaatatataagtattttaacccagaaacataaaaaatttataccaataaaatagtcatagatatgccaaaagaatctataagaatctataaggattcaaataaggatttccattccaggggaaaaatttaagcaagtcaaatatccaaaattaggccatatccatatgctgggatactaggcaatcattaaactcgtagtaaagaatgtttcataatttaaaacattttacaatatactatgttttaaacattaccaaaattcttgtagtcggattttaaactttttttttaaaggtttat

SEQ ID NO: 340353 - DNA, 574 bp, Homo sapiens
ttcccagacctccaaaaggtgttttccaaacactcaagagtcaaaagggccaaatactggatccttaggtgtgatgtgcctggaaagcatataatcaggtcatctgttaaaagccactaatatgaaagaggaaaagatatacaaatggtttataatagaaaaagtagcgaatatagacaaggaatcagagaagcaaatactctcaccctatcaggggagtgtaaactgatataacctttctgagggtaaattaggcaaaattaaaagcttttaaaatatataagtattttaacccagaaacataaaaaatttataccaataaaatagtcatagatatgccaaaagaatctataagaatctataaggattcaaataaggatttccattccaggggaaaaatttaagcaagtcaaatatccaaaattaggccatatccayatgctgggatactaggcaatcattaaactcgtagtaaagaatgtttcataatttaaaacattttacaatatactatgttttaaacattaccaaaattcttgtagtcggattttaaactttttttttaaaggtttat

SEQ ID NO: 340354 - DNA, 648 bp, Homo sapiens
ttccattttcatcttctcaaaacatttatccatctctaaacttcggctttctaagacccactttaaatctttttggaaagaagttaactgaggataaataaatacccttaacagaataaaaaatattcaaaatcaaccaataactctttgtaagatacctaatgtatattaagcattctaggagagaggacgagggaaaaaccttaaactttttttaatggaatgaaaaaattttaagttaaaaaatgcaaataaattaaaatataattttttaaccttgtttaaagctctggaataaaactgacttgacttaacttggtagtataaccackcatgtattttcatttaaaaaatgcgtctacttagcttgactgtttgaattcctttctgttgcttaatttccaaacaaaagatattactgctggttttaaatggctgaatcatctgagaagggtctctctgacaccgctgacaatgtagttctaaaaacagaaaattatagattatcagagaaggaagtttagatgtatcagcttagggtctgaagcatgtcttgtgaggccacccaaaaagacagctttcctcatagtccccgaccctgggctctaatctccagcccacaaacagatgcattcctctaattccaag

SEQ ID NO: 340355 - DNA, 609 bp, Homo sapiens
tgggagacagagttattatggaaagctgatttcactgtccaaaaatttagcctgcactttttcttgaaattatcyaaatatttcagcaattatctatttatatggttgttttctgggcatttccttactatttctccccagtctattatacagtgttaaaattatttgcttttgaagtcattttttcacttccatcacaacttacaaagcctagcctgaccgtccctctaggtcccaacaggtctggacttggaaaaggttttcaactggcctaaagcaaattgtcttgtaacagaaaaataattttttttttcacttatgctacataattgagtttgatttccatacatatcccctccaataactactgtatacagtgatccaaaggtgttcttaaaagatatgacggttttctttgataactctggatctggaatacaagatgtgcaatgacaggaaaccactttcttagtttgaaactagtttaatattaccttggtgatgccgagtttgcaaaccagctcctctctgttttgtacattttagaatgcaaagctcctaataatgagtgcatgagtcattcacatggaggtgacttataattcaaac

SEQ ID NO: 340356 - DNA, 609 bp, Homo sapiens
tgggagacagagttattatggaaagctgatttcactgtccaaaaatttagcctgcactttttcttgaaattatccaaatatttcagcaattatctatttatatggttgttttctgggcatttccttactatttctccccagtctattatacagtgttaaaattatttgcttttgaagtcattttttcacttccatcacaacttacaaagcctagcctgaccgtccctctaggtcccaacaggtctggacttggaaaaggttttcaactggcctaaagcaaattgtcttgtaacagaaaaawaattttttttttcacttatgctacataattgagtttgatttccatacatatcccctccaataactactgtatacagtgatccaaaggtgttcttaaaagatatgacggttttctttgataactctggatctggaatacaagatgtgcaatgacaggaaaccactttcttagtttgaaactagtttaatattaccttggtgatgccgagtttgcaaaccagctcctctctgttttgtacattttagaatgcaaagctcctaataatgagtgcatgagtcattcacatggaggtgacttataattcaaac

SEQ ID NO: 340357 - DNA, 655 bp, Homo sapiens
ataattgagtttgatttccatacatatcccctccaataactactgtatacagtgatccaaaggtgttcttaaaagatatgacggttttctttgataactctggatctggaatacaagatgtgcaatgacaggaaaccactttcttagtttgaaactagtttaatattaccttggtgatgccragtttgcaaaccagctcctctctgttttgtacattttagaatgcaaagctcctaataatgagtgcatgagtcattcacatggaggtgacttataattcaaactgaattaactgtaaatgcaagcaatttgaaaaaaattaaggccttatgttcagtgttgtcactacatttgttagggatttcatcactgtgtggaggcgtttagttccaggctaacatttggacagatggaaagctcccctggagcatgtgggtcaaaagagccagctccacccgaccttcagaggaactgagcaagcagcctccgggatccacagcttccctatctcactcacaccaggcagcacggagcactccctgcatttgagagggcacagcaacaaaacagtcagccagttgtgatgaaatctcttgtaaattaaaaagtgatcaacaaaaatgatcactgttattcctactattattgttgttag

SEQ ID NO: 340358 - DNA, 655 bp, Homo sapiens
ataattgagtttgatttccatacatatcccctccaataactactgtatacagtgatccaaaggtgttcttaaaagatatgacggttttctttgataactctggatctggaatacaagatgtgcaatgacaggaaaccactttcttagtttgaaactagtttaatattaccttggtgatgccgagtttgcaaaccagctcctctctgttttgtacattttagaatgcaaagctcctaataatgagtgcatgagtcattcacatggaggtgacttataattcaaactgaattaactgtaaatgcaagcaatttgaaaaaaattaaggccttatgttcagtgttgtcactacatttgttagggatttcatcactgtgtggaggcgtttagttccaggctaacatttggacagatggaaagctcccctggagcatgtgggtcaaaagagccagctccacccgaccttcagaggaactgagcaagcagcctccgggatccacagcttccctatctcactcacaccaggcagcacggagcactccctgcatttgagagggcacagcracaaaacagtcagccagttgtgatgaaatctcttgtaaattaaaaagtgatcaacaaaaatgatcactgttattcctactattattgttgttag

SEQ ID NO: 340359 - DNA, 600 bp, Homo sapiens
tatagtggcaatgatactatcagaaatgtgtaactgttaagtgcaattgattcactgaacaaagaaacagacagcctgaaattagccaaccaccatctagggtcaggtttggaagccaaaagtcctctatggtggtgtttttttaaaaaagcttcatcttcagcaaggaaacagtagattagtctgaaaactaggccaagatttggttgtaactatagcagaattgcagagaaattttaaattaataaccctatcaactttcctctgctgacatcaaagcactaataagaactactataacatctggttgatgcacttaagagctttgattctctgattccctggaaccctctgatccaggggttctagccaactatactcttkctagaagatagcaccctccctcgcctggaaataatatagaagcgttagttagaatacattttgcaagaatatatttgtcctgcttaagaagtatccttcatggcttctaagcatctaactaggtcttttccagctgagaaagaaagggctgccccagctttgagaaaaaataaattatttgccaaaaagccccagtgaaaacagctaaggattaga

SEQ ID NO: 340360 - DNA, 569 bp, Homo sapiens
ctccaggctgatttaagctgatccattacacaaaggaaaatatgaggtaacctcaggtgcctgtttaccaaaggcttttagaaaacaatgtaataaagatcatcttagtcattctaaagtaagaataaatgtcataaaaaagagaaagtgagaaatgtgaattatgagaagaaattatacttttatttatgaaattctaatttagcttggaattaatacttmttttacttagataaagaacactacataatgcttatgatgtgtaagagaaaacaaggtaggaatgtatttaaaatttttattattttatccttatgctacaaaaaattagaaggctttaaataatacatcttgtctggaaaagcatttatattttggataaacttagtgttctggaaaccatgtaaaatgtctaggtacttaatgtttataaaatcttagagaagtcaaacttgtgtatataataataatatacaccaatatatttatacatctatatccgtctacttacctgtctctgtgcctctatatctgtatctatgccctcaaagagacaagataggatgtaa

SEQ ID NO: 340361 - DNA, 569 bp, Homo sapiens
ctccaggctgatttaagctgatccattacacaaaggaaaatatgaggtaacctcaggtgcctgtttaccaaaggcttttagaaaacaatgtaataaagatcatcttagtcattctaaagtaagaataaatgtcataaaaaagagaaagtgagaaatgtgaattatgagaagaaattatacttttatttatgaaattctaatttagcttggaattaatacttcttttayttagataaagaacactacataatgcttatgatgtgtaagagaaaacaaggtaggaatgtatttaaaatttttattattttatccttatgctacaaaaaattagaaggctttaaataatacatcttgtctggaaaagcatttatattttggataaacttagtgttctggaaaccatgtaaaatgtctaggtacttaatgtttataaaatcttagagaagtcaaacttgtgtatataataataatatacaccaatatatttatacatctatatccgtctacttacctgtctctgtgcctctatatctgtatctatgccctcaaagagacaagataggatgtaa

SEQ ID NO: 340362 - DNA, 535 bp, Homo sapiens
tacgtaaccaccacagtcatatagagacaaaattactctatcacctgaaagatctccatcgtgctacatctttacagtcacacccctccccaccatacctaacccctgaaaacaaatcaaatgttttctaattctataatattggcatttcaagagtgatttatgaatgaaataatactgtatgtgactttctgagattagcttttttgttgttttttaactcagcagacatgctggaatatatccaaggtgctgagtgtatcartagtctcttctttgtattattgagtagtattttacagtatgaatgtactgaagtttgtttaaccgttcattcattaagggacattttggctatttccagttttaggctatactttccaaggaaaagttcccccaaaactgctataagcaatcatgggaacatttttgtgtggggatagatcttcatttctctgtcatgaatgcccaaggagtagtacacatgataagtgtgtttagttttttttttaaagatattgcaaaagtagttttc

SEQ ID NO: 340363 - DNA, 575 bp, Homo sapiens
tctgtccctaatctttcaaaactccaactatcaagtgtacccttctcacttagcatgtaaaattccaaaaggcatcgtaaatgactatcctgattatagatatccctatcccaatgatgctyctattatatataagagggaaaaacttttaagatatgagaaaaatctgtctctcacaagtcacaacttagaaccgttccttcaaggaccagggctacattgcctttgtggctcttggctacacttaatcctccctaggcattggaagggaacttgtactatagtagcagtggttcctgacctattatttttaaattctactgacaatgcaacatcatgtaaggacatacccaatttaggctcttttctaaaaactgcactatcttggatatgctgaacaaaaagatctatacttttcatgctcttatatggagatttcactgaaagggaagactggggagggcatgcacacgacaatctcatcttagaaaaaccatggatgggagattctatagccagaggcttattcttgttttctggtattcctttccttgaaagatcagtacttaatatat

SEQ ID NO: 340364 - DNA, 589 bp, Homo sapiens
tatattaattatatattgttgtaaattactccaatatttagcaacttaaaactgcaaacatttattatcttagaaatcctgtagatcatcagtttgggagcagcttagatggctggtattggctcaaggtctcataactgtgtagtcaagctgtgagctgggcctgaattctcctctaaaggcttggctagggcagaatttgcttccaaagtcacttgcaagatttttggcagacatcagtttcgtgtgggctgtaggactgataatgtcaactcactgttggctgttggctctatggacctttctgtaagacacctcacaacatggtagctggcttcacccagagcaaatgatctaagacaaattgaggaagagtgcacctcagacatatgacctaatctcagaagtaatattacttstgatgtatttttaaggatgctttattgaaatgatctacaaaatttgcaaatatttaatgtatacattttgatggtttgaacatatgtatacaccactgatatcatccccacaatcaaggtactaaaaatacccattacttccagaaatttctttgtgttctgttgtgttt

SEQ ID NO: 340365 - DNA, 589 bp, Homo sapiens
ctatgaaaaatggaaatggaaatgaaaaacggcatagagatttcccaaaaaagtaaaaatagaatttttttatatatagaactttatatatagaagtttttgtgtatatgtgtgtatatatatatatatatatatatatatatatatacacacacacaaaagaatactattcaacaataaaaagaatgaaatcatgtcatttacaacaaaatggatgccaattggaggttattatgttaggtgaaacaatccaggcacaaaaaaattccacaggttctcactcacatttgggagctaaaaaacttggtcccatgragacagtgaatagaatgatagatactatagactaggaagggtgtgcagatgggagggagagaggaagagaggttggtgaatgggtataaatttacagtaatttagaagtaagctctcatgttcagtagcgaaatgaattgactgtagttagcaacaatgcattgtatacttcaatgtagcaagaagaacttaaaatgttaccaacacagaattgctaaatgctcaaggtgatggataacctcaaataccctgacttgatcattacacattctat

SEQ ID NO: 340366 - DNA, 576 bp, Homo sapiens
aacacttaagtaagttttgaaagaatgcatcaaatttttgaacaagttttgtttagaagtattgaataaatagggaagaaacatgatattggaattagaccaaactgcttcccttggaaaagtgtgtttatttccatttcaaatggatctttcagtacaatatattagaaaactttaacctcttaaaaatgtaaaaataatgtcaatttaggttaaatgacacaatttaattaggttaaaagaatggttcaaaacattcaaatcatgaaaataaattgtaaattaagattagcttcttgaaaygttaagattataaaactgaaaatttcatttgacttattaccagatgaattcatcctatgttaattccgtgtatctgctctgggccatttttctatgaattatatgctattcatcatcctgacattactaaaatagcataaacttctattgataaagatactgcatttaaatgtcattgctgatattctcttcatatttctatgtacatcagaagagatgtacatagttctgaataggtgaatattcagaatattcatctgaatatgtgaaaag

SEQ ID NO: 340367 - DNA, 576 bp, Homo sapiens
aacacttaagtaagttttgaaagaatgcatcaaatttttgaacaagttttgtttagaagtattgaataaatagggaagaaacatgatattggaattagaccaaactgcttcccttggaaaagtgtgtttatttccatttcaaatggatctttcagtacaatatattagaaaactttaacctcttaaaaatgtaaaaataatgtcaatttaggttaaatgacacaatttaattaggttaaaagaatggttcaaaacattcaaatcatgaaaataaattgtaaattaagattagcttcttgaaacgttaagattataaaactgaaaatttcwtttgacttattaccagatgaattcatcctatgttaattccgtgtatctgctctgggccatttttctatgaattatatgctattcatcatcctgacattactaaaatagcataaacttctattgataaagatactgcatttaaatgtcattgctgatattctcttcatatttctatgtacatcagaagagatgtacatagttctgaataggtgaatattcagaatattcatctgaatatgtgaaaag

SEQ ID NO: 340368 - DNA, 525 bp, Homo sapiens
tgtaaacctaattaactactattagctgggaaacagaaggtagacgtataccttccaaattgaggaggagttactggttttcaggacttggtcctcacctttacagtacagaaattagatgttcatttgatgagtatttttttaagtttaccagacagatgcattactatttttctgaactgcctattcagttttattttcttgtcccatttttctattgcagtggtcatcatttttattgatgtataataatattgtatcataaatcttcataatatgtgcttccaaagttttttctaatttttcactaacctttgatttggtatttaatttttagttgtcagaagtttttaatatttgtatcatcaaagctatcaggttattaaaattgacttctcatttagacatactacratttttttttaggtaacagaaataaatatgtatcaaaaaaaaaccagagcatagcaaagctggctatgtccaatggcaataggatcggtcacctttcttagctcttgacag

SEQ ID NO: 340369 - DNA, 493 bp, Homo sapiens
cttttctatggccatgaagaaaactagcagagaaaacactgtgagagtggctaaggagaacaatagaaaaaacatggatttttgaaatctttaacaaaatcttgagttgctggtatcatatttcactatgcagagtatcagatctttcttattgccaacgagttgagttagaattctagcttctggctgcccaatcacaatatatgtatttacattgaaacatttagaaaagataggcactaatctaatttaaaataaattttaagtttagttgttatattaatattcatattaattaactcaataatttttaataaaaactagtcatattctgagacaattatttaaagtgtaatctgaatcaatttctaatataagactaggctaagtgccggatctttggttctctttgtaattgtttttttcttgtattacttgtgttmtttttttaattaaaaatgtattttcattttatttaaatatttttacctgc

SEQ ID NO: 340370 - DNA, 580 bp, Homo sapiens
tgacaaaattcaacatccttgcgtgataaaagctctcaccaaattaggtatagaaggaatatacagtgatacaataaagaccatataggagaagccaacagctaacattatactcaatgttcaaaagttgaagttctttttagatttctctaaaatctgaaacaaggaaagcttactcttgccacttctattcaacatagtattaaaagttcttgccagagcaattttatgtaagagaaagaaataaggcactcaaataggaaaagaagtgaaactgcctttgctgaggacattatcttatgtatagaaaatgtagaacaccctacaggtttcacctcaaatctgtkagaactaaattaatactgtaaaattgcagaatacaaaatcaacatacaaaagtcagcagtgtttctaaaaactaatggcaaattttctgaaaaaaatcaaaggtcaatttcatttataaaatagctacaaagaaataaaatagttaagaataaatgtaaccaaaaatgtgaaagactagtacattgaaccataaaatatcaataaaggaaattcaataagaagcaaataaaca

SEQ ID NO: 340371 - DNA, 582 bp, Homo sapiens
aactaaaaggatgagaatcctccaacttcaaagccagcaacagcaggccccatcttctcatgctttaagtctgccccatactctctctccctgttctgtctctagacacaccctggaaagatttttcactttggaggactcatgttatcagatgaggcctacctagatagtccagaataatctccccatctcaagatatttaaccttaagcatatctacaagatgtcttttgtcatgtgaggtaacatattcacaggttctaggggttagaaggtgaacatctttgggcacagagggcattattctgcctaatyaggactctgaaccctataacccaagaactgggttagtttttccaagaggattttataagcatgggcttcataaagtcaaatttaggaaaaactgaagtttccaattatgccttggtaacaaggaatatagattcctattgaacctatgcacataattacaaggctatgagaataagaaaatgagggctttcaaaacctggagaagccaagcagagaatataagatatattatgttatttctctttacaaaagcatggtctattagact

SEQ ID NO: 340372 - DNA, 534 bp, Homo sapiens
ttagaatgagtgtaatcttcagcttttgtaaagagtatcaaatgataaattgagtaatcagatctttgcctgaattgcttactgcagtgaaacatttattaaatgtgtagtaaaaatatcagttaatctgtccaaaaagctggatacattcatttgctttctttcatccagcttagttgtctcattggagaaagaagggaaaagaaaaatgatgtcctaattatttaygtgtttacaagtttgttttcttttttgcttagactgctgttaaactggctcactccatatactctgtgctacagcaatttaatatttcattaaaaagcattaatgatggctccagtgaatttctcctattcaagctccataatgacagcagttcaagcgagtgttgatctctgagtgatgcaacacaaaaacatcgcctaacaaaggaacacttggagtactactcatattctctgcaacttgaggtaaagttggagagctagctgctgagtggtaccttgtaatttaattgaataagaaaagacc

SEQ ID NO: 340373 - DNA, 591 bp, Homo sapiens
atgtgtgtatatatgtagatacatatatctgtgtatatgtgtatatatatacatrtgtgtatatgcatgcacacatatacatatatgtatagacatgtgtacattgtgtatgtacatgtgtacatgtgtatatatgcatatacatacatatgcatatatacacacatatgtgtgtatgtatgtatttatatatagagagagagagcagtatagggaggacaaggcgaatgtgaactgggaaaaaagcattatatatcataactaagaggtaattgatgatacttgagaaatcggtgaacaattaatatttgttaaaccattgactaggatgttaatttttcatttgaggtattttttagtgaaaggagagaaggaaatgaaatggtagctagtagatggtgaatttaagcaagatttgttccctttcttccactatacgcctctaaggaaattaaaaaaaaaaaaggcttgtttactttggaatgtggagtaaagagagcaacaagagattgaagtcaaagaataggtaagtgagcactgtaaggatctgcagagacagacagaaaaagtctgcatggagagtaaattggg

SEQ ID NO: 340374 - DNA, 591 bp, Homo sapiens
atgtgtgtatatatgtagatacatatatctgtgtatatgtgtatatatatacatgtrtgtatatgcatgcacacatatacatatatgtatagacatgtgtacattgtgtatgtacatgtgtacatgtgtatatatgcatatacatacatatgcatatatacacacatatgtgtgtatgtatgtatttatatatagagagagagagcagtatagggaggacaaggcgaatgtgaactgggaaaaaagcattatatatcataactaagaggtaattgatgatacttgagaaatcggtgaacaattaatatttgttaaaccattgactaggatgttaatttttcatttgaggtattttttagtgaaaggagagaaggaaatgaaatggtagctagtagatggtgaatttaagcaagatttgttccctttcttccactatacgcctctaaggaaattaaaaaaaaaaaaggcttgtttactttggaatgtggagtaaagagagcaacaagagattgaagtcaaagaataggtaagtgagcactgtaaggatctgcagagacagacagaaaaagtctgcatggagagtaaattggg

SEQ ID NO: 340375 - DNA, 598 bp, Homo sapiens
gtcacttacaagatcaaatcatgaaagttattactttcctcccagtgtctttctctttctccagttttctagaagaagccagttcatggacagtcttgcgggatgacccatagtgtgaagaaaaataacttcctgctaagacacatgtgagggtgtttagattggatcctatagtcccagtcttattttcagagaccatatttatggctgacagcttaaccacaacctcatgagagacatcctctgtagccaaggcccaggctgtactttggcccactttagccacagctggagtggctgggacgcaggacaccaaatcctgaaactgcgcaaagcagcaagtctttgcgcctggctcataaaaccatttttttttttcctcctacrcttcctggcttgtgatgaaacaggctgctgtgaagttttatggtcattaaagtctcagcattgtaatattctaagcacgtggtaagaccatacattccagtgctcatttgtttgcatattatcaagtgtttaaatctgaccaatgagttataaacagaaatgatgtatgtcatgtcatttcttgttttgtgatttttattactggtattaa

SEQ ID NO: 340376 - DNA, 540 bp, Homo sapiens
catgctccacctctcctgactacattttgttttttggagagacagggtctcactatgttgccctagctggtatagaactcttgagctcaagtaatcctcctgccttggactccaaaaatgctgggattataggcatgagtcaccacacctgtcccacctgtttgccacttttctttgaagacctatttcatatatgcatctttcatagcatctgaagtattgtatcacacttttaatatccttgttattttattagactatgttccttaaagaytgaggcatgtctacttcattttgttatttatagcatcctgcacagtgtctgacacttattaaacatttgctgaattggtgatgaaattaattaatttaggggagcttacttagttccaactgctatcctaagtgactatatagatagatatggagtgaatattatataaatattaaacaaaagttctctgccttcaaggtggttattgtttagtggagaagagggcatgtatatgagtaaatagagtaacagtaaaaagtagtttg

SEQ ID NO: 340377 - DNA, 430 bp, Homo sapiens
ataagccctctgaaatagtgtgtgtgtatgtgtgtgtgtgtgtgtgtgtgtgtgtrtatatatatatatatatatatatacatctatatatacatatacatatatacatacttatatatatacacatatgtgtgtatatatatctgatatataatctctctgaaatagtgtatatactttattatatatacacatatgtgtgtgtatatatatctgatatatagatatcagagtttataaaaattttactaataagaaagagatgcaatacacaatttaaaaataattataaaaacacaatactttttaagttccacatacttaattgattttcatagaatgcttttgtcaattattgccaaatgctttcatatagcctatctctgtttgacattcaaacatgatttcacaaatggaattgcttcccaat

SEQ ID NO: 340378 - DNA, 659 bp, Homo sapiens
atctcaactcactgtagcttccacctcccagtttcaagtgattctcctgcctcagcctcctgagtagctgggattacaggkgccccccagcatgcccggctaatttttttgtatttttagtagttacggggtttcaccatgttgatcaggctggtctcgaactcctgaccttaagtgattcaccccccactcagcctcacaaagtgttgggattacagatgtgagtcaccaagcacctggcctatcttttcactttcatgcatgcctttctccattttgctcactgtcatagagtcacattaggctactttcaggccctcccaagctttagtgtctcctcactttgttggtttagtcaagacttctcctcacccttcacaataattattctttatacttcaggcttcagtttaaatgtcacttaccaagaggccttcagagacatctcattttaaattagattccctagttttactttctctttgtaacctgaacctttccttcatagcacttatcctttagtgattataattatatcattataaataggttttaaattgtaatgtttctctgtccctacccccaacttcccagaagctttcaaaggatagatatccatgcttgttctctcacccctcaaaatccagcacaacgcagtg

SEQ ID NO: 340379 - DNA, 659 bp, Homo sapiens
atctcaactcactgtagcttccacctcccagtttcaagtgattctcctgcctcagcctcctgagtagctgggattacaggggcccsccagcatgcccggctaatttttttgtatttttagtagttacggggtttcaccatgttgatcaggctggtctcgaactcctgaccttaagtgattcaccccccactcagcctcacaaagtgttgggattacagatgtgagtcaccaagcacctggcctatcttttcactttcatgcatgcctttctccattttgctcactgtcatagagtcacattaggctactttcaggccctcccaagctttagtgtctcctcactttgttggtttagtcaagacttctcctcacccttcacaataattattctttatacttcaggcttcagtttaaatgtcacttaccaagaggccttcagagacatctcattttaaattagattccctagttttactttctctttgtaacctgaacctttccttcatagcacttatcctttagtgattataattatatcattataaataggttttaaattgtaatgtttctctgtccctacccccaacttcccagaagctttcaaaggatagatatccatgcttgttctctcacccctcaaaatccagcacaacgcagtg

SEQ ID NO: 340380 - DNA, 627 bp, Homo sapiens
ttaagaagcaacaggattttgagcaggggaataataagacatactggtgaaacccatctggagaaaccatttcaaaatcttcaaaattcatactgccacctttacagcccaggcacactgaaattccaagaacagtattttaaagctcacagatggacaacaaccagctgaggagggaacagatccaagtatctaactctagaccactgctttttcactacataagtgaaaactaaacttcagttgttcatttgttaatatatcaaatgtgcgtcatggacaaattgtggtaaacacataaaatggaatatcactaagtcataaaaaagaatgaagtactgatacacaccacaacatgaatgaacattgtagtatatctgaaagcattatgctatgtaagaggctaataaaaaagaacaaaatcatgttcttcgcagcaacacagatgtagctggaaaccatttcytaagcaagctaatgtggaatcagaaaaatcaaataccacatttcccacttataaatgggagctaaacattgggtacacgtgttcataaaaatgagaacaacagacactggggaacacaagaaggcggagggaggatgtgggggaagagttaaggaaaacta

SEQ ID NO: 340381 - DNA, 551 bp, Homo sapiens
cttgtgtacacaggttgtctttatgcaccttgctcaatgtctagctcacagtagatgatcaatattttgagggaatactggaatgaatgaaaatgtctgcccaaatagcctcaaagtttatcatatgactgaatcactgacatygctcttccaatatcaaccgttctgacctatggatgccctaaattctaatttcaacttccaccatggggccatattcgaagaactcatataaaagtgaggcgacaatggatggatgctcagttgagggtacatggtgcttatggcagtcccaaagctgtatttaaaagggcacaccgcaggacaatgcatcaatatatatgacatcaagaataaaaatgagaatcccttctgcctttcatcttttaaaaactgtccttgatgttacatcaattttaacattgtaactcacctgttttttcagttatatctgaatcaggagtgtttgccctgctaacttccccttcagcattctcctcttcagcactaagagaaattggtgaataagggccaggctgggaaggttgagg

SEQ ID NO: 340382 - DNA, 588 bp, Homo sapiens
tttccctttgtaggctgtagattttttctgaaaaatgcttgcaagacattttttaaattcttgaaattaaaacaaattctgcaggatatttttactgtgtagtctctttcaattgattctgcctgaattcactaagctctttcacatgcasactaaatgaaagcccatgaacgctttctattatgtgtttcattatttcttttttttttggtatgtgtgtgtgagtatgtatgattgtgtacacctattattcaaagcttcattctcacttctctgaatcttatatttatcatttcttcatatttcattgttttttttttttttttttttgagatggagtcttgctctgtcaccctttaaaacagtggcatgatatgggtcactgcaacctttgcctcctgggttcaggcaattctcctgcctcagcctcctgagtagccagggctacaggcgtgtgccaccacgcctggctaattcattgatttcatctattgggtgcaacagatctttccttcatggctttcaaaatatactaactctaccaaaaccttgagagtggaaatctagcctcagggaccaaaagaaaat

SEQ ID NO: 340383 - DNA, 588 bp, Homo sapiens
tttccctttgtaggctgtagattttttctgaaaaatgcttgcaagacattttttaaattcttgaaattaaaacaaattctgcaggatatttttactgtgtagtctctttcaattgattctgcctgaattcactaagctctttcacatgcacactaaatgaaagcccatgaacgctttctattatgtktttcattatttcttttttttttggtatgtgtgtgtgagtatgtatgattgtgtacacctattattcaaagcttcattctcacttctctgaatcttatatttatcatttcttcatatttcattgttttttttttttttttttttgagatggagtcttgctctgtcaccctttaaaacagtggcatgatatgggtcactgcaacctttgcctcctgggttcaggcaattctcctgcctcagcctcctgagtagccagggctacaggcgtgtgccaccacgcctggctaattcattgatttcatctattgggtgcaacagatctttccttcatggctttcaaaatatactaactctaccaaaaccttgagagtggaaatctagcctcagggaccaaaagaaaat

SEQ ID NO: 340384 - DNA, 588 bp, Homo sapiens
tttccctttgtaggctgtagattttttctgaaaaatgcttgcaagacattttttaaattcttgaaattaaaacaaattctgcaggatatttttactgtgtagtctctttcaattgattctgcctgaattcactaagctctttcacatgcacactaaatgaaagcccatgaacgctttctattatgtgtttcattatttcttttttttttggtatgtgtgtgtgagtatgtatgattgtgtacacctattattcaaagcttcattctcacttctctgaatcttatatttatcatttcttcatatttcattgttttttttttttttttttttgagatggagtcttgctctgtcaccctttaaaacagtggcatgatatggstcactgcaacctttgcctcctgggttcaggcaattctcctgcctcagcctcctgagtagccagggctacaggcgtgtgccaccacgcctggctaattcattgatttcatctattgggtgcaacagatctttccttcatggctttcaaaatatactaactctaccaaaaccttgagagtggaaatctagcctcagggaccaaaagaaaat

SEQ ID NO: 340385 - DNA, 588 bp, Homo sapiens
tttccctttgtaggctgtagattttttctgaaaaatgcttgcaagacattttttaaattcttgaaattaaaacaaattctgcaggatatttttactgtgtagtctctttcaattgattctgcctgaattcactaagctctttcacatgcacactaaatgaaagcccatgaacgctttctattatgtgtttcattatttcttttttttttggtatgtgtgtgtgagtatgtatgattgtgtacacctattattcaaagcttcattctcacttctctgaatcttatatttatcatttcttcatatttcattgttttttttttttttttttttgagatggagtcttgctctgtcaccctttaaaacagtggcatgatatgggtcactgcaacctttgcctcctgggttcaggcaattctcctgcctcagcctcctgagtagccagggctacaggcgtgtgccaccacgcctggctaattcattgatttcatctattgggtgcaacagatctttccttcatggctttcaraatatactaactctaccaaaaccttgagagtggaaatctagcctcagggaccaaaagaaaat

SEQ ID NO: 340386 - DNA, 576 bp, Homo sapiens
tgattgatttccttcctagggctgtggaatataaattacatgaccatytgtctcttcaattttcaacatctctgtgtgtgcatgtgtgtacatgtgcacgtatgtataagagagatctgagattcaataaataataaacttgaggaatggagttcagaggcagaagaaccacagaaacaagtcagccttatgtgggtagcctcccctccgtttgttgtgtatcaattggggttaataacaattttttttttttttgagacctgtctcgctctgtcccctagggtgaagtgcagtggcatgatctctgctcactgcaagctccgcctcccgggttcacgccattctccggcctcagcctcctgagtagctgtgactacaggcgcccaccaccatacccggctattttttatgtatttttagtagagatggggtttcaccgtgttagccaggatggtctcgatctcctgatctcatgatccgcccacctcggcctctcaaagtgctgggattacaggcatgagccactgtgcctggcctataacaatactgattccaaacacctcccaggattactgg

SEQ ID NO: 340387 - DNA, 576 bp, Homo sapiens
tgattgatttccttcctagggctgtggaatataaattacatgaccatttgtctcttcaattttcaacatctctgtgtgtgcatgtgtgtacatgtgcacgtatgtataagagagatctgagattcaataaataataaacttgaggaatggagttcagaggcagaagaaccacagaaacaagtcagccttatgtgggtagcctcccctccgtttgttgtgtatcaattggggttaataacaattttttttttttttgagacctgtctcgctctgtcccctagggtgaagtgcagtggcatgatctctgctcactgcaagctccgcctcccgggttcacgccattctccggcctcagcctcctgagtagctgtgactacaggcgcccaccaccatacccggctattttttmtgtatttttagtagagatggggtttcaccgtgttagccaggatggtctcgatctcctgatctcatgatccgcccacctcggcctctcaaagtgctgggattacaggcatgagccactgtgcctggcctataacaatactgattccaaacacctcccaggattactgg

SEQ ID NO: 340388 - DNA, 620 bp, Homo sapiens
cccactttcaactaactttggttaaggaaatgccatttgtgtccctaggttgtgagtattaagcatcctttcatatctgtcaattttctccactttaaaatgaggataatactacctattatgttattgatttactaatcattcattcaacaaatatttattgagtgtctgccatgtgaaagctaccatgccaggtactggtggtatttgggaaatggagatgtttggtttctgcattctaatgggggaaatataatttaaataaatttcattagtccagttgggctgctataacaaaataccagagactgggtggcttaaacagaaattaatttctcgcagttstggagggggaagtccaaggtcgaggtgtcagccaatttgatgagggttgttttcctggcttgtagatggccaccttcgggctccatgctcacatgacctcttctttgtgcatgtgcaaaaaggaagagaggagagacagagaaagagagagagagagagagagagagagaaagcaggagctctctgttgtcttttcttataagaacactaatcctgtgggattaatgccctacttgtatgccctcatttaaccttaattacttctgtaatgaccc

SEQ ID NO: 340389 - DNA, 576 bp, Homo sapiens
tgattgatttccttcctagggctgtggaatataaattacatgaccatttgtctcttcaattttcaacatctctgtgtgtgcatgtgtgtacatgtgcacgtatgtataagagagatctgagattcaataaataataaacttgaggaatggagttcagaggcagaagaaccacagaaacaagtcagccttatgtgggtagcctcccctccgtttgttgtgtatcaattggggttaataacaattttttttttttttgagacctgtctcgctctgtcccctagggtgaagtgcagtggcatgatctctgctcactgcaagctccgcctcccgggttcacgccattctccggcctcagcctcctgagtagctgtgactacaggcgcccaccaccatacccggctattttttatgtatttttagtagagatggggtttcaccgtgttagccaggatggtctcgatctcctgatctcatgatccgcccacctcggcctctcaaagtgctgggattacaggcatgagccactgtgcctggcctataacaatactgattccaamcacctcccaggattactgg

SEQ ID NO: 340390 - DNA, 545 bp, Homo sapiens
aaagtagatactcaaaacaaagcaaattcactgtttatcacagtggtcagttacaaagctctttcatgtccattttctcgctgctgttcatgggtttgcagggcaggaactaaccaagcagcattagactcgtgctttatttctgctctgctgctctgggtggtctgaactgtatttatatgctatttacgaaggaagtgtaaataaagttatagaaagaaaataaaccctcctatataaagaaagctattttagaagcctggaatcacctcgctgaacataacagacctataagctagaatatatctttctattcactggtgcagatgcccgaggggtctactcacatcagttgtctagttcctgttcttctctgccctgagagtratggcacagcattaatttttaaagggctctgaaattcactgttctaatttggagattttccaccatttgactgtaggagggaggctttgctctaatgagccactgtgtggcatgtgtctgcattgcctgacgttccaacctttactcaatcctggctg

SEQ ID NO: 340391 - DNA, 587 bp, Homo sapiens
cctctctaaactggttattctagttagcagctcctctaacctgttatcaaggttcttagcttctttgcattgggttagaacaggctcctttagctcagcagagtttgtttttacccatcttctgaagcctacctctgtcaattggtccagctcatccttcgaccagttctgtgcccttgctgtagaggtgttgcaatcactcggaggagaaaagccactctggccttttgggatwttagagtgtcttcattgaatctttgtcaccttcatgagagtgtgtagattagatctttgaggctgctgaatcttggatgaggtgtttgtggggactccgttgttgttgttgatgctgaggtggtggctttctgtgtatttgcgtttctttcaaagatcaggagcctcttttgtagggctgctgcagattgctgagggttcacttacagccatattcatctggttcgctcccatgcctgaagataccactcaaggaggctggagaacagcaaaggtaggtgcctgcttcttcctctgggatctctgacttcgaggggtaccaacctgatctcagtagcatcactcctgtgtag

SEQ ID NO: 340392 - DNA, 587 bp, Homo sapiens
cctctctaaactggttattctagttagcagctcctctaacctgttatcaaggttcttagcttctttgcattgggttagaacaggctcctttagctcagcagagtttgtttttacccatcttctgaagcctacctctgtcaattggtccagctcatccttcgaccagttctgtgcccttgctgtagaggtgttgcaatcactcggaggagaaaagccactctggccttttgggatattagagtktcttcattgaatctttgtcaccttcatgagagtgtgtagattagatctttgaggctgctgaatcttggatgaggtgtttgtggggactccgttgttgttgttgatgctgaggtggtggctttctgtgtatttgcgtttctttcaaagatcaggagcctcttttgtagggctgctgcagattgctgagggttcacttacagccatattcatctggttcgctcccatgcctgaagataccactcaaggaggctggagaacagcaaaggtaggtgcctgcttcttcctctgggatctctgacttcgaggggtaccaacctgatctcagtagcatcactcctgtgtag

SEQ ID NO: 340393 - DNA, 571 bp, Homo sapiens
tggactgctgtaaacttaaccaagggtgaatctaatttactcttatactagatttgggatttttattggaacagatcaattttagtactttatatgtggcaatagtctggaaaatatgttcttttgtccttcttgatcttagtagatttttaaaaacattttatgtgtatgtggaaagacagtattagcaggagcacaggaaaagtgtgcaaacacacatcttctcctaggycttaggtatatgtcaattcctctgcactccaacagagtatagtccacaaaggacttgatcaactttccattctgggaaatgctatgataatccaataaattgatggcattgtgctaactgaacctagtgaatagaaagtggcaagtgccctgaatgtcttagcaagctacaacaataacatagatgagagcaaaacttcagggtccaacagtctctggcattctggggcatccattctaaggtaaagtttatattatacactttgcataacctactactaggaaatagatacaagattttgtaaatatatttagctgttggaaacagcatctgtagctt

SEQ ID NO: 340394 - DNA, 527 bp, Homo sapiens
tatcttacagatttcatacttgtgagttctcacaattgtgtgaatgaatttatcaaaatttgtctctgtctctcccctccctttctctctctcttctccctccctctctctctctctctctcccctcctctgcctccatagatagatagatatcttataggctctgttgcttgggagatccctgactcatacagtaaccattacaacactaatgtctaggcgtacactatagaagaacamaagaaaaagaaaaagaaaaaagtggatactagaaacagaatccaagatgtataatatactagagttatcacatgtgtatttaaaaataaatgggaatactatgttctccaatgtaaaggatgaataaaaaattttaccatagaatagaaataataaagaaccaaatacaaatactagaactggaaaggaagtaatggctattaaaaacacaatagattatttgggcatgagattgatcacaacataagaggattcctgtactagaagccagatgagtaaaaatttcc

SEQ ID NO: 340395 - DNA, 611 bp, Homo sapiens
tcaacttaaaaaatctcaatttcatctttaaaaaaaatactattctgtttcagtaggtattagataaaagaaatttaaaataaatgtgacattttgcaactatataaatgctacaactggaatgacatttaaggggtccagaacctggctattttctcaggggaccttgtgtctgtaattcagacacactgatgccagactgtgatgctatggtagtttcctagacctatgacctgcctataaatctatcctaaaacagaggcraatgatcagtttcccttgactcagtacttatttcttatggaagagaaggaagtcaggctgaagatagggctgaagtggcataatatcaaaaccagcatagggataaaaacttcagagtttttaaagcaaattaagacaaataatattctttaaagtcatttgtagataatgatcaaacaaaaaaggatgctactattaaatagtgatcagggagctctcaagtttagttttccaaagatttttaccttcctaacatgaatgtcagcatctgcttgtgcataataaatgtattacatgtaaaaggccagacaaaagtcaatactaaggtgttaaagtttaattactta

SEQ ID NO: 340396 - DNA, 557 bp, Homo sapiens
atcccagtgctttgggaggctgaggtggacagatcacttaagcccaggagttcgagaccagcatggatagcatagcaaaaccccatctctacaaaaaacaattagcaggcatggtggcaggcacttgtagtcccagctacttgggagactgaggtgcgaggatcacttgagtttgcagtgagctgggattgtgtcactgtactccagcctgggtgacagagtgagaccctgtcttaaaaaaaaaaaaaagaaaggctctatctccaaatacggccacatgggagtcatggcttcaacataaaaatttggkggggcagcataattcagtctatgacattaattatgtaagaaaagacatcaaaagagtaatgtgacatcttagatgcacttaactaatgaaaaatcactctaaagagagtgagagaagggaaattagaaagaaataaaaatataaatatataaaaagttttcattatgtcacattttagaaatatatttttaagtttggaggattatgtgtgaatgttaaacagcatttatgctttcctaaataaatt

SEQ ID NO: 340397 - DNA, 557 bp, Homo sapiens
atcccagtgctttgggaggctgaggtggacagatcacttaagcccaggagttcgagaccagcatggatagcatagcaaaaccccatctctacaaaaaacaattagcaggcatggtggcaggcacttgtagtcccagctacttgggagactgaggtgcgaggatcacttgagtttgcagtgagctgggattgtgtcactgtactccagcctgggtgacagagtgagaccctgtcttaaaaaaaaaaaaaagaaaggctctatctccaaatacggccacatgggagtcatggcttcaacataaaaatttgggggggcagcataattcagtctatgacattaattatgtaagaaaagacatcaaaagagtaatgtgacatcttagatgcamttaactaatgaaaaatcactctaaagagagtgagagaagggaaattagaaagaaataaaaatataaatatataaaaagttttcattatgtcacattttagaaatatatttttaagtttggaggattatgtgtgaatgttaaacagcatttatgctttcctaaataaatt

SEQ ID NO: 340398 - DNA, 571 bp, Homo sapiens
gatctaaacttaactgagttatttgactgctaaaccaaaaaatcaatcttatccagaggattttgacaggacctagagtctcatattcaaaatttccaggatgcaatccaaaattactcaacacacaaagaataaggatgtgattaattctcaaagaaatagacagatttgaaattaccagaaaaaactttaaagcagatattataaccatcctccatgagacaaaggtgaacatttttgaaataaatagagacattctcaggagaaaaaaaaacagaaaggataatgagcaccaaatggaaattttagaactgaaaaacataatatctgaaattaaaagtcccatagtatggactcagtagcagaacagagataacagaagagtcagtgaagctgaagatagatgaatatatatagtccaatttgatcaacaaggggagacactatcagattggataaaactatacgatccaactgtsagctgtctacaagatacccactttaaatataataatatagttatattaaaagtaaaatgatggtaaaagatataccatgaaaacactaaaca

SEQ ID NO: 340399 - DNA, 602 bp, Homo sapiens
ggattacaggcatgagccactgcgccaggcctcaagctttagacattctgactccaaaacccaagtcttctgggattcataagcagaattctcattccgcagccaaaattaatttacaggccaaaaacattaactttaaacttatctttctttttttaaaaggataaaaacattattaatctctaaagcaagcatcctctgtgagtagaaactttaaattgcccttttaaagtttcaaaatagttttatcaaatataactcttaattcaaaaccaaaaactgtttaaaaatgaagtcaaacaaaactacaacaggtcartatctatgtgttaaagagtgattgtagggatagtgcttgtctttttacctttagccatgtcacactccttaatcattttgagaaagttggaaatttccctatctagtcgctgttggcatgactgtgctttctgcaaaaaaagaaaagacaaaattaaaacaaagtaataaaagattttacattacttatgctttagtgtttctatcaaaactttcagtacatagattgatataccataacagagacatatgccttaaagaaaagaaaaaggtgagagaaaatt

SEQ ID NO: 340400 - DNA, 586 bp, Homo sapiens
atttacattctttataaaaaggttggctaaacttactacttctggcattcaaatatatgactgtttatcagctttctgagaattataagaaatattttaattcctctaaaaatagaaatttagaattgttattcagtccacattattcaacatatattcctaaaattttcagtttattttatatatagtccagagatatagctacaaattaattttggaagcagctaagacataagttataaatagaatgaagtttatgtaaactgaagctggatttcattgtgataacttttggggaatttttgaacaaaatacataaggttttaattagcatggtgtgtgtgtgtgtgtgtgtgtgtgtgtgtgtgttaggcttgtcakgcttgatgtgactcaagatctatcctgataagtttttgtatctcacgatggtaccaagactataatatgcatgtgactgtgtgtgtcttattccgccccatattcccaatatagaatgcagtgcctggcttgtactctgattaattttgcatgagttatataggcagacataattttcctttcattttaacttcagagtcttaag

SEQ ID NO: 340401 - DNA, 606 bp, Homo sapiens
ctgtgggttactctactttctttaattaatatgaactatttaggtaaagcatgaaaacatgagccccaaaatgttacctttaagatgatagaaaatgttaagatattttataagaattcactttattaaaatattaggatattttaaaaaaccattttcctgtttttttaatgtggtagtacattttatataataatactcaaatatgaaaaatgtgtaaacaccatgtactgtactgggaaatgtagctataaaacaattgtggcatgtaagtaaaatcatgttacraaaactcaaattttgcctagggaaattgattagtaagaaatatgccaaaatgtttatagtggtcataaaatgatgagggtaataagtatatgtattttttgcctgtttatgttttttagattttatttaagcattttttgctatgaaaacattctaaaagaatgtaggaaatggacgtcatggcccaaaggaaagatgaaattcctaggacagcataacgtgtagcaacacaggatatcacttcatattttacaggcactgtcagtctagaagttagaacagcacagtttttcagcctcccttagtgcaagactgaag

SEQ ID NO: 340402 - DNA, 504 bp, Homo sapiens
tcaaactgcacaagaaaaagggcttagttgactttacaggtaatatgatttgtcagctgatgtggtcttagcttgggaaacagaagtagagactgaattgagtgattctgctctaatgagagcaccttacccacatataataacatttgtggatagagtgttaaatggatcattggcaaattactggaagtaccttgagtaacccactataagtagaccataagaccataaatagatcagaaaccatgtcataggggctgggcgcagtggctcatgcctgtaatcccagcactttgggaggctgaggtgggcagatcacttgaggtcagaagtttgagaccagcctgcccaacatggtgaaaccccatctctactaaaaatacaaaaattagctgggcgtartagtggacacctgtaatcccagcaactcgggaggctgaggcagaagaatcacttgaacccgggaggcggaagttgcagtgagctgattgcaccactgcactc

SEQ ID NO: 340403 - DNA, 575 bp, Homo sapiens
ttttaaaatataattgaacttttttttaattatcagaattttgtgtctggtgtttctggagcattattcttctgtttactatttatttctcagagctgcttagttttctaataccctttgagtttaagattgtttgataagaacaaactattagattgagactagaactgtcaacaaagacakaaaattttattcacttgctgagacaaagtgagtcattttagattaggtaaaccaataaacctaggcaaaatgtactctataatagaatgtggatttcttcaatggtactttatccacaaaaaacgacttaggtatttaccatttatttaatacatgctttctgcaagaaacctcaagcattgaggacatatttctgctcccagatgtttttctccatggaaaaactcatgcttttctgagcactatactgggtattcctgaattacttttcaaagcggggcagtgttataaaactttaaatgtcaccttgattcatgaggaaaaaaatgatttatagatgatggtgtgtcatgagtactacatggtgctttaaatgagtacacaaataataa

SEQ ID NO: 340404 - DNA, 607 bp, Homo sapiens
cactatactgggtattcctgaattacttttcaaagcggggcagtgttataaaactttaaatgtcaccttgattcatgaggaaaaaaatgatttatagatgatggtgtgtcatgagtactacatggtgctttaaatgagtacacaaataataaataagattcatgtttgrcattacatagctattaacaaataggttaaatgtcaaaagaattaacttctcttattgcctaagagagagaagatataaaaatgtctggttggattttatttatttttggatttttaataggcttaaagctcaaaactagattaaatcaataaaaattggtcattgcttccccttaagtacctgttgtcatattttataaattagcgggatcccccagaagaggaaataccattttgtactctaaaatcctttccagctgctattgaacataccatacagtgggcaagagataaggtaaaagttcctttttaaatttattttctttgaagtgagaaagaagatatttctgactttaaacagacttctatttgtaattttttttttcttttctctgttacagtttgaaagttccttttcccacaaaccttcattgtttaa

SEQ ID NO: 340405 - DNA, 546 bp, Homo sapiens
acatggaattgtcgatatatgagcatgttcgactcacaaaacagcaattcgtayggttcgagctaataaagatatgataattatgatagaagggctacaaataataaaagggcttttattaagccctttggaaagaaaaaattgaggtaagttctagttaaaatttcatgagggaacaataatctccaagacttattactcttatagtgaaggcaactttaaagatgttttctcactttcttttaatcttttgctaacaaggcccactttttagtatcaaatattcatagcacttatagtgagtacatatattatagtactaataacttacagctaggaaaatatgaggataacttgtaagataagaaatcagagttaaaattttgtatgctatctcttaccattccccttctcaaacagaaaagaaaagaaaggttaaagaagaaggaagggaaaaggagcttgaggtgaaaaaagaaaagcataaaacacatgagttgacacttcaaacttaggctaacttttggtgagggatgtgtatatgtt

SEQ ID NO: 340406 - DNA, 546 bp, Homo sapiens
acatggaattgtcgatatatgagcatgttcgactcacaaaacagcaattcgtacggttcgagctaataaagatatgataattatgatagaagggctacaaataataaaagggcttttattaagccctttggaaagaaaaaattgaggtaagttctagttaaaatttcatgagggaacaataatctccaagacttattactcttatagtgaaggcaactttaaagatgttttctcactttcttttaatcttttgctaacaaggcccactttttagtatcaaatattcatagcacttatagtgagtacatatattatagtactaataacttacagctaggaaaatatgaggataacttgtaagataagaaatcagagttaaaattttgtatgctatctcttaccattccccttctcaaacagaaaagaaaagaaaggttaaagaagaaggaagggaaaaggagcttgaggtgaaaaaagaaaarcataaaacacatgagttgacacttcaaacttaggctaacttttggtgagggatgtgtatatgtt

SEQ ID NO: 340407 - DNA, 496 bp, Homo sapiens
ctcttcactatcatatctgcaaatcatccggggagcttgcttaaaatatargttttgagttgggggatgggggtccgatctccttagtacaggcgattcctattacacggaagttcagaccagtgcttttcaaggtcaatcagtaatctcccaggaaaagtctccgagtatatcttatttaatacaagttgttctctttatgttattaccgtggttactgggtgacttttattggctcattttgaatgctgattcaagaacaaccttagcaaacaccaggtgggatccttgactttgtcagagggcaggagtatctggtttcgtggcgcttgtatgctaaacaagtgaacacgtctttttaaattccaattcagaaaactaggtcttggccagacgcaagcaaaaatattaacaaagtgtaagacttagcctgtcttacaatttctctttacttcagccactggatgtgaagaatgttatttataaccacaaccct

SEQ ID NO: 340408 - DNA, 596 bp, Homo sapiens
aatgcacaaaagagaaattaattttgtaaaatttattatggcatttgaaaacattctacattacacaggttatttttctgtctctttcattagatgttggcttctaataatgatgttctaattattagatgggctactatatccagatccagaatgtttatatttaatcaagttactggctcataaagtctcttatagtgttccaaggtaggtaagcatttgccactaaaatactatatcttattcctggaagaactgaaacatacaatcaaaatttgaaattaatatgaataaataaacctcagaatccctttattgttattctcatgtttaagcctttagaagtcctgctttgtgaatatgtttttgtcttttcagaaaaattaaataatggctttgcatgctctggagatcattttrttcctttccaattataactgcatgctacagcaagataaaaagtgggagaaattgaagctatcacttggtattaagcaatatatgtgcagatgtcttgtcaaaaattttcactttttaactaagtttagttatcagaatcagaaagaaaataatgaaaagtaaaaaacatgagtcaa

SEQ ID NO: 340409 - DNA, 612 bp, Homo sapiens
tttgcggtagtatatttctaagatattttaattgaatacatttatttttgcaactcatacctgaagaatacaactttaattttaaccattgtgtgaaatacttatagcttatcaatggctggtatgaatccaatacaatctttattatgagtaaattttttattactattgatagagttaagccacattttctttttcttttcttttcttttctttttctgagactgagtcttgctatgtcgcccagactggagtgcagtggcatgatctcagctcatttccacctctgcctcccaggytcatgccattctcccgcctcagcctcctgagtagctgggactacaggtgctcaccaccacacctggctaattttttgtatttttagtagatatgagatttcaccatgttggtcaggctggtcttgaactccttaccttaaatgatccgtccgccttggcctcccaaagcgctgggatttacaggcattagccaccacacccagacatgcagcattttcagtggagaaaatgcacattgtaataccacaactccagagattatcagacatacaatatggagggagcttcctactcctttgcctgagaattactg

SEQ ID NO: 340410 - DNA, 612 bp, Homo sapiens
tttgcggtagtatatttctaagatattttaattgaatacatttatttttgcaactcatacctgaagaatacaactttaattttaaccattgtgtgaaatacttatagcttatcaatggctggtatgaatccaatacaatctttattatgagtaaattttttattactattgatagagttaagccacattttctttttcttttcttttcttttctttttctgagactgagtcttgctatgtcgcccagactggagtgcagtggcatgatctcagctcatttccacctctgcctcccaggctcatgccattctcccgcctcagcctcctgagtagctgggactacaggtgctcaccaccacamctggctaattttttgtatttttagtagatatgagatttcaccatgttggtcaggctggtcttgaactccttaccttaaatgatccgtccgccttggcctcccaaagcgctgggatttacaggcattagccaccacacccagacatgcagcattttcagtggagaaaatgcacattgtaataccacaactccagagattatcagacatacaatatggagggagcttcctactcctttgcctgagaattactg

SEQ ID NO: 340411 - DNA, 612 bp, Homo sapiens
tttgcggtagtatatttctaagatattttaattgaatacatttatttttgcaactcatacctgaagaatacaactttaattttaaccattgtgtgaaatacttatagcttatcaatggctggtatgaatccaatacaatctttattatgagtaaattttttattactattgatagagttaagccacattttctttttcttttcttttcttttctttttctgagactgagtcttgctatgtcgcccagactggagtgcagtggcatgatctcagctcatttccacctctgcctcccaggctcatgccattctcccgcctcagcctcctgagtagctgggactacaggtgctcaccaccacacctgkctaattttttgtatttttagtagatatgagatttcaccatgttggtcaggctggtcttgaactccttaccttaaatgatccgtccgccttggcctcccaaagcgctgggatttacaggcattagccaccacacccagacatgcagcattttcagtggagaaaatgcacattgtaataccacaactccagagattatcagacatacaatatggagggagcttcctactcctttgcctgagaattactg

SEQ ID NO: 340412 - DNA, 602 bp, Homo sapiens
ggtcactggtgctttatttagttcattttgtaaggtcatatttacctgtatgttcctaatacttatgtttgttgatgtctgggcattaaagagttaggtacttaatctagtcttcacagtatgtgtttgtttgtacccatccttcttggaaaggttttcccagtcttcaaaaaraattgagtattctgatctaagtcgttggtcactgcagccatatatacattagggggcacatgggcccaggaacactgtgactcttgaagacttgtagagtactgccttgatggtcttgggtaagatctaaaagaatgtcttggattaccaggcagagactcttgttctcttcccttactttccccccaacaaatggagtctctccccacctcctctctctctctctgtgtgtgtgtgctgagctgcctggagctgggggaggggtggacataagcactcctgtgccacaaccaccatgactgtgctgggtcatacctggagccagcacagcactgagtcttggccaatgcccatggtgaccattgtctgggtaccgctgatgttcactcaaggctcaagggctcatgatttggcaaatggctaatcca

SEQ ID NO: 340413 - DNA, 497 bp, Homo sapiens
atgttttctgtgatggctctactactttacatttccactagcagtggaccagtgttcccctttctctgcatccttgctagcttttttttttttaatagccattctaagtggggtgagagagtatctcattgtggttaattcacatttcccttgtatacctgctggccatttgtatgtcatcttctgggaaatgtctattcaggtcttttgcccatttttaaattagattatttatttatttgctactgaggtgtttgctttccctrtatatgctggttattaatctctttttggatggataatttgcaaatatttttcccattctgtaggttgtctcttcatttttagcttgatgtaatcctatttacctattttggcttttgttgcctgtgcttttgaggtcttgcccagaaaactttgcccaaaccactgttctgaagtgtttcccagtgttttcttctagtcatttcatggtttcaggccttacatttaagtct

SEQ ID NO: 340414 - DNA, 519 bp, Homo sapiens
tcttctggaattattgatgttctatttttttagacatgagctgtcttttctagtattaaaaaatagctctattgagattatttcttttcacatgtgagacttctgtatttactataaacactcttttctcacaaagattctacattttatttttctctttacagggagaagtctaatatcacccacacattcctgtcttctttccttcaactgtgccctcatactggctccttgatctgagttatatctatcctattcaagtaggagcctctgaaactctctctcaatccctggacaagatcgtaagtaaaaataacatttcatcctaggaggcacrgagagattagagccacccttaaggatacaatggatatggagctggtggtccccatcatgtctccattcagttcaccaacatagaccccaaagaaagtcaagggatcctggaggatagctataaatgacagaaagtaagataaggtatttttgccggaacaaattattaaataatttgacctc

SEQ ID NO: 340415 - DNA, 546 bp, Homo sapiens
gcagatcgcttgagcccaggagttcaagaccagtctggaaaacatagtaagaccccatctctactaaaaatacaaaaaaatttagctgggcatggtgatgcatgcctgtaatccagctactcgggaggctggagtgggagaatcgcttgagcccacgagacagaggttggagtgagctgtgattgctcccctgcattccagtctgggtgacactgagaccctatcttaaagaawaaaaaaagaacaaatttgtgttttgatacattggaaaggctggaaactgagaatatggtttcattataagtctctgtaatagctgagggaaccattaaagtgccaactagaatttttactattattcctgaattggctgagacctaagaacagaaagtgttcctctatctaaagaaagcatcaatcagcctacagttggagaaagccacctcacatgtgtgccaactgaatgttagccatactcccaagaatattctaccaccttcctttctagtcataataaaaagggttagagagatacgcgtcgttggc

SEQ ID NO: 340416 - DNA, 546 bp, Homo sapiens
gcagatcgcttgagcccaggagttcaagaccagtctggaaaacatagtaagaccccatctctactaaaaatacaaaaaaatttagctgggcatggtgatgcatgcctgtaatccagctactcgggaggctggagtgggagaatcgcttgagcccacgagacagaggttggagtgagctgtgattgctcccctgcattccagtctgggtgacactgagaccctatcttaaagaaaaaaaaaagaacaaatttgtgttttgatacattggaaaggctggaaactgagaatatggtttcattataagtctctgtaatagctgagggaaccattaaagtgccaactagaatttttactattattcctgaattggctgagacctaagaacagaaagtgttcctctatctaaagaaagcatcaatcagcctacagttggagaaagccacctcacatgtgtgccaactgaatgttagccrtactcccaagaatattctaccaccttcctttctagtcataataaaaagggttagagagatacgcgtcgttggc

SEQ ID NO: 340417 - DNA, 547 bp, Homo sapiens
atatatgactgattgaagtttgtccttagaatcccccagacaaaagttctatcttcatgttttcagcctagaaaagaaggctttaaccatatccttactcaaatagagtattttaggttctttgagagggaggrctagggcctgtatgcaggttatcctcataatctacttttgtgcagaggtggaataatgatctttggtatagacaaacacatcaggattttggatgttaaaaaaaacagaaagtttgctcactggcatgtggtaggaggctaaaatggaaatacttgccatccatttctcagtggaaatacagctgtggtaattgatattccaaaggaatcatttatgccagtgtatatataagtgagggtaatgatataatttgtcacttaaacgaagccactttgagaatgaaagtgtgtattattaattatgccaggtcaacagaaataaactagaattgtcctgcataaacaaatgtatggttatcctacacataggatggactgataacgagcagttgtaggtcagtataaccatactg

SEQ ID NO: 340418 - DNA, 369 bp, Homo sapiens
aaagcagttattgctagaatgatgtttttactatatatttataaacatagaattaatgagaaaaataaaacacttcatactcaacatacattgtaaaatagttgtgagagatcatactaacttatactgttagtaattgtgaatggaagtgaaggtcacttaaaatctgtagatcccatttttaataacaagtttatcccttgtgatcaacttagataaatttttatataaggagatatttgcttttctgcataataacttttagttatagctaggtactaaatttctcagaaatgaactgcttttgtctttaaaatcttattcaaaataatacacaktatttaaacaataaattgctctgtttaaatc

SEQ ID NO: 340419 - DNA, 526 bp, Homo sapiens
aactgcataaaatgaactgaagtacatactgcactgctataataatttcataatctctgttctattacaatgagcttgtgttgcaagtatctgcttaaaatgacagtaatcatctcctcatgagcagttcatctctccagtaaattatgtatcatagtaaaaagtgatcttgcttatttttcatcaygtttagggcaaaaccgtaagccttgagtaatatcatgggacccagatgaagtgccactagtgatgctgaaagcgcttccaagaagcagagaaaagtcatgatatcacaagaaaaagttgaattgcttcatatgtatagtaagctgaggtctgcagctgtagttgccccacatttcagacagaaaattcatcttataaatggattatataaacttatggtattaataaatacactgaggtattgtagatgtattttctcttccttatgattttcttagcagcattttcttttctttagcttactttattgtaagaatatagtatataatgcatatataaa

SEQ ID NO: 340420 - DNA, 550 bp, Homo sapiens
aatactctcaagcaataaaccatatatgtatactatttccctcatatgttagcatttcttacaagaggcaagttgcaaaggaaacaccttaaagatggcttggcatttttaagcactcaaaggaaattcaactgctgagaggctggaagaaaactcatattacctgtagtttgaaaacaaatcattcccattcctcatacataaaatttacagtcggtattcagatgasagtaaattattcagtagctgtcaggattttcatttctcaaaaacataaaataaattgccttggttgttgtcttttagctctttttcttacagttataaaaacaattatataggagaagcaatttgtattcaagatgatttaaaaatgatattgttattatactaggcaaggatgttatttacaggatggaggtcagcagagttttacttgcattttgctttaaataccattgaaataaatatactattctacagttaagaaataaattaatatgtacattttgtagggtgttttaggattcattaatttttccccaaggac

SEQ ID NO: 340421 - DNA, 512 bp, Homo sapiens
aaaaccatacaaaggatctatgaaaccaaaagttggttctatgaaaagacaaacaagattaataaaccacaagctagattaacaaagaasagagacgatccaaatatgcacaaccagaaataacaaagatgacattacagctgataccacaggaatacaaaagatcctcagaaactacagtgaacacctgtatccacacaaactaaaaatggataaattcctggaaacacacaaccacccaaacttaaaccaggaagaaactgaaatcatgagcagacaaataatgagttacaaaactaacaaatcagtaataaaaaattggccaaccaaaaaaatccctgaaccagagaaattcacagctgaattctactagacacacaaaaaagagctggtaccaatcctactgaaactattgtaaaaattcaaggaggagtttcctccctctgtgaaactagcatcatcctgataccaaaatctggcagtaacataacaaaaaaagaaaactacgccaa

SEQ ID NO: 340422 - DNA, 575 bp, Homo sapiens
tcattagagaacatttaatagttatttaataataatcataaaagtagaaccctgaagaataaatgggtctttatataaaacataaatatctaaaaataagaaaatagttatgtaatctgtattgatggatatatatatatatatataaaatggctgaggcatggaggggatttaattaatggccattatatatatatatatatgtatatatccataaacacagatttataattattgctttatgaatttatcttttaaactggacaggagattttaaagagttacaaacaaagcacacatattgtgaattctctcagtttttatctgtaaatttcttacttaattatggatayatatatatatataatggttaagacatggaggggatttaattaatggcttttgattaaaagggcagtaactagaaatttaaaagtaatgtgaaaaataaacacacacaaaaaccttataaaccattatgaataccatgggaacaaaataaagtattgggaaaaatggcaatgaggaggtagaatgcttttatctgaaaattagctgaacatttaaggtatatg

SEQ ID NO: 340423 - DNA, 624 bp, Homo sapiens
atgttcaaaaaatattaaacatcttttttcatgcatgattcataaatctacactaaactgacataaagcctttttacaaaatgcagggtaaaataataagtaattacaagcctatactatgtataatgtattttttaaaawaacgttatcctgagttctggacacataaatacatcaaaatgttttaggttgcctagctttcacttgcatgtatttttttcatctagccacaactgcatatttgctaggcaacagaaagaagaaagtcttttttaaaacataaatctgtgaattctcctcaagagagacataggcaatatttgctgcatcacttagggagtgaaaggaaagagggaaaaaatcagattagcttctttgcagctgtgtttcggtattcaagaccacacctggacagggtaaagcttctctgattataaacctttggcaaaaagtaaaagttactgcctgaaaaagcagactatttctttggggattccttttggctatttcagtatttaacagatgtactagcttaagctttatactttgaaaatagaatggagcatggagaagcactgcatcctcctattgaaaagtctcacggtaaattggggtgtttaaaat

SEQ ID NO: 340424 - DNA, 488 bp, Homo sapiens
ctcctcctaatctgatatcatgagtcaggtcaacaatcttggtggataagcagtcattcaactggaaaggagatgtcagtcttctcttcttccacagtttagaagttattttcttgggatttttcagttgagagctaaggaatgcctcctattcacaaacatgaatatcctccaaaaggatgcctttatctcccttaaatttgtgatatcaatgctgccaatgcagtgtagtatcatccaaaggcatgatgagtctcatgcctggaagtggcccttcttcaaactcaatttcagggaaactgaaaacattgctttcaatagtttccctggagactgggattaaatctttscttgagcacttacacagataaagtagctaacctctgtggtttgtggcatagggatatttctcatttgtgaattaaggataacaaaagtacctaccatatagtgttgtgagaattaactatgtaaacaaacacacctca

SEQ ID NO: 340425 - DNA, 582 bp, Homo sapiens
aaataatcagtgtcaaggagactagttgggaggatgtttcaataatttaaggtaaaaattacaatggcatggatgaagaccatggcaaaagaaacaaagcagagaacatgttttgcagatgtttaatgtgaactggtgactaactgcatgtggaaggaacacgagagaaaataggattgagttgaatatgggattctactttgagagatttgatatagtgcaacatgacatcaaaacataaggtcgacatgggaatataaaatgagttatgttctagatattattaagccattacataactaacatatgtcttagtcttttgcggatggtaaaaacaaaatactgtaaaccgggtagcttacaaacaaacaaaaaaagtatttctcaatcgttttggtggctgggaaatccaagatcaaggcaaccagcagatttagtgtctgatgagggcccatttcctggttcatagacaargccttcttgctctgtccttacatggtggatggagcaagggtctctctggagcctcttctaccgggcactaatcccatgcataaaggctttgtcctcatgatgcaatta

SEQ ID NO: 340426 - DNA, 582 bp, Homo sapiens
aaataatcagtgtcaaggagactagttgggaggatgtttcaataatttaaggtaaaaattacaatggcatggatgaagaccatggcaaaagaaacaaagcagagaacatgttttgcagatgtttaatgtgaactggtgactaactgcatgtggaaggaacacgagagaaaataggattgagttgaatatgggattctactttgagagatttgatatagtgcaacatgacatcaaaacataaggtcgacatgggaatataaaatgagttatgttctagatattattaagccattacataactaacatatgtcttagtcttttgcggatggtaaaaacaaaatactgtaaaccgggtagcttacaaacaaacaaaaaaagtatttctcaatcgttttggtggctgggaaatccaagatcaaggcaaccagcagatttagtgtctgatgagggcccatttcctggttcatagacaaggccttcttgctctgwccttacatggtggatggagcaagggtctctctggagcctcttctaccgggcactaatcccatgcataaaggctttgtcctcatgatgcaatta

SEQ ID NO: 340427 - DNA, 592 bp, Homo sapiens
tatttttgatgacaactctggatagaaaataatcagtgtcaaggagactagttgggaggatgtttcaataatttaaggtaaaaattacaatggcatggatgaagaccatggcaaaagaaacaaagcagagaacatgttttgcagatgtttaatgtgaactggtgactaactgcatgtggaaggaacacgagagaaaataggattgagttgaatatgggattctactttgagagatttgatatagtgcaacatgacatcaaaacataaggtcgacatgggaatataaaatgagttatgttctagatattattaagccattacataactaacatatgtcttagtcttttgcggatggtaaaaacaaaatactgtaaaccgggtagcttacaaacaaacaaaaaaagtatttctcaatcgttttggtggctgggaaatccaagatcaaggcaaccagcagatttagtgtctgatgagggcccatttcctggttcatagacaaggccttcttgctctgtccttacatggtggatggagcaagggtctctctggagcctcttctaccrggcactaatcccatgcataaaggctttgt

SEQ ID NO: 340428 - DNA, 577 bp, Homo sapiens
acatatcaatatccatataccttataaaatactgtggaacattcaatttcctgtaaaatataatgcaactcacatatcaccatcatgattctagcaaatgaaactagaatgattacttagagtaacctacactggaatgaagagggagaaactgaaaaacaacaaattaggagatactttctatgaggttacaacattgatattatttttcctctacaaattccttctttctagtcttgaccatcactgtttctacacattctccctacaaaaaaaaagattaggaaaaaatgttatttgctattgtttaagcataactcaagtraaaaggaaaaagaaaaaccaaataacccaactcaaattcatctttcttcagatttatattacaatctctcttttctgaaaattatgccttaagatttagaccttagtggcttccttcatgtgacatgatggtacattgcaagtggaaattgacagaatcacagaattagaatttagaatctaacataaagattcttctaaaatgtgcccattatatgtacttccttagccatggaatttgatgttcaaattt

SEQ ID NO: 340429 - DNA, 577 bp, Homo sapiens
acatatcaatatccatataccttataaaatactgtggaacattcaatttcctgtaaaatataatgcaactcacatatcaccatcatgattctagcaaatgaaactagaatgattacttagagtaacctacactggaatgaagagggagaaactgaaaaacaacaaattaggagatactttctatgaggttacaacattgatattatttttcctctacaaattccttctttctagtcttgaccatcactgtttctacacattctccctacaaaaaaaaagattaggaaaaaatgttatttgctattgtttaagcataactcaagtgaaaaggaaaaagaaaaaccaaataacccaactcaaattcatctttcttcagatttatattacaatctctcttttctgaaaattatgccttaagatttagaccttagtggcttccttcatgtgacatgatggyacattgcaagtggaaattgacagaatcacagaattagaatttagaatctaacataaagattcttctaaaatgtgcccattatatgtacttccttagccatggaatttgatgttcaaattt

SEQ ID NO: 340430 - DNA, 606 bp, Homo sapiens
gccctaagacaccctggaataatattttttctaatttttccttttttcttatctctcttaacaaagtttgtgttggctattgaaagaaatgaagaaaaaaatactggtttcaaaagatattttaagacagaactaaagagataagcaatatcaagtgatgatcttccatcacttcattcttgttttccaggaatttcaacatcatttgcatgtgacagawtggatacacactataaactgagtcacatcagtcttttttgttagaaaaaaagtttacttaaaatatagacatcataagttatgggaaatataaccctaaactgaaaattggggattccttcgtgtaaattctggttctgttacacagcaataatataactcttgttaattcacttaatgaggggaatcagaattggattttaacatttcatctatatccaacatgtagggtgctattagctcaggagaaaatgtaatctcagaatgtgatgtcaaaaattttactctaaacttgaaataaaaaacaacataaaatgcatatataagtgatatactgcaggcatccaccctagtatttggtaagtaaatatatcactaatgagaata

SEQ ID NO: 340431 - DNA, 632 bp, Homo sapiens
tccaaccagcttgtgctcctaccttgtacccagaagctttttatttagccaatctataccttcccattctctcaaatatcctccaaaatctatttagctttcttaacctaaaaaaattgtaactcatcattaaaacctagtttacatcaccatgtcagtgaattcttttctgaggcaaaaatcagttgctccatcttttgtcttccttacagcataatacctttcactcttaaaaaacacttcccttgttatgatgtaactaagtgaccaattaatgtatataataattgatcctcaggttttcattttattaagaatcacagaataaacaagtaaagttgattatgcygattttattcaatttgctcaactaatatggactgaaccctaacctttgtgctcagcattgaattaaagggagaatacactgtggtaaactcaaagtatattgtctttgaacttagagtttagtatagtctgtacataaataaacaaacaaaaaatctccataatatgacaaattgattttaaatgctattaagaaaaagcacaatgggatttacagtagtctagataatctgagtagttaagtagttgacattcaagctaaccagccatagaaaagattattt

SEQ ID NO: 340432 - DNA, 632 bp, Homo sapiens
tccaaccagcttgtgctcctaccttgtacccagaagctttttatttagccaatctataccttcccattctctcaaatatcctccaaaatctatttagctttcttaacctaaaaaaattgtaactcatcattaaaacctagtttacatcaccatgtcagtgaattcttttctgaggcaaaaatcagttgctccatcttttgtcttccttacagcataatacctttcactcttaaaaaacacttcccttgttatgatgtaactaagtgaccaattaatgtatataataattgatcctcaggttttcattttattaagaatcacagaataaacaagtaaagttgattatgctgattttattcaatttgctcaactaatatggactgaaccctaacctttgtgcycagcattgaattaaagggagaatacactgtggtaaactcaaagtatattgtctttgaacttagagtttagtatagtctgtacataaataaacaaacaaaaaatctccataatatgacaaattgattttaaatgctattaagaaaaagcacaatgggatttacagtagtctagataatctgagtagttaagtagttgacattcaagctaaccagccatagaaaagattattt

SEQ ID NO: 340433 - DNA, 614 bp, Homo sapiens
agcttactccccatatcagagcctgtaaaacttgcgtttgttttgatattgtaatttatttcacaacttttctagtagggcagctctaaattctagttaattttccctaaatatgtactcccttacacctcttcctgcttagtttccattgaggtctcagcacgttttataactgaaccctgcagggaaaaaaaaaaacccaccactactggtggcaagtacgatctagagattgataattaatgctacatcctcaagtaatcttagaattttagaaraaaatacgtagacattttgctttcctttgctgctcatctttatgagaattctctcacttttaatatattttttaataatataggtttgggaataagagaaaaaaacaccagttgattttttctttttgcatgttagtagctgaaatcctaaatgtagtgaaataaaaggataaagttaattttagagtgaggtttagagattatctttgttacatttgatgatatacttggcctataagtgccagattaaaaaataaacaaaatttagcattctcattttcagtaaacaaattatataaatataaaagtttcagcacatataaatatgcacacagg

SEQ ID NO: 340434 - DNA, 623 bp, Homo sapiens
ttgaatcgataaacaaatatttacagatatatttagcttgaaaaaagtactggcattgaacattctataatacatctgtattacctcttaagaattatgatttttgtaagagttaataagcattataaaaaattagatattaataacccaaggataaaagaatattttataaaaatgtcatacatatatacatattctcacccttttcaccagatcattaaattattaaataaccataaatgagtcaaatatccattctttgccattaccccatcccagatcaataatcctgattcatgataaaatttgagatccactgttttaaaataaaaattaaacctgggaagtaatagtcactttaaagcatagcctttacaaatggagagtaatctgtattaagagactatcaggtgagtaaactaaaaaacctttggttaaagtgtggattccttttgtctccctaacttctctggaactattataaatatcatcattatcttaatagcatgtttaatctatgtttaaattctctctccagttgttcaactccttctagtaggktgaataatagccactcaagtatatcaaatcctaatttctgcaacctgtaaatgttactttat

SEQ ID NO: 340435 - DNA, 647 bp, Homo sapiens
gaatttagtacagtagttacctttcagggcagagtggaatcaaatggaaggaactggacaatagtattcagggatatgtaacagcaacatcaaaactaagaggagacacgaatagcattgtgtgccagatgctgtttcaaatgcttcacatatagtaacttatttaatgcttataataatcttatacaacaggtgcctgtatgctatcacccccatcatgcaaataaagcaagtaaaaggacctgcccaacagcacacaggtataaccccagagcccagatttaactggaggtgtttatctccagagtctgcatgtctttttttccccattgagacaatctgtgaataatattttaagtattttaatagtgtgctcgttagaaaaaatagattttagccagaaacaaacatgcagtatgtggctggaagctacataaatccacaataatcacagcaatggccattttccaaagtgytcttctttgagcaaaggatgtacaatatatgaatttattaggatatctttgcagattaaaggcaaaagatgatgtgcattataaatatattattcataaggaaattatacacatctttcaatttgatacataaataagtatatttactaatatctacttaaataataaact

SEQ ID NO: 340436 - DNA, 566 bp, Homo sapiens
agcccagtgaatgtaaagtcacctaggctattccttttgttgtattttccactccctcaagtagtcactttggtattttttactaccagtgttgcctattcccgaatcttatcaccagcccagtattcttctgtcaaggaagacttctgaggttttagttcagaccgctgaataatgaatagtgcaattttctgtatcaggggacaggattgaagaactgctttaagagagacatgttcagagatgctgaaccatatataggtgtaggatatgcaattggcaatatctagcaggctgttggatgtgtgggcctacatctcatgagaaaggcatcaaacataaggctctgaattttggcgaccatgtttaaacacaagtgagagctaataaggcatgcaatacggctgcaaacagatccagcatgcaggaggtaatagcaatattatcacttagaatactgactcagtcaaaaatgccaatgacttccagctgtgcacatgtcagggamccacttacttctagaaacattgattaccttattttgggagatacaaggagggggatgg

SEQ ID NO: 340437 - DNA, 526 bp, Homo sapiens
cagactgtcacttcatatatgtctgctttagactttcttttaagcaggaaatatattcattttgtaattgaaatgaaaaatataaaataaatctaataaaagttgttaacttaaacatttttttagctacaatctagcatttgggaatctatttattttcataaacgtgatacacatgattcccagtgaaataaaagaagatatttagccaacatcttcttttacccccaatcaaagcaatcgcttctctatatcactcagcactgcattcactctcttccttgccaagttagattttattttgccgtgtatgtattttggtcacatttaatcctttctggaacaagtcacgatgtgcataaatacatacataacactttggaaacagcacgtaaagatgttttggcartcgaaaatctgtactgaatattttcaaatatataggttaaagcactggcttatttacactgtactgaaagagagtcgtgtctcataaatcatcacaactttgtcagggcacttgaac

SEQ ID NO: 340438 - DNA, 526 bp, Homo sapiens
cagactgtcacttcatatatgtctgctttagactttcttttaagcaggaaatatattcattttgtaattgaaatgaaaaatataaaataaatctaataaaagttgttaacttaaacatttttttagctacaatctagcatttgggaatctatttattttcataaacgtgatacacatgattcccagtgaaataaaagaagatatttagccaacatcttcttttacccccaatcaaagcaatcgcttctctatatcactcagcactgcattcactctcttccttgccaagttagattttattttgccgtgtatgtattttggtcacatttaatcctttctggaacaagtcacgatgtgcataaatacatacataacactttggaaacagcacgtaaagatgttttggcaatcgaaaatctgtactgaatattttcaaatatataggttaaagcactggcttayttacactgtactgaaagagagtcgtgtctcataaatcatcacaactttgtcagggcacttgaac

SEQ ID NO: 340439 - DNA, 582 bp, Homo sapiens
gctttttgcatacttttcaagttttctttgcttgtctgtatcaagtcatcagtaaaagcaaggagaatatatagtcaccatgagaagtttccattgaacaaaacaggtttggaaactccattattttgtatagaacttagtcacatgaacaactatatagggagtgtttgcagttgtagtttagcaatttgcccaggcagaagagaaaatgaaattagtaagcagcaatcaatgtctaacacaggtggaactggggaagctcacttgttttcaaatatctttcactaatgtgttaatcagtttgtaaatcagcttatacactagcatgggctttacctcttttaactacatttaattttgctactttatttgacttactctaacacagaatggaataaacaacaatcaaaaatacaaacagacagcattgagtagatgacacactttaccgaagacttaaggaatttccttcatgtttttttagagttgaagtaattagctataygtttttttcttcctacccttaatatcaaaccatgcattaaaaaacagcttatcaaagcatttttctaaacaaaggca

SEQ ID NO: 340440 - DNA, 553 bp, Homo sapiens
gattaattgatagatggttttccagkagttgatttccacttaaccattcctcttctctgaaagaaaagtcaagaaggaggggtccttaatttaggtaaaatgtttctacttctgtaattcattatattttcttattatcaatgagtctataaagataagtgcatcatctccttgactttgtcccaaaatgtgtcttttttggtagggcagcctattgtttcctttatatccaggagtcttttttagtttgtttatttattggattcataggcatatttcagaaatattgagagatcagatccagaccactgaaataaaacaaatatcccaataaggtgagcacaaaaaaatcctttttgtttcccacagataaaattatgtttatattatactgtaatttattatgtatgcaatagtattatgtctaaaaatgtacatacaatatatatgtaatataaatgctaatgagcatctaaaccttcaatgagttgtgatctttttgttggtagaggttcttgactcattgttgatggatgctgactgatcaaagtgg

SEQ ID NO: 340441 - DNA, 581 bp, Homo sapiens
tcagtctgtaccataggttcaatcatctgagctctcaatgttggtcagaataaattacattttaaactttatgaatactttactccaacagtaatctgtcaacatcacatgggtgttcattttttgatgggctactcatttttaacttaacatctattgtattcggtgaaggtggttctgtacgttgattatttgaacttggttgatttaagattatgatttaagattaatttttataaatagcccatgtatacaacagaagaatatacatttgctaattatttagtgcagaaatacacattagatgaagcttgttaactgtacagttatactggcagaaatttaaaattatatatatatttttctgtttgattgcaaaattgctgacagatgagttgttaaatcttctaagatcaaggatggctcaattgctccctgtaatcataccaatttttgctgtacacattttcaggctattttttaggtgcatacacacaaatcttctgcatatttctgtcatgtaccmccttgtaacaaatatagcttttcaatggaaatatttcatctttttccggttatta

SEQ ID NO: 340442 - DNA, 634 bp, Homo sapiens
cctgtttgttggtgccaaagacctgccccctgtgctctttctgtcaggagtgcaagccccttgttctgaatcaagaacagtgaccacagggtggcggcgctttcagtggccggtggcatctaacttcccgctcatggatgcttcactttgcttctgctagtgcttttgcgattctctgataaaagcaaataattttctaaatttaggaaaactagttctacatttatcttatattcatttttctattttatttatttcaccctcaatatctgtggtctgtgtctttaataagctctaaaaatgcatttcatatagattttgagagattacattatcaaatccagcctaaataactccagccgcacacccacggcccccaccacatgctaggctatcttctctctgtgctctaactacacttgtttgaaaattgtcctgcttycttttaccctggtgtgtttgcatgcacaccataccctttgtctcaggaggcttttccttttactccatccaccccttttacacatttctccaaactcagtgtggtcaatccttttgcaagacaaactctctgacctccctttctttatcaaatccctactagaatttctcagcacaactgcaaagactttag

SEQ ID NO: 340443 - DNA, 514 bp, Homo sapiens
tgaggtttatagttctctaaagaacataatagatgtagataatcttatcaataatggtaagatgttatttctaactttttccaaactattccccgtcagtttaggtagttctagattttctataattattattacttcttgtaaatatttcaacagattttttatcagctgccaaacattataatactttgttgtataaaattgtaaagtttactmtttcccagtttcttgcttgtgaatactttactggacttttagaactctagtgatataaccctaatattttatgaaatttccctcaggagtattttaaaatagtttttgcttagctaaaaaaaaatttgattgcaaataacagaaagtcacttgcactggattatgcaaatgggttttactacaagaaaacaggactattttaaggactttatggtggtggcacctgttagctagacatcactgtccccactgctctacacatcttagcatcctctctctccagcttctcctgctgctg

SEQ ID NO: 340444 - DNA, 498 bp, Homo sapiens
tgatggtgtttacagtaaaggttgtagcatttcaagactgtggagttggagaacattaggataattcaggttatgtttggagacagagctattcattgattataaatcaatgagggtgcaatttgctgatatgggagaacttagagagtaatagtagattaattgtttatgttcactttgaggtgattatcaaacctacaaatgaatatgtgaagtaggcagctggccaaaggagcctctaaggtggccttgttagagaaataaatttgcaagtttggggcatacggatagaatcmaagccttaagatcagatcagattaacaatcaaagagtataaacaggaaaaggaagtgggtcagtgactgagctttgaagatagataaactggtaaaataaaggaagagtaatcagaggaaaaggaagaaatcccagctatatttctcttaagtagaaactagcaagaaaatggggaggtgttctaagaatatcttacaactc

SEQ ID NO: 340445 - DNA, 498 bp, Homo sapiens
tgatggtgtttacagtaaaggttgtagcatttcaagactgtggagttggagaacattaggataattcaggttatgtttggagacagagctattcattgattataaatcaatgagggtgcaatttgctgatatgggagaacttagagagtaatagtagattaattgtttatgttcactttgaggtgattatcaaacctacaaatgaatatgtgaagtaggcagctggccaaaggagcctctaaggtggccttgttagagaaataaatttgcaagtttggggcatacggatagaatccaagccttaagatcagatcagattaacaatcaaagagtataaacaggaaaaggaagtgggtcagtgactgagctttgaagatagataaactggtaaaatraaggaagagtaatcagaggaaaaggaagaaatcccagctatatttctcttaagtagaaactagcaagaaaatggggaggtgttctaagaatatcttacaactc

SEQ ID NO: 340446 - DNA, 628 bp, Homo sapiens
gatcatcaatatcactgttttttatctccacatcttgtcccactggaaggtcttcagggccaataaagctgtcatctcccatgatgacgatgccttctggatacctcccgaaggacctgagactgttcatttattttttgtttttttttttttaagttttcaggtaatttttaatctcaataggcttaaggagcacacactaaaataatgataagtataataaatacaaaaaccaatgatagaattattattattatacataactgtatgtgtgagaattttatgkgactggcagcacagtagatttgttcacaccagcatcctcacaaacacatgagtagtacgttgcagcaagttatgacagcagcaatgtcactaggtgatagtttttcagttcctttataatctcatgggaccacaccatcgtatgtgcctcagtgttaatggaaatatccagatgcagtatacgattgtattctcatcttgcccttcaccaaccatccagtaaaggctctgctcctctcttcacactgattctgttaatattttgggtttacttctagtcttctgttgtttcagtgctgtccattgagttatatgtatgttttttgtttgtttgtttgttttt

SEQ ID NO: 340447 - DNA, 628 bp, Homo sapiens
gatcatcaatatcactgttttttatctccacatcttgtcccactggaaggtcttcagggccaataaagctgtcatctcccatgatgacgatgccttctggatacctcccgaaggacctgagactgttcatttattttttgtttttttttttttaagttttcaggtaatttttaatctcaataggcttaaggagcacacactaaaataatgataagtataataaatacaaaaaccaatgatagaattattattattatacataactgtatgtgtgagaattttatgtgactggcagcacagtagatttgttcacaccagcatcctcacaaacacatgagtagtacgttgcagcaagttatgacagcagcaatgtcactaggtgatagtttttcagttcctttataatctcatgggaccacaccatcgtatgtgcctcagtgttaatggaaatatccagatgcagtatacgattgtattctcatcttgcccttcaccaaccatccagtaaaggctctgctcctctcttcrcactgattctgttaatattttgggtttacttctagtcttctgttgtttcagtgctgtccattgagttatatgtatgttttttgtttgtttgtttgttttt

SEQ ID NO: 340448 - DNA, 585 bp, Homo sapiens
aaacacttacgcagtgtgtattgtgtyacacatttttccagcatttttcataagtagactcaagcctcacaacaaccctgagacatgaatattactgtccttattttacacatgaggaaactaagacaagaaggctaaagaattagcctaaggtcggccgggtgcggtggctcatgcctgtaatcccagcagtttcggaggccaaggtgggcagatcatgaggtcaagagattgagaccatcctggccaacatagtgaaaccccgtctctactaaaaatacaaaaaaatcagtggggcatggtggtttgtgcctgtagtcccagctacttgggaggctgaggcaagagaattgcttgaacctgggaggcgtaggttgcagtgagccgagatcgtaccactgcactccagatgggcgggagagcaagactccacctcaaaaaaaaaaaaaaaaaaaaaaaaaaagatttaccttaagatcatttggaaagtaaatgacagaggagggattttaatccagtctatctctgaaacttgataatcgttaagtattctctgatgtatgccaagtttgcccagtttcctgg

SEQ ID NO: 340449 - DNA, 585 bp, Homo sapiens
aaacacttacgcagtgtgtattgtgtcacacatttttccagcatttttcataagtagactcaagcctcacaacaaccctgagacatgaatattactgtccttattttacacatgaggaaactaagacaagaaggctaaagaattagcctaaggtcggccgggtgcggtggctcatgcctgtaatcccagcagtttcggaggccaaggtgggcagatcatgaggtcaagagattgagaccatcctggccaacatagtgaaaccccgtctctactaaaaatacaaaaaaatcagtggggcatggtggtttgtgcctgtagtcccagctacttgggaggctgaggcaagagaattgcttgaacctgggaggcrtaggttgcagtgagccgagatcgtaccactgcactccagatgggcgggagagcaagactccacctcaaaaaaaaaaaaaaaaaaaaaaaaaaagatttaccttaagatcatttggaaagtaaatgacagaggagggattttaatccagtctatctctgaaacttgataatcgttaagtattctctgatgtatgccaagtttgcccagtttcctgg

SEQ ID NO: 340450 - DNA, 585 bp, Homo sapiens
aaacacttacgcagtgtgtattgtgtcacacatttttccagcatttttcataagtagactcaagcctcacaacaaccctgagacatgaatattactgtccttattttacacatgaggaaactaagacaagaaggctaaagaattagcctaaggtcggccgggtgcggtggctcatgcctgtaatcccagcagtttcggaggccaaggtgggcagatcatgaggtcaagagattgagaccatcctggccaacatagtgaaaccccgtctctactaaaaatacaaaaaaatcagtggggcatggtggtttgtgcctgtagtcccagctacttgggaggctgaggcaagagaattgcttgaacctgggaggcgtaggttgcagtgagccgagatcgtaccactgcactccagatgggcgggagagcaagactccayctcaaaaaaaaaaaaaaaaaaaaaaaaaaagatttaccttaagatcatttggaaagtaaatgacagaggagggattttaatccagtctatctctgaaacttgataatcgttaagtattctctgatgtatgccaagtttgcccagtttcctgg

SEQ ID NO: 340451 - DNA, 422 bp, Homo sapiens
ctggtttgatcctttgaccatttaaggacaactggaaagcgctgtctctgaggaatgggtcatcagcaaatactgaatttcaaaattttacattttgaaatcaagacrtctgttgacttcttgatctttgacttcccaggctctgtaactgtgcgcaataaatttctggtgcttacaaattatccaatctaaggtattctcttatactagcctaatcagactaaggcacttaccttgagacagagtgtgtgaacttttggttcaggcatttatgattaggggtcagggtcagtggcatcaataaaaccaatgcacaaatcaatatatatgtgtcatccaatctaatttgtgcttttgtgtttgtatcagccagcagcactcagctgccatttatgcactttttttgtcagaatttctatttt

SEQ ID NO: 340452 - DNA, 422 bp, Homo sapiens
ctggtttgatcctttgaccatttaaggacaactggaaagcgctgtctctgaggaatgggtcatcagcaaatactgaatttcaaaattttacattttgaaatcaagacgtctgttgacttcttgatcttygacttcccaggctctgtaactgtgcgcaataaatttctggtgcttacaaattatccaatctaaggtattctcttatactagcctaatcagactaaggcacttaccttgagacagagtgtgtgaacttttggttcaggcatttatgattaggggtcagggtcagtggcatcaataaaaccaatgcacaaatcaatatatatgtgtcatccaatctaatttgtgcttttgtgtttgtatcagccagcagcactcagctgccatttatgcactttttttgtcagaatttctatttt

SEQ ID NO: 340453 - DNA, 562 bp, Homo sapiens
atgtctcacatggtggcagacaagagaagagagcttgtgaagggaaactcctctttttaaaatcatcagatctcccaagacttattcactataatgagaacagcacggaaaagacctgcccctatgattcaattacctcccaccagatccctcccacaacatcagaattcaagatgagatttgggtggaggcatagccaaaccatatgaagtcttatttgaattttagcattaagactattttattacaaggaaataagcttttactagtctacagataagggcctctgtgtgttctggcccttataacagttctggatcttataagcacacagaattgttctgttatttttgtagtgcctctrcaaggagaaaacttctcaaaatagtcatctgttacctagacgtgttgtcacagacttggtattgcataaggagattctactctaaaagatcttagatttttctttattttttgtgaacttacttgctcaattaagtgtactatttagagttatctaaaatgtaattgacctttttgtcatcagtttcactagaatgta

SEQ ID NO: 340454 - DNA, 571 bp, Homo sapiens
tagaagatttgctttttctataataaaaagtataagctgataataaaataaattagaaagactaagtagcacaatttaaatgaggaatacagagggaaatgttcaatttttattgaaaaaatgacaaagtggtgttttcatatttgctgagccattatggcttttataaaatcatggatgatttgaggaattatgkttttcttttctttatatgatctaaatgttttttccctccttataatacaaagagtgaaatcatcactttgatattaagcacatttatttccaatttcttgatacgacctaaaggtacatttaagtgggaataaaagccaaagcaaatgaagtgaattactggcagtgattattgtcaatatgtaaatcagacatggggcatatttatccttacaacatacttcaaatcttcagagcaaataagtgaatagattcttaaaattccatgaagcttttaaccattacactggagggctggataaaaatctattcattctggacatcctagcactcatccagctaagaaggtaactatttataaccacctaattgttta

SEQ ID NO: 340455 - DNA, 571 bp, Homo sapiens
tagaagatttgctttttctataataaaaagtataagctgataataaaataaattagaaagactaagtagcacaatttaaatgaggaatacagagggaaatgttcaatttttattgaaaaaatgacaaagtggtgttttcatatttgctgagccattatggcttttataaaatcatggatgatttgaggaattatgtttttcttttctttatrtgatctaaatgttttttccctccttataatacaaagagtgaaatcatcactttgatattaagcacatttatttccaatttcttgatacgacctaaaggtacatttaagtgggaataaaagccaaagcaaatgaagtgaattactggcagtgattattgtcaatatgtaaatcagacatggggcatatttatccttacaacatacttcaaatcttcagagcaaataagtgaatagattcttaaaattccatgaagcttttaaccattacactggagggctggataaaaatctattcattctggacatcctagcactcatccagctaagaaggtaactatttataaccacctaattgttta

SEQ ID NO: 340456 - DNA, 571 bp, Homo sapiens
tagaagatttgctttttctataataaaaagtataagctgataataaaataaattagaaagactaagtagcacaatttaaatgaggaatacagagggaaatgttcaatttttattgaaaaaatgacaaagtggtgttttcatatttgctgagccattatggcttttataaaatcatggatgatttgaggaattatgtttttcttttctttatatgatctmaatgttttttccctccttataatacaaagagtgaaatcatcactttgatattaagcacatttatttccaatttcttgatacgacctaaaggtacatttaagtgggaataaaagccaaagcaaatgaagtgaattactggcagtgattattgtcaatatgtaaatcagacatggggcatatttatccttacaacatacttcaaatcttcagagcaaataagtgaatagattcttaaaattccatgaagcttttaaccattacactggagggctggataaaaatctattcattctggacatcctagcactcatccagctaagaaggtaactatttataaccacctaattgttta

SEQ ID NO: 340457 - DNA, 571 bp, Homo sapiens
tagaagatttgctttttctataataaaaagtataagctgataataaaataaattagaaagactaagtagcacaatttaaatgaggaatacagagggaaatgttcaatttttattgaaaaaatgacaaagtggtgttttcatatttgctgagccattatggcttttataaaatcatggatgatttgaggaattatgtttttcttttctttatatgatctaaatgttttttccctccttataatacaaagagtgaaatcatcactttgatattaagcacatttatttccaatttcttgataygacctaaaggtacatttaagtgggaataaaagccaaagcaaatgaagtgaattactggcagtgattattgtcaatatgtaaatcagacatggggcatatttatccttacaacatacttcaaatcttcagagcaaataagtgaatagattcttaaaattccatgaagcttttaaccattacactggagggctggataaaaatctattcattctggacatcctagcactcatccagctaagaaggtaactatttataaccacctaattgttta

SEQ ID NO: 340458 - DNA, 545 bp, Homo sapiens
ttactacttaactcagtgacagatcaggtgattcatatgcaaaagctatcactacactgaaatactaggtgttttctttgttattttcattttcagaccaggagatttgaatatatttaatgaagccgcatctttgtttaactccttagccatcatgagcttttattgattgcttttctaatttgtaagtaatacrtactcttctgagttatgtttaatcaatgtcctctcttttaaatagaaatgttattgtactttatggattgtacttgatggagaagttaaaagaaaaattggacataaagcttcttactttcttttacttcaattgtcattactcttcatgcccaaattattattttctttccgcctcattttaaatttgccttattttgaaagcacgtgagtttatactttgggaaattctgttataaagaattaggtataaattttgaattataattcatttgttagtgataaatgtcaccatagaaatatttccctatcaaattagttctaaaaatgtggactagctaaatcataat

SEQ ID NO: 340459 - DNA, 382 bp, Homo sapiens
gcaccggtcttgagatggggtctacgataatgttcttagtagcagtattcacaagaaccgttgtaaacctgtttcctaaaatataaaatggaaatgagtaagatagccacaacataacattgttatgaycccaacatgagaaatttatgtaaatttatcaataagacaatgagtgcagataagtgttctgtaaagattagacattgttccttcaaaaacagtctcatttataattatggaatattattccttcttggccatctatgctcagtttaaggattcaattcagcttatagcagaaaatggactttaggtcagttacatcagtatctgaattgctgaatctgcaatttataagttgtgtgaccttgaagaaatatgt

SEQ ID NO: 340460 - DNA, 584 bp, Homo sapiens
aatggtcaaatgtgtttatcttctgtgagagacaaaaagctattcctttcaggatgtagtcatccagatttttagcattctcatttgtaagactgtctgtacaggtgaatatttttggaagacaaattactaaaggtcattatacatgaaatgttttactgatcattttacttatagttcccaggagttacayatgttaaaatattaacttttatgacttatatattaaatgcatattaacttattaaagacagaaagacatttttaaaaatctttgtttggcatagcaatttttttctctacttcatgaaaaatatgtaacattcctgttaaaactgtcgaagtcttcaatggctgacattatttagcattaactacagttaagttcttacttatcagtctctggctacctaaaggttttttttttaatgtgatatgtcacattcagtagtttattaagtcaggtttctactgttgggcattttgttgtttgaaatacatttataatccttccttagaaatagaatttatggttcaaagagtatacatatttttaaatatttttaatgtaaaacaacaagttg

SEQ ID NO: 340461 - DNA, 584 bp, Homo sapiens
aatggtcaaatgtgtttatcttctgtgagagacaaaaagctattcctttcaggatgtagtcatccagatttttagcattctcatttgtaagactgtctgtacaggtgaatatttttggaagacaaattactaaaggtcattatacatgaaatgttttactgatcattttacttatagttcccaggagttacacatgttaaaatattaacttttatgacttatatattaaatgcrtattaacttattaaagacagaaagacatttttaaaaatctttgtttggcatagcaatttttttctctacttcatgaaaaatatgtaacattcctgttaaaactgtcgaagtcttcaatggctgacattatttagcattaactacagttaagttcttacttatcagtctctggctacctaaaggttttttttttaatgtgatatgtcacattcagtagtttattaagtcaggtttctactgttgggcattttgttgtttgaaatacatttataatccttccttagaaatagaatttatggttcaaagagtatacatatttttaaatatttttaatgtaaaacaacaagttg

SEQ ID NO: 340462 - DNA, 610 bp, Homo sapiens
tttttttaaatctattttatgataagacataaaactcatttgccttgtctaaaaatatcaaaatggtaacctattttctataattctcatgaaaacctgagctcccattctccttctgaatgaggcttctcttgatacattgagccctactgcaagttaattttatattttctaaacaaaaaaaaaaagtctccactgtttactggtactatgcttcccccagcgaatgtgtacaggattgcttatcaacattgtaaattcatccttgcttgtattgtatgatgtacaagtaaggcatgatgtgtaagcaagaaagcattttttagtctcagaaactcagtgtcaattaaaattattattttttgctttattgtttacattcaaaatgaaaaaaatccttttcatrtggtcatttctcaatacagatattgaatgcctttaagtagagagctcaggaaattatcattttacctccaatgatattttaaaactttgtcaatatcttggtcaataaaaaagctagtttttgtttatgttttgttcatttttgcttttaatcatagctaagtttagaaaaatgaaatcaatgtgtattgtcagaatgcaagtc

SEQ ID NO: 340463 - DNA, 475 bp, Homo sapiens
cttttgccttgccggcacacacttgcccactttcttgaaatcccatcactttgtcagtatacacacttgggtggaccttgcctcccctcctccaatggcatgtgtgcaccctgctcccccactgtactgrcagtgtcagtgcgtgccgccatccagatgtcaccaccaccagcatgctaaccccatggaggcacaggcagccagccatggtgctcccgccactactaccagtacaagtgcatgcatacattttggcaccctaccccccccaacatgtgggcactctgcctcaccattgttgcaggcataagcatgtgcatgaaggcctctgccccattcctgccagtgccctgcccccagctgacagagcgcaccctgatgcatcactgcagcttctgacacatgcgggcaaacacagattccactgccaccacccctacagagcattttggccagcacacctcatcagaatgtt

SEQ ID NO: 340464 - DNA, 475 bp, Homo sapiens
cttttgccttgccggcacacacttgcccactttcttgaaatcccatcactttgtcagtatacacacttgggtggaccttgcctcccctcctccaatggcatgtgtgcaccctgctcccccactgtactggcagtgtcagtgcrtgccgccatccagatgtcaccaccaccagcatgctaaccccatggaggcacaggcagccagccatggtgctcccgccactactaccagtacaagtgcatgcatacattttggcaccctaccccccccaacatgtgggcactctgcctcaccattgttgcaggcataagcatgtgcatgaaggcctctgccccattcctgccagtgccctgcccccagctgacagagcgcaccctgatgcatcactgcagcttctgacacatgcgggcaaacacagattccactgccaccacccctacagagcattttggccagcacacctcatcagaatgtt

SEQ ID NO: 340465 - DNA, 475 bp, Homo sapiens
cttttgccttgccggcacacacttgcccactttcttgaaatcccatcactttgtcagtatacacacttgggtggaccttgcctcccctcctccaatggcatgtgtgcaccctgctcccccactgtactggcagtgtcagtgcgtgccgccatccagatgtcaccaccaccagcatgctaaccccatggaggcacaggcagccagccatggtgctcccgccactactaccagtacaagtgcatgcatacatkttggcaccctaccccccccaacatgtgggcactctgcctcaccattgttgcaggcataagcatgtgcatgaaggcctctgccccattcctgccagtgccctgcccccagctgacagagcgcaccctgatgcatcactgcagcttctgacacatgcgggcaaacacagattccactgccaccacccctacagagcattttggccagcacacctcatcagaatgtt

SEQ ID NO: 340466 - DNA, 607 bp, Homo sapiens
cagaagtctaatgtcaattggtagcttatttcttttcctgtgtgcctttgaagtaattaacatattaatataagtccctatgattgtgtaatttcatggttttattgaaatatttattttttcccaatattttagcatatttgtggtaaaagaaatatattgtttttatatgaattatgacatttttaaacatgtccccttgaagttaggtatttttgtatatttttcataatttgaaggattaccaatctccaaatcccctacaaagcttaacacatgaactaatgtctatcacaatactgaattttctcctrtatacaaggtaactagcttgctcttcgtcaccattgggtcagttatttacatgtaacaatatcaacgtagtagagtcaaatctgagaaatggtcatcttgcttatggacaaagcagacattgtcaatttggctgcactctaggtttaagataataccttttccctgaaatttcctaaagcatgtgtctctgaccacaggaaacaacaatggatcaaaactagagcaaagcaaatattagtaaaattagaccattaccatagactttatgattcctaaatgatttttataatgt

SEQ ID NO: 340467 - DNA, 493 bp, Homo sapiens
ttttaaaaaatctttatagataatgtatcaccaaatacagagcaacaataaagagatatgaattatttaaacaaaagaggggtgaaataaaattctggaattaagaagaataataattacattaaaattcactgaagatgttcaaaagttatttggagctggcagaagaaagaatccatgaacatgaagataggacagttgagataatccataataatatgcagaaagaaaaataactgtaaaggtgaacagcacctcagagatttgtagggcaccatcaactgtactaacaaaygcataataggaatctcagcttgtaaggagagagagaaataaataatatgtggatacattatggctgaaaacatcctaaatgtgatgaaaaatattaatctctgccaccaagactcttgataaattcaaaataggataaactcaaagagatccacccctagatatagacacatcatattcaagctgctgaaagccaaaa

SEQ ID NO: 340468 - DNA, 649 bp, Homo sapiens
acaatctctctcttctccattgatttctggaatggagcatttactaatcttcatccagtgttgctctggaaagtttcatcttgagattgcatcattatacattcagtatataccaaataccttactccttcactgattcacaagtattttaacactctgatatttaggaagcatgactacttcacattcattagatttttaaaatatatttttaaaagtttgaggtgtatatttcattacacaagtgcaaatatatgtttctgggctatgcattcaagtagaaggtatctaagaagtctactaattttaattaattacctcatggttaaaacccttgaattattttcaaatagaaaataaccaaaattttattttaaaagaaagaatgccatgaaattatacgtttttgtacagcaataactagttatgtaaaatcattaagctcctgggtattggggkgtgtgtgtgtgtgtgtgtgtgtgtgtgtgtgtgtgtattagataagtgcccaggagcagtttttttttctaactattgaaggttaatttctgaatatgggcatgagagggtaaactccattcttagccatgtttcatttttttcctaacctaagaaagaaaaacctggtagtgtgaaagcattttgctaa

SEQ ID NO: 340469 - DNA, 649 bp, Homo sapiens
acaatctctctcttctccattgatttctggaatggagcatttactaatcttcatccagtgttgctctggaaagtttcatcttgagattgcatcattatacattcagtatataccaaataccttactccttcactgattcacaagtattttaacactctgatatttaggaagcatgactacttcacattcattagatttttaaaatatatttttaaaagtttgaggtgtatatttcattacacaagtgcaaatatatgtttctgggctatgcattcaagtagaaggtatctaagaagtctactaattttaattaattacctcatggttaaaacccttgaattattttcaaatagaaaataaccaaaattttattttaaaagaaagaatgccatgaaattatacgtttttgtacagcaataactagttatgtaaaatcattaagctcctgggtattggggggtgtgtgtgtgtgtgtgtgtgtgtgtgtgtgtgtgtrttagataagtgcccaggagcagtttttttttctaactattgaaggttaatttctgaatatgggcatgagagggtaaactccattcttagccatgtttcatttttttcctaacctaagaaagaaaaacctggtagtgtgaaagcattttgctaa

SEQ ID NO: 340470 - DNA, 649 bp, Homo sapiens
acaatctctctcttctccattgatttctggaatggagcatttactaatcttcatccagtgttgctctggaaagtttcatcttgagattgcatcattatacattcagtatataccaaataccttactccttcactgattcacaagtattttaacactctgatatttaggaagcatgactacttcacattcattagatttttaaaatatatttttaaaagtttgaggtgtatatttcattacacaagtgcaaatatatgtttctgggctatgcattcaagtagaaggtatctaagaagtctactaattttaattaattacctcatggttaaaacccttgaattattttcaaatagaaaataaccaaaattttattttaaaagaaagaatgccatgaaattatacgtttttgtacagcaataactagttatgtaaaatcattaagctcctgggtattggggggtgtgtgtgtgtgtgtgtgtgtgtgtgtgtgtgtgtattagataagtgcccaggagcagtttttttttctaactattgaaggttaatttctgaatatgggcatgagagggtaaactycattcttagccatgtttcatttttttcctaacctaagaaagaaaaacctggtagtgtgaaagcattttgctaa

SEQ ID NO: 340471 - DNA, 563 bp, Homo sapiens
acacttcaagcagaaatataaaactatacatgtatttcttgcatagaactgaaaaaagcctgtgcttcaattgggcattccttattttttacattccttacttcttgtcaatcttggaaccatgttaactatgagctagatgatattactattagttaacttgatacatcatctagctcatagttcactatcctttactccaagatccagtgagaagttgctccrcagctggagaaattggagatttgggactaggaccatggctctgcaatttactacctatgtgatctcaattcattcaaaccctggtttacttctgctaaaaattgcatcataatacctaactgaaaggtttgagtatacagaaaacacatcttaaacttttaatgtaatgatttccatttcacaaagtccaagaggttctcacaaatctttcctcaaatcttaggcatcaggctttaaaccttttcaaacaagatcatctgggcctataatgcctccagtggaagccatttgcaatcttttgagattcactttttcctacaaggcaaaatggaagcatc

SEQ ID NO: 340472 - DNA, 450 bp, Homo sapiens
caaacatatgctcctgtagaaggattttaaagttcaattagtttagttcttccttgggctacaaatgggactgggataacagcattcaaggtatcagctgacaatgcatgctacagcatgatgacagtgttcttttgatgaagttgtcacacmacatgaaaaaaagcaacaaaattattagagaatccttgtatgattccagtgattgctttattttttttcctgcatgttcaaattacatttgtaaaattgcattcaagaccagagttaagcttacctttttttttcctgaataaaccattgcctcccatttgttttttcctgccatttctaacattcttttctttattctcatgatgaacaaacagatatttcacaacagattttctattaaagttggtttgaggtttgaattcacaccaaacactaaatattattattcccttttga

SEQ ID NO: 340473 - DNA, 605 bp, Homo sapiens
atatacaaatgaggagtatttactttcttataaaatccatttttagactatkaatttgatggctgcagaattgtacactgattcatgacttatctattccattattttgaaatatttagttatttcatcaattttaaaaaaaatttatttatttatttatttgtttattgagagaaaggatttcactctgttgcccaggctggagtgcagtggtgtgttcatagctcattgcagccttaaactacagggctcaagctatcttcctgtctcagcctccaaagtagctggactacaggcacacgctaccatacccagctaattttaaattgtttttgtagagatggggtcttgcttggttgcccaggctgacctctttcatcaatataaaacaataatatgatagatattttaatcttaggatccatgtcaaacttaaaattactggataagagagaagaaacactcttaaatcatcaacttaaaataacgaattgcttttgagaatgatcacattttctttacaatctccatacatgatttttctacttagaaatccttctacattccaaaatctaataaaatccttcacttgattatgctgttga

SEQ ID NO: 340474 - DNA, 605 bp, Homo sapiens
atatacaaatgaggagtatttactttcttataaaatccatttttagactattaatttgatggctgcagaattgtacactgattcatgacttatctattccattattttgaaatatttagttatttcatcaattttaaaaaaaatttatttatttatttatttgtttattgagagaaaggatttcactctgttgcccaggctggagtgcagtggtgtgttcatagctcattgcagccttaaactacagggctcaagctatcttcctgtctcagcctccaaagtagctggactacaggcacacgctaccatacccagctaattttaaattktttttgtagagatggggtcttgcttggttgcccaggctgacctctttcatcaatataaaacaataatatgatagatattttaatcttaggatccatgtcaaacttaaaattactggataagagagaagaaacactcttaaatcatcaacttaaaataacgaattgcttttgagaatgatcacattttctttacaatctccatacatgatttttctacttagaaatccttctacattccaaaatctaataaaatccttcacttgattatgctgttga

SEQ ID NO: 340475 - DNA, 605 bp, Homo sapiens
atatacaaatgaggagtatttactttcttataaaatccatttttagactattaatttgatggctgcagaattgtacactgattcatgacttatctattccattattttgaaatatttagttatttcatcaattttaaaaaaaatttatttatttatttatttgtttattgagagaaaggatttcactctgttgcccaggctggagtgcagtggtgtgttcatagctcattgcagccttaaactacagggctcaagctatcttcctgtctcagcctccaaagtagctggactacaggcacacgctaccatacccagctaattttaaattgtttttgtagagatggggtcttgcttggttgcccaggctgacctctttcatcaatataaaacaataatatgatagatattttaatcttaggatccatgtcaaacttaaaattactggataagagagaagaaacactcttaaatcatcaacttaaaataacraattgcttttgagaatgatcacattttctttacaatctccatacatgatttttctacttagaaatccttctacattccaaaatctaataaaatccttcacttgattatgctgttga

SEQ ID NO: 340476 - DNA, 393 bp, Homo sapiens
atgtgtactttagtgtcacttcttaattttctatgagttctgcacactcatttagactaaaatttatgttattttttctaatcccagtgtctgttgttccttctatgtgtccatgcattctaatcatttagctcccacttgtaagtgagaacatgtggaattcggttttctgataactaatgtgtrctaggcttaatacccggtgacaaaataatctgtaccacaaaccttcatgacatgagttacctgtataacaaaactgcacatgtacccttgaacttaaaatttttaagaaaacataggatcatatggttaaaaaaataaataaaatttatgttggtttgtttttcttaatgttagtttaaatgtgttcaaatatattaaaagaaatat

SEQ ID NO: 340477 - DNA, 560 bp, Homo sapiens
gcttttgaattataatatgttgatatacatttgtaagtttaattttgggaagtatttgatcatattcaaacacaaagaaaaacaaaattacgtgacaaaaaatgtcatggcaaatagtgttttacataaaagcaaaaatgtttttaatataattgtatttaatatataattctaaacttatttaaataagtcacatctagaataagtgagaataatcaatgttataacccagttataaaaatgtaatgtgtattattataataaatataagatttaaaaatattggtgacaataaatcacggcaattcaactacctcaagtattatatattttttttctctttttgttttttgtagagacggggtcttgctatgttgcccaagctggtatggaactcctggcctgaagtgatcctcctgccttgtatacttgaattcacagaacattattccacaaaaagttttaagagttarccaaatcattttactaaactgcagaatgggaagtagaaacatgttttaaagtttcttttctaggaatcattgggagtaggagagtga

SEQ ID NO: 340478 - DNA, 558 bp, Homo sapiens
cctttccctcagcctaatattgtgtaagcactcaataaacacccattgattgatgtctaggatttatttatttatttattttttaktgtttttattttttgagacggagtctcactctgtcgcccaggctggagtgcaatggcgtgatctcggctcactgcaagctctgcctcccggattcacgccattctcctgcctcagcctcccgagtagctgggactacaggcgcccgccaccacgactggataattttttgtatttttagtagatacggggtttcatcttgttagccaggatggtctcgatttcctgacctcgtgatccgcccgccttggcctcccaaagtgctgggattacagcagtgagccaccacgcccggccaatgcctaggtttttatatgcttctagtcctgggagttgatggtacattctgcataaaaaacccttgtcagcttaacattgttcatcctgaagctgacctattatagatgtccatttgtttgtctttacatctcagatgaagcaagcacccacaaaaaggttcgtgtgtgtgtgttt

SEQ ID NO: 340479 - DNA, 558 bp, Homo sapiens
cctttccctcagcctaatattgtgtaagcactcaataaacacccattgattgatgtctaggatttatttatttatttattttttagtgtttttattttttgagacggagtctcactctgtcgcccaggctggagtgcaatggcgtgatctcggctcactgcaagctctgcctcccggattcacgccattctcctgcctcagcctcccgagtagctgggactacaggcgccygccaccacgactggataattttttgtatttttagtagatacggggtttcatcttgttagccaggatggtctcgatttcctgacctcgtgatccgcccgccttggcctcccaaagtgctgggattacagcagtgagccaccacgcccggccaatgcctaggtttttatatgcttctagtcctgggagttgatggtacattctgcataaaaaacccttgtcagcttaacattgttcatcctgaagctgacctattatagatgtccatttgtttgtctttacatctcagatgaagcaagcacccacaaaaaggttcgtgtgtgtgtgttt

SEQ ID NO: 340480 - DNA, 558 bp, Homo sapiens
cctttccctcagcctaatattgtgtaagcactcaataaacacccattgattgatgtctaggatttatttatttatttattttttagtgtttttattttttgagacggagtctcactctgtcgcccaggctggagtgcaatggcgtgatctcggctcactgcaagctctgcctcccggattcacgccattctcctgcctcagcctcccgagtagctgggactacaggcgcccgccaccacgactggataattttttgtatttttagtagatacggggtttcatcttgttagccaggatggtctcgatttcctgacctcgtgatccgcccgccttggcctcccaaagtgctgggattacagcagtgagccaccrcgcccggccaatgcctaggtttttatatgcttctagtcctgggagttgatggtacattctgcataaaaaacccttgtcagcttaacattgttcatcctgaagctgacctattatagatgtccatttgtttgtctttacatctcagatgaagcaagcacccacaaaaaggttcgtgtgtgtgtgttt

SEQ ID NO: 340481 - DNA, 558 bp, Homo sapiens
cctttccctcagcctaatattgtgtaagcactcaataaacacccattgattgatgtctaggatttatttatttatttattttttagtgtttttattttttgagacggagtctcactctgtcgcccaggctggagtgcaatggcgtgatctcggctcactgcaagctctgcctcccggattcacgccattctcctgcctcagcctcccgagtagctgggactacaggcgcccgccaccacgactggataattttttgtatttttagtagatacggggtttcatcttgttagccaggatggtctcgatttcctgacctcgtgatccgcccgccttggcctcccaaagtgctgggattacagcagtgagccaccacrcccggccaatgcctaggtttttatatgcttctagtcctgggagttgatggtacattctgcataaaaaacccttgtcagcttaacattgttcatcctgaagctgacctattatagatgtccatttgtttgtctttacatctcagatgaagcaagcacccacaaaaaggttcgtgtgtgtgtgttt

SEQ ID NO: 340482 - DNA, 561 bp, Homo sapiens
ctgccgtaactatagggtgataaggcagctttatgctttttgatattttccaaatttcccccatagtccaaaattctacctttttagaattagagatggggtcttgccatgttgcccaggctagtcttgaactcctggccttgagtgatccctccgcctcacccttccaaagtgttgagatcacagtcatgagccaccattcctggcccaaaattctacctttagagatattaagtgagaaacatagtaaagacattgaaaccaaacaaacctagtaaaaatgaacgttacctaaaacaagtacagcaccttcctattagytgattggaacagatacattcatcctattagcaagacgatttggagtctcaatgcgataaggttcaaattaaatttccttgtggtaaagcacagagatgactagctatatgtatgaagttcagcatgaggctgttgacctcattatcacctctcggccctcacctctacccacatcccaaccttcctttacctttttcttctttttggtgtttaatacagagtttttgcggtaattacctt

SEQ ID NO: 340483 - DNA, 615 bp, Homo sapiens
ttattaatagttttagtaaatactttcacatcttttttcatatgtcatttaatatcatatcaatctaattgagatagaaatatttaccctctttcttaagcattagttaaatgtatatacatacttttaaaacttctgttctttttttctattcttgccccattgacatgaaaaaaatgtkctgaattcttgctttcgcttttctcttttcttcctttgttccacttgggagccttcaaaagttctgaattataatagaagtgaagtgttagttctagtgtcagattaatacagaggaaaatgaaaattacaatttttaatagacttttataactagtattgctaattacctgtttccttttgaaatacaccgtctgtgctcaaatctaaaaaaggatttgaagtacttgacttaaaggtcttgacaagccccaaaagtcttatttaaaaaataccatagaaatctctacttacctcttttttcttcctgtaaggttgcgtttttgtttgtagccatagtggttaaattataatagtcaaaactgttatactctgagtgtataacacaatgtttaatgcatgttttgttagataatctttaaaattaatatataa

SEQ ID NO: 340484 - DNA, 549 bp, Homo sapiens
gatcaaatgaacagaacattgacagatgttcatttacagctgtctaatttctctatagaccattccagttgtgatagagagaaggggaagtatagggagcaaagctgttgagtttcgactccttctggaagaaggggtaataaataattagccttgctgctactccccttggaaacagacattagccttactggtccagaagtggaggttagaaaacaccaaacaatttcattattttacctaactcagaaatatgatctttacgtttttcctaagaacatcgtgggtagatactctttacgggggtgcagaccaacatgacatcaagtggctgggccagtaaggtaaatacatgtagtggactaccagtctccattaaaacttggaatgggaagccatggagtagataatttttcagtcatcctcagtcttacaagtgtgtaataggaaactaaatagttggatatttgtttgactccatttgaaaaatcagtcrattcagtgaggaaaaatgagttgaggctatgggttgacatcacataggcatta

SEQ ID NO: 340485 - DNA, 541 bp, Homo sapiens
cacattatattaattaataatgaatctactgagtattttgtaaatgatttactcataaatgaatttctattgaaattagagggagaactgtattttaaggtattgtattaatgatacagtcaggacgcagggawataacgggtagaaaagggcagttgcctggcaaagtacccaccctcaagcctggaaacccacagccctacatgggaacaggcattcctattttcacaccaaaacgttgcatttggcctgccatgcccccctatcctgtacccatataaatcccaaaccccaggctccatgagcagaagagcagaggtgtagaagagtggcacagcagagagagagagaagagaaggagtgtctggatgtcgagaggagtttggctggggatggtcagagaggagatcggctgtgggatggccaaactctaggggaagatcatcttcccactccatcccctttccagttccccatccatccctttgacagtcacctctatccagcaataaaatcactgcatttactatccttcaatttg

SEQ ID NO: 340486 - DNA, 618 bp, Homo sapiens
agtttgagtcataccaaagaagatttctcaactagcaggatcaaagttctttttaaagagttgattttttttttttttccggagctaaaatggtctccccagctgctaagaaaagaggaaactgtggtgttttctctggaactttccccaagcactgtagttttcagtggggtgcagtgtgacaccattccctaagaatgttttggaaattcactgggaagatgtttaatcatcccagtgattttaggtttcacactgggttgggtattaacactatcatgcgagaaggcaggaatgctaaggatcttgtggagcataggacagtctcacacaaagaaatgtcctgtgttctgtacaacttcaaatgttccccccagccattcttgcaggtgaaaaaagccacttacaattttctaagcttgsaatataacttcattttacctatggacatgataggcccttgtaccgcctaaacatacatgaaattttttaagaatgcagctgccgtgctaaactgaagggaaactacctgacactttgttgagaacattattgagcatgacatcatgtttaagggttatcccccagtttggaaaagcatatcattgccaataagat

SEQ ID NO: 340487 - DNA, 574 bp, Homo sapiens
agccacttacaattttctaagcttgcaatataacttcattttacctatggacatgataggcccttgtaccgcctaaacatacatgaaattttttaagaatgcagctgccgtgctaaactgaagggaaactacctgacactttgttgagaacattattgagcatgacatcatgtttaagggttatcccccagtttggaaaagcatatcattgccaataagatgacccagcattggtagctgttacacattcaaggtgattttaagtaataggaatatagttattaattaccctttgtttaaaaatgtcaaatataaattgtctcttaaatgcaaagatttattacaaataaatgcaagcacgtgactgcttccttaagtctttggacgtaattgtgtttgaatattttccttttgaaatacatataatgttattatatttaattggtttactatctgctcagactactcagaaaatcctcaacctctctctyctccttattcctcagggtcattcatttaagttctgttggttctatttcctaattttgccttctcttgtttataccaatgctac

SEQ ID NO: 340488 - DNA, 513 bp, Homo sapiens
ctggatacatttcattagtacatttatttcatttctgccacccaatattcttaaggatacgtagcatactgaaacttctgtcatgaaaatgacatgtcaaaattattttattttggaggccgggcrcagtggctcatgactgtaatcccagcacttttagaggccgagacggtcagatcagttgaggccaggagttcaagaccagcctagctaacatggcagaaccccatctctaccaaaaatacaaaaattagccgggtgtggcggcacgcacctgtagacccagttaattaggaggctgaggcacgagaatcgcctgaacccaggagttggaggttgcagtgagctgagatcatgccactgcactccagcctgggagatacagtgagactgtcaaaacaaacaaacaaaaacaaacaaaaaccaactatttattttgggtttgaatcttgtttttcaaccttactctgaaactgtcctcaggagtcggttgccactcaactatcctataaa

SEQ ID NO: 340489 - DNA, 513 bp, Homo sapiens
ctggatacatttcattagtacatttatttcatttctgccacccaatattcttaaggatacgtagcatactgaaacttctgtcatgaaaatgacatgtcaaaattattttattttggaggccgggcgcagtggctcatgactgtaatcccagcacttttagaggccgagacggtcagatcagttgaggccaggagttcaagaccagcctagctaacatggcagaaccccatctctaccaaaaatacaaaaattagccgggtgtggcggcacgcacctgtagacccagttaattaggaggctgaggcacgagaatcgcctgaacccaggagttggaggttgcagtgagctgagatcatgccactgcactccagcctgggagatacagtgagactgtcaaaacaaacaaacaaaaacaaacaaaaamcaactatttattttgggtttgaatcttgtttttcaaccttactctgaaactgtcctcaggagtcggttgccactcaactatcctataaa

SEQ ID NO: 340490 - DNA, 577 bp, Homo sapiens
aatacttgtggcagctgtagttggcattgacacctgccccggattcacattgcaagggagagttaaggctgtgttttctccactcgataaaaatgkcaggttataaaggcagatagtgatatctaagaagtcatggtgcaaattacctacaaaaggaaggaaaatctagattcctaacactccaggacaccatatacttgacactgtgagattctcagcaccttcctgcaaaactaatgcagtcttcagtgcacttgacttcagccaaataggatttatccgagtgtttcctttggaagttgagagacagagagagtggaaaaaagggagaaaaaaagagaaaaagaaaagccagcgagtggtggaaataacccacttcctttctgcagtgggtgttgccagtattttgtggttcttcatttgatttcactgtgaaaatgaaactttaatttcaaatgatcagtaaaagaaggtagattttaaaaaataaggtgttgtggttgcaaatgacagaaaaacctgacccaaactggctcagcaaagcaaacatattgattggtgtagagaagttttacaa

SEQ ID NO: 340491 - DNA, 476 bp, Homo sapiens
gctggccaggtgtctgcactaagtttggcatgaatatggkgacctcccacgagagggaggggagaaatggacgcaggtcaaaactcctgtgctggtcagtggtgggcttgcacccatcattagcctctgcgctccagcctgggcaacagtgaggccctcttataaaaatatctctttattaaaaaatataaataaaatatattagcataagtatatattgtttgcatgaaaccaatgactgcatctgtaagtgcagttctgtttgcttgagctagcctgtgtcttgtttatatatgattaagggactttatttggctttagtttttctatgcgttcctcctcttctctgcacaagttttgatctcatttattccctagatgtttgaaagtggacacactagatttctctaatgtaaaaggaatgatgtgttttaaatttacatgactaatattttttcatgcaaatcattcaaatt

SEQ ID NO: 340492 - DNA, 533 bp, Homo sapiens
agacttctgggccagggctgggcgcacacggggatgaaatatggtcccttccctttccacacctgtgtggtaacaaggggctagattagcaaacaattaaaatccaacacgtcctactgtacaagtgtgagagaacgctggaggagaaggcggcgcgagctgagccyttaccacctgagtgaaggagaaggtgggtgtgagctgagcccttaacacctgagcaaaggagagaacgctggaggagaaggcggcgcgagctgagcccttaccacctgagcaaggagaggttctctgtgcttaggttaatttcacagctgtttgggggcaaattggagtattttcctagcaatctttaaaccactgtcttctatattgcttaacctgtttaaaataactatgaaggaaaaagatgcttttgaattatgatgattgtaatgttatcgacagatcttagctggtaattctgttttccttttctccttagtgtcaaatcaacagtgccttgacatctttccacactgctttggaacttg

SEQ ID NO: 340493 - DNA, 533 bp, Homo sapiens
agacttctgggccagggctgggcgcacacggggatgaaatatggtcccttccctttccacacctgtgtggtaacaaggggctagattagcaaacaattaaaatccaacacgtcctactgtacaagtgtgagagaacgctggaggagaaggcggcgcgagctgagcccttaccacctgagtgaaggagaaggygggtgtgagctgagcccttaacacctgagcaaaggagagaacgctggaggagaaggcggcgcgagctgagcccttaccacctgagcaaggagaggttctctgtgcttaggttaatttcacagctgtttgggggcaaattggagtattttcctagcaatctttaaaccactgtcttctatattgcttaacctgtttaaaataactatgaaggaaaaagatgcttttgaattatgatgattgtaatgttatcgacagatcttagctggtaattctgttttccttttctccttagtgtcaaatcaacagtgccttgacatctttccacactgctttggaacttg

SEQ ID NO: 340494 - DNA, 533 bp, Homo sapiens
agacttctgggccagggctgggcgcacacggggatgaaatatggtcccttccctttccacacctgtgtggtaacaaggggctagattagcaaacaattaaaatccaacacgtcctactgtacaagtgtgagagaacgctggaggagaaggcggcgcgagctgagcccttaccacctgagtgaaggagaaggtgggtgygagctgagcccttaacacctgagcaaaggagagaacgctggaggagaaggcggcgcgagctgagcccttaccacctgagcaaggagaggttctctgtgcttaggttaatttcacagctgtttgggggcaaattggagtattttcctagcaatctttaaaccactgtcttctatattgcttaacctgtttaaaataactatgaaggaaaaagatgcttttgaattatgatgattgtaatgttatcgacagatcttagctggtaattctgttttccttttctccttagtgtcaaatcaacagtgccttgacatctttccacactgctttggaacttg

SEQ ID NO: 340495 - DNA, 561 bp, Homo sapiens
gcagtaactattttgcactctctaatttatttatgtgtttactacatggaaaactatttartgacagaaaaaggagataaaaaagaacaattcactcatcatctcagcgttgtttgttttcactctttctgtatgtgacccaatagagcatttaaatatgtatgttaagttgcatgcttattttttcctttgtttattttcttttctaattttattgtgggcattaggcgggattggacaatgttttatagttctttggcgttcctcaggtggcaagcacagtgccaggcacataatagaaacagtcaatagccaatcgatatttttagggttttacagatttgtttaaaatctgcagccagtgattatttgttttcaattagattccaattgcctctgtgctctcaagaatatatattctagtttctatttttttctgcttttctgttaaacctttggctttttggattgtaactgagcatcatctttcttgtttgtggacatgctggatcaatccagacacttaaaaatccactttgttagtataaaagaagcttcaag

SEQ ID NO: 340496 - DNA, 561 bp, Homo sapiens
gcagtaactattttgcactctctaatttatttatgtgtttactacatggaaaactatttagtgacagaaaaaggagataaaaaagaacaattcactcatcatctcagcgttgtttgttttcactctttctgtatgtgacccaatagagcatttaaatatgtatgttaagttgcatgcttattttttcctttgtttattttcttttctaattttattgtgggcattaggcgggattggacaatgttttatagttctttggcgttcctcaggtggcaagcacagtgccaggcacataatagaaacagtcaatagccaatcgatatttttagggttttacagatttgtttaaaatctgcagccagtgattatttgttttcaattagattccaattgcctctgtgctctcaagaatatatattctagtttctatttttttctgcttttctgttaaayctttggctttttggattgtaactgagcatcatctttcttgtttgtggacatgctggatcaatccagacacttaaaaatccactttgttagtataaaagaagcttcaag

SEQ ID NO: 340497 - DNA, 547 bp, Homo sapiens
ttgggcaactccaccatcagaatagattcagagcaactggcgctgtcatgcgtcagagaggatttatggacagaagaaagtaagtgacataaagaaaacagaagtgagatacagaaacagtcaggttgtttacagctcggggtctgccttatttrgctacggtttgaacagttggctgctgtgattggctgaaactccgctacttgttacaagagtttgttacagtctgtttatgcatccagttaggctacagttcactatgtacggagaaatctttaggctaaaatacgtaagaaggcagctttaggctaaacaatttaataggttttacatagcaacccttgacctgatttgccttctagttaaaggtagttaattaaatcttacttcaccttcagtagaagagctgaatgggtaaagctagcacaacataaaaatagtgatattaatttccctactctcctccttcttagaattccaaacattttgggaacctgtatttattttgatggataatatggatttacaaaaagatgcacaaaggcat

SEQ ID NO: 340498 - DNA, 547 bp, Homo sapiens
ttgggcaactccaccatcagaatagattcagagcaactggcgctgtcatgcgtcagagaggatttatggacagaagaaagtaagtgacataaagaaaacagaagtgagatacagaaacagtcaggttgtttacagctcggggtctgccttatttggctacggtttgaacagttggctgctgtgattggctgaaactccgctacttgttacaagagtttgttacagtctgtttatgcatccagttrggctacagttcactatgtacggagaaatctttaggctaaaatacgtaagaaggcagctttaggctaaacaatttaataggttttacatagcaacccttgacctgatttgccttctagttaaaggtagttaattaaatcttacttcaccttcagtagaagagctgaatgggtaaagctagcacaacataaaaatagtgatattaatttccctactctcctccttcttagaattccaaacattttgggaacctgtatttattttgatggataatatggatttacaaaaagatgcacaaaggcat

SEQ ID NO: 340499 - DNA, 547 bp, Homo sapiens
ttgggcaactccaccatcagaatagattcagagcaactggcgctgtcatgcgtcagagaggatttatggacagaagaaagtaagtgacataaagaaaacagaagtgagatacagaaacagtcaggttgtttacagctcggggtctgccttatttggctacggtttgaacagttggctgctgtgattggctgaaactccgctacttgttacaagagtttgttacagtctgtttatgcatccagttaggctacagttcactatgtayggagaaatctttaggctaaaatacgtaagaaggcagctttaggctaaacaatttaataggttttacatagcaacccttgacctgatttgccttctagttaaaggtagttaattaaatcttacttcaccttcagtagaagagctgaatgggtaaagctagcacaacataaaaatagtgatattaatttccctactctcctccttcttagaattccaaacattttgggaacctgtatttattttgatggataatatggatttacaaaaagatgcacaaaggcat

SEQ ID NO: 340500 - DNA, 547 bp, Homo sapiens
ttgggcaactccaccatcagaatagattcagagcaactggcgctgtcatgcgtcagagaggatttatggacagaagaaagtaagtgacataaagaaaacagaagtgagatacagaaacagtcaggttgtttacagctcggggtctgccttatttggctacggtttgaacagttggctgctgtgattggctgaaactccgctacttgttacaagagtttgttacagtctgtttatgcatccagttaggctacagttcactatgtacggagaaatctttaggctaaaataygtaagaaggcagctttaggctaaacaatttaataggttttacatagcaacccttgacctgatttgccttctagttaaaggtagttaattaaatcttacttcaccttcagtagaagagctgaatgggtaaagctagcacaacataaaaatagtgatattaatttccctactctcctccttcttagaattccaaacattttgggaacctgtatttattttgatggataatatggatttacaaaaagatgcacaaaggcat

SEQ ID NO: 340501 - DNA, 588 bp, Homo sapiens
aaaaacattcatagtagtatgatatgcagtattgagaaacaagaataactagaatattgaggaatacacactgttagccaaattaaacatattcacctagcaaaatattattttgtaacaaaaagtcataactaaggtaatgcttactctggtgtgctggaaaaagcacaggctctakaaaacgctaccaagttaaaatctcaagttgatcctggactaaatctatgactattagcaagatagacaaactctcaacttgcatttcctcatgtgaaaatgtgatgtaattatactgccttatgtggatataatcagtaaacaagaaaagtatcccaaatgtctagtctgaagctcggcacatacaataaactagttactgtatcatgatgataaatggaaaaggcaggatacaagtaagaagtgtagtaggacaaactatgtaaaaatattcacaggctgggcacggtggctcatgcctgtaatcccagcactttgggaggccaaggcaggtggatcacgaggtcaggagatcaagaccttcctggctaacacagtgaaaccccatctctactaaaaatacaaaaaatt

SEQ ID NO: 340502 - DNA, 588 bp, Homo sapiens
aaaaacattcatagtagtatgatatgcagtattgagaaacaagaataactagaatattgaggaatacacactgttagccaaattaaacatattcacctagcaaaatattattttgtaacaaaaagtcataactaaggtaatgcttactctggtgtgctggaaaaagcacaggctctataaaacgctaccaagttaaaatctcaagttgatcctggactaaatctatgactattagcaagatagacaaactctcaacttgcatttcctcatgtgaaaatgtgatgtaattatactgccttatgtggatataatcagtaaacaagaaaagtatcccaaatgtctagtctgaagctyggcacatacaataaactagttactgtatcatgatgataaatggaaaaggcaggatacaagtaagaagtgtagtaggacaaactatgtaaaaatattcacaggctgggcacggtggctcatgcctgtaatcccagcactttgggaggccaaggcaggtggatcacgaggtcaggagatcaagaccttcctggctaacacagtgaaaccccatctctactaaaaatacaaaaaatt

SEQ ID NO: 340503 - DNA, 640 bp, Homo sapiens
tattttcttagtataattttatgttatattaattttacctcaagtttaaaaaagaaaactgaatgtctagaaagtgcttatgctgttatgaaaataactacaactatttcataagttcagttggaaaataatagtttctcaatggaacttctgggcataattccacatttatcaaaaaggtataacataaggaataggggctcaaaaaggaggaaatgccagttattaaccttggccartaagggtattttggggaaataagaacacggatttgtttattaaaatgggcacccctctaaaccagccatcacttttgtctttcagtggaagatctcttatccttaagataagaaacctgattttatatctactgtatgtaatctactttcactatcaatgagagtgaaaatcaagagtgattaaagcatgcaaagggaagacaagggactgtgatcaggcttggaacacccatctgtttgatcacaggaaggaggatgaatgagaaccacaaaccgtctgagagattctgtttgaactgtgtaggctaagcattaacaattcccagcattcctgccctgagtacctacccttctactactgaagctaaaactatttaaaacttttagactatatttaccac

SEQ ID NO: 340504 - DNA, 628 bp, Homo sapiens
gcacagccaggtgccctgttcaaagttttgcccactgggaagatttcccttcaccactgtccttcagggatgtcctagaaaggggctgtagtgctacagctgtccacttttgggtgatgcctgcatgtcatgcagaaccatctgcgaacgaggccttagtcttttcttcctctgtcagctgatcatagggaactccccaggaggctatcagtgcaggctgggaaagagaaggcagggtggmaggagtggagatcatgggcatttgagccacttcctcatgtaacttacttctgctttcaggatctgctcaagcccaatcacatatataccacttccatttgatgatggaatgatgctgtgcacaatccactttatggctagataagttagcaaacacccagttcatgataggcagttcagatctcatggtggcttgatgacccacagtcaaacgttcagtttccaccaaagcccagtaataggccaacagctatctctcaaaaggagagtagttatctgcagaagatggcagggctttgctccaaaatcctagaggcctccactgtgattcacctatgggggcctgccagaggctccaaacagcatatccattagccaacgacacctg

SEQ ID NO: 340505 - DNA, 637 bp, Homo sapiens
ggtgaatgaggagtgtcaagtgcatttacatttcataactctctaaacagttcatgccaaggactatcagtgttctccataccattagaagtagagtccttagcattttgatgtctaatcatattaagaagccaactccagaaaccccaaaaccaaagaaagaactcaatttttactattcagttcctctagaaccactcctggtaccaaaatctgtattagtcaggattctctagagggacagaagtaatagggacacaatacatatatatgggagtttattaagtattaactcacaggatcacaaggtcccacaataggccgtctgcaacccgaggaacaaggaaaaccagcctgagtcccaaaactgaagaacttagagtctaatgttcaggggcaggaagcatccagcacaggagaaagatgtaggctgggaggctaggccagtctagtcttttcatgttcttttgcctgctttatattctagycacactggcagctgattagatggtgcctacccagattaagggtgggtctgcctttttcagccccctgactcaaatgttaatctcctttggcacacccacagacacacccaggatcaatacttcatatccttcaattcaatcaagttgac

SEQ ID NO: 340506 - DNA, 474 bp, Homo sapiens
gcactccagcctgggcaacaagagtgaaactctgtcacacacacacacacacacacacacacacacacaaacgtggcatgtgcctgtactctcagctactctgggaggctgagatgggaggatcacttgagcccaggaggttgaggctgtggtaagtgtgatcaagccactgcactccagactgggcaacagagtgagaactcgtctcaaataaaaagattagtttcatgtatataatgactacttattgatactatggaaaaataagataatggaataacaaatgattgttttagaatatcactaattcacttaacagagtaatgatctaggttttcctttaaaagatataaatgtgtttaarcccactaacttctattttggaagtcattactaatattgttcatgaatagtctctcctgactcatataacatgtcatattaaacttcaatggaataagcacaacattgttt

SEQ ID NO: 340507 - DNA, 474 bp, Homo sapiens
gcactccagcctgggcaacaagagtgaaactctgtcacacacacacacacacacacacacacacacacaaacgtggcatgtgcctgtactctcagctactctgggaggctgagatgggaggatcacttgagcccaggaggttgaggctgtggtaagtgtgatcaagccactgcactccagactgggcaacagagtgagaactcgtctcaaataaaaagattagtttcatgtatataatgactacttattgatactatggaaaaataagataatggaataacaaatgattgttttagaatatcactaattcacttaacagagtaatgatctaggttttcctttaaaagatataaatgtgtttaagcccactaacttctattttggaagtcattactaatattgttcatgaatagtctctcctgactcayataacatgtcatattaaacttcaatggaataagcacaacattgttt

SEQ ID NO: 340508 - DNA, 474 bp, Homo sapiens
gcactccagcctgggcaacaagagtgaaactctgtcacacacacacacacacacacacacacacacacaaacgtggcatgtgcctgtactctcagctactctgggaggctgagatgggaggatcacttgagcccaggaggttgaggctgtggtaagtgtgatcaagccactgcactccagactgggcaacagagtgagaactcgtctcaaataaaaagattagtttcatgtatataatgactacttattgatactatggaaaaataagataatggaataacaaatgattgttttagaatatcactaattcacttaacagagtaatgatctaggttttcctttaaaagatataaatgtgtttaagcccactaacttctattttggaagtcattactaatattgttcatgaatagtctctcctgactcatataacatgtcatattaaacttcartggaataagcacaacattgttt

SEQ ID NO: 340509 - DNA, 572 bp, Homo sapiens
ttttttgtaacttatctaggtgccacagttttggcactcattgagtggaaagtttgctcatctttaacttttcaataggaattgtgtaagctgaatcaattaggaagtctatrgtggtggctattgtctgtgctgttgtcagttcttttcaattaggtcaaaatcaaggttaattttttcctcacaggttgatacggattgtttgctgctgtgggctttatatttaacattaccctatcccttcttaaaatgagttatccatttttaaactgctgacgtctttggaatattgtccctggaagctttttgtagagcgtcaatgatttcaccattcttccactcactcgtcaccataaagttgatgtttgttcctgcttcaatttttgtagaattcatgttgctatgataggggctcttttcaaaccagtgtattattcttcatagtgcctcaaactagatcctgtttaaacatgttagaacaagttaggatgagtttattttgatgcaaatttttttattttcaggcatagttttttcataatacccatttttcatgaaatttttgaacaacc

SEQ ID NO: 340510 - DNA, 585 bp, Homo sapiens
cggattgtttgctgctgtgggctttatatttaacattaccctatcccttcttaaaatgagttatccatttttaaactgctgacgtctttggaatattgtccctggaagctttttgtagagcgtcaatgatttcaccattcttccactcactcrtcaccataaagttgatgtttgttcctgcttcaatttttgtagaattcatgttgctatgataggggctcttttcaaaccagtgtattattcttcatagtgcctcaaactagatcctgtttaaacatgttagaacaagttaggatgagtttattttgatgcaaatttttttattttcaggcatagttttttcataatacccatttttcatgaaatttttgaacaacccattgtatttctctgagctaatattgtagtgggaaaggggtcttggagaaaaataaagtaaagcatttttacatacataaaagtgcattagagtggggaaaacacctgactctttattctaaagatgatagagaaatgtgcacatgattgtacaagtagaaaatggagaataaatattaataaaatagtgaactatagttttgcttt

SEQ ID NO: 340511 - DNA, 635 bp, Homo sapiens
attcgcttcaacttagtcaccagctgcattagcccctaacaagagagtcagcctgctctttgaagctttgaaggcaggtgttgacttctcctttctagctatgaaagaaccaaatgacatcctcttccaacatgtaaggcagtttcatctacattgaaaatctgttgtttagtgtagtcacctttatcaatgatcttagataactcttctggataatttgctgcagcttctrtatcagcacttgctgcttcaccttgcacttttatgttatggagatagcttctttccttaaatctcatcaacaatcctctactagcttcaaacatttcttctacagattcctcacgtcgatctgccttcatagaattgaagagttgggggcttgctctggattaggctttgtcttaaaggaatattttggctggtttggttttctatcaagacaatcactcaaaccttctccatatcagcaataagtctgtgttgctttcttctcattcttgtgttcactggagtagcacatttaatttctttcaataacttttactctgcattcacaagttggctaactgtttgatgaaagcagcctagctttcaccctgtttcgacttttgacatgccttcctcactaagct

SEQ ID NO: 340512 - DNA, 619 bp, Homo sapiens
gaaagtctaaataaatagcattacaaataggagtaattaatcaataagttggactgctgtaatacaacatatacaaaaatttcaggtgtttttgaaaggatctgtacaaatactttggagattatatttgcaacctggaatctgcraggtgccttcttaaccaagaataggaatccagttgccagaaaagaattgataggcttgtttgataatataaaaatgaaaactttgtagagctaaagattaaattgaccaaaaacttgaggtgtaatataaggtagaaagaaagaaataaggatcccttacattgtttctaatcattctcactagaatattatgcattacttttggacaaattatttcactattataattagataaatagagtaatgctttcaactgaaatgaagtcaaaattcattcatttaatttattcagcaaatacatttcgggcacctgtttgttatagacttgttttaggtcctggggatacagctgtaaacagaactgaagaagaaaaacttgccctcaggagctcacattctaaatgagaaaaattaataggtagaaagtaaaatataagatggaaaacgtaaattatacattaaagaaaacaata

SEQ ID NO: 340513 - DNA, 558 bp, Homo sapiens
gtacctctgtcctgcttacttcaaaagaagttttgaaaayagaaacttcatttcttgtcatacctctgttgttttccacatataatgtacccttctcatctgaccgtccttgcaacttggaagaactcgattttccttcttttccctgtgaagcttggaagagctcgattttccttcttttccctaccttcagagatgctgacaaaaatgatttcttgccccccattcccgattactaatttggaaaaaaatatcaatcttctaaaaatttaacatggagtctaaaactgatatccctgaaaataaatgtaaaaacgtagataaattttggtaaagatgtgataacagtgctttcaactgcagatgaaggtttaatattgactaaaatttaaaagcattgccttgaattccctttccatctcttttgttttaggtgtggacactttgataacatgtcaaagttatcaaagatgctataccatctttcaatagtatcacaacagacacccacaacacacttgcacttgttttcattagttagttttcagatatgaacat

SEQ ID NO: 340514 - DNA, 558 bp, Homo sapiens
gtacctctgtcctgcttacttcaaaagaagttttgaaaatagaaacttcatttcttgtcatacctctgttgttttccacatataatgtacccttctcatctgaccgtccttgmaacttggaagaactcgattttccttcttttccctgtgaagcttggaagagctcgattttccttcttttccctaccttcagagatgctgacaaaaatgatttcttgccccccattcccgattactaatttggaaaaaaatatcaatcttctaaaaatttaacatggagtctaaaactgatatccctgaaaataaatgtaaaaacgtagataaattttggtaaagatgtgataacagtgctttcaactgcagatgaaggtttaatattgactaaaatttaaaagcattgccttgaattccctttccatctcttttgttttaggtgtggacactttgataacatgtcaaagttatcaaagatgctataccatctttcaatagtatcacaacagacacccacaacacacttgcacttgttttcattagttagttttcagatatgaacat

SEQ ID NO: 340515 - DNA, 589 bp, Homo sapiens
actggtctgggaatgtggtctattttcacactgtgtggtctctcttaacatcagctcctgaccctgtgggcctgcctttccatgcagtacccttgttctctgagagtgaggaggtctgtgttttgagccttcctacagtgagtatggaatycgcaggaatgttctctgtatgctatagcaataattcttgccttgcttgttaagtgataaagctggagggttagatagtaacatgtagaaaatagtcactggacatacaaaacataggaagtttaggtaggaaaacaggaaaaatgcctcctttacataaactgcagacacatgagaaaaagcaataaaagatcatgcacacatatggtataaaccaagtgtgattatgtgtatggatatacatatattcacacaattatttgcagtatgtttagataagttctgtatatagcaaactgttaataaaaagctcagaaataatttatcatcaggataaaatataatgttggaagcattatttgtgtaaaaaatcagatgtttttgtctggtgaggggaagaatttgtgtatcaaagtaaaacccatggttttaatccagg

SEQ ID NO: 340516 - DNA, 589 bp, Homo sapiens
actggtctgggaatgtggtctattttcacactgtgtggtctctcttaacatcagctcctgaccctgtgggcctgcctttccatgcagtacccttgttctctgagagtgaggaggtctgtgttttgagccttcctacagtgagtatggaatcygcaggaatgttctctgtatgctatagcaataattcttgccttgcttgttaagtgataaagctggagggttagatagtaacatgtagaaaatagtcactggacatacaaaacataggaagtttaggtaggaaaacaggaaaaatgcctcctttacataaactgcagacacatgagaaaaagcaataaaagatcatgcacacatatggtataaaccaagtgtgattatgtgtatggatatacatatattcacacaattatttgcagtatgtttagataagttctgtatatagcaaactgttaataaaaagctcagaaataatttatcatcaggataaaatataatgttggaagcattatttgtgtaaaaaatcagatgtttttgtctggtgaggggaagaatttgtgtatcaaagtaaaacccatggttttaatccagg

SEQ ID NO: 340517 - DNA, 610 bp, Homo sapiens
tctgcttcaagtaagcagatctcacctgtgactctagattcrcctctccagatctggagtgacagctttccctgcaatattagttcactggtggatctaatgaaagacattgagtttcaactttttctgcttttttgttgttgttgcaaggacatgagtgatgacttccaagatctttgcatgttgaagctgaaagtggcagtcatatgttactttttaattagaaaaaaatatataatttttataagtgtcagaattttttaagaatcatgatatactaaaatgctgaaagaaatttttgaagccaaataaaatgttaaggccaacaaaaaaggacatttgagctaaaagtctactaaggaagattcatggcctggagaagtgatataaataaactctgacagagagaaagcagaaatactcaattcttataagatttctatttatttcattacaaagaatgatactaaactttgaaaaagcagaactagcaaatttttaactcaaatctgaaacttaagatgaatagatataaaaagatgcctatcttctttagaggagatcatctggagtcccaaaagggctattgattaagacttctgtgttcatt

SEQ ID NO: 340518 - DNA, 507 bp, Homo sapiens
gcacctagcagtaaaacctaggtggggaagtgtggaggtacattaggacagataaatacattagacaggattcttttcattgcaagtgaagaaactcaaactagcttaatgaaattataaaaacttamcagttcatgcaaacctagctggatttaatcgcttaacaacataatggagagtatatctatctcagtgcaaattgaaaccacagtaagatactatctcacacctgttaagatggcttctataaaaacaaacaaaaaacagaaaataacaagtgttggcagggatgtggaaaaatgagaactcttgtacactggtagcgggaatgtaaaatggtgcaaccactatggataacagtataatcgttcctcaaaaaattgaaattagaactactatatgatccagcaacctcattataggtccaaaataataagaatcaaagtctcaaagagatactttgcacacttgttttcatagaagtattatttacagtaacctagcagt

SEQ ID NO: 340519 - DNA, 620 bp, Homo sapiens
taaaaagatctcaaattaacaacttaatatcacaactaaaagtactagagaactaagaggaaaaaaatcccaaagctggcagacaacaagaaataaccaaaaccagagctgaaccaatggagattgaaacgtgaaaagccattcaaaaagtcaccaaactcagaagctattaaaaaaaaagaaatcaatgaaatagatagaccactaggtagactaattaataaaaaaaaagagaagattcaaagaaacacaatcagaaataacaagggggttatatcagtggcaatatccactgaccctatagaaacacaaacaaccatcagataatactatgaacacctctatgcacataaactagaaaatctagaagaaattggtaaattcctggagaaatacacccaccrcccaagactgaacaaggaaagaaatgaatccctgaacagaccaataatgagctctgaaattgaagcagtaatacatagcctactaaccaataaaagcccgggacccgatgaatttacagctgaattctacaacaagatgtaccaagaaaagctggtaccatacccacagaaagtattttaaaaaattgaagaagagatactcctccctacctcatt

SEQ ID NO: 340520 - DNA, 580 bp, Homo sapiens
attattgtataaaatggctcaatttctgaaaacttccaattacgttaaaactgtaaaaataatagttgaatttaattgtaaaattaagctgtgctctaggtgccattcacacccatataagtatcttgataatttttttaaaaaatttttgaggactcagggatattctttggaggctatccagcattcctggcctctatccaatataaagctaaaagtgccccaaatcattgcaacaaccaaaaaaaaatgcctctatgagattccattatattcttggtcagacaataaaaacttatgattctatgatccagctactcttgcctagttragaagattgaccaatggcttcttcatgcaaacagaaattttcccttccatatgcattaaggtgcagtttcccttagtagtcttatttacttttcagccaaatttgttcaaaaaaagaattgataacttttataatttgaaagcacagaaaagacgtttatgataaatttgctagctgacgtgatattcgatttttaaacaaactcagtcatcccaatgctatattcttgcacacattcacttgccactc

SEQ ID NO: 340521 - DNA, 296 bp, Homo sapiens
ggaaaaataagcattttacaatctataaatcatgtctaaatgacaagtaaaaagagaagaacaggctaaaaataggaaaataaacatgcagagaatatgtattaactgaataacttttgtggggaggttacagtcataacttgtttatrtcaattatatggaattctcacaaaaatcctgtaaataagttttaaatcatagtctcataaatgaggaaacagaggttcagagaggttaatgcacttgctccggggagcaaacccctggagggcagatttgagattccagaagcagga

SEQ ID NO: 340522 - DNA, 615 bp, Homo sapiens
agaatatgtattaactgaataacttttgtggggaggttacagtcataacttgtttatatcaattatatggaattctcacaaaaatcctgtaaataagttttaaatcatagtctcataaatgaggaaacagaggttcagagaggttaatgcacttgctccggggagcaaacccctggagggcagatttgagattccagaagcaggactgagagctgtttggcactgaggtggagttggggaaggggtrggcagggtgggcatggcgtttccagtagtctcttccagaagagtcctaagcgattgctagggaacagatctaaagcacccagtttattcttttttgcacaaagcagcatgtctgaggcaggctgagtaaaacattcagagtatggtgaacagatagacttacatgaggcctgaaataaatacattttgaataattcattttctggtcacgaaattctagttgaaaagcaaaattcacatcttgccctgcctccatgatgactaggcacattataccacagtcagaaatgaaaacaaaacacacatacaaacaaaaaccatttcattaatggatgaactaaaacaaactgaacaagaacccaccagtcc

SEQ ID NO: 340523 - DNA, 634 bp, Homo sapiens
aaatgtattcctgcacagctcacttttctttaatagcctacctaacaaatatcagcagtccaagtatcatcaaactccagtgtttgcctccaaagttcagtgaaagcactatgcttctgagtttagttttgaccctatctttccacacatatgcccagacagtgcctacattgtgctcagtcacaaagctagatcaacagtggatctcatcacttgcagttcccatttgtcagggatcatggtcctatactgtatgctatccaatgtctgaaaattgtattattatatatttagctttatttttattaaaagcatagrgctaacttcagtactagttacgctgttatggccagtaatgaaaagccatgtattattccctctcatcaaatatattttgtctagtaattcatataaatttttgcaaaacatcaaggtttaatgataaaaatgcaaaaatattaaataaaaagcataaaatagaaggaaaatatgttagtaaccagagtcacagttctgcaacaacttggaaattttactaatggtggcatggatcactgtgtttctaagctgggctctctaaatgagcacttttaaacataataggaattcaatcttttgtggatattttaaaaat

SEQ ID NO: 340524 - DNA, 498 bp, Homo sapiens
gcaatttctacttaaattttaggagagaggatgagtccagggaccagaacccaatataccacaaagtatttgttgataactgcactttgttgcctggtcaccagcaaatgccactaatgaagggtgactttaagctgttacgaagtagcagcattaggaggagtatattcacctagactgccgctttgtagatatgagtctttagartagaggactggatggctaaagacctttggttatgccacactgccctttcctagtcttcacctctggagggcttttgtgctttactaatattacccacccccctctttatccctgtaattagtatatgttaaaaataatctacataaaaagcaaaataaggacataccttgtgaatccccaaactgggtgtaaaagcctgtaaaccttactttacatcttaatttaaacaataaattgtttttaaaaactgtaacttatgaggcaatttgaaattggaacacactatatatt

SEQ ID NO: 340525 - DNA, 574 bp, Homo sapiens
attaatagaaatgaggagtggtagattcagttgggaaggtaggttaggccagatcctgccggtgtttgaacctactttatgtgcaatggggagggactgaaggtctcaaacaggggaatgacttttaatggagctggatattgcaaatattaacgggtcacaggcaaaacaaaattttctttctgacaaactcaccaaaatatcttacatacaatacrtattagccacatcataagtgaaaaatgaaaaaatgttctatcccaaattgataggaaatagtattgaaaagttaacactttgttatttaacgtaaatatttgttatattaacataatgtaaacatgacatgttaacatatttaacataaatatcatgttatttataaaaaacaatacaaatagcaagttatacggtggtgtttctcagggatgagcgagctccaaagcagaagctataaaatcaacccctgataaccctctgagcctaagtacccatctacaaaaaaatcatgatggctacctcacaataatgctgtgaggtttaaataataaaataatctatgcaatgcccttaa

SEQ ID NO: 340526 - DNA, 585 bp, Homo sapiens
atgactatagatgatcctgctgtaaatgctagcaggaaattaataatagcactgcctgagatctgcaaacttctaggtatcattcagcaggagtgcataaaatgagaagacttaaatatgaggctgctggctattttytaaatcatgtgagcacctttttgtcactgctatcatctttctgaattatttaaatcataggaaaattacagaaattaacttgtatcttcagatttccattggttcatgtgttatcattaaagacattgatgggttatggttaaggacgtaaaaggagaggaatggcaagtaaccatgaaagatatttgccatgattagagagcttattccctttagtgaaatggctacaaccaagagttatttaaattttcttattgctcagactgaggcacttacttctacttggtagtcacacacacacacacacacacacacacacacacacacacaaatacacacacagccctgtaattctttatccaggaaacgtttggtgagcaccttatgtatctcaggcacattcctaggttctattgtgggaaataagtgagtaaggcaagatcattg

SEQ ID NO: 340527 - DNA, 585 bp, Homo sapiens
atgactatagatgatcctgctgtaaatgctagcaggaaattaataatagcactgcctgagatctgcaaacttctaggtatcattcagcaggagtgcataaaatgagaagacttaaatatgaggctgctggctattttctaaatcatgtgagcacctttttgtcactgctatcatctttctgaattatttaaatcataggaaaattacagaaattaacttgtatcttcagatttccattggytcatgtgttatcattaaagacattgatgggttatggttaaggacgtaaaaggagaggaatggcaagtaaccatgaaagatatttgccatgattagagagcttattccctttagtgaaatggctacaaccaagagttatttaaattttcttattgctcagactgaggcacttacttctacttggtagtcacacacacacacacacacacacacacacacacacacacaaatacacacacagccctgtaattctttatccaggaaacgtttggtgagcaccttatgtatctcaggcacattcctaggttctattgtgggaaataagtgagtaaggcaagatcattg

SEQ ID NO: 340528 - DNA, 543 bp, Homo sapiens
ataaaaaggaaatttgacaagtgctgataggagatcaaggtcaacatcaacagagataattcatgttgatattatgtacccttcatatgatgtgataagaatgtcaatttacctctgtggttttcctcctgaaaaccaaaaactacagtctaatcatgagaaaaacatcacacatatctaaactgaggaatactgtacaaaatatctaatcagtactccttaaaagagttaagatatcaaamacaaacgatatctgagacactgtcacagccgaaagaagcctaaggaggcatgaaaatgaaatgcaatgtgtatactggatgaaatactaggacttaataagcacattaggttaaaaactaaggaaatctgaatagagtatagaatttagttaacaatgtgtcaatattggtctattagaactcttctgatgtcagatgttaaatacagaacaaactgttcccgggttatatgaggactctactatttttgtaacatctttgtaaatcaaactattctaaaattaacagtttactaaaacat

SEQ ID NO: 340529 - DNA, 543 bp, Homo sapiens
ataaaaaggaaatttgacaagtgctgataggagatcaaggtcaacatcaacagagataattcatgttgatattatgtacccttcatatgatgtgataagaatgtcaatttacctctgtggttttcctcctgaaaaccaaaaactacagtctaatcatgagaaaaacatcacacatatctaaactgaggaatactgtacaaaatatctaatcagtactccttaaaagagttaagatatcaaacacaaacgawatctgagacactgtcacagccgaaagaagcctaaggaggcatgaaaatgaaatgcaatgtgtatactggatgaaatactaggacttaataagcacattaggttaaaaactaaggaaatctgaatagagtatagaatttagttaacaatgtgtcaatattggtctattagaactcttctgatgtcagatgttaaatacagaacaaactgttcccgggttatatgaggactctactatttttgtaacatctttgtaaatcaaactattctaaaattaacagtttactaaaacat

SEQ ID NO: 340530 - DNA, 543 bp, Homo sapiens
ataaaaaggaaatttgacaagtgctgataggagatcaaggtcaacatcaacagagataattcatgttgatattatgtacccttcatatgatgtgataagaatgtcaatttacctctgtggttttcctcctgaaaaccaaaaactacagtctaatcatgagaaaaacatcacacatatctaaactgaggaatactgtacaaaatatctaatcagtactccttaaaagagttaagatatcaaacacaaacgatatctgagacactgtcacagccgaaagaagcctaaggaggcatgaaaatgaaatgcaatgtgtatactggatgaaatactaggacttaataagsacattaggttaaaaactaaggaaatctgaatagagtatagaatttagttaacaatgtgtcaatattggtctattagaactcttctgatgtcagatgttaaatacagaacaaactgttcccgggttatatgaggactctactatttttgtaacatctttgtaaatcaaactattctaaaattaacagtttactaaaacat

SEQ ID NO: 340531 - DNA, 600 bp, Homo sapiens
tctattagaactcttctgatgtcagatgttaaatacagaacaaactgttcccgggttatatgaggactctactatttttgtaacatctttgtaaatcaaactattctaaaattaacagtttactaaaacattgatggaatgttgataaaattattaagaaaatgatgataattaagaagagtgatatatttctgattgctaataaatatacctacatatttttacttgattttgaaggttcaaataactgtaatatttgaattgtattatatttatacacacacacatatatatacataaacacatatatatatatgaaagaaagatgtaactggtttaaaaatgtagatatataactaatgcaaactgaaawcttagaaattatttaaccttgggataaaaagttttagaaacaaacttaaacttaggacaatgtaacctggatttgtcaaaatatttttggggtttctgaaacagatatattttgaataagctagtataaatactaaacacttcatgatttcagagtcatttaagagtgtgcttatctcataacacctttcaagaagacaatttttttattcttagtgcaagacaagc

SEQ ID NO: 340532 - DNA, 600 bp, Homo sapiens
tctattagaactcttctgatgtcagatgttaaatacagaacaaactgttcccgggttatatgaggactctactatttttgtaacatctttgtaaatcaaactattctaaaattaacagtttactaaaacattgatggaatgttgataaaattattaagaaaatgatgataattaagaagagtgatatatttctgattgctaataaatatacctacatatttttacttgattttgaaggttcaaataactgtaatatttgaattgtattatatttatacacacacacatatatatacataaacacatatatatatatgaaagaaagatgtaactggtttaaaaatgtagatatataactaatgcaaactgaaaacttagaaattatttaaccttgggataaaaagttttagaaacaaacttaaacttaggacaatgtracctggatttgtcaaaatatttttggggtttctgaaacagatatattttgaataagctagtataaatactaaacacttcatgatttcagagtcatttaagagtgtgcttatctcataacacctttcaagaagacaatttttttattcttagtgcaagacaagc

SEQ ID NO: 340533 - DNA, 600 bp, Homo sapiens
tctattagaactcttctgatgtcagatgttaaatacagaacaaactgttcccgggttatatgaggactctactatttttgtaacatctttgtaaatcaaactattctaaaattaacagtttactaaaacattgatggaatgttgataaaattattaagaaaatgatgataattaagaagagtgatatatttctgattgctaataaatatacctacatatttttacttgattttgaaggttcaaataactgtaatatttgaattgtattatatttatacacacacacatatatatacataaacacatatatatatatgaaagaaagatgtaactggtttaaaaatgtagatatataactaatgcaaactgaaaacttagaaattatttaaccttgggataaaaagttttagaaacaaacttaaacttaggacaatgtaacctggatttgtcaaaatatttttggggtttctgaaacagatatattttgaataagctrgtataaatactaaacacttcatgatttcagagtcatttaagagtgtgcttatctcataacacctttcaagaagacaatttttttattcttagtgcaagacaagc

SEQ ID NO: 340534 - DNA, 316 bp, Homo sapiens
aatcaagttactgttttctaggctctaccatcactgtggcttttctttgcttcagctcaagtaattttgcacgtaagctttgccctcagtaaaaaagtcattatttttctcctatrcaggaatcaagatgaaggaatgcccagaaataaaactcctcgttgtggctgtaaaccaaaaagtgtctgagacaggtgtcaatcaatttagagatttattttttcaaggttgaagacatacctgggaaaataagacacaagtcaccataggatctgtggcccctgctttttccaaagagggttttgaagactacaatatt

SEQ ID NO: 340535 - DNA, 581 bp, Homo sapiens
catcaaattttttgcttgatttcgaggtgatcattggtgatttaaaaagaattacttggatgttaaagaatccttaaccattattcaatcattaacttattgaatcattaacttaatttcaaagatgatccccatagaaagcacacattttcggaaaaggccaaaggtggaatgtaggctgcataactacatctcagaaatggtgagctgaatataatgactattgaacaaaaaaatcaaagattcctgttgagcttcatatcataccttagtgatctttgctcatccrtttaatttctctcttactcagattcttcataagtaaaatagaaattataattactgtattgtctatttggcaggattgtaataaatcactgtgataaagcagtgaaaaagtaagtgagtaattactttgaaaattaacaaatacattatatatatgggatctagaccaggctacaaggtatgtaataatgacagctccttaaaagagtccccagttaaaagatagggccactgtccatagggacaagtattgcctactgaccctgtctgcgctcagggcacatacggttgga

SEQ ID NO: 340536 - DNA, 610 bp, Homo sapiens
ccactatgaagaaatatttgaggctggataatttataaagaaaagaggtttagttgactcacagttccacatggctgtggaggcctccagaaacttacaatcatggcgaaaggcattttttcacagggtgccaggagagagaatgagtgccaagcgaagggagaagcccctaataaaaccatcagatctcaygagaactcactcactgtcatgagaatagcatggggggaaactgcccccatgattaaattacctcctactaggttcctcccacaacatatggagattatgggattacaattcaagatgagatttgggtggaaacacaaagctaaaccatattagatacaaaagggagggtaggtagtgagataagtggtcacatttttgtgagactttgattagtgctcactgaatccatgtgaaaagagagagtagaggaacagtcagttacacattcatctcatggcttactcagtgaatctgtattttatgtaagctaaaaggaaacagagtagagaaaagtcaaatatgcatttgtcttgaggtaggaagagggatgatttctagtcttgtctttgtcctacaactgtaaggataagctgttaat

SEQ ID NO: 340537 - DNA, 624 bp, Homo sapiens
tggtggacaaatttaggcaaaactgtttttctacagtaatttgtgaataaacttctattgtctttcaatgtctctttgggttgctccagatttctctttatttttcatattttcaaaagggggarcatctcacattctttgtgattatactttctcctctatatgtctcttcagaaactcatttgagtcagagcgagtgtatcccttgcgaggtataggagatttgtgaagaacaaaaataaaacacttaactctttctagaagccaaagagattacaagtgaatgaaacagtcttagtttaagacaaatggcatctgttttgcatacaactttttaaaattcttcacttgaaagcgtgttcaccaatcttccctaaaatatgcagcctctaagtctaaattttatttttctagttgtgatagggagtttgttacagagaaatattttcctaccataaaaatatagttgttcaaggaaaacaataaatgataactgatttttggcatcactgctggcgagttaattattaagaagtgttggagaatgttttgaaatgaattgcacattgcactctctcagtagagggaagttgttattcatattaagcatcttttactttgtgg

SEQ ID NO: 340538 - DNA, 538 bp, Homo sapiens
tatcaaatgttctctccacttactttgaaacacattgagagccaagcaaaatatgtctgcacatcatatctggcccttgggataacaaatttaagacttcattactgacaatgcataatacaaaataaatcattataccatcagttaccacaggcagttccactgtgttcagtaaaccagtgtatattattgagcacagttgtcaagcttacaactcaccaatgtrtacaactcaccaacccacaactcagatccctttcaatgatacaataatatgcaatgactactcataagaatactgcttatagaaaagttgtgattgaaatagtgagttcttgactacttgttgtgtttccacttgttaacttacagtgttatattacagggtgttttttttttgcatgcacacagaaattaatgtgcaaaatcataatgtttcccaattcatataaagtctaatgggaacatagtaaactgaatcagataaaatcataattttttggtctattattttgtgcaaaacccaaaacaaaaacaa

SEQ ID NO: 340539 - DNA, 615 bp, Homo sapiens
tcatgctatatgaagaatatttaagctcattcaattaacataggaactagtatttttatttatttattttttttgagacggagtctcactctgtggcccaggcaggagtgcagtggcacatctcggctcactgcaacctctgcctcctgggttcaagccgattctcctgcctcagcctcccgagtagctgggattataggtgcgtgccaccacacccagctgatttttgtatttttagtaaagacgaggtttcaccatgttggccaggcttgtcttgaactcctgacctcaggtgatccacccaccttggcctcccaaagtgctgggattacaggtgtaagccaccacgtccaactggaactagtgtttttatatagacatcagagaaaaatcatcacacaccctaaaaactcgccccaatagcattataaaaaacagaatcctgagttgaaggaaccagtatcttttayagtgtgattcctttattttgctgtgttcagtatccccaagtcctatgtaattcatttcctgggagaaacagactagagataatgttaagcaggtattggcttgaggactgtgttgatttcctatgaactgcttgtgatagtttgt

SEQ ID NO: 340540 - DNA, 615 bp, Homo sapiens
tcatgctatatgaagaatatttaagctcattcaattaacataggaactagtatttttatttatttattttttttgagacggagtctcactctgtggcccaggcaggagtgcagtggcacatctcggctcactgcaacctctgcctcctgggttcaagccgattctcctgcctcagcctcccgagtagctgggattataggtgcgtgccaccacacccagctgatttttgtatttttagtaaagacgaggtttcaccatgttggccaggcttgtcttgaactcctgacctcaggtgatccacccaccttggcctcccaaagtgctgggattacaggtgtaagccaccacgtccaactggaactagtgtttttatatagacatcagagaaaaatcatcacacaccctaaaaactcgccccaatagcattataaaaaacagaatcctgagttgaaggaaccagtatcttttatagtgtgattcctttattttgctgtgttcagtatccccaagtcctatgtaattcwtttcctgggagaaacagactagagataatgttaagcaggtattggcttgaggactgtgttgatttcctatgaactgcttgtgatagtttgt

SEQ ID NO: 340541 - DNA, 545 bp, Homo sapiens
cataacaagggagatatgaaagcagagtggataagtgcctcaatcctcagttggaccacatgtttttgacatggatctatagtttccttcaagatttgctgtggcaggaatacttgaacatcggtgggcaggtaagtagtggcagaacggacctgaaacagcccacatatgtcactacctgtagctagagaacaagtgcttcttatgttggtgggttgctgtttttgttcaaarttgaaaacttcctgctctttttcaattattttctgctccattttatttctcttctctatatgagtccctggttacaatcatgtcagacagcttaatgttttccctcatgatgttgattcttttcattttctacaatctcttttctctctctgtttgacttaagaaaatttccgttgatctactcctcacattttctgtttcttcccccttgtatgtacaaactacttttaagtttatcctttgatatttttattgatattatgttttccagttttttagatttcctatttatcttttgaaatacttatttc

SEQ ID NO: 340542 - DNA, 603 bp, Homo sapiens
tccaactcctaccatagaatatgataattcatagcttctttataagcaccagttaaatttgagtctgttagaatggatgtatatatgagtttatcaacatttctaatcctttgtgattactttagaaaacaagtagacaggactttgagtcttaagaatatttgattaatcatattgatcagtatctccaatcccattgctatacttcatgcatccaaaacctcttaattttcatgccatctaagtcaccatttcaacacttactttactgatccttgtcttttctcattaatgactttttttaaaaaaattaatcaattcttgtgtatcatcagttggagaaatctagcaaaaaacttcaagtaaatatttctactttggctggtatrttccaaccaggttttaaattccttcagggagggcagggtcctatccattattttaattagtttttttgttgttgttttaggttcatggcaaaattgaatagaaagtacagaaagttcccatatgctgcctcctccactcagcacacacacacacacattatccttcactatccacattctacaccacaggagcacatttgttacattcactgaa

SEQ ID NO: 340543 - DNA, 603 bp, Homo sapiens
tccaactcctaccatagaatatgataattcatagcttctttataagcaccagttaaatttgagtctgttagaatggatgtatatatgagtttatcaacatttctaatcctttgtgattactttagaaaacaagtagacaggactttgagtcttaagaatatttgattaatcatattgatcagtatctccaatcccattgctatacttcatgcatccaaaacctcttaattttcatgccatctaagtcaccatttcaacacttactttactgatccttgtcttttctcattaatgactttttttaaaaaaattaatcaattcttgtgtatcatcagttggagaaatctagcaaaaaacttcaagtaaatatttctactttggctggtatgttccaaccaggttttaaattccttcagggagggcagggtcctatccattattttaattagtttttttgttgttgttttaggttcatggcaaaattgaatagaaagtacagaaagttcccatatgctgcctcctccaytcagcacacacacacacacattatccttcactatccacattctacaccacaggagcacatttgttacattcactgaa

SEQ ID NO: 340544 - DNA, 614 bp, Homo sapiens
tgtatagtttcttcctgcttgcttgctttctgtactctttttttttgcatgtggatatccagcaacatatgttgaaaagactattctttctccaacacattgctttttcacctttgtcaaaaaatagttgattatatatgtggtctcttggtgggtatttgatttgtctgytattttctaataccacagtcttatttattgtagctcatagtaagtcttgaagttggttagtgttaattgtctgactttgttcttcttcaatattttgttatctaagtcttttgcttccccatataaactttaaaattaatctgttgtcataaaataatatgcttggattttgattgatattgtattgattcaacttaggaagaaattgcatcttgacaatactgactttttccatttttattcttccaataggaggtactgtgatctggagtatataatgtgaaaaatatatctgtaaaaaatgaacatacggagagttcattcatatcggtatcagtttactagggctgccataacaaagtcatacaaattgaatggatttgacaatagaaatatattgtctccaattttggaggcgaaaagcctaaaatcaagacgttgtc

SEQ ID NO: 340545 - DNA, 584 bp, Homo sapiens
ttgcaaaacggaaacatttttaattcaagtttcaaagcttgaactgctacaatttgactcactcgggcacatttagtgatcgtgggaaacccctctattactatgtatatccagatgaacaaacccttcatgtcacatgcaagcttacccacaataaaagactgctttcattctttgccaggtctgttgaattgaaattyatactgcaatcaaaaattatttgttttaactaaggaattattttctctctatttaattttatatttcaaaaagatgatgttgcaagttctcagaagctctttaccttccagatactaaaggattagcagcaccctacacctggaaacaaacaggcaaaatgggtgcaagccatcaagcagacttatcaaatatcactttatttactctaaagcaaaagcatcatttaccattccattccagctctgtcaatttaggcagccaccatactctgatgactgcagtctgctgtgatgactttttatgtgtgaactagtcacaatagtatgcataaaagaattcattccctaatctaaaacctctgccagtaacggactattgttgac

SEQ ID NO: 340546 - DNA, 614 bp, Homo sapiens
tgtatagtttcttcctgcttgcttgctttctgtactctttttttttgcatgtggatatccagcaacatatgttgaaaagactattctttctccaacacattgctttttcacctttgtcaaaaaatagttgattatatatgtggtctcttggtgggtatttgatttgtctgctattttctaataccacagtcttatttattgtagctcatagtaagtcttgaagttggttagtgttaattgtctgactttgttcttcttcaatattttgttatctaagtcttttgcttccccatataaactttaaaattaatctgttgtcataaaataatatgcttggattttgattgatattgtattgattcaacttaggaagaaattgcatcttgacaatactgactttttccatttttattcttccaataggaggtactgtgatctggagtatataatgtgaaaaatatatctgtaaaaaatgaacatacggagagttcmttcatatcggtatcagtttactagggctgccataacaaagtcatacaaattgaatggatttgacaatagaaatatattgtctccaattttggaggcgaaaagcctaaaatcaagacgttgtc

SEQ ID NO: 340547 - DNA, 618 bp, Homo sapiens
aattgtcaaattcctcatagaaaaagataatttgttcttaatatttcaggataaagcttcaagtaatatagaagataaagttattcttactattgtgatagtagtgttgcccctggaccccagtcattgaatctgcatggggctcaattaatgtttcactacattagatcttaatttttaatatttttaatgtagctttttaacatatattcttttcatgttgtgtttaggaggaggagaatgagtaagagttgaattgatggaggattgtcactgtgcctaacaagagatggtaatggcttgaccaaattatcttagtgcccagagccacccataaggctaagckgtagcaatattactggctgcttgaagagtagtgtacaatcctaaaattttgcttaatggaggaggagtttctttataaccagtcctttaaacactgtgccatagagagaagtctgaatcagaaaatgtcatcaatttgtgtgtcaaagtgaacttttcaaacagaaccaagactagagaacatattgaataagaatgagacaggttagagtatggggaagctttcaaggagcttggaagggagcagtataaagaaatgaaagcagatatgaa

SEQ ID NO: 340548 - DNA, 466 bp, Homo sapiens
cagaaacttctaggggcaaggattttttaaagtaataaatttgcagtgaaataatatcttctggaaaacatgggtatagcttaacaattctaaaattggtatacctgcacaccggcattgaataattacgtaaatcactggtggatagtgggaaccagatttatcactgctgaagtgaaggattgcagataaacatgagagagggctagaataatccctgtcttatgggattagagttggagacaccaggatgaactcctgtttactttaatgtagctacagatatatatatgtagaaatatttacagatatttatgtctgtgtatatattagtatacacacatacatttctcttctctgccagctgagaagcatattttwgtgccagaaattaaggaagtactgaaaacaaaaacaaaaacaactctacaatgatgagattataacaaagggacaccagagccaa

SEQ ID NO: 340549 - DNA, 577 bp, Homo sapiens
cagtttcttgaaggtctctcacacactcacatatctagaaatcatgtagctgaaattgtgaacaagcagtctaccttgagaacatatgctgttagtcattaaactataatgcttaataagtaatttgccagatgttaaagaaaattacactaggcaaattaaacagcaaggaagacttcataaaagactagcagtaaaggtcaaggctattgcactaggaaagagagattgaactcagctgtggtgaaacaaaaggcaggaaagttattaagtactggggtgagctaacagaagagtacaggaagactttatcggaaggttggtcaatttctttaggccatctgtgtttgataattggtacttgtaatctgtgtttgctaattaagtaggcttctgcccacycacacagagactgagagctaggagtgattttattttgttgttcattttactgtaattatatttcaaagggatggctcccagactcacgagaaagacattactttgttgtaaaactggggagaggccaggcaaagatttatacctcaaaggtgcagaggaagaattcgttaattgc

SEQ ID NO: 340550 - DNA, 618 bp, Homo sapiens
ctttttgtattgagttcaggaggagaaatttaaaatcccctttgaactttatttggtaacactaggttagagtactttcttgcccctagctaagttctcactcaatggaacataatgatgcctcctgtgtgtctagaaaccatacagataactgcctactgagcaaattgagtcaaagatgcagaatggaagaaaactagcattattgaatgctagcatacagagtgaaagcttcttttaatccaaaagatgggtaagatctgttgaaaagtgatgtggttcctgcttcctacagctttaagcagtaggaaaaaatatctaaaatgttaaaaattgtgcaattgtattaataattttacaacttgtgttattcttgtttccatttttactatttttaaagtatgcaactcaaagacaatcatgtctttttaacaacatataatgcagagttaaggagcataacactgatgcataaactgaggcatttcattctagcccaaacttatttrttagtaaaccatatcactttagaataagaaaatataaaatttctgaaaaagacaatttctgaaaaatactttgtcacgtagagatatcatccactgagaggagtgatgt

SEQ ID NO: 340551 - DNA, 462 bp, Homo sapiens
catttgtgaaactttgaacttgaggaagatgatttaggktatctggcagaagaaactgctaatcagcaaagcattcaagaggcggtttgggtgctgttaaaagcattcagttttaacagggaaacagagcataaaaatgcagaaaatttgtagcctgacagtgcgatagaagagaaaaacccacttttgaaatggaaattgtcatcttacatttggagtagttaaaagtggcactgccattatctgatacttaaaagaagaagaaacaattgtggaaactattaaatgctcttaataagatcaaaatttgggaaagaatgaaaaagtatctaaaaggatactctacaaacttgtttttggatataacaaaattaaaagaacaaaacaaatatttaaagcatcccaggcacacctgaccttaataacaggaactggagtgcttaaaggagctgcagacagatt

SEQ ID NO: 340552 - DNA, 462 bp, Homo sapiens
catttgtgaaactttgaacttgaggaagatgatttagggtatctggcagaagaaactgctaatcagcaaagcattcaagaggcggtttgggtgctgttaaaagcattcagttttaacagggaaacagagcataaaaatgcagaaaatttgtagcctgacagtgygatagaagagaaaaacccacttttgaaatggaaattgtcatcttacatttggagtagttaaaagtggcactgccattatctgatacttaaaagaagaagaaacaattgtggaaactattaaatgctcttaataagatcaaaatttgggaaagaatgaaaaagtatctaaaaggatactctacaaacttgtttttggatataacaaaattaaaagaacaaaacaaatatttaaagcatcccaggcacacctgaccttaataacaggaactggagtgcttaaaggagctgcagacagatt

SEQ ID NO: 340553 - DNA, 462 bp, Homo sapiens
catttgtgaaactttgaacttgaggaagatgatttagggtatctggcagaagaaactgctaatcagcaaagcattcaagaggcggtttgggtgctgttaaaagcattcagttttaacagggaaacagagcataaaaatgcagaaaatttgtagcctgacagtgcgatagaagagaaaaacccacttttgaaatggaaattgtcatcttacatttggagtagttaaaagtggcactgccattatctgatacttaaaagaagaagaaacaattgtggaaactattaaatgctcttaataagatcaaaatttgggaaagaatraaaaagtatctaaaaggatactctacaaacttgtttttggatataacaaaattaaaagaacaaaacaaatatttaaagcatcccaggcacacctgaccttaataacaggaactggagtgcttaaaggagctgcagacagatt

SEQ ID NO: 340554 - DNA, 505 bp, Homo sapiens
ccagggattatgcaaagctatatcttgccctttgaakaacacaagtattaccattcagaaaactttcctctataattcatgcaatgtagaaaaaaatgcacaaaatctaaaactccacatttgaatgccagtctaaataattgacattactcaaaaaaacttggtattcaaatatgaagttttttccatgttaatgttacttaaaaagaacaaaaaggagaagactaggattgaggggcttgggagaggaatgggaggagaaacaagaggacaaagcaaagggaaaatggtaggagaaatttatagctgaaatgagacaactattattcttcatgtttactaaatgaaatttcatttatatgtgtcatttaaatgaaaaataatacaactcatattatgggaacttcatttctcataaatcatataaataattatatatgtgtttttgtgtataattagtccatattccacagaaataatttgaaaaaatgccctaaggaaatca

SEQ ID NO: 340555 - DNA, 505 bp, Homo sapiens
ccagggattatgcaaagctatatcttgccctttgaataacacaagtattaccattcagaaaactttcctctataattcatgcaatgtagaaaaaaatgcacaaaatctaaaactccacatttgaatgccagtctaaataattgacattactcaaaaaaacttggtattcaaatatgaagttttttccatgttaatgttacttaaaaagaacaaaaaggagaagactaggattgaggggcttgggagaggaatgggaggagaaacaagaggacaaagmaaagggaaaatggtaggagaaatttatagctgaaatgagacaactattattcttcatgtttactaaatgaaatttcatttatatgtgtcatttaaatgaaaaataatacaactcatattatgggaacttcatttctcataaatcatataaataattatatatgtgtttttgtgtataattagtccatattccacagaaataatttgaaaaaatgccctaaggaaatca

SEQ ID NO: 340556 - DNA, 559 bp, Homo sapiens
tatcattaaaattgaccaaatatcataatgacttcattagattttattatttttcagctggttctctaaggtattttggggagatcatgttttctgcatataatgattattaaacaaaactataagaggccatkattttagactgagctcaagcactaggccctaacagaccagaccaaacaaaatggagtcattcctgctaaatgccatataagaaattggaaactctaaggaagcaaagagatctcaaaacaaacctattttgtcttctgaaaacaggagatcacagaataataaggaagtcctctctgctttaacctttatagaaaagtgacctgaagaaaccaatcagttattattattattttttttttttaccgttgttctctttgcttgttttcaccttacaaaacccactgttttgctattttccagtggaattgagaagaagttagttcatttacaacggtgaaagaatgacatcaatgcctaaagttttgatcaacttcttaattttgagagattaaccaaaagggaggaattattaaattaagtttag

SEQ ID NO: 340557 - DNA, 559 bp, Homo sapiens
tatcattaaaattgaccaaatatcataatgacttcattagattttattatttttcagctggttctctaaggtattttggggagatcatgttttctgcatataatgattattaaacaaaactataagaggccattattttagactgagctcaagcactaggccctaacagaccagaccaaacaaaatggagtcattcctgctaaatgccatataagaaattggaaactctaaggaagcaaagagatctcaaaacaaacctattttgtcttctgaaaacaggagatcacagaataataaggaagtcctctctgctttaacctttatagaaaagtgacctgaagaaaccaatcagttattattattattwtttttttttaccgttgttctctttgcttgttttcaccttacaaaacccactgttttgctattttccagtggaattgagaagaagttagttcatttacaacggtgaaagaatgacatcaatgcctaaagttttgatcaacttcttaattttgagagattaaccaaaagggaggaattattaaattaagtttag

SEQ ID NO: 340558 - DNA, 533 bp, Homo sapiens
cccagagtcactgtgaacctgttttgcttagaaggaggaggattgtcctttagcaaatcattctttcttcaattaaaaactkcgttaaatttaacttgtctaatggttttcttttaacatgataattctatatcctcattttgaataattattactcttactatgttttaggtgattgcattgactggaattttcagatcaatatttggtaataaaaattcactgatagcaagtttcatattcttgaggatagtaagatggttcttgagctttactattaacattctcttatttctacagaatttatagataacaacctgtttattttctgttgaatatcttcaccatacctatgattacaacattgatacttgtcatatttatgcttctattttataacagtaatatattgcctaatattctaccagaattttataattctgggataagacttgcttaattctgtgtaaatattatttggatgtacattttgcttttagaatttaagttggctctagcagtgttttcaaaag

SEQ ID NO: 340559 - DNA, 631 bp, Homo sapiens
taactgctattttgaaatatcctagtatattaatcaaattagaattgcaatatctatgtcataacaactaaactmctaaattttataatatttcaagtttccttaagaatatttttcctcaggctgggtgtggtggcttacgcctgtaatcccagcactttgggaggccaaggcgggtggatcacctgaggtctggagttcgagaccagcttgaccaacgtggagaaaccctgtctctgctaaaaatacaaaattagctgggcgtggtggcacatgcctgtaaactcagctacttgggaggctgaggcaggagaatcgcttgaacccaggaggcagaggctgtggtgagctgagattgtgccattgcactccagcctgggcaacaaaaacgaaactccatgtcaaaaaaaaaaaaaaaaaaaaagaatattctttctctgctgcaaattaagaatacatgaaatgatgagcctgaaatacttttaccaagatttaaataaacacctcttttctaatatcaataaaccaccaatataagcataatctaattcttatgaatttactatgtttagggagcaaataaacaaagcattttgtcctcattagtaaccatattatattattaaacata

SEQ ID NO: 340560 - DNA, 631 bp, Homo sapiens
taactgctattttgaaatatcctagtatattaatcaaattagaattgcaatatctatgtcataacaactaaactactaaattttataatatttcaagtttccttaagaatatttttcctcaggctgggtgtggtggcttacgcctgtaatcccagcactttgggaggccaaggcgggtggatcacctgaggtctggagttcgagaccagcttgaccaacgtggagaaaccctgtctctgctaaaaatacaaaattagctgggcgtggtggcacatgcctgtaaactcagctacttgggaggctgaggcaggagaatcgcttgaacccaggaggcagaggctgtggtgagctgagattgtgccattgcactccagcctgggcaacaaaaacgaaactccatgtcaaaaaaaaaaaaaaaaaaaaagaatattctttctctgctgcaaattaagaatacatgaaatgatgagcctgaaatacttttaccaagatttaaataaacacctcttttctaatatcaataaaccaccaatataagcataatctaattcttatgaatttactatgtttagggagcaaatraacaaagcattttgtcctcattagtaaccatattatattattaaacata

SEQ ID NO: 340561 - DNA, 487 bp, Homo sapiens
gtggaatgatatgatttggctgcgtccccatcccaatctcatcttgaattataactccaacaattcccatatattgtggaaggaacccagtgggagctgattgaattatggggatgggtcttttccatgctgttcccatgatagtgaatgagtctcatgagatctgatggttttaaaaatgggagtgtccctgcccaagctctctttgcctgctgccatccacgtaaaatacaacttgctactttttgcctttcatcttccaccatgattgtgaggcctctccagccatgtggaactgtaagtccaataaacctctttctttttaaattgcctagtctcargtatgtctttatcatcagcatgaaaatggactacttacacagaaatacaaaaaaaattatgtaaggctattatgaacacttttgcattcacaaaatagaaaacctgcaggagatcagtaaattcctggaaatatacaaccctcctg

SEQ ID NO: 340562 - DNA, 523 bp, Homo sapiens
aggcattaaatgaaaaagatacatgcacacacgtttatagcagcacaatttgcaattgcaaaaatatggaaccagaccaaatgyccatcaaccaatgagcagataaagaaaatgtggactagttagatagatagataaatagatagatagatagatagataattagataattagatagatagatagatagatgatagatagatcatggaatattgctcagctataaaaatgaacaaaataatggcattcacagcaacctggatagagctggagaccattattctaagtgaagtaactcaggaatggaaaaccagacatcctatttactcacttataagtgggagctaagatatgaggatacaacaggaataagaatgatatgatggactttggggatttgtggggaagtgtgttgggggggtgatgattaaaagactacacattgggtacactgtacactgcttgggtgaagagtgcaccaaaatctcagaaataaccactaaagcactttaccttgcaacca

SEQ ID NO: 340563 - DNA, 523 bp, Homo sapiens
aggcattaaatgaaaaagatacatgcacacacgtttatagcagcacaatttgcaattgcaaaaatatggaaccagaccaaatgcccatcaaccaatgagcagataaagaaaatgtggactagttagatagatagrtaaatagatagatagatagatagataattagataattagatagatagatagatagatgatagatagatcatggaatattgctcagctataaaaatgaacaaaataatggcattcacagcaacctggatagagctggagaccattattctaagtgaagtaactcaggaatggaaaaccagacatcctatttactcacttataagtgggagctaagatatgaggatacaacaggaataagaatgatatgatggactttggggatttgtggggaagtgtgttgggggggtgatgattaaaagactacacattgggtacactgtacactgcttgggtgaagagtgcaccaaaatctcagaaataaccactaaagcactttaccttgcaacca

SEQ ID NO: 340564 - DNA, 523 bp, Homo sapiens
aggcattaaatgaaaaagatacatgcacacacgtttatagcagcacaatttgcaattgcaaaaatatggaaccagaccaaatgcccatcaaccaatgagcagataaagaaaatgtggactagttagatagatagataaatagatagatagatagatagataattagataattagatagatagatagatagatgatagatagatcatggaatattgctcagctataaaaatgaacaaaataatggcattcacagcaacctggatagagctggagaccattattctaagtgaagtaactcaggaatggaaaaccagacatcctatttactcacttataagtgggagmtaagatatgaggatacaacaggaataagaatgatatgatggactttggggatttgtggggaagtgtgttgggggggtgatgattaaaagactacacattgggtacactgtacactgcttgggtgaagagtgcaccaaaatctcagaaataaccactaaagcactttaccttgcaacca

SEQ ID NO: 340565 - DNA, 523 bp, Homo sapiens
aggcattaaatgaaaaagatacatgcacacacgtttatagcagcacaatttgcaattgcaaaaatatggaaccagaccaaatgcccatcaaccaatgagcagataaagaaaatgtggactagttagatagatagataaatagatagatagatagatagataattagataattagatagatagatagatagatgatagatagatcatggaatattgctcagctataaaaatgaacaaaataatggcattcacagcaacctggatagagctggagaccattattctaagtgaagtaactcaggaatggaaaaccagacatcctatttactcacttataagtgggagctaagatatgaggatacaacaggaataagaatgatatratggactttggggatttgtggggaagtgtgttgggggggtgatgattaaaagactacacattgggtacactgtacactgcttgggtgaagagtgcaccaaaatctcagaaataaccactaaagcactttaccttgcaacca

SEQ ID NO: 340566 - DNA, 568 bp, Homo sapiens
cttcttacgttttagcaaagagactggtggcattttgcccctgccctagagatctgtggaactttgagcttaagagagatgattcagggtatctggcaggagaaatttctaagcagcaaagcattctagaggtgacttgggtgctgttaaagrcattcagctttaaaagtgaagcagggcataaaagttcaaagaatttgcaccctgacaatgtgatagaaaattctattttctgaggagaaattcaagctggctgcagaaatttgcataagtaacgaggagccaaatgttaatcctcaagacaatggggaacatgtctccagggcatgtcagaggttttcacagcagcccttcctatcacaggcccagaggcccaggaggaaaatacggtttcatggaccgggcccagggtccccatgctgtgtgcagtctaaggacttagtgccctgtgtctcagatgctccagctgtggatgaaaggggccaatgtagagctcaggctatggcttcaaatggtgcaagccctaagccttggcagcttccatgtggtgttgagcctgtgagtgtac

SEQ ID NO: 340567 - DNA, 568 bp, Homo sapiens
cttcttacgttttagcaaagagactggtggcattttgcccctgccctagagatctgtggaactttgagcttaagagagatgattcagggtatctggcaggagaaatttctaagcagcaaagcattctagaggtgacttgggtgctgttaaagacattcagctttaaaagtgaagcagggcataaaagttcaaagaatttgcaccctgacaatgtgatagaaaattctattttctgaggagaaattcaagctggctgcagaaatttgcataagtaacgaggagccaaatgttaatcctcaagacaatggggaacatgtctccagggcatgtcagaggttttcacagcagcccttcctatcrcaggcccagaggcccaggaggaaaatacggtttcatggaccgggcccagggtccccatgctgtgtgcagtctaaggacttagtgccctgtgtctcagatgctccagctgtggatgaaaggggccaatgtagagctcaggctatggcttcaaatggtgcaagccctaagccttggcagcttccatgtggtgttgagcctgtgagtgtac

SEQ ID NO: 340568 - DNA, 568 bp, Homo sapiens
cttcttacgttttagcaaagagactggtggcattttgcccctgccctagagatctgtggaactttgagcttaagagagatgattcagggtatctggcaggagaaatttctaagcagcaaagcattctagaggtgacttgggtgctgttaaagacattcagctttaaaagtgaagcagggcataaaagttcaaagaatttgcaccctgacaatgtgatagaaaattctattttctgaggagaaattcaagctggctgcagaaatttgcataagtaacgaggagccaaatgttaatcctcaagacaatggggaacatgtctccagggcatgtcagaggttttcacagcagcccttcctatcacaggcccagaggcccaggaggaaaatayggtttcatggaccgggcccagggtccccatgctgtgtgcagtctaaggacttagtgccctgtgtctcagatgctccagctgtggatgaaaggggccaatgtagagctcaggctatggcttcaaatggtgcaagccctaagccttggcagcttccatgtggtgttgagcctgtgagtgtac

SEQ ID NO: 340569 - DNA, 568 bp, Homo sapiens
cttcttacgttttagcaaagagactggtggcattttgcccctgccctagagatctgtggaactttgagcttaagagagatgattcagggtatctggcaggagaaatttctaagcagcaaagcattctagaggtgacttgggtgctgttaaagacattcagctttaaaagtgaagcagggcataaaagttcaaagaatttgcaccctgacaatgtgatagaaaattctattttctgaggagaaattcaagctggctgcagaaatttgcataagtaacgaggagccaaatgttaatcctcaagacaatggggaacatgtctccagggcatgtcagaggttttcacagcagcccttcctatcacaggcccagaggcccaggaggaaaatacggtttcatggaccgggcccagggtmcccatgctgtgtgcagtctaaggacttagtgccctgtgtctcagatgctccagctgtggatgaaaggggccaatgtagagctcaggctatggcttcaaatggtgcaagccctaagccttggcagcttccatgtggtgttgagcctgtgagtgtac

SEQ ID NO: 340570 - DNA, 632 bp, Homo sapiens
gactattaaagacttaaagaaagatgtttctttgttttctgtagggtgctatgtaatgagtaaacatggcaataaaattcttaccataaatgcataaaccaatatcaaaaagctatctgccaataaactatttgatgtatatcttctgtataacaacacagctcaatttcataaaatccagtcaacaagagagctaaataattctttctgaacacatatatcatgatctggtataatgcaagtatacaagataagctatttacagagaataatgaatttcagatcacacaggtaatctttatattgatcactgactatgtgtttggttagtattaagcagcataaaagttgtagttaagagttgccaaaagatagctgggagtgacaccatttcagttttccaatttattaatatggaactagaattaacattctctaataaaaatggaaatatctgccagaataggcagtatatatatgtggttttgggtcagttatagagacacacacacacacacacacacacacgtgtgtatatatgtayatattatacataaattatattcacagatctatgaatttcacaaaatgaacacatttctgtaatcagcatccaaatcaagaaacagaat

SEQ ID NO: 340571 - DNA, 575 bp, Homo sapiens
ttaatataatgatagtaagtaaatattttaattaatttcaaattaataaatcttaaacatatatttaaatattgtagtcaaatttcwacagggattcaaattataattagaagtttgactgataaaagtgaaataagagacaggcagtctgattatatggtgttaatgactcatctcggcaaaacatggacatctattatttacattccgtgattatctaaatacatacttcatgattatgttcatggaatctcccattggaagtgttaaagataaaatattctgctgcagtctacaagtttgaaaaactctgatttggtgaatgttattttcagcaggcaaactgtcttccttaatctgtcccatggttcatggcatggagaagccatgctagataaactacatacttccacaaatgaatttcaaatacttcatttctcaggatcaacaaacagttacttagtggataggggagggagggttcattcttccaaatatgagttctaaaagaaaatattaatatatcttcaaagtgaatataaactttcagatttccaaaataaacatgaagtttt

SEQ ID NO: 340572 - DNA, 636 bp, Homo sapiens
atattgtatgacccaattttaattcaaacaatttattcaagaaatagttatcttggttttgggttaggatacagaaatttatgagactgtcactttcatcctaatagacagataacctttaaaatcagagtttcattattgtctgtgggttgtgtgtgcatatgtgtgttgtttttcctattagacgtaaagaaatttaaataaaccaaattcccggaaagtgataaacacttcctagaaaaacaaacacaccaagaaaacccccaaagcaaatggatgggtggtagaatgaagagaaatgtaccatagacaaggtcaggaaaaatagaccttttaacaaacttttaatagatttttgtgggctgacacaatgtttctatcctactacatttgactgccaactatttttcttcattgcctaggttaatatgccaaacactgggccacagcactaagttgtacagagcctgatgaagccttgaaggaagccaggagttcagagataaactcctcttaaacccataagatttttgccartggtaacatagaggctgtgaaggctaaagcttgagtaagagaactgtgaaaaatcactccaaggttctctagacagtcattgagtgtactctacaagcc

SEQ ID NO: 340573 - DNA, 612 bp, Homo sapiens
ttataagaaaaatgcaaatcaaaagcacagtgagatatcaccactccagatagactggctattatcagaaagagaaaagataacaaatgttgatgaggatgtggagaaatagaaacccttacacacagttggttggagtgtarttagtatagctgttaaggaaaacagtacagagatttcttgaaaaattaaaaaatagaactaccacataatccagcaatctagttttctagctatgtatccaaagtgagtaaaatcagtatactgaagaggcatctgcacctccatgtttttactgcagcgctattcacaatggccaagacattgaatcaactgtctccaacaacagatgaatagatttcaaaatggtttatctgtacaaagacatactattcagtcatttaaaaagggaaatcctgtcatttgtgacaatatagataaacctgaagaacatgatgttcagtgaaataagccagacacagaaagacaaatactgcataatttcactcatatgtggaatcttaaaaagttgtttttatacaattcatgaataaaactgtttgccagagactggggatgacatggagcaggagagagaaggaaaggttggtc

SEQ ID NO: 340574 - DNA, 403 bp, Homo sapiens
gaactcagaaaaaggtccattgtttctggggaaataaataagcaaaagtactttaacccataaggaatggtcaagacaatctcttggacccaggattttgcatgatttcgaagcagagttttgctaccacttggagaggggcaataaagactctctcacacaggattttccacaaatagaagacagatttttgctctaaggagagtgataaatactctctakaaagaaaccctatgtctaaagaaaagacatattgggcctgcctaaaacttggctcgtccacaagaaaagagagtactctgcacccctcataatcctagtattgagcacaagtactcctatagtaagagcacaagatttgagattgtgttcatagcggaggtctatgatgactgtgaaaagc

SEQ ID NO: 340575 - DNA, 593 bp, Homo sapiens
ccagggggtacgtgacaggggctgcaagcaccggtggtcagagtgaaacagaacagaacgggagttttcacaatgtccttccatacaatgtctggaatctatagataacatcagttgctacgtcaggggtggaattttaactaccaggcttaggtcaggcaggcccaagcctggttttgggtctggttcctaggcgccgggctacctgccttttgtttcgcttttctttccttttctgagtacaaaacaatgtgagagggtctgtctttctctcagtttaattaagtgaaaagtcctttttgttttttaaaaggagccacgtgcatgtcttaggttaatcttawaacaaattgttttgataatcattcagaacatgtatataaagtttccataagatcaaacatctgccttcccttatctgtgacactttggaggagttgactgtagcgttgtattaaggagtgtggatccaggagttgattgctggcgtttgacagctggatctactgcttattatgtctgcgtcttgagttgaggcacctaatctatccccattgtggttttttcctttgtaattattatcatacacatta

SEQ ID NO: 340576 - DNA, 593 bp, Homo sapiens
ccagggggtacgtgacaggggctgcaagcaccggtggtcagagtgaaacagaacagaacgggagttttcacaatgtccttccatacaatgtctggaatctatagataacatcagttgctacgtcaggggtggaattttaactaccaggcttaggtcaggcaggcccaagcctggttttgggtctggttcctaggcgccgggctacctgccttttgtttcgcttttctttccttttctgagtacaaaacaatgtgagagggtctgtctttctctcagtttaattaagtgaaaagtcctttttgttttttaaaaggagccacgtgcatgtcttaggttaatcttataacaaattgttttgataatcattcagaacatgtatataaagtttccataagatcaaacatctgccttccctyatctgtgacactttggaggagttgactgtagcgttgtattaaggagtgtggatccaggagttgattgctggcgtttgacagctggatctactgcttattatgtctgcgtcttgagttgaggcacctaatctatccccattgtggttttttcctttgtaattattatcatacacatta

SEQ ID NO: 340577 - DNA, 573 bp, Homo sapiens
ggctttcaaagtacttggggaaataagacacattaaaagaaataatgataaaaagcagcaaatatttattaaattaaccatttagaaatctagttacaatgtccatacattttaaacatgggcttttatattatttatgatttgtgaaagatgtattaaaactcaaaagatttgtttttgagttttcaaaaggtcatagagcagtacagacctggattcaaattctggctgtactacttagtagctatatcttatagggaaagtagcttaacattgtttaatgttggttttcttaactgtacaaggggataataacataaggtttagggttaattagataaattaaatagtacactgcttggtccacagtaacggttcaataaattatcatccactgtgtgccaggtaatgtgctagaccattatgaccctggcatggataatccaatgtgaaatgcacagtttactattgaccatatatatttatcctcattagtgaaaacaaagtggctttccctttkttcttcagtagaattactaatctttgttgaataaggaattcctggtgttactg

SEQ ID NO: 340578 - DNA, 443 bp, Homo sapiens
ggtctccctgtcattgatataatttttctctttgtgagaggatctgcaatgcattagaatttcaaaatactacataacaacatcagttgaaaagctcccatataacacatcacgtatcacacacgcacatacacatgctactgctgctttaccaaaatgagttcttatttcaaagaaaacattttataatgatttagtttccaaatgctcgtaacagtttgtcatttagtatagctcattttaatattttgctttctggatgcatgttgactccccatatacctgtagttagcatgcaaaatttatcctttatattttatcaattgtttatgaagctgacagatttatgtcagcaactgctttacttagagatstaacatttcgagctctcatagtttctagttgaaatagtatggcatgcagccaaacaatcatagaccata

SEQ ID NO: 340579 - DNA, 580 bp, Homo sapiens
ctgtcagacactgttgtttggaaataacacaagatgagcaagctcctattttcttggagttcataatgcaataggcacagtggagatggatgacagcaatcaaatcacagtgggataaatgtcatagtaagggccatatagggtataaatgaaactcaggaggaattggcatgcactgaaatgggtgacacatggttgcttggagaaatgatttytaaactaagcatgaaaatgtagttggaattacataagcaatcaaagagtggaatacttttcagtaggaagaaaataaagctttctaattcctacatgaccatttatataggagtgtttttatattttgtatccagctttgaagtggacaagtaccagtttactccagagcttagtatgcattaaatgcttaatatgtgttaacttttttatcaccacatcgtcatcatcctcattagcatcattgatatcttgtgagtttctccatggtttttttaaaaaaaaaaaaaaaaaaaaaaaagaaaggccctgaagaagaaaatagcaatagcaacattaggtgcagagccatgatgaaatgagccac

SEQ ID NO: 340580 - DNA, 580 bp, Homo sapiens
ctgtcagacactgttgtttggaaataacacaagatgagcaagctcctattttcttggagttcataatgcaataggcacagtggagatggatgacagcaatcaaatcacagtgggataaatgtcatagtaagggccatatagggtataaatgaaactcaggaggaattggcatgcactgaaatgggtgacacatggttgcttggagaaatgatttctaaactaagcatgaaaatgtagttggaattacataagcaatcaaagagtggaatacttttcagtaggaagaaaataaagctttytaattcctacatgaccatttatataggagtgtttttatattttgtatccagctttgaagtggacaagtaccagtttactccagagcttagtatgcattaaatgcttaatatgtgttaacttttttatcaccacatcgtcatcatcctcattagcatcattgatatcttgtgagtttctccatggtttttttaaaaaaaaaaaaaaaaaaaaaaaagaaaggccctgaagaagaaaatagcaatagcaacattaggtgcagagccatgatgaaatgagccac

SEQ ID NO: 340581 - DNA, 586 bp, Homo sapiens
gattttctccctgtgaagtggtgatgggaatagctcactgctatgttatggtaactacatgattaaataaaataatcagtgtaaacaacatcataaattttgaaggtagttttttgtcaaatgatttgttaaacattctacagaataaacatttctcaaaacagtctgtagcagtacacccttgaatctttgagaagacatttcattgcttatctcttatatattatctgcttttcttttggsaaatattgaatttctcaatgtttgtttttgaattagaatcacagactgatggctggcatttacagagaatactacatcccattaattagaatgagttactagagaatgacaagcagagaaaatgtattttttatgctggcttcaagttctggaaatttgaggcaccaatggatgatatcttagtccctttcaggaagtaacacttaaaataattattctctgttgaggtgttacagggattagtatttgtgaaacattcttaaaatcccagtttaaagctattttatgagtatcaaaaaatgattgcacaagcttagtttccaattccaggaaaagatatgca

SEQ ID NO: 340582 - DNA, 576 bp, Homo sapiens
aagccgacttgtcatattaagatgctcattttcattaaaagcatgctttttttaaaaagtaaaaatacattttataataacacaactacatactttattcatctttgtttttctcttatggcaacttctcttgcagttatcttgtttatttaaggttagaattgataaacaaatatgaaattgctaatatttttgattgaaaagttttcagtatgttaagggcaggctctcaatatgtaatggtagagtttctgtcctatacgctgttttcttgtcctttcactctgccctgcctcagcatagataagaaatgcagaacagtgacccctatctataggcctagggttaatcagctaaaacatgcaagtgtctcctctagttaagwcaggaaacaaaattctcctttctatgatcagtgtaagcttctgtgtcaaggtttcatcactcctgatgttttatatttctttttttgaaagggtttaagaatgtgtgtgtgtagttcatcagagagagaaagagaaagagagagagagagaaggtggcagactcacagctaaagtttgacaaggcaaataa

SEQ ID NO: 340583 - DNA, 399 bp, Homo sapiens
agataaaatcacatagatcctcgtacgctacaataaagttttcatctgttcctccaattgaaagagaaaggcatttgaagattttgaattaaattgtaacatatctgaatatattttcgaatactctgttatgtggataatagactatayggggcaggggcaggatttgaaagagcagaacattgcaacactctaggtgagcaacagtggtatctttggccaagctagttataacagagaggtgctatggttcttgatatatgttaatgatagaacagagataattcgatgatgaatttgatgtacattataaaagtaaactctgagttgtatatttctcatttataaaagaacacatatttcagagtgttgttgtaaagactatatgatataatttat

SEQ ID NO: 340584 - DNA, 632 bp, Homo sapiens
gtttgtaaagtttcttaactgtaaaactactcttttctccctgctatatatgaaatttatttttaaaaattcactatgtgaaatttgcacttaaggagtgcgaggtgtgctcctaatccttgrgagaggaatatcaacataaattgcttggaatttttctgcataagaaatttgttttatctctcttatctatatctacctatctgtttatttaatcatttatttctgtcagcacagattcagagatatttatttcatactttgggttataattaacaccattttattttgttcaaattatttcagctttggccattgggagcttttatagttggcccttctgtcctttttacatattcaaatctttgtctgcatttgtgggtgtgcaggtgtgttagcactttttaaatttgtggcactacaaggtgttctaggctcattttgcagtattcttgcctcaggcctagaatcagatatttatccaaagaacctgtgctttttttcttactggagaataacattagaaaccaaaaacggagtgccaggtgtaaacattgctattgggttgtcattggttctagatccactcagttaaatataaatatgtgtgtgtatactcaccagtgtatata

SEQ ID NO: 340585 - DNA, 598 bp, Homo sapiens
acgggacctagaaaggggagaagccatgttgcccaactccagaagttggtataagagtttgaaaggcactgtctgatttcagaagcctttacctataaatgccaggtggcatctcatactctccctgattggttagtgtaaaaacaacactcttcccctaaaaaggtgcagaatcctcctttctcagcaatgaggaggtctaggcctcagtggttttggaaagtcactgttgccaaagagtctatttgggattgtagagtaaggatagatttcgttatttcttgcaaactatctgagaaatcctttgagagtgtgtggtagtaggataatgaagtagataaacctgcttttcgcagttcgctgtagcagtggccatttctaaccatataagtaggggtattagttgtacggccctgcgctgatgggcttgagctttgaggggcactgacagggcctgatttcctagggcaatgttaatgttgggatttaraaggaataaggtgcaggtgcctgtctagttagtggggaggcagatataggttgatgttccacataagaagaatatgccttggctgggtagacatttagaaatttaccg

SEQ ID NO: 340586 - DNA, 598 bp, Homo sapiens
acgggacctagaaaggggagaagccatgttgcccaactccagaagttggtataagagtttgaaaggcactgtctgatttcagaagcctttacctataaatgccaggtggcatctcatactctccctgattggttagtgtaaaaacaacactcttcccctaaaaaggtgcagaatcctcctttctcagcaatgaggaggtctaggcctcagtggttttggaaagtcactgttgccaaagagtctatttgggattgtagagtaaggatagatttcgttatttcttgcaaactatctgagaaatcctttgagagtgtgtggtagtaggataatgaagtagataaacctgcttttcgcagttcgctgtagcagtggccatttctaaccatataagtaggggtattagttgtacggccctgcgctgatgggcttgagctttgaggggcactgacagggcctgatttcctagggcaatgttaatgttgggatttaaaargaataaggtgcaggtgcctgtctagttagtggggaggcagatataggttgatgttccacataagaagaatatgccttggctgggtagacatttagaaatttaccg

SEQ ID NO: 340587 - DNA, 551 bp, Homo sapiens
tgatataacaatagcatgacatctctccaagtgagacagaaggtttgccccagaccctgtaggacagmtatgtacctattgggatcatctgaaaacttccccaggtctgccttgatctgctttaaatcagagagggagaaggggacatgtacctaggttggggcaaattcccctcccactacagcttgaaggggacaaaactgatagcctggggatttttatggtcctttggagatttctttgcttgtttccttctaggcaggggagattaaaggaggcttatcattaataggaaggggagctatagggaggctaggatatggaggtaagctgagaggtcctcctgtgggatgtaaattacaagctttgcatagttgtggatactctttaaatgaaaagaaagcttggacataaggtatttcactccatttgccttccctcttacagaaaaggtcaagctgtaggttagtattgtaatttatacttctctcaggtaaccatttttccccatcagagagagaatattggggccaggccatagtgcagaaaaa

SEQ ID NO: 340588 - DNA, 551 bp, Homo sapiens
tgatataacaatagcatgacatctctccaagtgagacagaaggtttgccccagaccctgtaggacagatatgtacctattgggatcatctgaaaacttccccaggtctgccttgatctgctttaaatcagagagggagaaggggacatgtaccyaggttggggcaaattcccctcccactacagcttgaaggggacaaaactgatagcctggggatttttatggtcctttggagatttctttgcttgtttccttctaggcaggggagattaaaggaggcttatcattaataggaaggggagctatagggaggctaggatatggaggtaagctgagaggtcctcctgtgggatgtaaattacaagctttgcatagttgtggatactctttaaatgaaaagaaagcttggacataaggtatttcactccatttgccttccctcttacagaaaaggtcaagctgtaggttagtattgtaatttatacttctctcaggtaaccatttttccccatcagagagagaatattggggccaggccatagtgcagaaaaa

SEQ ID NO: 340589 - DNA, 606 bp, Homo sapiens
accacaagcattatgccaacatccatgttagcttgggagaggacccagagctccagaaatgaatacagcccagcatataccattgattaccaacttgtaagactccagaaacccccataggacccyacagtttcctaacttatcagaataaaagtaaaaaccaatggaacagtatataaattctttatacaaatcaaaataattcacagatacataactatgtggaggtatagataaagagtataggtaaagaatgcttttttattttatttccccctttgggcctatatgattaagcaatcctagctcttactttaaaccattaaaaaataagataaaaactgtaagttgttttaaacctctcaatttttggtaattggttgcatatcaatagacaactaatacaaggagtgaaagataaacagcaaaaatgtttctactcttgcattcaaaaaataaaagaaagctaggcacagtggctcacgcctgtaattgcagcactttgggaggtggaggtgggcggatcacttgaagtcaggagttcgattcgagcttggctaacatggtgaaacctcatctctactaaaaatacaaaaattagacagg

SEQ ID NO: 340590 - DNA, 534 bp, Homo sapiens
tgggttctcaaataattttacttcgcaagcccttgcagtcaagttgtattactggkttttggcctatataatatgagtaaaaattatacacatgatttccaggcatgactacttgtcttcttggagaactctcaccatattactttccccttttcagagaccaaagatgtcatgttgaagttggtagtgtcactatgtggaagaagtttgagtattaaatgaatctaggtaagagaaccctcactgaccatattagacagtaacacaagacgcaataaaatgttattgcatcaagccagtgataatttgggtttattttactgcagcacagcttacttgagtccaagaatcaatatagttttctttgccatctagagtagcaattgcacatttgataggagttacgttatgattggttatcagagttttaaaattgactttagatgcagaatgtactacttggtcactaccatcttgttattacatcccttttttattaatttacttacctgattggccctggaacacatttga

SEQ ID NO: 340591 - DNA, 534 bp, Homo sapiens
tgggttctcaaataattttacttcgcaagcccttgcagtcaagttgtattactgggttttggcctatakaatatgagtaaaaattatacacatgatttccaggcatgactacttgtcttcttggagaactctcaccatattactttccccttttcagagaccaaagatgtcatgttgaagttggtagtgtcactatgtggaagaagtttgagtattaaatgaatctaggtaagagaaccctcactgaccatattagacagtaacacaagacgcaataaaatgttattgcatcaagccagtgataatttgggtttattttactgcagcacagcttacttgagtccaagaatcaatatagttttctttgccatctagagtagcaattgcacatttgataggagttacgttatgattggttatcagagttttaaaattgactttagatgcagaatgtactacttggtcactaccatcttgttattacatcccttttttattaatttacttacctgattggccctggaacacatttga

SEQ ID NO: 340592 - DNA, 534 bp, Homo sapiens
tgggttctcaaataattttacttcgcaagcccttgcagtcaagttgtattactgggttttggcctatataatatgagtaaaaattatacacatgatttccaggcatgactacttgtcttcttggagaactctcaccatattactttccccttttcagagaccaargatgtcatgttgaagttggtagtgtcactatgtggaagaagtttgagtattaaatgaatctaggtaagagaaccctcactgaccatattagacagtaacacaagacgcaataaaatgttattgcatcaagccagtgataatttgggtttattttactgcagcacagcttacttgagtccaagaatcaatatagttttctttgccatctagagtagcaattgcacatttgataggagttacgttatgattggttatcagagttttaaaattgactttagatgcagaatgtactacttggtcactaccatcttgttattacatcccttttttattaatttacttacctgattggccctggaacacatttga

SEQ ID NO: 340593 - DNA, 588 bp, Homo sapiens
  misc_feature (1)...(588): n = A,T,C or G
tgacagccgtcactttatttcctctattgttatatcaacatctagaagtcaggcacataataggaactgaataaatacttgtggattaaatgaagaatgtagctntttatttatatcttatacatttatttattttaatcaagtattgggttgaaatttggaaatggtctttctataaactatattgattcttcacctttttgtcaaagaaaattatatgaatgtatataaggtggatatgattacaattttaaaagatgtagtatattatggataccacagcaatttaaatatgtatatagtattmaatagtcaatgatgtgaaaatattaaagctctcttatcttctgtttcttattggcctaatttctgaaataaaatactaattgaaaaaatctaagtttgtagattcaaattaggagaaaattctattctcagatgtcatacttgttaaaatgcttttaaccacttggtcacaccaaacgtatcatttaatgtaagcaaagaatgcaatttatcagttataatttatcagttataaatttcattccttgcttagattaaataatatgttctgtatcataatat

SEQ ID NO: 340594 - DNA, 613 bp, Homo sapiens
agttataaatttcattccttgcttagattaaataatatgttctgtatcataatatataactatctctaagagtcataaaaatagctaacttgaatgtttccaatgtttgaatgggttctagatgttgtgctcaacaactttataaacaagggctttgtgaccccattttacagaaatagaaataaagtacagggttgtgaattacttctgcttgaaagaccagtgagctatagaagatcactcaggtagtgtgcagagcagaggctttgctccaaccaccaaagcccattgcttttttccctcataggattccagtacaatatgcctccagtcacatttggcatatatcatgatatcagtgatatcaacggtttcatcaagcaaatttaggacctacatttaatattacacatacacctatactaaagttatacaattttctaaataaatattagtttcatttaccaagtctatttaagctagtgaattatctataatcaaaacttatggttaaagctttgaataaaggaaatattttagaacrtttaaccaataataatattctcttttaagaaatacttcacataaacatacataataataggaaaataag

SEQ ID NO: 340595 - DNA, 628 bp, Homo sapiens
aatgaatttcaaaatgtatacctcctaaatgcacctgaagagtaccctcataattaatagcttcattattgcagtcattctttctgaagaaacttagtgctattttttgaccatataattgtggattagctgtgagattagggatctacaccataattagaccaaccagtctattagcttctgtgttttagtgtactgcacagtgttgtatgccaaacagattagttattttttgtgcttccataaatgaaaaaggagagattataactgataccaaaaaaatacaaaaaatcatcagagactaytatgaacaactaaactgtcacaaactagaaaacctagatgaaatggataaattcttggaaacatacaaactcccaagattgaaccagagaagaaacagcaattttgaacagaccaataatgagcagtgagattgaacgtgtaattttaaatctcccaacaactatgaaaaaagcacaagcccagatggattcacaggcaaatgctactagaaatacaaagaaaaactagtgccaatcctgaaactattccaaaacattgaggaggaatgaatcctccctaattcattctacaaaaccagtatcatcctgataccaaagccaaa

SEQ ID NO: 340596 - DNA, 624 bp, Homo sapiens
cctgtttctcaccatatacaaaaatcgactcaagatggatcaaggacttaaatgtaagtcctgaaactatgaaactactagaagaaagtctagggaaagcccttctggacattggtctaggccatgaattcatgactgggatctcaaaagcacaaacaagcaaaacaaaaatagacaaatctcacaatgatttgattcagcaatctcacagagtttatacccaaaggaaaactaaaaagcttctgcagaaaaaaagaagtgatcaacagaatgaacagacaactggtataatgggagaaaatatttgcaaactattcatgaggcagaggattgatattcaggttttacaaagaactcaaatggttactgggaagtgcaagaatcctgggttcttgtctccttagcagaaagatttcagccaagagacacacagcaaggggtaagtagcagagctkattgaaggaaggtaatgtatattccaagagaggagtgagttgacctggctggaatatagctctgggctggtccagctgggaaaatagcagtaccagtgtttatttaaagagacagtacactctgaaagatgaaacagagctggctgcttgagagaatgcacaagaagca

SEQ ID NO: 340597 - DNA, 633 bp, Homo sapiens
atctaccaccttgagcagagttgtcattctcccctgaagtgacagattgtgttcrttgagcagtttgaatatgtcacacaagtgagcaagttttgtgacccattttgtatcactgaaatgtgctgccagtggtgactgtttttctaaaagaaatctctggagtggctctcataacttaaaaactctggccaatgattgacctttagaaagccatctcaccatctcacatctgtgtataagagatgtgcgtacactgcatgcatctcttcagagagctgcatgaacagacttgagttaagggcatgtactttaatatggttgataattttaatcatatgctgccaaatgctgttaagttcaggtgactttttttttcagctagttagcatttttctatggaacatccagtgcgttcagaagtgacctctttgacccaagtagtgaaactagaaagccatccagtcatggcagctgctccatccatgcatatactgacacaaattgtccaagtcagttttcctgatatgtaatcattcaaagacttgaatagttctgcatttgtggcgttggttggcaatagaagtgcacataatatatccttatgcacatccttctgaaaaatatattacacaa

SEQ ID NO: 340598 - DNA, 633 bp, Homo sapiens
atctaccaccttgagcagagttgtcattctcccctgaagtgacagattgtgttcgttgagcagtttgaatatgtcacacaagtgagcaagttttgygacccattttgtatcactgaaatgtgctgccagtggtgactgtttttctaaaagaaatctctggagtggctctcataacttaaaaactctggccaatgattgacctttagaaagccatctcaccatctcacatctgtgtataagagatgtgcgtacactgcatgcatctcttcagagagctgcatgaacagacttgagttaagggcatgtactttaatatggttgataattttaatcatatgctgccaaatgctgttaagttcaggtgactttttttttcagctagttagcatttttctatggaacatccagtgcgttcagaagtgacctctttgacccaagtagtgaaactagaaagccatccagtcatggcagctgctccatccatgcatatactgacacaaattgtccaagtcagttttcctgatatgtaatcattcaaagacttgaatagttctgcatttgtggcgttggttggcaatagaagtgcacataatatatccttatgcacatccttctgaaaaatatattacacaa

SEQ ID NO: 340599 - DNA, 633 bp, Homo sapiens
atctaccaccttgagcagagttgtcattctcccctgaagtgacagattgtgttcgttgagcagtttgaatatgtcacacaagtgagcaagttttgtgacccattttgtatcactgaaatgtgctgccagtggtgactgtttttctaaaagaaatctctggagtggctctcataacttaaaaactctggccaatgattgacctttagaaagccatctcaccatctcacatctgtgtataagagatgtgcgtacactgcatgcatctcttcagagagctgcatgaacagacttgagttaagggcatgtactttaatatggttgataattttaatcatatgctgccaaatgctgttaagttcaggtgactttttttttcagctagttagcatttttctatggaacatccagtgcrttcagaagtgacctctttgacccaagtagtgaaactagaaagccatccagtcatggcagctgctccatccatgcatatactgacacaaattgtccaagtcagttttcctgatatgtaatcattcaaagacttgaatagttctgcatttgtggcgttggttggcaatagaagtgcacataatatatccttatgcacatccttctgaaaaatatattacacaa

SEQ ID NO: 340600 - DNA, 569 bp, Homo sapiens
ggttttattactgcaaaaatgttagatatagtagacttaagaaagcagagcaagcagactgtcgtcttattgtaagccttgttaaattgcctgtggtctcattttggtttgccaaattaggtaaagccaaagaatcattagagtttaatgtgtattttaactataaaccctgtgagtttctcaatcatcaaaacaggcgcttgaaatttagggggtacaattatagacaaacacttaaaaatcatcttggatatcgaattgaggatcctgtgcactttattttttccctgaaaaaatatgtaagtgaatctgaaacaaactgacaggcttacaatagaatgaacatttttcyaaaagcaatggtgtatttattactaaggacaaaagtattttgtttacaccttaactataatttgtacttactaatactttatttgaggataatgaattttataaataacatttgaagctatatttatttaaatcaaaatgttctgatatataatctatagttttagaatttattaaaaatagttgaaagttgcagcaattctctaagctagtgtttg

SEQ ID NO: 340601 - DNA, 567 bp, Homo sapiens
tataccataagtagtaaaaacaatactcaagaaagaaatgctacataatgaccaactaaatgggcatgattattttaatatttagtgtacatatraaatatagattatttctacttaaacactactgtgaataatttgtctgaattttggatactttttctaaagtatatttttataaatatctattatgacaaagaaaaaatatatttaaaatactcctagtaataaaatttcatataaggttgtttttaaaatctataattagagtgtaatttaacaaccacattgagctgaaatatctcatgattttttcttgcaaatttgctatcttgagatcaatttattcattttcaataagtacaaaatggccgtgctttctttcagcataggaaaaattagttattttttaggttgcacaacagagactatggttgtctgcattaatgccatatgtgttataaaaactacgtgtcttaaattaactacatatcagagacaggcaccaaaattagaagagataaaggagaaaaataaaatcatatttgacattccagtctaaagcataaa

SEQ ID NO: 340602 - DNA, 567 bp, Homo sapiens
tataccataagtagtaaaaacaatactcaagaaagaaatgctacataatgaccaactaaatgggcatgattattttaatatttagtgtacatataaaatatagattatttctacttaaacactactgtgaataatttgtctgaattttggatactttttctaaagtatatttttataaatatctattatgacaaagaaaaaatatatttaaaatactcctagtaataaaatttcatataaggttgtttttaaaatctataattagagtgtaatttaacaaccacattgagctgaaatatctcatgattttttcttgcaaatttgctatcttgagatcaatttattcattttcaataagtacaaaatggccgtgctttctttcagcataggaaaaattagttrttttttaggttgcacaacagagactatggttgtctgcattaatgccatatgtgttataaaaactacgtgtcttaaattaactacatatcagagacaggcaccaaaattagaagagataaaggagaaaaataaaatcatatttgacattccagtctaaagcataaa

SEQ ID NO: 340603 - DNA, 594 bp, Homo sapiens
tagtggaaactttttacactctcaaagaactgttaaagaaaaaaaacagaatttatgcctcctagatttatgtctctatgaattagtcctttcagactttcagtctactcctccattataataaatactgtgtctttattgtatttgtcttttgctctacattcaaatggaaaaacatagaccaagcttaaacaatagtcttaaactctgaactcaagtatccaaggagccaatctaaagcatgaaatcaggtctttggactataattgtccaaagttaatgcagtggcaawtatcaatggtttcttaacctctaggacaatatgatagattagaattttccataagtaaaatctttacactaactgtccataatggagggcatgagttacaaaaagaaagaaataaattcattaattaaactttctaaaagtagatcttaaaaatgtataatcttaggtgatcaggcatttcgtgaacatctactcaaatatgctaaaataatttaagttgttcatttttctccaaaagtcagagttgttggtcttgtcaaggattaatcaacactatgtctgctttgtgaacaagcaacact

SEQ ID NO: 340604 - DNA, 594 bp, Homo sapiens
tagtggaaactttttacactctcaaagaactgttaaagaaaaaaaacagaatttatgcctcctagatttatgtctctatgaattagtcctttcagactttcagtctactcctccattataataaatactgtgtctttattgtatttgtcttttgctctacattcaaatggaaaaacatagaccaagcttaaacaatagtcttaaactctgaactcaagtatccaaggagccaatctaaagcatgaaatcaggtctttggactataattgtccaaagttaatgcagtggcaattatcaatggtttcttaacctctaggacaatatgatagattagaattttccataagtaaaatctttacactaactgtccataatggagggcatgagttacaaaaagaaagaaataaattcattaattaaactttctaaaagtagatcttaaaaatgtataatcttaggtgatcaggcatttcgtgaacatctactcaaatatgctaaaataayttaagttgttcatttttctccaaaagtcagagttgttggtcttgtcaaggattaatcaacactatgtctgctttgtgaacaagcaacact

SEQ ID NO: 340605 - DNA, 403 bp, Homo sapiens
tgttattttggtttctgtatgtaacaattttaagagaggaaagccacaaaattcaactgattatatacagattatttgcagataacatgtcggctccacggaataaaaatgcaaaatttttcctcacaaattgatcaccacggactgactttttctcactgctasaacgtggtcttgctttttcctttttgatgtctcttccattatctcttctctgtcatttcttcaagcccgagttcttgtttgtgcaagtaattgagttactaaagcctttgtcttttattgtaaagcacacggcattttcagcatgtatcattaactacacaattgtcatgctaccttatttattttatcaagacccacagtgattttcatctttaattactgtatatatatattttat

SEQ ID NO: 340606 - DNA, 542 bp, Homo sapiens
tgctactgctccctacttctgccattttagatcttaatggtctatttgcattggattcagatttctggggcaggactctgactaaaatgttctgccctccagtttgaaataatcaacaaattctagattttctttttgtcgtctaatatgggcagaaagggtccttaatgggtttctctaaaggaaaaaccaaactgcttctctctccttttccattcacaacacagaatgcttctgtgatcctagatatatggggctatttccgccacactaagcagtcaatcaattctgcagtggacaccagcttagtgacctctaattcaattcagttttgacgctatctacctgtaaagagaatcagatcctctaggttgagggcttagtcccacaagactgctcttacttcagacaacaatcctaaggctgtcacctayacttctgactgatcaactattaattggggttcccactaccccctcctgatgaatttgcaagagtggctcacagaaatcagcgaaacacttagctttcatttgctggtt

SEQ ID NO: 340607 - DNA, 454 bp, Homo sapiens
tataatgctatagtaaaaaaygtatccacacaaagattatatatggatgacttacatcaaactgaaggggataggcaacaagaacaagtagagatttacaaaaatcaagaattatgtgttataaaaataaagatgtatggttctggtgtcaagttcataagcctgaacttccacagaatatttctttaaatgcgctttgttcctagcccactctcagtgttgctacttagaactgaaatcttaaaaacaatgaagatataatgtgctatttcaattaactattactttaatttgtttattttatttatttccaagcaccgacgtataatcaattgtttcttcacttgacactttaaatgtatttctactatgatatttgttatacaactttatgaaattatttggataagtgaccttcttaccatagacttaaactccttagaaaaatggatta

SEQ ID NO: 340608 - DNA, 454 bp, Homo sapiens
tataatgctatagtaaaaaatgtwtccacacaaagattatatatggatgacttacatcaaactgaaggggataggcaacaagaacaagtagagatttacaaaaatcaagaattatgtgttataaaaataaagatgtatggttctggtgtcaagttcataagcctgaacttccacagaatatttctttaaatgcgctttgttcctagcccactctcagtgttgctacttagaactgaaatcttaaaaacaatgaagatataatgtgctatttcaattaactattactttaatttgtttattttatttatttccaagcaccgacgtataatcaattgtttcttcacttgacactttaaatgtatttctactatgatatttgttatacaactttatgaaattatttggataagtgaccttcttaccatagacttaaactccttagaaaaatggatta

SEQ ID NO: 340609 - DNA, 559 bp, Homo sapiens
aaggagaaactctctgatttttcaagatatgtagaaagactatttgataaaaataaaataaaagtttctcaagctgaaaaaaagaaatataataatccatttctaatatttttccaatcaaattagccagtgcaataaggcaagaaaagaggaaaaaagacgtaaggtttagaaaataatcaaacttattttcagttaacgtgactggatatgcagcaaaatttaaataagctattctaattgctaagtaaatctatcaaagttattggataaaaagcatatattaactttatttttacatataagcatcaaaaaatctagtgttgtgtaacaaagtaccacaaacttggtggttttagcagcagaaatctattccttcacagttgtgaaggctagaagtctgaaatcaagttgttagtagaattggttcttttttaagggttctgagggagaatctgtttcatgcrtatttcctagtttctggcaatggccagccatccttgctattccttggcttgtctctatctttacatgacattctctctgtgtctctatatga

SEQ ID NO: 340610 - DNA, 493 bp, Homo sapiens
caccatgtctagaatatatatatatatacacatatattatagatatctctatatataccatagatatctatatatacactatatctatctatctatatgtatcttgtatatatatatatatatatatacaagatttatatatatcttgatgaaacccagaaggtcatwgttaaagagaaaatttttaaagattccagacttgagaaaagaagtcaaaggctaaatttcagaattctcactatcaacacaaaatggttgctgaaagaaaacattctttgttctttatacaaagaacttttatacaaagttctttatatataaattcctctttgtatataaaatgccaagtaaaagaattttacatacaaattgatttttaattaagtgagatagaaagagtaacaagagaaaatttggatgtggaagatttgcaaattcatagcaccaataataatcattatttttatatccagttgcatgaaaaaaagtttta

SEQ ID NO: 340611 - DNA, 570 bp, Homo sapiens
gatgaaataagccccagtctcccgtagctctcccaggcttattaggatgaggaaattcccgcctaataaattttggtcacaccgsctgtctgctgtcaaaccctgtctcctgataagatgttatcaatgacaatgcgtgcccaaaacttcattagcaattttaattttgccccggtcctgtgatctcgccctgcctccatttgccttgtgatattttattaccttgtgaagcatgtgatctctgtgacccacaccctattcatacactccctccccttttgaaaatcactaataaaaacttgcaggttttgtggcttggggggcatcacggaacctgctgacatgtgatgtctcccccggacacccagcttgaaaatttctctcttttgtactctttccctttatttccaagaccggctgacgcttagggaaaatagaaaaggactcatgttgaatatcgggggctgatcgggggctggtttcccctgataggtatggactcaggctaccattgtccataattgtttttggatgtccatgattaggagaataggcttattttgacaagtg

SEQ ID NO: 340612 - DNA, 541 bp, Homo sapiens
  misc_feature (1)...(541): n = A,T,C or G
aagcaaagacttctaaagaatatgcttgactttctgtctctattatatcacctgataatcttccactgaaatgaatcaaattcagccatgcctcttatggatatgtaaacctgttcaggatgactctctgtcatttgcttacagaacccctctctctctctctntgacacacacacacacacacacacacacacacacacacacacacaatytaaactgcctccatggcctcatttctgctagggaagcttttaggaggccatcaacaaatcactgactgatgttgtagtttggtctgggtttttacaaatcagtgagcttgtgaatctgaagcctagaaacttggcttcattttgcaccatctgttaatattacccaaaattattttagcagaaatttgactctcaatatttcatgctgtaaataatggaaaatgtctagttcaaaagttctttcaacagtgtaatgaattgacaatattgtctcagatatatttaaaagtctgcactttcatattctgaacagagcactaaacaaatct

SEQ ID NO: 340613 - DNA, 673 bp, Homo sapiens
aattgccattttttccaaatttgataaaaactataaacctaaatattcaagtactcagtgcacttcaagtgcaagaaaatcgaagaaaattacatcataatgacagtgctcaaaagcagtaataaatagaaaaacttaaaaaactgggaaaaatgcatgctacatacagaggaaaaasgataaagatgacatcaattttctcattgtaaacaatgcaaacaaaagagagtgaagcaacagtgtcaataaagcatcaaaagaagaaaaaataactagtaatctagaattccaaaagtttttaactgggattggagacacctaactggagttgatctaaaaatattaggtgatttgtaccatctacacccgggtaagttaaacattttttaaaagaatataaagttaatctcctgagttgatggatgattttaatttagtgttttacaagtcagactattgtttggcttaagtcgatcctcctgttttcaaatcagtcacatatattctggttcctggtagcagcagtatttaatcattagaacaggaatttataatatcaactagaaaatttctatttagcagactatcaaattccctatttcttagcatgactgttctctttcttggcacagataatgcagaatctttcagacaatctttcaaacatttacta

SEQ ID NO: 340614 - DNA, 556 bp, Homo sapiens
atgaataaataaagaatggcacaggcatcaaaaaataaactactattaatatgacataattaawgtaatatagttattattaacaataattcagaggaattatcaagtttatgcttatattgtttgttatgaaattgtattacacttttattttagagaatgatgtttggcgtttaattatgtgtggcaacatttttactgtaagaattctacttaaatcttgctttgttctaaaatttcaaattatttatggtaagaaaataagccaccttctacacatctttctcttataacatctattttattaaataaacttgtcttttatgttgcttcatataaataagtttttgaggtggcttagataatacctgttgattgattattcaatgtattcaaaatgtattagttatatttttgtatttaatatcttaataaatatcttaaatgtattagacactaataaataatcaatataggatcttatgtttattataggcaagtgtgtggacttactatataatttatcatccttgataaattaggtaaataaataaaa

SEQ ID NO: 340615 - DNA, 567 bp, Homo sapiens
acttctctgctttaacagaattatgttgaaatctgcttytgcacattaaaaaaaaaaaaaaaaaaaaaggctaacaaaatctatcttccagagtggcactgaaagagataacatcaacaacaaaattatacccataatattactgaattataggattcagagcagggtaaacagatgtagggtcaggtatgaatttaacaggaggataaatacactattatggccactcgtttatgaagataagaatacaggtatttttaaaggagtggacaaatttatccattaagagtatttatttactacctgttgtttgtataggttccaatatttaagaacaaaattaataaaagaaaaacaacaaccatgtagaataggtacaatttagaagacaggtaaataaaagtgaaattgtcatataatataattagtgatatgaaagagataaacatggctgctatcagagtcctgggaaaggagaggaaaacctaccctagataaaatgaggaagtcatggaatcttagttggaaaagaaactctagaattgattatttaatgatgattaggca

SEQ ID NO: 340616 - DNA, 349 bp, Homo sapiens
aacttccagtattatgttgaataacagtggcaacagtggcatccttgttgtgttcccaaaattagaataaaggctcttagagatttttttttctcattcagtatgatactacctktggatctgttggggagggcttttattatgtggaggtatgtttcctgtatatccaattttttgaggatttttatcatgaagagatgttggattttatcaaatgctttttcagcatcaactgaaatgagcatagaattttgtgtatgctgaaccatccttgcattcctggcacaaatcccacttagtcatgatgaatgacctatttattgtgttattgaattcgattttttaggat

SEQ ID NO: 340617 - DNA, 584 bp, Homo sapiens
atgtatgttgaattcttgatgctgaagtgtcgtcaaatagatgaaaatatcataacatatggacttttgcgaaaagcacggaatctcctagaacttatccttcagaaatatattatcagggataaaaatgcatggcataaagtccttttttaattattagatttttttttcttttttcaattatcagaatagaawgtgagtgagctatgctggaccatatgcaaattttcttttgtctgggttagagcagccaaattcagaaatacaaagaaagcaaaatataaacaacctgcttagaccctattccttctaaatctatggctacttcttcattttattactccaatatcaagaaaaggcaatttttaattcttctagacagtgaaagtacaaagagagtgcataaaagactggattgtacaatagaatgttcactttagcttttttgagagagctggtacaagctgtccattccccaaccttcttaggctggtgaagttaacataggcgcagggccgggctcagttcagcacccaggagttgttgagtgagtcacaaagaccagaatcctaggaatgagcatt

SEQ ID NO: 340618 - DNA, 597 bp, Homo sapiens
tcattctctttcttaaatttatctgataggattctgaattccttctctgtgttatcttaaatttctttasgtttcctcaaaacagatattttgatttctctgtctgaaaagtcacatatctctgtttctccaggactggtctttggtgccttatttagttcacttggtggcctcatgttttcctagatggtcttgatactggtggatgttcatctgtgtcttggcattgaagagttaggtatttattatagtcatcatattctggaattgcttgtacttgtctttcttgggaaggctttccaggtatttgaaagaacttgagtgttgtgatctaagctgtatctgcattataggccacctgaagcccagtaacactatgatacttgcaaactaatagaggtactgcctttatggtcctggataagatccagaagaattctgtggattacgaggcagagattcttgttctcttcccttactttctcctgaacaaatggagtctctctcaccctgttgtaaagtacctggggctaggggtgggatgacaccagcatccctgtggccactaccactaggactgtactgattcagatctga

SEQ ID NO: 340619 - DNA, 640 bp, Homo sapiens
ttccatcttccttggaacatcttagctatactttattgtaaaatttatagcgtaatcacttgtcaagttaaacattataagtacactgatttagtcatattgctttaacctttagaaattatagcaataacctcataaaaataaattcagcaatyaggctcaaattatggctatgtattttacttaatacttagtagtttattaattaatatgagaggcatataataaaatatgaatccttattttcctaaaaatatttatgaataaaactcagtcttattgtataagtatatagcctgtaacttactgactgacattaacagacccagactgaatgtagagaataggtatatagatcacccaatagcaacgcttgtacattattaatttgtacacagtagtggtagttgatatgtacaatagacagactgctgcatttttgaaacaaaatagagaaaatatctcttaaatattataatgatgatttttttcataaattagatatatttttttctttaaggtacttctaagtgataaataaagatcacatggaagaattattatgaatctcagagtaccaattactggttttaaaatgtacaataaatgttggaaaaaaggctgaaataaaatacaaatt

SEQ ID NO: 340620 - DNA, 534 bp, Homo sapiens
atttatgtgtgtctatttctgggttctctattgttttccattgatctgtttgtctgttctttcaccaatgtcacactgtgttgattatcataagtttacagtcgtttttgaaatcaggtagtgtcatcagtcctatgattttgtctccttgactaatgccttggctattctgggtgtttgcttctccatgtaaactttagaatcagtatgtcgatatccacaaaataacttgctgtgagtttgattaagatttattgtgtttgtaatttgcattgatatctaataatattgagcatcttttcrtgagtgtattgccattagtatttccctttgataaattatcctcaaaattgttgcctatttttagattgagttatttgatttcttactgggtttagagaataatcttttctgtcttgaagaccttttttggtgtatttagtcaggttttccagagaaacagaagcagtagagagagagagagatatggaaagaaattgattatgagagattgactcatgcaactatggaggc

SEQ ID NO: 340621 - DNA, 629 bp, Homo sapiens
gattatgagagattgactcatgcaactrtggaggctaagaagtcccatgatttgccatctgcaaattgaaagcccaggaaagccagtggtatagttccagttcaaacccaaggcctgaaaacaaggcacatcaatgtctcagagcaggagaaaatggatattccagctcaaccacagagcaaattcacccttcttccagttttttgtcctcttcaggccctcaatggattggctggtgcctatcaaaaatgacgatggcaatcttctttactctgtctacccattcaaaggctaatctcttcgagaaacagcctcccagacacacccagaaataatgtttcatgttgtgaatcccttaaccaagtcaagttgacacatattaataaaattaactgttacttatgtgattagatatgttagatacgtgatttgcagatattttctcccagtctgtagcttgtcttttcattcacttaatagtgttatactaaaaggtttaaattttagtttaatttaccaattatttagtaatggatagtgctttttttaaaaatcatatttaaggactttttgcctaacacaaggtagcaaatattttctcctaaaagatttatagttttatattttat

SEQ ID NO: 340622 - DNA, 578 bp, Homo sapiens
atgcatacatttcttcaacatactgatttcagttcctttggatatatgccargtaatgggattgttggatcatatgtagtttgatttttaattttttgagcatgctccacatagttctccataatggctgtatcaatttatattcccaccaacagtaaataagggttcacttttcttcacattcctgccaacacttgttatctttttttgaaaatagccattgtaaaatgtgtgcagtgatatctcattgtggcttagacttgcatttccctgatgattagtaatgttgataatttttttcatgtacctgttgcctacctgtatatcttctttggagaaatgtatattcagttcctttgtccatttaaaaaacttaattattttcttgccagtgatttgtttgaatttctaatatactttggataataacccttatcagatatatactttgcaaatattttttcctattccataggttgtttattcattctgtttattgtttcctttggtatacagaagcattttagtttgatgtgattccatttgtctatatttgtttttgctgcatgtgcttttgg

SEQ ID NO: 340623 - DNA, 578 bp, Homo sapiens
atgcatacatttcttcaacatactgatttcagttcctttggatatatgccaagtaatgggattgttggatcatatgtagtttgatttttaattttttgagcatgctccacatagttctccataatggctgtatcaatttatattcccaccaacagtaaataagggttcacttttcttcacattcctgccaacacttgttatctttttttgaaaatagccattgtaaaatgtgtgcagtgatatctcattgtggyttagacttgcatttccctgatgattagtaatgttgataatttttttcatgtacctgttgcctacctgtatatcttctttggagaaatgtatattcagttcctttgtccatttaaaaaacttaattattttcttgccagtgatttgtttgaatttctaatatactttggataataacccttatcagatatatactttgcaaatattttttcctattccataggttgtttattcattctgtttattgtttcctttggtatacagaagcattttagtttgatgtgattccatttgtctatatttgtttttgctgcatgtgcttttgg

SEQ ID NO: 340624 - DNA, 578 bp, Homo sapiens
atgcatacatttcttcaacatactgatttcagttcctttggatatatgccaagtaatgggattgttggatcatatgtagtttgatttttaattttttgagcatgctccacatagttctccataatggctgtatcaatttatattcccaccaacagtaaataagggttcacttttcttcacattcctgccaacacttgttatctttttttgaaaatagccattgtaaaatgtgtgcagtgatatctcattgtggcttagacttgcatttccctgatgattagtaatgttgataatttttttcatgtacctgttgcctacctgtatatcttctttggagaaatgtatattcagttcctttgtccatttaaaaaacttaattattttcttgccagtgatttgtttgaatttctaatataytttggataataacccttatcagatatatactttgcaaatattttttcctattccataggttgtttattcattctgtttattgtttcctttggtatacagaagcattttagtttgatgtgattccatttgtctatatttgtttttgctgcatgtgcttttgg

SEQ ID NO: 340625 - DNA, 562 bp, Homo sapiens
agggtaggagagaggaataaggagatacagggtgagagggagagagatttttgagatgattgaggctggtcaatattttgaaatattattttatacatctatctgggctctccagagaaagagaacccataggaatatatacatacctacggagagagagaggccaagaagtcccactttctgcaatgggcaagctggagacctagcagagccaatggtacagttccagtccaagtccaaaggcctgagaaccaggaaagccaatgactcaagctccagtcaaagtctgaatgcaagggcaggagaagatggtaacrcagagcacattttctcttactccacctttgtactctattcaggccttcagtggattggatgcagcctacccacacttggggagggcaatctgctttactcagtcgactgctgcaaatgttaacctcaccctgaagcacctttagacatacccagaataatgtttaactgaatatttgggcatcccatggcctagtcaagttgacatataaaattaactatcacagtatcactcttcaaattttcc

SEQ ID NO: 340626 - DNA, 562 bp, Homo sapiens
agggtaggagagaggaataaggagatacagggtgagagggagagagatttttgagatgattgaggctggtcaatattttgaaatattattttatacatctatctgggctctccagagaaagagaacccataggaatatatacatacctacggagagagagaggccaagaagtcccactttctgcaatgggcaagctggagacctagcagagccaatggtacagttccagtccaagtccaaaggcctgagaaccaggaaagccaatgactcaagctccagtcaaagtctgaatgcaagggcaggagaagatggtaacgcagagcacattttctcttactcyacctttgtactctattcaggccttcagtggattggatgcagcctacccacacttggggagggcaatctgctttactcagtcgactgctgcaaatgttaacctcaccctgaagcacctttagacatacccagaataatgtttaactgaatatttgggcatcccatggcctagtcaagttgacatataaaattaactatcacagtatcactcttcaaattttcc

SEQ ID NO: 340627 - DNA, 565 bp, Homo sapiens
gtggggatccaaacaaagggagacttgtgcctcatttccttagtggaaccgaaggagcaacaagcctccccttgctctctctctatacctccaccagtcacaggcagagaaagtaaaggtggggcctgctgagcacgtcagagcagaatgggcatggcatagctccgtcaagtctcccagagctccagagcagcacaaaaaggcatccaaatatttcctgtgcttccctgtcctctcacctcaagagggatgcaaaagacaaggctggagtgacctcaagcagtctagcagtcttgmaagttgtatgaactggaaacacaagtccagaggagaacaaggccatcttgaggataccagcaaggatagatcactatgcccggaagccaataggagccatcacaaataaacaagaatttctgaggacaaaggtccccctcttgatagacatcaaagtatgatgacttaaggccccagaacttagaggcaactcagggagaaaatggtgggggaaaaaaaactccggaacagacttaataaataattgaccaaaggtagcctgagttga

SEQ ID NO: 340628 - DNA, 513 bp, Homo sapiens
ctatgcccggaagccaataggagccatcayaaataaacaagaatttctgaggacaaaggtccccctcttgatagacatcaaagtatgatgacttaaggccccagaacttagaggcaactcagggagaaaatggtgggggaaaaaaaactccggaacagacttaataaataattgaccaaaggtagcctgagttgaatatgattgaaattaagttcagttacagaataatgttatatttgttttttgcacagaggattttgcagcctgagacttttacctgcttggctataaagaaataaaacttgtttacctttgcaaacagtactctctctctctctatgaaagccaaaagaataactccaaaaatgttttgagaaataagatcattattgaactaagtatatgacttcccaaagagactactttccagagtaacactcctttctgtaagtgtccattctgttccatttcttgaaaacattagtctcactagttcaaactggtattcatact

SEQ ID NO: 340629 - DNA, 547 bp, Homo sapiens
acagaaagatatgcgacctgtcggatttggaaccaatcacacctgggtttgaactccagactttgggcaagaaacctgaatctcagattccttgattgtaacatggggtcaatgttacccagctcaaagggcttctgtgagatgaagtaagtgaatgcatagggcctgacacagtgcctgacacagagaaattaattgaaatattaggtccattctctataccagggctcaaattcagggcattggtaaattgaaacagaaagactaatatgttaatattttcactaatctctaactgaaaagtcacatttcttaaataatacaggtaagcaatattagcatatgcagtagctgtgatgttgacactaagagaaatcacagatattttcataacacaacacagctagtatagatatttwaaaaatattgtttatactcatcactattttgaaattatggtagttattagacctgctgctagatcttgttattcaatgcattagtgagaaagcacattactgtacaaaattgttttttaacattttga

SEQ ID NO: 340630 - DNA, 516 bp, Homo sapiens
ttgaaattatggtagttattagacctgctgctagatcttgttattcaatgcattagtgagaaagcacattactgtacaaaattgttttttaacattttgatggctatatttttgtaattgatttcctttgcaatattatgtatttttaaaattcttcataaacatgctttaaacgggaattgaaaacattgagaagactagagacttcaacaaactgccaaatgggtttgctctaccctctgcgagtggtgttatattcagctattacgaaatggatgaaggtcctattgattgggactgtgaatagatgggaccatttttcagatgggtctaatttgggctgttttctgcaaatatgatcaatttyggacttgcaggtgattttggttcatattcagctgttgctcacttaatgagatttttacttgaaatgtggaatgaaagagaacactttaacattttatcttttcttgatctcaaaaagtaatatgaaaaacaaggagatgtgtccagatc

SEQ ID NO: 340631 - DNA, 614 bp, Homo sapiens
actttaacattttatcttttcttgatctcaaaaagtaatatgaaaaacaaggagatgtgtccagatccctgaaagtcattttcatatgcacatgccccaaggatcttagagagtcattaggattttatgacactaagttattggctttatttgtggcaaaggtactgtgaaatcagataagaatcggcggcttctaaatcttgtctccctgcagttaaaaataaaaacagattcaaccatcatcwggttaatatttccttacatttcactagttctgaaacatgccaaaatatgcctacttgcaacagctggaaaattatacttcaactaaaattatatttcttggcttcctatggaatgcttttgctctgagagctcaggaataatctaaccagtgttttctggtttttttgttgttttgttttgtttttaatttgtgacaataatccaaccagaaatgtcaccaggttttgttatagggcaaaatacactttataatattacttttctttaatacataccagaagcctatttcttattctaatatgtgggtaaagtacatttttaaaagatagcagcagaataataataatttataatgtggcatatgtaag

SEQ ID NO: 340632 - DNA, 619 bp, Homo sapiens
tgggaccatttttcagatgggtctaatttgggctgttttctgcaaatatgatcaattttggacttgcaggtgattttggttcatattcagctgttgctcacttaatgagatttttacttgaaatgtggaatgaaagagaacactttaacattttatcttttcttgatctcaaaaagtaatatgaaaaacaaggagatgtgtccagatccctgaaagtcattttcatatgcacatgccccaaggatcttagagagtcattaggattttatgacactaagttattggctttatttgtggcaaaggtactgtgaaatcagataagaatcggcggcttctaaatcttgtctccctgcagttaaaaataaaaacagattcaaccatcatcaggttaatatttccttacatttcactagttctgaaacatgccaaaatatgcctacttgcaacagctggaaaattatacttcaactaaaattatatttcttggcttcctatggaatgcttttgctctgagagctcaggaataatctaaccagtgttttctggtttttttgttgttttgttttgtttttaatttgtgacaataatccaaccaraaatgtcaccaggttttgttata

SEQ ID NO: 340633 - DNA, 583 bp, Homo sapiens
gtgtgagtaagcgagagggttactcaaactgtggtgagtgacaagggatctgggctacctgcctgtgcagcccatccaggctataccatttccatcttaaaatggacaattggctgcagctaggccaatctgacttcctgatttggtgggtctgagagaacacagccaatattgggcaggtctccatgcacagacaattggtatcctttggtcaagtgtttcatctttaccagggcacagtaacacaccaggagatgtttatcaaaaggcatataattatctgctgctgcaaatggcatggccttsttccagaatcccagggtcctgaattccaattctcccactgagatttgtcaccactaaacatttagtgatgctggttgcctcaccagctcattcctaatgaccttggtaagtggtgtgtcctctgggtcctcttgttgagtataatcctccaggaagtcttttgacctggcaaaatatatccattctagcatgactagtttctccaggctctttattccttcctgtatcatcttttggcacaatttaggcatttcctttccactcagcattaaccatc

SEQ ID NO: 340634 - DNA, 589 bp, Homo sapiens
ccaggctctttattccttcctgtatcatcttttggcacaatttaggcatttcctttccactcagcattaaccatcactttctccacacttttaggagccatggttgcagtgaatttgtcttactccctggggttcacgccatcatgttaaatcctgtstcctgaagtcaatgaattcatacatacatattgactcccttgatcaaacgccttcaaaatccaatcccgaagatcttccctagccatcggcagctagctaggtcatatagcttcttcagtataatctcctgcctcccttatgaagtccagttgatgtacttttgcaggctccccattgaacataaccccttcttccttcctatattcttcttaatctcatttctataatttgttctaaagaaagaatctgttgttcaatcacactaggaggtgaattacaacaaagcaaaaatgaaaatttaagctaatggaatgaaacctctacaacagaattttctgacatggtagcggtatgagggtagaaacagacatgtacttagagagggagcaaaactctgctattgtacccaattactgcctattttacctat

SEQ ID NO: 340635 - DNA, 589 bp, Homo sapiens
ccaggctctttattccttcctgtatcatcttttggcacaatttaggcatttcctttccactcagcattaaccatcactttctccacacttttaggagccatggttgcagtgaatttgtcttactccctggggttcacgccatcatgttaaatcctgtgtcctgaagtcaatgaattcatacatacatattgactcccttgatcaaacgccttcaaaatccaatcccgaagatcttccctagccatcggcagctagctaggtcatatagcttcttcagtataatctcctgcctcccttatgaagtccagttgatgtacttttgcaggctccccattgaacataaccccttcttccttcctatattcttcttaatctcatttctataatttgttctaaagaaagaatctgttgttcaatyacactaggaggtgaattacaacaaagcaaaaatgaaaatttaagctaatggaatgaaacctctacaacagaattttctgacatggtagcggtatgagggtagaaacagacatgtacttagagagggagcaaaactctgctattgtacccaattactgcctattttacctat

SEQ ID NO: 340636 - DNA, 589 bp, Homo sapiens
ccaggctctttattccttcctgtatcatcttttggcacaatttaggcatttcctttccactcagcattaaccatcactttctccacacttttaggagccatggttgcagtgaatttgtcttactccctggggttcacgccatcatgttaaatcctgtgtcctgaagtcaatgaattcatacatacatattgactcccttgatcaaacgccttcaaaatccaatcccgaagatcttccctagccatcggcagctagctaggtcatatagcttcttcagtataatctcctgcctcccttatgaagtccagttgatgtacttttgcaggctccccattgaacataaccccttcttccttcctatattcttcttaatctcatttctataatttgttctaaagaaagaatctgttgttcaatcacactaggaggtgaattacaacaaagcaaaaatgaaaatttaagctaatggaatgaaacctctacaasagaattttctgacatggtagcggtatgagggtagaaacagacatgtacttagagagggagcaaaactctgctattgtacccaattactgcctattttacctat

SEQ ID NO: 340637 - DNA, 613 bp, Homo sapiens
gtgttcttatcatgttttgcctggcaaaaagtagaacatcaataaatgtctgtcaaatatgcaactaataaacagattcttcaagtgtgttgggatactaggaaaagttaagcaaaagacacggaaaaacatttgttatgggaagatgttgggaattgcttcagttgaaagcggtatggggtaaggtaatttgagaytgatgaaaaaaatgggccagactgattgaacttcttaaggaattgaaaattccctaagaatgaacatttatgtaaaaatagtattgcatatttttcactttattttatttcaacatagcattaatattttagtataatcatacatattatttgagatggcatttctagtgagtcatatctgtaatttgctagtagagatgaaggaaaagcagttgcttaataaaaattcataatgccaccattgctagaaactcatctattccttactattaggggaggtgtgtctgaaattattagtcttatagattgtttaattaaacatatacagttacttccatgacatagtaacttcaaagtagtattgccaaattaagcagtcataggtgtacaatttagggaaattagatttaaaaatg

SEQ ID NO: 340638 - DNA, 543 bp, Homo sapiens
aggtaatttgagattgatgaaaaaaatgggccagactgattgaacttcttaaggaattgaaaattccctaagaatgaacatttatgtaaaaatagtattgcatatttttcactttattttatttcaacatagcattaatattttagtataatcatwcatattatttgagatggcatttctagtgagtcatatctgtaatttgctagtagagatgaaggaaaagcagttgcttaataaaaattcataatgccaccattgctagaaactcatctattccttactattaggggaggtgtgtctgaaattattagtcttatagattgtttaattaaacatatacagttacttccatgacatagtaacttcaaagtagtattgccaaattaagcagtcataggtgtacaatttagggaaattagatttaaaaatggacttcatatacatctagtctcaaactctaatttgacaagtagaccctgagaggttaataacagtttcagctcatccaaagtttaaactcagttttcccagtttccaacctac

SEQ ID NO: 340639 - DNA, 587 bp, Homo sapiens
aacctaattagctggctccattttgcttctaacctcacaagctaaccacctttgcttattcttgtacgtaggccaggataactataggaataatttagtttatgctttaaccttggagcaagaatgattatagtctcttcccaaaactaacctttcccttgttagggactgaaactgcatttgtggaactaatgtaaggtcataatattagaactataataggggtctgaattctgctaagatataggcatagttatacagtaaccaatcattgttccctaacttgctgttttataattgcttacttctcaggagtcacatagccagtgatcaaaagatctgtaacttccccagttcctcctatgggtaacattgctattgtgaaacttaagactggcatttcagatcagatcactcagatgccttgagattatgaaactccttctctgctgcaatacctgctgtttcagtatattggctttttctgtgcagcaggcaagaagaacctgctgggctgtaacaatactgtccctaycccatggaattaatgtaagaattccatgaagtgataactgtaaagcacttaa

SEQ ID NO: 340640 - DNA, 582 bp, Homo sapiens
actgccatgatagtgtacggggtgggagctacatacatgtgtgtatatgtagagtgtgtgtgtgtgggaggaatggtggggagcagggtctttgacaatgaagtgtagtagagtgagaagaaggagctaatagaagagtgtagacagataacagaaataagtggaagaccaggaggtggttaacatttaaaaaacaacaaaggaggggctatggccaaagttctagtgtttgttttttgtttatctctgatacttcatctttattgccatttagacattatttagtattgctttttggactaatctataaagtcttgtgggttgcatttgtgtttgttttctccttaataatcttggtacagccttaacccttgtgggtatgtgcactaccttcagtaaactgaaataagttaaaacctagtgtttcaaactaagtgccatcaattgaaatcagtggccaatttcttggtttcagggatrcttggttttcctcctgtatggatagccagtcattaattctgcaattgtattgtatttattttttattgtagtgaaatacacataatataaaacttaccacct

SEQ ID NO: 340641 - DNA, 596 bp, Homo sapiens
cttggttttcctcctgtatggatagccagtcattaattctgcaattgtattgtatttattttttattgtagtgaaatacacataatataaaacttaccaccttaatcgtttttaagtgtacagttcagtagtgttaagtatattcacattgttgtacaacaaatcttcagaactcttttcatctggcaaaaccgaaagtctatatccattagacaactccctggtccctctcagcctctggcaaccaacattcttctttctgtctctatgaatttgartactttaggaacctcatgtaaatggaaccatacagtatttgtctttttgtgactgatttatcaggattcatccacgttttaggaagtgtgagaattttcttcctttttaaggctgaataatattccattgtgtgtgcattttgtttatccattcatctgtccatggacacttgtgctgcttccaccttttggctattgcaaataatgctgctatcaacgtgggtttacaaatatatctctttgagttcctactttcaattcttttgggtatatactggaagtggaattgctggatcatatagtaattttctatttaat

SEQ ID NO: 340642 - DNA, 566 bp, Homo sapiens
cgaaactccatcttataaaaaaaaaaaaaaaaggaaaatatattttctcaaataatcctttgccgtaattatcatttattactctcttttgccttttcgcttctgtaaaggtgtcctgatgaacaaaagtgattatattcttaactaccacactacgctgtttcaatcctggaaaatgatcataatttttagtgtcattataataacggatatcttaggaaacctatttaattgacatttcaaagttgtgtttatccasagtggcctaataagctatgattgattatctataactgaacaccttgtctttaatgatcaaactgaattttatatcacatagtttatgaacaattctgggttttttttcttcatgataaagatacaaacataatctcacctaggaaaacctttcctcaaaaatcatgctgttccaatgacccctttatgaaaaaaaaatagagatgaaattttttaataaaaaaatttaaattacttttcaaatgagtttcaccacgacttttttggcaggtagataagcaaattgagtagttttctaaatcaacctg

SEQ ID NO: 340643 - DNA, 502 bp, Homo sapiens
ttgcctcatagggactacagtttacatgcccctgtgtgagtgtgtatgtgtcccactcaaatctattggtctctgcaaccgtaatgatctagtctgcaatatttttctaatgtctctcttctggtttttgtagaaatgacttcattgtttcattagytggaaaatctggatctgatctttggaagaaggatttggaacatagtgactgtacctttaatgaaaagattaacaatgcttcagagctgaattgccctggatttgtttagaataggccttgcgttttgcttttttgaggaggaacttacataccaagtcttgtcctggatttatataccattccaatcccctcgcccatgttctaaataaaggtagtatgactatacgtttgaaataagaaataactccagtgtgctatgctttgtttataaaaatgaatgctagacattttcctggatctttgtgagaaatgacatcctatactgatgccctctctgtaatcaca

SEQ ID NO: 340644 - DNA, 512 bp, Homo sapiens
gatgccctctctgtaatcacaatactaaccacttccagcccctcgtattrtgttgcagcattttgatgatgtttagctttacacttattcaagaaccatgtcccgcttgattatcctttttcctgcattgctggcggagcacatgccatcctagtctccgcagaattacacacacttccactgattttgctggctgagcattggggatgcagattggccaggcatcctcagtcggtccttttcctaatttggtactactgtcagcctgtccctggcaacaccatgacaccccactcactccttgggttgctcaccaggggaggggacatgtgtgacccagtcttgttgctgaggaaatgaagcacattcatttacgctgctgctgctcacagccgaaaaaggccaagacaaacagtgacacagcacactgaactctgctgaaacgtccagactttctcccagtctgggactcctgccctgtgagtcctaaatgtataagggtggttttctcc

SEQ ID NO: 340645 - DNA, 537 bp, Homo sapiens
tctttgtgagaaatgacatcctatactgatgccctctctgtaatcacaatactaaccacttccagcccctcgtattgtgttgcagcattttgatgatgtttagctttacacttattcaagaaccatgtcccgcttgattatcctttttcctgcattgctggcggagcacatgccatcctagtctccgcagaattacacacacttccactgattttgctggctgagcrttggggatgcagattggccaggcatcctcagtcggtccttttcctaatttggtactactgtcagcctgtccctggcaacaccatgacaccccactcactccttgggttgctcaccaggggaggggacatgtgtgacccagtcttgttgctgaggaaatgaagcacattcatttacgctgctgctgctcacagccgaaaaaggccaagacaaacagtgacacagcacactgaactctgctgaaacgtccagactttctcccagtctgggactcctgccctgtgagtcctaaatgtataagggtggttttct

SEQ ID NO: 340646 - DNA, 537 bp, Homo sapiens
tctttgtgagaaatgacatcctatactgatgccctctctgtaatcacaatactaaccacttccagcccctcgtattgtgttgcagcattttgatgatgtttagctttacacttattcaagaaccatgtcccgcttgattatcctttttcctgcattgctggcggagcacatgccatcctagtctccgcagaattacacacacttccactgattttgctggctgagcaytggggatgcagattggccaggcatcctcagtcggtccttttcctaatttggtactactgtcagcctgtccctggcaacaccatgacaccccactcactccttgggttgctcaccaggggaggggacatgtgtgacccagtcttgttgctgaggaaatgaagcacattcatttacgctgctgctgctcacagccgaaaaaggccaagacaaacagtgacacagcacactgaactctgctgaaacgtccagactttctcccagtctgggactcctgccctgtgagtcctaaatgtataagggtggttttct

SEQ ID NO: 340647 - DNA, 566 bp, Homo sapiens
cgaaactccatcttataaaaaaaaaaaaaaaaggaaaatatattttctcaaataatcctttgccgtaattatcatttattactctcttttgccttttcgcttctgtaaaggtgtcctgatgaacaaaagtgattatattcttaactaccacactacgctgtttcaatcctggaaaatgatcataatttttagtgtcattataataacggatatcttaggaaacctatttaattgacatttcaaagttgtgtttatccacagtggcctaataagctatgattgattatctataactgaacascttgtctttaatgatcaaactgaattttatatcacatagtttatgaacaattctgggttttttttcttcatgataaagatacaaacataatctcacctaggaaaacctttcctcaaaaatcatgctgttccaatgacccctttatgaaaaaaaaatagagatgaaattttttaataaaaaaatttaaattacttttcaaatgagtttcaccacgacttttttggcaggtagataagcaaattgagtagttttctaaatcaacctg

SEQ ID NO: 340648 - DNA, 566 bp, Homo sapiens
cgaaactccatcttataaaaaaaaaaaaaaaaggaaaatatattttctcaaataatcctttgccgtaattatcatttattactctcttttgccttttcgcttctgtaaaggtgtcctgatgaacaaaagtgattatattcttaactaccacactacgctgtttcaatcctggaaaatgatcataatttttagtgtcattataataacggatatcttaggaaacctatttaattgacatttcaaagttgtgtttatccacagtggcctaataagctatgattgattatctataactgaacaccttgtctttaatgatcaaactgaattttatatcacatagtttatgaacaattctgggttttttttcttcatgataaagatacaaacataatctcacctaggaaaacctttcctcaaaaatcatgctgttccaatgacccctttatgaaraaaaaatagagatgaaattttttaataaaaaaatttaaattacttttcaaatgagtttcaccacgacttttttggcaggtagataagcaaattgagtagttttctaaatcaacctg

SEQ ID NO: 340649 - DNA, 547 bp, Homo sapiens
tcttaacgttgctggttatcagagagatgtaaatctaaatcacaatattattatgcatccagcagaaaggccaaaaataaaaaggcaaacaataccaagtgttggcgaggatgtgaaataactggacctctcatatgctgctagtcaaagtgtaaatttgtataaacactttgaaaacaatttgatgttttctaataacatgaacatacacatgccctrtgacccagcaattatactttgagacatatgtaatatgctcaacagagaaatgtatatatgtgcaccaaaatacatgaataagaatctttatggtagaattatttttcatagccccaaactggaagctactcaaatttacctcaacagtagaatgaactgtagtctagtcatatattacaatactatacaacactaacaataacatggctaattctttacacatggcaggttaacttttataatcataatgttgagtaaaagaagccagacccaaaagaaaaaatactgtataattcaatttattaaaaaaatgaaattaacctgtggt

SEQ ID NO: 340650 - DNA, 547 bp, Homo sapiens
tcttaacgttgctggttatcagagagatgtaaatctaaatcacaatattattatgcatccagcagaaaggccaaaaataaaaaggcaaacaataccaagtgttggcgaggatgtgaaataactggacctctcatatgctgctagtcaaagtgtaaatttgtataaacactttgaaaacaatttgatgttttctaataacatgaacatacacatgccctgtgacccagcaattatactttgagacatatgtaatatgctcaacagagaaatgtayatatgtgcaccaaaatacatgaataagaatctttatggtagaattatttttcatagccccaaactggaagctactcaaatttacctcaacagtagaatgaactgtagtctagtcatatattacaatactatacaacactaacaataacatggctaattctttacacatggcaggttaacttttataatcataatgttgagtaaaagaagccagacccaaaagaaaaaatactgtataattcaatttattaaaaaaatgaaattaacctgtggt

SEQ ID NO: 340651 - DNA, 565 bp, Homo sapiens
tctgggatattgtgtctaatcaaggatttctggtagattctaaaagataattttggaattatattatcacagtgtttctggtgtcccaggtagttccagtttttccaacaacataacaaagttacttatgaccacccaggtcctctcttctctttccccrtttcccactccactttggagagagaatcaaacacctatcagaaatatgcaaaaatagtgcacagtgttgccatttctttaaatttgttgatatttatcctttttccctgaagtttatcttgcccttccattatttttattgaggcataaaatacataacataaaattcatcctcccaacaatttccaagtgtacagtacaatagtcaacctcatgcactgtattgtataacagatccccaaagccccccatcctgtgggactgaaattctatatccaccaaacagctccactcccctccccagcctctggcagctaccaacatctttttttgtgggaagtaagaaaaagaaaaattgtgtaactagcaatgaatttttaaaattctttttttttttttttttttt

SEQ ID NO: 340652 - DNA, 608 bp, Homo sapiens
atgtaaatatctttcatatatttctctatgctcatagaaaaaatgtttattaatatataggggctttcctatttcttaaaaaaagaaataaccctatttacatttctctgcaatattttttcatttaatataacatggaaatctttccaggtagatatacagactgtaagttaatattttaatagacatgtaatactacaaatatgaagctattgtgatttattcaactgttcccctattgatggatatccaggttggtaccagatttttggtcactgccaatgatgccataatagctgcacagacacacccatgccacacacacccagtttcatgtattagtcctttcagtgtttcaagatagattcccattgttacattgctggatcaaaagttgcacacactttgaatttaatagatcatgttaggttaccttgcagaagaccgcagcaattcacaaacacatmagaaatttgtaaaagtgttgctaatcattaaacaataagaaatgaaaaaaaattagccaggcatggtagtacacgcctatagtcccagtgcctcaggaggctgaggtgagaggatcacttgagattgagaggtggaagctg

SEQ ID NO: 340653 - DNA, 608 bp, Homo sapiens
atgtaaatatctttcatatatttctctatgctcatagaaaaaatgtttattaatatataggggctttcctatttcttaaaaaaagaaataaccctatttacatttctctgcaatattttttcatttaatataacatggaaatctttccaggtagatatacagactgtaagttaatattttaatagacatgtaatactacaaatatgaagctattgtgatttattcaactgttcccctattgatggatatccaggttggtaccagatttttggtcactgccaatgatgccataatagctgcacagacacacccatgccacacacacccagtttcatgtattagtcctttcagtgtttcaagatagattcccattgttacattgctggatcaaaagttgcacacactttgaatttaatagatcatgttaggttaccttgcagaagaccgcagcaattcacaaacacataagaaattygtaaaagtgttgctaatcattaaacaataagaaatgaaaaaaaattagccaggcatggtagtacacgcctatagtcccagtgcctcaggaggctgaggtgagaggatcacttgagattgagaggtggaagctg

SEQ ID NO: 340654 - DNA, 503 bp, Homo sapiens
atatgactggtctccagactctgacccaaagctatccctagatggaaatctggggatatatggcctgtagcctggggaatcctatgctgctttggagatcagctgattggcagtgactcacggagggaggcaacagatgagggaggtgggggtgggatgaaaatacctgagactccaggtattttctctttttgtcccccaaccatcaccacccatctctgtttgtcccccacccgtcaccaccaccaatcagagaactttacctagacctcccaggtttgcttctttgggtttcctctcttgtccagaccagtttttcactttattcccttaacagcccatctagaatttccygcaacaataaaaactattattaacaatttatttgggctgcataattttacggagaatgcatatgcctataactaatttagctagacttgtgcataattattccctaagccatctctgactgagttgaaacacagtaatagtgcctctcc

SEQ ID NO: 340655 - DNA, 503 bp, Homo sapiens
atatgactggtctccagactctgacccaaagctatccctagatggaaatctggggatatatggcctgtagcctggggaatcctatgctgctttggagatcagctgattggcagtgactcacggagggaggcaacagatgagggaggtgggggtgggatgaaaatacctgagactccaggtattttctctttttgtcccccaaccatcaccacccatctctgtttgtcccccacccgtcaccaccaccaatcagagaactttacctagacctcccaggtttgcttctttgggtttcctctcttgtccagaccagtttttcactttattcccttaacagcccatctagaatttcctrcaacaataaaaactattattaacaatttatttgggctgcataattttacggagaatgcatatgcctataactaatttagctagacttgtgcataattattccctaagccatctctgactgagttgaaacacagtaatagtgcctctcc

SEQ ID NO: 340656 - DNA, 569 bp, Homo sapiens
gttattaagacttttaattgaagtataatgcacatggagaaaggyacatattatcctaagtatatcacttgatacgtttccacagaacaaacacactcatcaaaaaacggaatagaatcagaaccacggaagcctttcttgtgcccccttgtgtttttttctgcttttcctcctatgcaggtaacctctatcatgccctttaacagcacaatttagtcagttttgtacttttatataaataaaatcatacagcatattctcttttgtatatggctttttaatttcaatattgtttttgagatatatcaaattgctgtatagaattctactgtgtgaatataccacactacgccttttacagttgatggccatgaaggcagttttagttctgggatattacaatcaatgctgttctgaacattccagtacatatttttgggtgaacatagataggtatttgtgttaggtgtctatctgacagtggagtttctggatacgcagtgtttcactttggtagattccacgagctaaaggggttatatcaatttacatatcagtgtatgagaaat

SEQ ID NO: 340657 - DNA, 569 bp, Homo sapiens
gttattaagacttttaattgaagtataatgcacatggagaaaggtacatattatcytaagtatatcacttgatacgtttccacagaacaaacacactcatcaaaaaacggaatagaatcagaaccacggaagcctttcttgtgcccccttgtgtttttttctgcttttcctcctatgcaggtaacctctatcatgccctttaacagcacaatttagtcagttttgtacttttatataaataaaatcatacagcatattctcttttgtatatggctttttaatttcaatattgtttttgagatatatcaaattgctgtatagaattctactgtgtgaatataccacactacgccttttacagttgatggccatgaaggcagttttagttctgggatattacaatcaatgctgttctgaacattccagtacatatttttgggtgaacatagataggtatttgtgttaggtgtctatctgacagtggagtttctggatacgcagtgtttcactttggtagattccacgagctaaaggggttatatcaatttacatatcagtgtatgagaaat

SEQ ID NO: 340658 - DNA, 569 bp, Homo sapiens
gttattaagacttttaattgaagtataatgcacatggagaaaggtacatattatcctaagtatatcacttgatacgtttycacagaacaaacacactcatcaaaaaacggaatagaatcagaaccacggaagcctttcttgtgcccccttgtgtttttttctgcttttcctcctatgcaggtaacctctatcatgccctttaacagcacaatttagtcagttttgtacttttatataaataaaatcatacagcatattctcttttgtatatggctttttaatttcaatattgtttttgagatatatcaaattgctgtatagaattctactgtgtgaatataccacactacgccttttacagttgatggccatgaaggcagttttagttctgggatattacaatcaatgctgttctgaacattccagtacatatttttgggtgaacatagataggtatttgtgttaggtgtctatctgacagtggagtttctggatacgcagtgtttcactttggtagattccacgagctaaaggggttatatcaatttacatatcagtgtatgagaaat

SEQ ID NO: 340659 - DNA, 635 bp, Homo sapiens
ttactgcagtaaagcaaattaacatatccacaatgtcacatagttctcctcttttggtttttgtggcaggagcaactaaaatcgaatttagcatgaatcccaaatgtagcataattttattacctgtagtcctcatgttgttcattagatgtctatacttgctcatcctacacgtctattactttgtaacctcagacctacatctccccatttcctccccacccaccttctgctcctgttctctatctctgtatatttgatgggtttttttttaagattccacatataagtgagatcatgtaacatttttctttctgcatatggcttacttcacttagccatgttcttcaggctcgcccatgttctggcaaatggcaagatctcattctttttaagggctgggtaatattccattaaatatgtatacgtgtgtgtgtgcgtgtgtttgtatgtatgtatgtatgtcgcagtgtcagttttttccccatctgtctgttgacagacacttaggttatttccatcttggctgttatgaataacactgcaatcracttgggaatgtggatatctttacaaggtagtgacttcatttcctttgggtatatgcccataaaagggattgcaggatcctatgg

SEQ ID NO: 340660 - DNA, 620 bp, Homo sapiens
ataacactgcaatcaacttgggaatgtggatatctttacaaggtagtgacttcatttcctttgggtatatgcccataaaagggattgcaggatcctatggtagtactacttgtaatttctttcaaaaccgtcatactactttctacaatggctgtaccaatctacctccccaccaacaatgttaagtgttcccttctctccataccctcaacagcatttgttatcttttgactttttgataatagccatcttaagtggtgtgaggtggtatcccacagtgtttttgatttgcttttctctgatgattaatgatcttgagtgccttttcttctaactgttggacatttttgtcttctttggagaaatgtctatttagytcttttgctcattttaaaatttctacaattgagttacatgagttctttataaattttggatattaaccccttgtcagatatacatggtttgcaaatatgttttcctaatccataggctgccatttcatttcattgtttcctttgctgtgcagaagctcttagtttgagttctcttgattccatttattttcatgtttgttcatttgctgagtatctactatctgcaggccacctcactgtgtc

SEQ ID NO: 340661 - DNA, 503 bp, Homo sapiens
taggacaatgattaggataaaaaaatgacaattgccgcagggaacatacaacatggatcattttatcagtttgagggaagtttgggcagcccaaattatggggtcagttttggatatattgagttggaagtatttgagtgacatcctggtgaagctgtccagcagggagaaaatatgagacttgtatttaggaggatttagggctccatattttgatctaatgaaaatacaacatgcctttactaggctgagatatataaaatgcgatagtattgaattttcatgtcccaaattacactggctccagccctactgactcactgcccaaccacaactccactttgtcttattctttgttccccagaaagtaaagcctgaggcaaaascttgtgaggacttctttgttagggaccacaaccccaggtaacagaagtgagactatgggggagtgaggctggaaaggtgaggagaccccacgagggtgcgctactgagcttgccacc

SEQ ID NO: 340662 - DNA, 610 bp, Homo sapiens
ttgccaaccttctactttccctcctcctgcctcattatctgggcccagtcattatactacattttctgtgtgtttggatagaaaagccagctcttcaaaccataacattggcagcaattttcttcctacagtttgtaaaaattaaatcacaaatcaaaagaatatgagccaaacatgccgcagccatttggagttacataaaagggaagccatcaacacctccctatcttggctgatgaatgtatctgatatttcagacttatttcttggttctttcatgaccacaagaccaaaactaatcagtccaattagacaaacttccagattatagctctgaagtcaactcaacaagtaacatatccaacaatataatttgccaagtgtaatttgcaggatgcaggggtggggtggggtcagggggaggcggttcctgatttatcacagcagctaaagccatattccagtctgaatacaaaatagacaaagaawgagaaagttagattaggggcactgaaactactgatcatcatgtttttccgatattaaaaaaaaaaaaaagaaaaggaaaagaaaagctgaggttaagaacaccatccagtaaaagccctca

SEQ ID NO: 340663 - DNA, 595 bp, Homo sapiens
aatttatataagatttcatttcttccttgcaagtaggctgttttctagtattgatgttgaattagatttttagggtagtgttttaaaactaggaaaaagactttttaatacttaaacattcagaaactagtgtcatcaatgtcattgtgcccaccactcacaatgaataaatgttaacattttataatattcccttcatttatatttgtaaaactgaaatattactgatccagctggagcctctttgtacctggtcctattttcctccttctccagagacaactgtgctcatgattttggtatgtatctgacttctagtatgtgcttccatactttgactacacaggtatttatccctaaacaagtgttgctattgtatgtttttaaacttacttaaatggcactgtaatgtatacatcagtctgtaactttgatttttcatttagtattatgattttgagatttatctttacacacagatctaattgttcatttcatctagttcactcattctaggagacaaagacacatgtasagtatttctttaagtaaacattctcctatggatggcccaattaaaatgtacagtattcta

SEQ ID NO: 340664 - DNA, 597 bp, Homo sapiens
ttcccttcctacaaaacataccactgataatttcactaatattgtactgtactcctggccattttagaatcagaatcagaaaataatttctgaagaaaaaatttaattaactcaatttccttattcaacaaatagggaaattaagtgttagagatattcaattatctggctaaagtcaactaaccacacaaataataatagatataggactgcaggctgtcttctgattcctcatcagtattcttttgcttcattaagctttctttagcataagtyaccaaaaaatgcttagcttgagttagtgattttagcttcttcttccagttttttgtctacctaatccaaagcatataccctggtacaagcaggctgtattaataatttgcacatactttgccttggcttgtaatgaaaaaactatgacaaacattatcatccatacatttttgatccataagctggagctgccctgaatgacctttaggctgagatgggggtcattgttacctcagcaaaagtcagggacaaatttcatgtaatctttctaagggaataatattctctgtaggtaagcttcctgcagaacacatgtctgag

SEQ ID NO: 340665 - DNA, 651 bp, Homo sapiens
atatatgctttaggatggctaaaatgtaaaaggctttctataccaagtagtggtaagaatgtgaaggaactaaaatttccatgcactgctagtttcaatgtaaaatagtacaaaaactttggaaaaccattatttaaaatgttaaatttaawgaaaaatttctgaaatgataaatatacactgaccatataatccaggcattctactcctagatatttacctcctctcctcccaaaatgagaatgtatatccacacagacttgcacacagatgtttacagtagctttattaaaatgtccagaagtcaaaatgtccatccagaagtgaatatataaacaatcatggtacattgatacaatgcatcagtactaaataatacaaaggaatgaactattggtacacaacaaaacggatgaatctcaaaataatttcactgagttaaagaagccaaacagaaaggaggacatactgtatgattccatttatataaaattcaagaaaatgcaaaccgatccacagtgacagaaagcagaataacggtattctggagattgtagagtgagaagggattaaaaagggggcaccaggaaaaatttggaaggagatagatatattcatcatcgtgattgtggtgataatttaatgggttat

SEQ ID NO: 340666 - DNA, 528 bp, Homo sapiens
attccttctggaggctttagagcagaatccatttccttaaccttcccagttcctagaggcctcctgccttccttggcctgtggtccctttctcaaatcactctgacctctgcttccatcatcatgtctccttcggtcattctgaccttccttcctccattttctaagactccttgtaattatgttggacctactgaacaggccggggtactattctcatctcatgatgcttaacctaaccatatctgcaaagtatcttttgccacttaaggtaacacattcaccagttgtagagattaggaggtagacacccctggggagccattattcttcttagcatactgcatatactattctggaataaaaaggatgtgaatttaaaccctgaatcattatttgttctataggactttaagcagattgctgaaatagtaacctctttccaaagctataaattggtgatcttagttatatctgcctcatagagtygttgtgagagtcaaataggccacaaagctagttgaataat

SEQ ID NO: 340667 - DNA, 549 bp, Homo sapiens
gatttgctttcactgcaatgagctatctgataacatgtttgcagaggtggaaaagtagagtgctctaccaatgaagaatacctataatcatgaaaaaaattaaagttctggmacataacaaaaagccaaattagtttatgcttgcttgataaataaccttcttgacattcagcactgaattctcaaaaataaaagaaagggctaagtttaggttgagtgttgagcattctactaaatgatgttggccaaacaaaaacactatgttaaatatttattatattaaatttttaagttaccaggtcaaaaatatcaccttacacatcttctggacataatacaaagttgtttattttattttactttttaagttaaattttcatttgttgcaaggtaatagaacatttctcaaactacacagggtaaataactagttttattctaaatttccaacctatcatggattaataattctatgaaatataacaaaaatgaattgttagaaaagtgaaagaaaaaacagacatataaaatataagctcacttttagta

SEQ ID NO: 340668 - DNA, 549 bp, Homo sapiens
gatttgctttcactgcaatgagctatctgataacatgtttgcagaggtggaaaagtagagtgctctaccaatgaagaatacctataatcatgaaaaaaattaaagttctggaacataacaaaaagccaaattagtttatgcttgcttgataaataaccttcttgacattcagcactgaattctcaaaaataaaagaaagggctaagtttaggttgagtgttgagcattctactaaatgatgttggccaaacaaaaacactatgttaaatatttattatattaaatttttaakttaccaggtcaaaaatatcaccttacacatcttctggacataatacaaagttgtttattttattttactttttaagttaaattttcatttgttgcaaggtaatagaacatttctcaaactacacagggtaaataactagttttattctaaatttccaacctatcatggattaataattctatgaaatataacaaaaatgaattgttagaaaagtgaaagaaaaaacagacatataaaatataagctcacttttagta

SEQ ID NO: 340669 - DNA, 438 bp, Homo sapiens
attttaatttttattttaggtttgggagtacatgtgaaggttttttacataggtaatcacatgtcatgaggattggttgtgacggacttcttcacraaaaactggacaattgacttgaattaaacttttataaatgagaatattcaaatgaccaataaacatatgaaaaaagcttattttcattcgtcattaggtaaacacaaattaaaactacaatgagatgccataacatatgcaccagaatgggtaacaaaaaactaacaatactaggtgttgataaagatatgaaagaagaaaaacgctcatatactgcttgaagtataaattggtacaaccactttggaagacccattgttaatatttaacctagaaaatgcaccaatttatgagactctcattacaatcctaggtatatactctacaaaatatgtgcttagg

SEQ ID NO: 340670 - DNA, 566 bp, Homo sapiens
aatactaggtgttgataaagatatgaaagaagaaaaacgctcatatactgcttgaagtataaattggtacaaccactttggaagacccattgttaatatttaacctagaaaatgcaccaatttatgagactctcattamaatcctaggtatatactctacaaaatatgtgcttaggtaatataatcaagacacacacacacacacacacacacacacacacacacactcttcaaattctagtggagatctgtttttatcttgtgctaagtgctgagccctgaatgtcaaaagtcttcctctcagtattcctgctccatcctcaactttcagcactctttgcaagcctgcacctcagagggatttttctccccatgctttgtcccattcctcaacagttgacttcttgtcactcagggccagccaggttcatagcgggaggtgaggaggtaggttcagtgctcctagcccatcttcagtggtagacacatcctgcttgagaccctacctgagtgggggaatggagggctttcaagttgttcctgttcctcctcactatagtagccaa

SEQ ID NO: 340671 - DNA, 562 bp, Homo sapiens
gctactgctgccagatgcacatagttgtcctgcaaggctgaagttgtctgggcttaacacatgcccagaaacaagcattccagtggttccaggaggggtcagcatgggctgtgsacatggcaggtaggcttcacatgaacttggggatgccctgggccttgggcagctatgtggtggaaaacctgttcctgaaggcaacacttggcttatcccatgtagcaaacttccaggggaacaactggccctctgtttctggaactttaaaagtggtcagtgaccctggtggacaatgttcccaaaatcccacctcggggtagggatgtggtcagacagctggttctgaaccagcaatgaggggtgggcaagtaggactccagccactccatcaccatgacggcctgggtgtgtttgtgtggcctcattctcttgatgaggtgggcatgggatatctgccagggactagtgggcaggaatcgagcccagtgtatactcacatgcactgaaccctatgtagaaggggattaggtcctgggggccatagatggcagttgctgggctggtg

SEQ ID NO: 340672 - DNA, 548 bp, Homo sapiens
gctcattgtggtagttctatttttagtttttgagaaatctccatactgttttccataaggrctgtaataatttacattcccatcaacaatgtgtaagagttcccttttctctgtatccttgccatcatgtgttttttgtttgtctttttgatagcagtcatgccaactggggtaagataatatctcattgtagttttgattttcatttccctgattagagatgatgtgcgtttttttcatacagcattttttcatatacacattggccatttgtattcttttgaaaaatgtctattcatgtcctttgctcactttttaatgagactgtttattgctgttgggttttttgctgttgagttgtttgatttccttgtatattctggatatccttgtatattctgacattcttgtcagataagtagttcacaaatattttctcccatttaacaggttgtctctccattctattggttgtttcttttctgtccagaagctttttaacttaaaatagtcccatttatctatttttgtttttgttgcttgtgctt

SEQ ID NO: 340673 - DNA, 548 bp, Homo sapiens
gctcattgtggtagttctatttttagtttttgagaaatctccatactgttttccataaggactgtaataatttacattcccatcaacaatgtgtaagagttcccttttctctgtatccttgccatcatgtgttttttgtttgtctttttgatagcagtcatgccaactggggtaagataatatctcattgtagttttgattttcatttccctgattagwgatgatgtgcgtttttttcatacagcattttttcatatacacattggccatttgtattcttttgaaaaatgtctattcatgtcctttgctcactttttaatgagactgtttattgctgttgggttttttgctgttgagttgtttgatttccttgtatattctggatatccttgtatattctgacattcttgtcagataagtagttcacaaatattttctcccatttaacaggttgtctctccattctattggttgtttcttttctgtccagaagctttttaacttaaaatagtcccatttatctatttttgtttttgttgcttgtgctt

SEQ ID NO: 340674 - DNA, 597 bp, Homo sapiens
cagccttctgtttttcctactaaatcataagcgtgaacatcttagtgggtggcattatacatcctttatgtttgtagtcccccaaatggctttcacacagtargcacttaaatttgtggacttttataggctgtgtagacatcatcaaattcctgtattctgggattaggtgttgggggcaggagatgtggtaaataatttgaagaatgccgaagataaattatgtgttggaattttgtcttgagcatggttggccatgttttgtagaaaaactttctctcaggtaacctcagtcaggttgcctttggcaggcatatatcagattgagtcgggatttaaggttgcaaacctcagagttctcaattgagctctttttctgggttaaaaataattcagtatttctgaacttaagaaagtttcttaaatcaagctgactgcctttccagtctgtctctgcctgtttcctcaatgataagaggaggtagtggtgaatgagggctgggacgggaatatttacattactggaataaaatcatgtcaggattctactctgatgtgatgcttagctttgctttaaccatcatctcccattttatt

SEQ ID NO: 340675 - DNA, 597 bp, Homo sapiens
cagccttctgtttttcctactaaatcataagcgtgaacatcttagtgggtggcattatacatcctttatgtttgtagtcccccaaatggctttcacacagtaggcacttaaatttgtggacttttataggctgtgtagacatcatcaaattcctgtattctgggattargtgttgggggcaggagatgtggtaaataatttgaagaatgccgaagataaattatgtgttggaattttgtcttgagcatggttggccatgttttgtagaaaaactttctctcaggtaacctcagtcaggttgcctttggcaggcatatatcagattgagtcgggatttaaggttgcaaacctcagagttctcaattgagctctttttctgggttaaaaataattcagtatttctgaacttaagaaagtttcttaaatcaagctgactgcctttccagtctgtctctgcctgtttcctcaatgataagaggaggtagtggtgaatgagggctgggacgggaatatttacattactggaataaaatcatgtcaggattctactctgatgtgatgcttagctttgctttaaccatcatctcccattttatt

SEQ ID NO: 340676 - DNA, 597 bp, Homo sapiens
cagccttctgtttttcctactaaatcataagcgtgaacatcttagtgggtggcattatacatcctttatgtttgtagtcccccaaatggctttcacacagtaggcacttaaatttgtggacttttataggctgtgtagacatcatcaaattcctgtattctgggattaggtgttgggggcaggagatgtggtaaataatttgaagaatgccgaagataaattatgtgttggaattttgtcttgagcatggttggccatgttttgtaraaaaactttctctcaggtaacctcagtcaggttgcctttggcaggcatatatcagattgagtcgggatttaaggttgcaaacctcagagttctcaattgagctctttttctgggttaaaaataattcagtatttctgaacttaagaaagtttcttaaatcaagctgactgcctttccagtctgtctctgcctgtttcctcaatgataagaggaggtagtggtgaatgagggctgggacgggaatatttacattactggaataaaatcatgtcaggattctactctgatgtgatgcttagctttgctttaaccatcatctcccattttatt

SEQ ID NO: 340677 - DNA, 597 bp, Homo sapiens
cagccttctgtttttcctactaaatcataagcgtgaacatcttagtgggtggcattatacatcctttatgtttgtagtcccccaaatggctttcacacagtaggcacttaaatttgtggacttttataggctgtgtagacatcatcaaattcctgtattctgggattaggtgttgggggcaggagatgtggtaaataatttgaagaatgccgaagataaattatgtgttggaattttgtcttgagcatggttggccatgttttgtagaaaaactttctctcargtaacctcagtcaggttgcctttggcaggcatatatcagattgagtcgggatttaaggttgcaaacctcagagttctcaattgagctctttttctgggttaaaaataattcagtatttctgaacttaagaaagtttcttaaatcaagctgactgcctttccagtctgtctctgcctgtttcctcaatgataagaggaggtagtggtgaatgagggctgggacgggaatatttacattactggaataaaatcatgtcaggattctactctgatgtgatgcttagctttgctttaaccatcatctcccattttatt

SEQ ID NO: 340678 - DNA, 525 bp, Homo sapiens
gaggtacttctgcaagacccaaagatccaggggagttagagtcaatgtactcaggacatttaaccagatatacttgtcccatgtttcaagatctcaggctttctctaggaggtagataaactttgcataacagacttgatttagtgagcatttaaacatctcagaagctccagagttcattgttaatgaggccttgagcctgcagctcaactatatattattctactgttggaaatattgacctcattataagccaccacagggactttatggctttcataattagccataaactgtttgmtaaaagccctcagaatcccattatccttatgcagggtgtgaacataatttagcagtaaccagtcaactccattatttttgtatgcattgattgttacattcccggagcccttcatttttcaagtagatgcatcattacccttgccacagaattcccatacactgggatattttcccaggttgtcattggttgtgatagttttagcaattgagccatcactttgc

SEQ ID NO: 340679 - DNA, 573 bp, Homo sapiens
atgctagccagagcaatctgacaagagaaataaaatcatccaaataagaaaacaagtcacgctatctctcttcactaatgatatgattctatacctacaaaaccctcaacaatctactaaaaggctcctagaactgacaaatgacttcagtaaakgttcaggatataaaatcaatgtacaaaaatcagaagcatttcttttttcttaatattgttttgacagaatctcactctctttaccaggctggaaggctattctgtgaccttggctcactacagcctcaacttcctgggttcaagcaaacctcccaccttagccttgcaaatagctaggacctcaggtacatgtcaccttgcctggctcatttttgatttttttttttggtagagttagggtctcactttattgtgcagggttgtctgcaactcctgggctcaagtgatccttctgcttcagcctcccaaagtgctaggattacagttgtgagccaccacactgggccttcagtaacatttctatacttcaataatgttcatgcagagtcaaattaagaaggctattccattttcaata

SEQ ID NO: 340680 - DNA, 553 bp, Homo sapiens
ctatacatgctgcacacatcgctttacataaaatggaaagtttcaaggaaatatagggttttagratggctagggatctttattaataatctacttgacttcattttataaaagaagctgatttttaaaaaatgaataatttacctaaaattacataaaaaattagtgtcagacccaagtgtaggaattagaacatcagcccaagagtaataaaataacttcacagccttataggttaaaataatctacaatatatactgaattgaatgtttcactagtcccaataactttacatttacattccactattctctgtttccatacaccaatttgaaatacaagtttcatcttttaaaaaaatgttcgtcttacagactaattacatcaaaatctgctgggggatcattgtgaaaaactagattctagagagccatctcaaatcactgaatactgatcttcatatttggaaacgattgatgtaaaacatattacctaagaatgctaagaagctccatgggcccagtagagttcttcatagagtacttcactcatt

SEQ ID NO: 340681 - DNA, 559 bp, Homo sapiens
ccttgggggaaaaaattattactaagtcctcaaaagcaattgcaacaaaaacaaaaattgacaaatggggtaattaaagagcttctgcacagcaaaggaaactatcaacagagtaaacagacaacctacagaatgggaaaaaatagtcacaaatcacgcatccaacaaagatctaacatccagaacatataaggaacttaattcaacaagcaaaaaacaaatacctccattaaaaatgggcaaagggcatgaaagtacactctaaaaagcagaaatacaagcagccaacaaacatatgaaaaaatacccttctacatcactaatcatcagagagatgcaagtagaaaccacaatgagayactatctcacataggtcagaatgtatctgattaaaaagtcaaacacaacatatctggtgaggatgtggagaaaagagagcacttacacattgttggtgggagtgttaactagtttagccactgtgaaaagcagttgggagatttctcaagaaacttaaaatataactatcatttgatgcagcaatcccattactgggtac

SEQ ID NO: 340682 - DNA, 553 bp, Homo sapiens
ctatacatgctgcacacatcgctttacataaaatggaaagtttcaaggaaatatagggttttaggatggctagggatctttattaataatctacttgacttcattttataaaagaagctgatttttaaaaaatgaataatttacctaaaattacataaaaaattagtgtcagacccaagtgtaggaattagaacatcagmccaagagtaataaaataacttcacagccttataggttaaaataatctacaatatatactgaattgaatgtttcactagtcccaataactttacatttacattccactattctctgtttccatacaccaatttgaaatacaagtttcatcttttaaaaaaatgttcgtcttacagactaattacatcaaaatctgctgggggatcattgtgaaaaactagattctagagagccatctcaaatcactgaatactgatcttcatatttggaaacgattgatgtaaaacatattacctaagaatgctaagaagctccatgggcccagtagagttcttcatagagtacttcactcatt

SEQ ID NO: 340683 - DNA, 585 bp, Homo sapiens
gggatctttattaataatctacttgacttcattttataaaagaagctgatttttaaaaaatgaataatttacctaaaattacataaaaaattagtgtcagacccaagtgtaggaattagaacatcagcccaagagtaataaaataacttcacagccttataggttaaaataatctacaatatatactgaattgaatgtttcactagtcccaataactttacatttacattccactattctctgtttccatacaccaatttgaaatacaagtttcatcttttaaaaaaatgttcgtcttacagactaattacatcaaaatctgctgggggatcattgtgaaaaactagattctagagagccatctcaaatcactgaatactratcttcatatttggaaacgattgatgtaaaacatattacctaagaatgctaagaagctccatgggcccagtagagttcttcatagagtacttcactcatttgttagtgagttacttttactatctgcaaatcgatgaagctgttgtcacttttctactcttagattacagcatctttgataatcttgaaatgctttccaaagct

SEQ ID NO: 340684 - DNA, 392 bp, Homo sapiens
aaattcacactggagattatttgtatggaaacctgtggagacactgcagaaagcatttcaggcagaataatgtgatgcaaaccatatggctgagaagcaggtggtgacagtggccaacacttatgmagtgctatgtgacaggcaccagtctaaatattgaacatgaatttatttaagcctcatagagatgccctaaggcaaatgctattatgatccccatttttactgacaaggaaaataagtcatagggaattgaaatagtttacaaacaggaaatgcggctccagaacatgccctcttaaccagggcgctatactgattcctgctaaacttgcatcatctgatggcctgtgcatccaaagaactgaggttatttttaggaagaaagtaag

SEQ ID NO: 340685 - DNA, 392 bp, Homo sapiens
aaattcacactggagattatttgtatggaaacctgtggagacactgcagaaagcatttcaggcagaataatgtgatgcaaaccatatggctgagaagcaggtggtgacagtggccaacacttatgcagtgctatgtgacaggcaccagtctaaatattgaacatgaatttatttaagcctcatagagatgccctaaggcaaatgctattatgatccccatttttactgacaaggaaaataagwcatagggaattgaaatagtttacaaacaggaaatgcggctccagaacatgccctcttaaccagggcgctatactgattcctgctaaacttgcatcatctgatggcctgtgcatccaaagaactgaggttatttttaggaagaaagtaag

SEQ ID NO: 340686 - DNA, 392 bp, Homo sapiens
aaattcacactggagattatttgtatggaaacctgtggagacactgcagaaagcatttcaggcagaataatgtgatgcaaaccatatggctgagaagcaggtggtgacagtggccaacacttatgcagtgctatgtgacaggcaccagtctaaatattgaacatgaatttatttaagcctcatagagatgccctaaggcaaatgctattatgatccccatttttactgacaaggaaaataagtcatagggaattgaaayagtttacaaacaggaaatgcggctccagaacatgccctcttaaccagggcgctatactgattcctgctaaacttgcatcatctgatggcctgtgcatccaaagaactgaggttatttttaggaagaaagtaag

SEQ ID NO: 340687 - DNA, 392 bp, Homo sapiens
aaattcacactggagattatttgtatggaaacctgtggagacactgcagaaagcatttcaggcagaataatgtgatgcaaaccatatggctgagaagcaggtggtgacagtggccaacacttatgcagtgctatgtgacaggcaccagtctaaatattgaacatgaatttatttaagcctcatagagatgccctaaggcaaatgctattatgatccccatttttactgacaaggaaaataagtcatagggaattgaaatagtttacaaacaggaaatgyggctccagaacatgccctcttaaccagggcgctatactgattcctgctaaacttgcatcatctgatggcctgtgcatccaaagaactgaggttatttttaggaagaaagtaag

SEQ ID NO: 340688 - DNA, 610 bp, Homo sapiens
acttcactcatttgttagtgagttacttttactatctgcaaatcgatgaagctgttgtcacttttctactcttagattacagcatctttgataatcttgaaatgctttccaaagctctgctcctaaatcaagacctagtaaaatagctacctctggggttttaatgaaatagactacattttattagacctatcatttaaaactagatcagcattgatttcaacttatattttccattcagaattccaactgccattttccatagatgtttgtgaaaaagagtcattaggatgagcaatcccattataattgcacatcaactatttatttgtgctacttgaattatgataaataagttayggcagaaaaatgggcaatttctgttggggttctaaggataggttgttttagcaagaaatacatcttttttggtttataagccattaagattttgactttatttctctggtataacctagctgactttgatcaattaagacattcctaatttgatgaactcagacaacatagcatatacttaactgtttgaaacagccatatctgaacagtgaatttccccaaaggctgtaactgtaataactttgaagta

SEQ ID NO: 340689 - DNA, 583 bp, Homo sapiens
tgtttccattaatcaggccattagaaaagcaccctgccattctctgatagctgtgctatagagtaggttgcttgataaagaatgaaagcaaagtgattctatttgttatgtaatgtgagtgacatggaaggtaaatttttttaaatagtcatggattttagctttctgaaaggaatgcaatttggaagtttctccaaatctccaaatggttttgagttacatataatgcaacctgacacctagcttgatatttgaattctgtgtagctagaaagttgatagactatggatcttttctgttttataatgtttggtattatactggacctttccttgtgttaattttttctctttattaacatatgaaaaattctgtgaactattgatcatccaatgagattttctcagtctcaaaagacaaataatgcaatttggaaaactgyaaatttgtttgcatgtaatctgaatctctaggtatactctaatttttttttcagtaaattctgagttaaatgtgtatcattacaatgccagaggattaacttaatttttctatcttccaaatccagttttcctccatcagg

SEQ ID NO: 340690 - DNA, 583 bp, Homo sapiens
tgtttccattaatcaggccattagaaaagcaccctgccattctctgatagctgtgctatagagtaggttgcttgataaagaatgaaagcaaagtgattctatttgttatgtaatgtgagtgacatggaaggtaaatttttttaaatagtcatggattttagctttctgaaaggaatgcaatttggaagtttctccaaatctccaaatggttttgagttacatataatgcaacctgacacctagcttgatatttgaattctgtgtagctagaaagttgatagactatggatcttttctgttttataatgtttggtattatactggacctttccttgtgttaattttttctctttattaacatatgaaaaattctgtgaactattgatcatccaatgagattttctcagtctcaaaagacaaataatgcaatttggaaaactgtaaatttgtttgcatgtaatctgaatctctaggtatactctaatttttttttcagtaaattctgagttaaatgtktatcattacaatgccagaggattaacttaatttttctatcttccaaatccagttttcctccatcagg

SEQ ID NO: 340691 - DNA, 610 bp, Homo sapiens
acttcactcatttgttagtgagttacttttactatctgcaaatcgatgaagctgttgtcacttttctactcttagattacagcatctttgataatcttgaaatgctttccaaagctctgctcctaaatcaagacctagtaaaatagctacctctggggttttaatgaaatagactacattttattagacctatcatttaaaactagatcagcattgatttcaacttatattttccattcagaattccaactgccattttccatagatgtttgtgaaaaagagtcattaggatgagcaatcccattataattgcacatcaactatttatttgtgctacttgaattatgataaataagttacggcagaaaaatgggcaatttctgttggggttctaaggataggttgttttagcaagaaatacatcttttttggtttataagccattaagattttgactttrtttctctggtataacctagctgactttgatcaattaagacattcctaatttgatgaactcagacaacatagcatatacttaactgtttgaaacagccatatctgaacagtgaatttccccaaaggctgtaactgtaataactttgaagta

SEQ ID NO: 340692 - DNA, 556 bp, Homo sapiens
gcttccagtgttcatttatgttatctaccttgccaattaaaaatagagaaatcttatacataatgaaatagttcttgtgattctcaaaagcatgacttaatttgcactgatttactcatatatgatttggtatagcggtttattatccttactaagcaattctatagaattttacattcaaaatcagtatcttgtttttgctcttatagarcacaacataaagtgaatatcaacaaattgataattacaaaccaaatagcaataatcattatagtttaaacaactatttacaactagtacaatatttatacaaatattgtattatataaataaataaaacaacaactatttatttagctcgtaattctgttggtcagcaatttggactgggctgaactgtgtgattttctgctggtctcagttacacctacaagttcagctaaaccattttgcatgtcaaaacaaaagagtgtgaccacctatcaactggggttgttgggaagcctggactatatgtgtccaccttgctagtctggaaatgttaacatggtggcct

SEQ ID NO: 340693 - DNA, 566 bp, Homo sapiens
ccttatcaggggtcggaagaggatcaagaaagggcgaaccacaatatacaagtagttttcaagttgctgcttgttttatgtttgccactgtttygctggacaaagtaaatcacatagccaagtccagtcaccatggaagggtaccaccaaagggcttggatgaagagggaagaatttgtagctgctttttaagtcagccacagatggactttggggaaactgactcatggattcctactttgctgtctttttaaaactattcatttattgtaattagaattgacattagacagcagttggtagcttagacagcaggcatttctgctctcttatgctgccacattgtgagaactggacatttagctcaccttcctgatgttatatactttataatatgtgaatttactcattctcaacttttccttattagttcgtgtactatttttttggttcatcagttgagaactctgatacttttaggcattggcctcagatgtgctgtgtatcattaaattatgtgattcaaagtcctgcaagaataaaagaataatctcagccataagtct

SEQ ID NO: 340694 - DNA, 547 bp, Homo sapiens
atagtctaatgggagtggaggcaggaagtatcaggccctaccacttttggctatgctgggctctgatgatgtctcccttggaagcacagtgcatttccttcggcagtggccraccttcttacagaaggcacattgatttatatccaaggcacagtggcccagaggcacagactgggactttcaccttctcacttcctctgtgagggccaggggttaagaggctgcctctgaagtggtggagagcacaaggctgcagctagaagctgggactcttgtgagatttgctttattttatgtcttctctgtcctattcctgtgatggaaaactgcaaaagccaagtctaaaagctgatccatgggagtctggaagcctaaggctgcttttggcggcctactgcagatatcagaagcagactgggctataaaataaactcctagcaatgtcgcaatgcccatcccttcttggagtcaggggcagtgttagtgtatttcctcaaaatctaaattatccacccttgtaataaggctaggatttcatcttttccct

SEQ ID NO: 340695 - DNA, 547 bp, Homo sapiens
atagtctaatgggagtggaggcaggaagtatcaggccctaccacttttggctatgctgggctctgatgatgtctcccttggaagcacagtgcatttccttcggcagtggccgaccttcttacagaaggcacattgatttatatccaaggcacagtggcccagaggcacagactgggactttcaccttctcacttcctctgtgagggccaggggttaagaggctgcctctgaagtggtggagagcacaaggctgcagctagaagctgggactcttgtgagatttgctttattttatgtcttctctgtcctattcctgtgatggaaaactgcaaaagccaagtctaaaagctgatccatgggagtctggaagcctaaggctgcttttggcggcctactgcagatatcagaagcagactkggctataaaataaactcctagcaatgtcgcaatgcccatcccttcttggagtcaggggcagtgttagtgtatttcctcaaaatctaaattatccacccttgtaataaggctaggatttcatcttttccct

SEQ ID NO: 340696 - DNA, 639 bp, Homo sapiens
agcaatcagctaaaagtcagaggatcgttgaggaaagtaaaagctaaactgtttggagcctctttcctggggcagcgtataggctactacaaaacagaggcggtgagcagaaaggtgacaagatgcagagcactcagatgaaggacagagagtgtaaggtggacggtccaaaaacagaaagtggcaaccatcttgtttagccaaatccattcttctcaatataccccaggtcctctaaccttgtgagcttggcttctaatctgagtatgactcccccaggtctctaactttttgggctaagtctctccccctaacattataccctagggcctctcacttaagtagtagtggataatcattcttgcccaccagaatggcttcacgactctaaaagatggcccatttgccagctgattgattctgtatggcttgttttcattggagtgggggtcttgtctttgtgtcccttcatggtgttgctgaaagatgttgctggaaaagagggtcctgatactgaccacamagtaggattcttagatcttgtgcaggaaaaaatttgagatgagtcagagagcacagtgaaagaagcaagtttattagaattgactccattacagacttggacatactcagaaaaca

SEQ ID NO: 340697 - DNA, 575 bp, Homo sapiens
taagtaattctaactgatttcctgctgttgagcagggagctgagcaaatacaacagatcatgggcctaaagtaggagaagactgaggacaaactctggaacacatgtgattaaattaagtataattgaaaccaaatcaaatttaataaggctgtaccttttagtttcaagatgtttccatcattttgaaatgtgatgttattcagtgraaaagaaaaatagtgtttatctccagagtaaagaacagggttccctgcggggattgattgtctgagagatatggctcaggattaaaaattcttcttttttctactcataaactaaaaattaatttctaagcccgtgttgactaaatgcacctctctcacattccaaagttaacctgaaaagatagttcaagccacgggtcacacatgcctcattatactctcctccctgtggttttaattttaatttttaatttatttttgtgggtacatagttggtgtatatatttacaggggtacatgacatactttgatacaggcatacaatgagtaatacataataaaaaacttcccctcaagcatttataga

SEQ ID NO: 340698 - DNA, 575 bp, Homo sapiens
taagtaattctaactgatttcctgctgttgagcagggagctgagcaaatacaacagatcatgggcctaaagtaggagaagactgaggacaaactctggaacacatgtgattaaattaagtataattgaaaccaaatcaaatttaataaggctgtaccttttagtttcaagatgtttccatcattttgaaatgtgatgttattcagtgaaaaagaaaaatagtgtttatctccagagtaaagaacagggttccctgcggggattgattgtctgagagmtatggctcaggattaaaaattcttcttttttctactcataaactaaaaattaatttctaagcccgtgttgactaaatgcacctctctcacattccaaagttaacctgaaaagatagttcaagccacgggtcacacatgcctcattatactctcctccctgtggttttaattttaatttttaatttatttttgtgggtacatagttggtgtatatatttacaggggtacatgacatactttgatacaggcatacaatgagtaatacataataaaaaacttcccctcaagcatttataga

SEQ ID NO: 340699 - DNA, 575 bp, Homo sapiens
taagtaattctaactgatttcctgctgttgagcagggagctgagcaaatacaacagatcatgggcctaaagtaggagaagactgaggacaaactctggaacacatgtgattaaattaagtataattgaaaccaaatcaaatttaataaggctgtaccttttagtttcaagatgtttccatcattttgaaatgtgatgttattcagtgaaaaagaaaaatagtgtttatctccagagtaaagaacagggttccctgcggggattgattgtctgagagatatggctcaggattaaaaattcttcttttttctactcataaactaaaaattaatttctaagcccstgttgactaaatgcacctctctcacattccaaagttaacctgaaaagatagttcaagccacgggtcacacatgcctcattatactctcctccctgtggttttaattttaatttttaatttatttttgtgggtacatagttggtgtatatatttacaggggtacatgacatactttgatacaggcatacaatgagtaatacataataaaaaacttcccctcaagcatttataga

SEQ ID NO: 340700 - DNA, 618 bp, Homo sapiens
aaacctacaacccattggcatttctgagagagaagaagagagaatatgcagcttggaaaatatatttgtggatatagtccacaaaaattcccctaatctcactagagaggttgatatgcaaatctaagaaatgcagagaacccagtctagatattatacaaggcacatagtcaacagattaaccaaggtcaatgcaaaagaaaacaatcttaaatgcagctagaaagatgggtcaagttatctagaaagggaataccctcaggttagtagcagacctctcagccagaagagactgggagccyacttttagtgacctaaaagaaaagaaattccaaccaagaatttcatatgctgcctcactaagctttatacataaaggagaaataaaatctttctcagacaagcaaatgctgaaggaatacattacaactagatcagccttatgggaggttcctaagagaacgctaagcatgggatcaaaagagtgacacctgctaccacaaaaacacacaagcacatagcccacagttatgctaaatcaactacacaatcaagtcgacctaacaactagcaaacaacatgatgacaggattaaaatcacagatataattatcaacc

SEQ ID NO: 340701 - DNA, 653 bp, Homo sapiens
ttggggtgtctcccaggttctgcaggaacagtccgcttccttcagagggtctgtgggtcctcttgggattcctgcagtcatttgttcttgcagtcattcyggagctaaaattccacgataagagcctccgcatgctgctacatctgtctgagtcagagctgcaatctagtcctgcctcctgtctgccatgatgaactttggtcaagcagctgtttccttcaggttttgacacaaatatttccttctaagagataccttcacctatttctcagggtccccctcttgacttatctctattatatcacccttttaacattttcttcatagcatttactagtatctgaaattacagtcaggtgccacataatgatgtcggggtcatcaatgggcttcatgtatgacagtggtcccctaagattataatacagtatttttactgtacattttctatgtttaaatacataaatacttaccattgtgttacagttgcctacaatatttggtacagtaacatgctgtaaaggtttatagcctaggagccataggctataccatatagcatagctgtgtagtaggatacaccctctaggtttgtgtaagtacactatgatgttcacaaacagatgaaatcacctaacaatgtatttctcaaa

SEQ ID NO: 340702 - DNA, 583 bp, Homo sapiens
tggcagtaaataattcccaatcttctgcctaattactttcagaaaagaattgagtgacttctcttccccaagctcatagtgttaccttacatttcaaggaacatctgcttcaaggagaaaaggtttggatggaatcaccgtgtactgtggaatagtatttcattttacacactagtaatagagaccttgctgattttaattgtgccactggctgtgtgatctcaagcaacctctctggccctccttttctgtaaaaatggctactagttgattataagttttttgtacatatgaaataataccactagagttatgtgtaattcctgaacttcaaaccatttttctgactacgctcatgaagctagtgtgtcccaccatatcaatggaatgtttgcaatcactatagctaattaggagtcaagatatctggcagagcttattagcccasgctccttgtggtgctttcgccagtgaagcttgattggcttgagccttggatgatgaacaaagctactttgttgtgtgtttttggcattttctattgcctgtttcaaatcctatacaacaaattggtggatctcaa

SEQ ID NO: 340703 - DNA, 604 bp, Homo sapiens
taaggaaaacatgaaggagaattaagtttctaccagtgctctccagttggatatcctaaagggacttgggttttgatagacaaaactgcagcctttcattttactgttaagtctcaggctgcttttcctcctagtctcactgactcagtgaacataatcatcctccagttattaaactgagaatgaggataagacagaaatatgcatttcctattatttcttgatcttctaggaagtgttaaaatactaaaaatagagaaagatgtacattcctcttcacaacaatatcactttttagcaagtggtattttacaatttcatgatgctatttaactctgtggctgtcatcaattattcgacgatgtggtattcatgaatttaccrttgtaatatccaaccctctgctctacagtctcattctgagctggctatttttttgagaattcaattttttctacctgactgataatctctttgtctctgatagtatacaatattcaggtgttatgattggatatggtttgtttggccccacagaagctcatgttgaaatttgacccccagtgtggtggtgttgggaagtggggcccaatggaaagtgttt

SEQ ID NO: 340704 - DNA, 626 bp, Homo sapiens
tggttccattctctcagtaataagttcttgctcttggacattggactagttctttcaggaatgaattagttcccacaagagcaggttgttataaagcaaagttcctctactgtttccccctcctccctctttgtaggtatccacttcccctttgacttatctgccatactgtgacaaaacccaaccctcgcctgaagccaaggctatgccatcaaacttctcagcctgtagaactaaataaacctctttttctttgataaattacacagtcccagatattattttataccaacagaaaatggactactagaacaggattgttcaaaagtatgtgtagagtgtacatacatctttgaaacttgtgaaataaatggatgctatctaggtctataaagaaagaagatttgtaaggatttaaagtcatactttaaatataaggttcttagtttataagttacaagttcttagactgtggctactcgggaggctgaggcaggagaatggcgtgaacctgggaggccgagcttgcagtgagctgagattgcactactgcactccagcctgggcgacagagcaagactccatctcaaaaaacaamaaaaaaaaaactttactctaaagttagt

SEQ ID NO: 340705 - DNA, 564 bp, Homo sapiens
gcttacttcaatttttctgtttggacaacagaatcttaattataaaggtgatatattttattcaatttagttatctagctgaaactaaccaagaaagggttatataaccctaaaacttaaagtataataataaaaaaaagtgaaaaaaagaattttatgaagacaacaaaaatataatggkgactaaatctacattattgtacagtaagattgtacataattatataaagcaaagtacataattattatgtagggtctgatatcaatttctcttcattagagattgatgaaacctctttgccaaggattgactaaagaaagtgtttctactttgatctgtttttagttttcctttctttttttttaaaataacatccaagttctgtcttttatatatgatttaccttaataactctgccggtgatattaattatgattgcttctttgatattataaatttcattagttattaatctctgcatctgaaattgcttaaagctttaaatgtaaaattttaaagtttcataaacttaatttattttaaaaataaatttaggtattccc

SEQ ID NO: 340706 - DNA, 564 bp, Homo sapiens
gcttacttcaatttttctgtttggacaacagaatcttaattataaaggtgatatattttattcaatttagttatctagctgaaactaaccaagaaagggttatataaccctaaaacttaaagtataataataaaaaaaagtgaaaaaaagaattttatgaagacaacaaaaatataatggggactaaatctacattattgtacagtaagrttgtacataattatataaagcaaagtacataattattatgtagggtctgatatcaatttctcttcattagagattgatgaaacctctttgccaaggattgactaaagaaagtgtttctactttgatctgtttttagttttcctttctttttttttaaaataacatccaagttctgtcttttatatatgatttaccttaataactctgccggtgatattaattatgattgcttctttgatattataaatttcattagttattaatctctgcatctgaaattgcttaaagctttaaatgtaaaattttaaagtttcataaacttaatttattttaaaaataaatttaggtattccc

SEQ ID NO: 340707 - DNA, 564 bp, Homo sapiens
gcttacttcaatttttctgtttggacaacagaatcttaattataaaggtgatatattttattcaatttagttatctagctgaaactaaccaagaaagggttatataaccctaaaacttaaagtataataataaaaaaaagtgaaaaaaagaattttatgaagacaacaaaaatataatggggactaaatctacattattgtacagtaagattgtacataattatataaagcaaagtacataattattatgtagggtctgataycaatttctcttcattagagattgatgaaacctctttgccaaggattgactaaagaaagtgtttctactttgatctgtttttagttttcctttctttttttttaaaataacatccaagttctgtcttttatatatgatttaccttaataactctgccggtgatattaattatgattgcttctttgatattataaatttcattagttattaatctctgcatctgaaattgcttaaagctttaaatgtaaaattttaaagtttcataaacttaatttattttaaaaataaatttaggtattccc

SEQ ID NO: 340708 - DNA, 415 bp, Homo sapiens
tagggtctgatatcaatttctcttcattagagattgatgaaacctctttgccaaggattgactaaagaaagtgtttctactttgatctgtttttagttttcctttctttttttttaaaataacatccaagttctgtcttttatatatgatttaccttaataactctgcyggtgatattaattatgattgcttctttgatattataaatttcattagttattaatctctgcatctgaaattgcttaaagctttaaatgtaaaattttaaagtttcataaacttaatttattttaaaaataaatttaggtattccctttagcataaaacaggcacatatataacataaaaatttagataagaaaatgactatccattagtctactaaactgtatatttcctttccgatttttaatgc

SEQ ID NO: 340709 - DNA, 543 bp, Homo sapiens
actttttaatctacttacatttataggactataattttcagacaagcatatgtctatgttattcacataactattatctttgtcaatacacaaatgaataacaaaagataaaagatctgatttatgtatctagttaccagaattcagttaggtttaatagtctttatcaagaatagcataaaagcctgtaagatggtaatgcatttaggttttcatagatgtgatagaaacacaaagtgacagtagctcaaacatggtgaaggtttgtttctcatgaaagtacgaatttaggtaattcaaggctgttgtggtaatctacagattcatttgttgatgtggtctttatcctaaagtttcaaagtagagagagctccaagaattcctctttcaaacagtaagayaaagaaaatagggtcatcagggtcacaatcctgcagtttaaggacatgatccagacttcttatacaccacttccatttacattttcttagtgacagcttagtcatgcaaccacacctatttgcaagggagattaggaaatga

SEQ ID NO: 340710 - DNA, 616 bp, Homo sapiens
actggcttttctgttagactcatcttcagtattcctggaggcaactctacatttgacatacatggtgggaaacacatttcaactgtttataacctcatgatgtgaaacttgactacctaaacaatgaaaggaaatttgactggagttctaacatactagcatggcttggtgatccctacatattgaagagtttaagtcaagactatgcgagttgtcattatgggcattattcatcctagagtccaagtattttccttccagtttcattgatatttctttctgctataatatgtttcccaaattttcatgtaaataactttttatgacctcaattgtgtttttttctaaatattttttattattgttttaaatattgtacaatatatacctgttttggcaaattcaaatgagtcataagtacatacattaaaaatactatttttggtcccgttctatcatcactcttgcacaaacccagataacctgttctaatactttggkttatgccccttggagtattttaaaaatgctccccccttttaaaataaatacctacacacagtgttttttttttttttttttaatgaaaacatcatattttcctattgtatttttc

SEQ ID NO: 340711 - DNA, 605 bp, Homo sapiens
catctaattttgacttatagtcacatgaaaggtgatctgtagaaatgtctgtagaaaatgtggaaacaaacactgcaaaattattatgaacattatatttgtggggctccttttcagtctgttagaaagttttccagcaaataaatcatgtgaacagcaatatgactaaaggtgtagaacatagcatcgagttctgatattaaaccaacctaggagagatagagtttatattacctttctattaccgctgtaacaaattactgcaaacctggtggcttaaaacaatttacatttattcttttatagttttggaaayctgaattccaaaattatcttactggcttaaagtcaagatgtcagcagggacatgctccctctggaggttctaggagagaattcatttccaaaggttttcccatccctcatcttgcgacccccattctacatctttaaagtcagacacatcaggtacagttctgcccacaccgcattcattttatcttctcttctgtctccttctttcacatgtaaggacctgtgttaacattgtaagcacctggacaatccatgctatctctctgttttaaggctatttgattagcaac

SEQ ID NO: 340712 - DNA, 576 bp, Homo sapiens
acaattattatttccttcgatataggcacaggaatgacttgataaagcaaatgttaagttactaaacctgcttatgtttattgtcaaaaaagtggctgttaattgtttaattgtggcctgagggaaattacttggagatacatctaattttgacttatagtcacatgaaaggtgatctgtagaaatgtctgtagaaaatgtggaaacaaacactgcaaaattattatgaacattatatttgtggggctccttttcagtctgttagaaagttttccagcaaataaatcatgtgaacagcaatatgactaaaggtgtagaacatagcatcgagttctgatattaaaccaacctaggagagatagagtttatattacctttctattaccgctgtaacaaattactgcaaacctggtggcttaaaacaatttacatttattcttttatagttttggaaacctgaattccaaaattatcttactggcttaaagtcaagatgtcagcagggacatgctcsctctggaggttctaggagagaattcatttccaaaggttttcccatccctcatcttgcgaccc

SEQ ID NO: 340713 - DNA, 518 bp, Homo sapiens
ttacttgttacacttactaaagaatatgaattctcaaatttagtagaaatgctgtcttcatagtcaagggcctcaagtcagttataaaatgtgaatttctctcgttagtaacgctcttgttgtccctgaaaaaaaaaaagttagtgtttatgccttcacataatactttagcatctgctttttttcatccatcccgcaagggtaagaaaactgttaagctctctcctcctctcttggaattcatcagttactgtcaatgaagggcctgtgctatgcacagtaatgcaytatgttttgtggacatgaaacataaaagaggaacaacacctgtttcttgccctggaaaatcagtcaaaacagtggcattaattttgagaaaccaaagagagccatgatccttcacatcatcacaatgtagtgacccaatatctctgaagggaaagaaaaagggattatatgaaatgtggaaacatgaagtatgataaaaatgaaaattagcttttggtttgcaagagtaa

SEQ ID NO: 340714 - DNA, 622 bp, Homo sapiens
taataaatacactggcctggatttggagtcatgtctaacatccacataacaaattgatttcaccttttctgaaaatgtgtaatgtaaaattcacatgtgtggtacacatattctaacacatgccaccatttaacaaagccagacatctcaattgtaggacaatactgttagctaattatgactgtagggagaaaccttactaaaatgaacttatatttacaagggaataataacttgttttcgagcctttgattggcaccagagactgacctctgtcttcttttattttttaagaaagaattatttgatccttgttattgacattttgtttgccactcttagcagctgtttaacaattacatttataaacctgacaggaggcttttagaaaayggctgagagtctgtaattgggaaatgtacttcacttttcttgcttctgttttctcttcataataagatgtttgttccttgtaaataactttcttaactgttattgccttgaggattacatgcagtcactctgacccaggtagccttattaaggtggtggggccctggtgtcaggcaataatcagaccagccagggccgattgtcaccttctttcactgctgcttgccat

SEQ ID NO: 340715 - DNA, 642 bp, Homo sapiens
gaggattacatgcagtcactctgacccaggtagccttattaaggtggtggggccctggtgtcaggcaataatcagaccagccagggccgattgtcaccttctttcactgctgcttgccatggctggaaataaagggcaacagtaattacttctcaaamggtaggtgctgagaaggcatttttttagcgatattgaaagaaagttaataaaggcacacctatagaaaaacagaatagaatttggaagaccagaaggaagtttattttagaagagataatgcctctctttctttctctggcgctgatcaggatttactagctctttctactagttcctgaagaagaacaaactgtacatcactcccttttatgaaacactacctcatttctaactcagtgagatataaagtagcacaggtacacttgtggctacaaaacataattttctgtggttatttgaagggttacaaaagagagaaataggctacacataggattgtcttagtccattttgtgctgctataacataatgccacagacaggataatttataaagaacaaaagtttattggatcagggttcttgaggctggaacgtccaagaatgaggggccagcatctggcaagagtcttcttgtggcatc

SEQ ID NO: 340716 - DNA, 591 bp, Homo sapiens
caggataatttataaagaacaaaagtttattggatcagggttcttgaggctggracgtccaagaatgaggggccagcatctggcaagagtcttcttgtggcatcatcccatggtgcaagggggaaaaaagggtgagagagaaagaatgagaaaaggggaaaaacttgtttttcataaggaacctgctcctgtgataatgatgttaatccactcatgatggaagagcacacatgacctaatcactcacctctaaatactattttaaatacttagtgcagtattaaaaatattccacctcttgatgctgttagaatagcagctaaatttcaacatgattttggaagaaccaaacatttaaaccacagcaggggtcatgattataatcctgggagaacgcctatgaatgagtcaaacagcctcctctgccccatagtgggcaaggccaagagcctctccactgtgtcagtggggattgtattaggtcttctgaatcctatggaaaccacaagggtcttattgcatgggttcaatgagcctggtctcctctccaattcatcagggtgttgggctcacagatgaaataatatacca

SEQ ID NO: 340717 - DNA, 575 bp, Homo sapiens
ccagattaacattggtgggattggtttctggtgagggctctcttcctggttttcagactgctgccttcttgctttgtgcacacacgacatttcctcagtgtgtgctggtgaagagagtgagaaccagctctctgatatttcatttttctaagggcactaatcccatcataccaggacctttccttcatgacccaagtacctcccaaagaccctatgcccaaatattatcacactgygagtgagagcttcaacatatgaattttgtgcggacaaaaaatttagtacataacacacttgccctcagattgttcctaagaaaaatttgggtgcttgtaattaaggttacacaacctaagcaaacttcaagattacaaaagattttaaaagggcctgagtgtacattgttagcaaaagtgacaatatctggtggtctgattgttgtccattgagtgaacaaggaagtacaaggtactatctataactgtagttaacttcttttttatgttttgcttcctctcaaaacaattcataagtaatttgataatattatgaaattatggattccaaacaataat

SEQ ID NO: 340718 - DNA, 591 bp, Homo sapiens
tagctaacatatgagatatgtttttgttgtgtccccagccaactctcatcttgaattgtagcttccataattcctctgttttgtgggagggaccctgtgggagaaaattgaatcatgggagcagtttcccccatactccccatactgttctcttggtagttaataagtctcatgagatctgatgattttataaggggttttccctttcacttgtctcttattctctcttgtctgctgccatgtaagacatgccttttgccttccaccatgattgtgaggcctccttakccacatggaactgtgagtccattaaatctttttttctttataaattacccagtctcaggtatgtctttatcagcagcataaaaacagactaatacaatacgttatgcatttatctgtgcctggcatttttctgtatgcttaattaatataaccttatgaggtcataggtattacaggtgtacagttttgctgaaatcattagggacagatgtgtttaaaaaattagaggttttaaacattcagaaaaataatacagtgcatatattatagatatgtattacccccagaagggtctgggggcag

SEQ ID NO: 340719 - DNA, 620 bp, Homo sapiens
ttctcttggtagttaataagtctcatgagatctgatgattttataaggggttttccctttcacttgtctcttattctctcttgtctgctgccatgtaagacatgccttttgccttccaccatgattgtgaggcctccttatccacatggaactgtgagtccattaaatctttttttctttataaattacccagtctcaggtatgtctttatcagcagcataaaaacagactaatacaatacgttatgcatttatctgtgcctggcatttttctgtatgcttaattaatataaccttatgaggtcataggtattacaggtgtacagttttgctgaaatcattagggacagatgtgtttaaaaaattagaggttttaaacattcagaaaaataatacagtgcatatattatagatatgtattacccccagaagggtctggggrcagcacaacacaaacacattaacatttttatgaagaaacttgtaaatgttcatactacatgagaaaatatggctataagtaactcatatcttttcagatatatttgttgtcaaataagtttgctataaccttaaaaaaatttttaactttgaaaaattttggattttataattgtgctt

SEQ ID NO: 340720 - DNA, 532 bp, Homo sapiens
aagaacagtttcacattatctgcttcatcctccccacaatcccaggcaacacagcatggagagagatacctgctgctttgaagaagtggagggaagtgctatggaccctagtatcagacatgccccagtaaaacacaatgctargctgcctcctctgaccccaggcttcaggctggcacctatggacacaaattccaggacagcatttataggctcaggcatcaggctgacatctgcagacttagtctgcaagctagcccctgcagctctacattctgtgtcctcccagcaccaggctggtccctttggtcacaggcctaacactggccccaacaaatgcttgctccagcagacccagggtccagagccacatgagtagactccagtctcagaccatcccccacaaacccaggttttaatactgctcatatgtacccatgactcaggtgtgccaattggaaccatgcctctagaccaacccagctccaggctaacctccacagactcatctttcagaatagcctctgaagag

SEQ ID NO: 340721 - DNA, 485 bp, Homo sapiens
aaaccccacaaaaatacataaacaaaataattcaaacaaaaagatagaagctatttaaaaagcaatcagaaatcctgtagcagaagaatataatgactaaaataaaaattatacagacagcttctacagcaaactcaarcagaagaaaaatttagtgagcttaaagacaagacatctgaaattactcaaaggagcaaaagaaaaaattttaaaagtgaagatagcatatatgacttataagataccatcatgtgaaccattatgtaaactatgagggtctcagaagtagtggagagagagaaaggagaggaaagcttatttaaaaaaataatgacaaacaacttcccaaatctggagaagaaaaagagcatccatatccttgaagcccaaataaccacaagtaaattagagatattcccttaggcacactattatcaattctgaaaattaaaaacagaattttgaaagcaggagaaaagcaactc

SEQ ID NO: 340722 - DNA, 485 bp, Homo sapiens
aaaccccacaaaaatacataaacaaaataattcaaacaaaaagatagaagctatttaaaaagcaatcagaaatcctgtagcagaagaatataatgactaaaataaaaattatacagacagcttctacagcaaactcaaacagaagaaaaatttagtgagcttaaagacaagacatctgaaattactcaaaggagcaaaagaaaaaattttaaaagtgaagatagcatatatgacttataagataccatcatgtgaaccattatgtaaactatgagggtctcagaagtagtggagagagagaaaggagaggaaagcttatttaaaaaaataatgacaaacaacttcccaaatctggagaagaaaaagagcatmcatatccttgaagcccaaataaccacaagtaaattagagatattcccttaggcacactattatcaattctgaaaattaaaaacagaattttgaaagcaggagaaaagcaactc

SEQ ID NO: 340723 - DNA, 562 bp, Homo sapiens
tttgtgcagggtaattcctctttttaaaaccatcagatctcatgagacttattcactatcacaagaacagtgaacattccaattacctcccaccgggttcctctcatgacacatgggaattgtgggagttacaattcaagatgagatttgggtggggacacagccaaaccatatcatactgttttattgaagtgatgatatatttctctctgacatttccctaatcaatggataagataatatgatcaamattattttactgttacttattttgagtaagtaagaaatgatgctccctgaaggtcaacttatttttcacatactaataaacaatttctttaacaattgattctaggagaaactcagggagtgggaccaggattctgtgttttaacaagccctccaagtgattctgatgcatattaaagtttgagcatcactggccaacactcctcccattcctactcctcaaggacatttcaggaaaatcccttagctttcttgtctcattcaatttcactacttgttttcaggcattaaaatatgtcatgggtggagccaa

SEQ ID NO: 340724 - DNA, 537 bp, Homo sapiens
tgatgctccctgaaggtcaacttatttttcacatactaataaacaatttctttaacaattgattctaggagaaactcagggagtgggaccaggattctgtgttttaacaagccctccaagtgattctgatgcatattaaagtttgagcatcactggccaacactcctcycattcctactcctcaaggacatttcaggaaaatcccttagctttcttgtctcattcaatttcactacttgttttcaggcattaaaatatgtcatgggtggagccaagatgaccaaataagaacagctccagtctacagctcccagcatgagtgatgcagaagatgggtgatttctgcatttccaactgtggtactgggttcatctcactggggagtgttggaaactgggtgcaggacagtgggtacagtacaacaaccctgagccaaagcagggtgaggcatcgcctcacctgggaagtgcaacagttcagggaattccctttcctagtcaaagatggggtgacagacgtcacctggaaaattgggtc

SEQ ID NO: 340725 - DNA, 605 bp, Homo sapiens
tacctataaaaatacatttagactgaaaataaaaggatggcaaaagttactccatgccaatagaaaccaaaaaagagcagaaatagctacacttataccagacaaaaatagatttcaacaaaagactgtaggaagagattaagaaggtcattatataataataaagagatcaattcatcaagaggatataataattggaaacatatatgcacccaacactaaagcacctagataaatgaagtaaatattataagagctaaagaaagagacctcaatacaataatggctggacacttcaacaccccactttagtcattggatagaccttccagacagaaaatcaacaaagtaacatcagacctaatctgcactatagaacaaatgaacctaatagttatttacagaaaatttcatccaacagctacagaatacacattcttctcctcagcacgtgggttattctccaggatagaccayatgttaagtaacatgtctaaaaacattcaaaaaaattgaagtaatatcaagcattttctttgaccacaatggaataaaactagaaatcaattaaaaatgaatttcagaaactatacaagcacttgaac

SEQ ID NO: 340726 - DNA, 605 bp, Homo sapiens
tacctataaaaatacatttagactgaaaataaaaggatggcaaaagttactccatgccaatagaaaccaaaaaagagcagaaatagctacacttataccagacaaaaatagatttcaacaaaagactgtaggaagagattaagaaggtcattatataataataaagagatcaattcatcaagaggatataataattggaaacatatatgcacccaacactaaagcacctagataaatgaagtaaatattataagagctaaagaaagagacctcaatacaataatggctggacacttcaacaccccactttagtcattggatagaccttccagacagaaaatcaacaaagtaacatcagacctaatctgcactatagaacaaatgaacctaatagttatttacagaaaatttcatccaacagctacagaatacacattcttctcctcagcacgtgggttattctccaggatagaccatatgttaagtaacatgtctaaaaacattcaaaaaaattgaagtaatatcaagcatttyctttgaccacaatggaataaaactagaaatcaattaaaaatgaatttcagaaactatacaagcacttgaac

SEQ ID NO: 340727 - DNA, 613 bp, Homo sapiens
tactattataaaacaaaaatttataactgtaagtgcatatataaaaaacagagaaacttcaaataaataacctaacagtrcatcttaattaaatagaataaaaaggccaaaccaactcaaaattagaagaaaagaaataataaagattagagtggaaataaagttaaaatgaagaaaacaatgcaaaagatcaatgaaacaaaaagttgattttttttgaaaagtaaaacaattcacaaataattagacaggctaactgaagaacagaggagatacaaatttataaaatcagagttgaaaaaggatacattacaagtaatgcttcagaaaatcaaagggtcattagtggctactatgagcaattgtatgccaacaaattagaaaacctagaggaaattcttagagaaacacaacttaccaagattgaactaggaaaaaatcaaaaacctgaacagaccaataatgaataacaaaattaaagccataataaaaaagtatgtaggaccagactgaaaaatagagaaggaaagaagattttcaaattcattctttgaggctagtattaaactgatatcaaaaccagacaaagacacattaaaaaagccaactatgg

SEQ ID NO: 340728 - DNA, 584 bp, Homo sapiens
aatttgcaaaaaacctagcaaactgaattaagcagtacataaataaataattcataatgaccaagtgggatttatcccagaggtgcaacgatggttcaacatgcaaatcaatcaatgtgatatatcatataaacaggatgaaggggccaggtgcagtggctcatgcctgtaatcccagcattttgggaagccaaggtgggtgaatcacctgagatcaggggttcaaaaccagcactggccaacacagtgaaaccccatctctattaaaaatgcaaaaattagacaggtgctgtggtgggcacctgtaatcccagctactcgggaggctgaggcaggagaatcagttgaacctgggaggtggaggttgcagtgagccaagatcatgctattgcactccagcctgggtgacagagggagacttcatcaaaaaaaaaaaaccaaaaaaacaaaacamaacacaacacaacacaacaaaaaaaacagaatgaaggacaaaatccatataatcatttcaattatgctaaaaaattatttaataaaatttaatattctttaataattaaaaaccctttgaaaactgggta

SEQ ID NO: 340729 - DNA, 592 bp, Homo sapiens
ctttcttttagctgatttcttccttttagaataggagtatttacccaatgcctgtgccccatttgtatcttggaagtacctaacttgttttttgtattttaggcttataggaggaaggaactagctttgtcttagatgagacttttgacttttgagttaaggctgaaatgagttaagactttggggattgttgggaagtcatgatcgtattttgaaatatgagaaggatatgagattttgaatggccaggggcaaaacaatataatttggatatgtgttcccaccaaaatgttctattgaaatgtaatcctcaatgttggaagtgggcctagtggggaggtgattgaaacaggagggcaggatttccatgaacagtttggcatcatttcctttggtgccattcccacaatagwaagttttcatgagagctggtcatctacaaatgtatagcactttccccctgcccttgcactaccatgtgatatgcaagcagcggatttatttttcaccttgattgtcagttgtcaggggcttccccagaagtagaagccagggctatgctttatgtacagcccatagaatgatgagccaa

SEQ ID NO: 340730 - DNA, 548 bp, Homo sapiens
attactagtcagtaacttcttaaaccaagtttaggttttgaaattccctgatccaagaaagttaagcctgggatcaaattycccatgtaataactgcctcaatttctgttctccttaaccttgatggcacaacctttagggaatcccagcttggagtagagatgctcaaatctaaatctgctaaaatatattttatgctggttctgaattctaagttacattgctctcacctcacaaaatggacaaaactaggagtctaattttatattatcagcaaatgctctcagggcaaaagtggcttcagtgtttgcctctcagtctgggtccttgttttctcttcacttttggcttggctcttccttactgcctttccataatgcttttatgaaagatttaattttttttaattaaaaatgtttgtctagctatatatttctgtgacgtggcatgagtgatctgaatagcttcactgaccgttacagaaacaggtgggctccctctctgtttttaactatgtccaaaaataatgggattctgctgatattagg

SEQ ID NO: 340731 - DNA, 618 bp, Homo sapiens
gtctgtttcctttctcataggatgaaatggtttggtgaactgttartcaagttactcaacatacatgataatgatagaaaattcttatttatataatgtgaaacaaactctgcaaaatgccatatattccttatttatttcatttatcattttaagaactcagtaaagtaagcatacttactatctactaatcaggagattaaaactcagattatgcagttttcaaaatgaaatatagttaatacatgtcagggccaggtttcaaatcaaattgttcaactttttgactttgcattacacttctcttctattcttagcatgattacgggccacctccttttagctacctgttattatttaatagtgttccctaaaatgtcatctaaaactaaaatgatacatatagccaaatgctaattatatagcagtaggagaggtattcaggaaattggtcagttttctttttcttcccagttcctgtgagtcattgctctttgtgtgaaataagatgccctcaggtgaatagctaacattgttagaaaaacatggtcaaccatgagcaatcatgacaataaggattttcctgtcaagcagtacttttgaattagacacaagacc

SEQ ID NO: 340732 - DNA, 435 bp, Homo sapiens
ttttgaattagacacaagaccattgttaagcagtggggagtccagttgcctggcttctttacttaaatgtgtaactatgcatactcactgttacccactgaaagccaattagtatttgcaatctgaagagtcatctttggggagcaaatttctaactggataactgaacaaaataactcagtatcatctataaatttcatgatgcttgtttgactaaggaagctttaatgaataactataatgacaaattatttttcttacatatatattargctttataatccaagaacttcttagaaaatgacactttaatgttttttcttatcaaggaatatctattcttttggcatctgtgtgataaatacagaatgtttctcagctcatacgttttctggtaaaagatctgtgaccgtgactgtcggtgaggggaatggg

SEQ ID NO: 340733 - DNA, 507 bp, Homo sapiens
atggattcttgttaggtaaggttacctaaagtaaaaacatggaacctgcttctaagtctttaaaaaaaaatctatccagagtatgcccaattataactcggcccccaggcctgcgttcagtgaggcctcccgtggcgtcagcatgttcgtgtggaggaatgtggaaggtcactctgtggccgtgttcccctggtactccatccccttcctgacccctccctgcagccacaygaggcccagcaacctgccagtcactcagtggcctccaaccagagaaaacaacctgccaagttggcagctgttgctcataagcgtccaccaggtgggacagggagtgttgaccctgggcggccccctggagccacctgccctgaaagcccagggcccgcaaccccacacactttgggggtggtggaacctggtaaaagctcacctcccaccacagaggaggagccctgggcccctcaggggagtccctgctggacagtgacacagagaatgaccatg

SEQ ID NO: 340734 - DNA, 507 bp, Homo sapiens
atggattcttgttaggtaaggttacctaaagtaaaaacatggaacctgcttctaagtctttaaaaaaaaatctatccagagtatgcccaattataactcggcccccaggcctgcgttcagtgaggcctcccgtggcgtcagcatgttcgtgtggaggaatgtggaaggtcactctgtggccgtgttcccctggtactccatccccttcctgacccctccctgcagccacatgaggcccagcaacctgccagtcactcagtggcctccaaccagagaaaacaacctgccaagttggcagctgttgctcataagcgtccaccaggtgggacagggagtgttgaccctgggcggccccctggagccacctgccctgaaagcccagggcccgcaaccccacacactttgggggtggtggaacytggtaaaagctcacctcccaccacagaggaggagccctgggcccctcaggggagtccctgctggacagtgacacagagaatgaccatg

SEQ ID NO: 340735 - DNA, 426 bp, Homo sapiens
agaacacaattcaaagtgagatttgaatgggaacacagagccaaaccacatcacagagrttacagtgagccaagatcaccactgcactccatccagagcaagacctgtcttaaaaaaaaaaaatgcaattaggaatgtgtcttttgcattagctatgacagctttggtgtggtcttcaaaaacaaattgccacttttctagaccttgatactcagattaagaattctccatggaaagagtttcaaacaaaatacttttgctatagaaatacatcaccaatttactaatatttacaagaagttatgaggaatataatgcaccattataaagaatgggttagagcagtgttgtccaacacaaacatgatgcaagtaactttaaatcttctagtagccacatgttttaaaaataaaaggaaatacgtaa

SEQ ID NO: 340736 - DNA, 426 bp, Homo sapiens
agaacacaattcaaagtgagatttgaatgggaacacagagccaaaccacatcacagaggttacagtgagccaagatcaccactgcactccatccagagcaagacctgtcttaaaaaaaaaaaatgcaattaggaatgtgtcttttgcattagctatgacagctttggtgtggtcttcaaaaacaaattgccacttttctagaccttgatactcagattaagaattctccatggaaaragtttcaaacaaaatacttttgctatagaaatacatcaccaatttactaatatttacaagaagttatgaggaatataatgcaccattataaagaatgggttagagcagtgttgtccaacacaaacatgatgcaagtaactttaaatcttctagtagccacatgttttaaaaataaaaggaaatacgtaa

SEQ ID NO: 340737 - DNA, 441 bp, Homo sapiens
ttctgtgtataccaaaatccacgcatactcaagttttcgaagtcagtcctgtggaatccacatataacacaaatgggaaaattagtgaggtgtggtgacaagcacctgtagtcccagctacttgtgaggctgaggcaggaggattgcttgagcccaggaggttgaggctgcwgtgagccataattgcaccactgcactccagtctgggcaacagagtgagacagaaggttgactttttaatagaatttttctgttcacttgaagatatggtcaggattgtggcatatgaaaattcttcataaaataactatctaatccaattaatgctggaattgggaacagcagaagtgtcatctcagagctactcacaatgaaaggtgatgtctggggctcaggtgtgttgaggtccccatgcctggactatgggtgctgagtgggatt

SEQ ID NO: 340738 - DNA, 531 bp, Homo sapiens
ttagaaaatgaactgggtgcggtaaaacattcgtatagtcccagctactctggaggctgaaataggaggatcgcttgagcccaggaagtggaagctgcagtgagctctgatctcaccactgcactccagcctgggtgacagagtgagaccctgtctcaagacacacacamacacacacacacacacacacacacacacacacacacacaatctcagtctgtccagccttgactaatcaaaagggccttctggttacagaagaggtatgctcttttgtaggacagggagagaccagcaagcttgttcacagacttttcctcatcctctgcttagttttccaagaaccctcacagtggaaatggagtctctgggaaaatgacctaaatctttgggttaccaggggagaaatatgcctcctttgtcaattaataaatggaacatctgccttaaaatccagggagttctgctagaatgaatcactccctaagaccctgacctatgcatggaacatgaaaaactgaagtttaactg

SEQ ID NO: 340739 - DNA, 531 bp, Homo sapiens
ttagaaaatgaactgggtgcggtaaaacattcgtatagtcccagctactctggaggctgaaataggaggatcgcttgagcccaggaagtggaagctgcagtgagctctgatctcaccactgcactccagcctgggtgacagagtgagaccctgtctcaagacacacacacacacacacacacacacacacacacacacacacacacacaatctcagtctgtccagccttgactaatcaaaagggccttctggttacagaagaggtatgctcttttgtaggacagggagagaccagcaagcttgttcacagacttttcctcatcctctgcttagttttccaagaaccctcacagtggaaatggagtctctgggaaaatgacctaaatctttgggttaccaggggagaaatatgcctcctttgtcaattaataaatggaacatctgccttaaaatccagggagttctgctagaatgaatcactccctaagaccctgaccwatgcatggaacatgaaaaactgaagtttaactg

SEQ ID NO: 340740 - DNA, 578 bp, Homo sapiens
caaccatggagaggtgccccttgcacatcctcctgcactactcacacaatacacacatgcacgagcgcacgcgtgcacacacacacacacacacacacacarttgtagtcagagacatggagataaggagatagttcacttaaggggggctcccagtcctgatcctaaggttttctgatctttcaccttaaaaatcacagacctctcagatggaaccacagttaacacacacaccaataaacactccctacccatgctgtcactcatcaatctgtctagcaaagtcccctgctgaggtcagaagtggctctctcaatggcccagcttgaccaggcttcacacctagatcacacatggattgagatgcaggaagtgccacccactcccaccccatcaacacttagaacaatccttcgtggtgaagggacagcatgggccacagtggctcagaacagaacttagggtcagatggagttgaattcatacctcacttcttccattcttcaggcttttgcacagctccagcgagcaccattcacactttccagtgagcaccattcacacttttacctaaaggc

SEQ ID NO: 340741 - DNA, 593 bp, Homo sapiens
tccattttttattctagtagccccccgccgagggtaaaagtatgatagaaggacattacatcaatttgtatcataatttaaaaaatattggggggaatctaagaatttcttgtgatcagtaaatggtttaggaatcagaatagtgtcatctttcacctactccccacccccaaagaaaaacacccagtaaatccaaatcccctactttgttctgctgctgattggtcccatgaatcattttttacggctggcaaaactaacaggtcaagcagtataaggaagtaagcagctcagattcactgtttggggttcttaacatgtagttacctactctggagagctgaaagctggagttcatttattctcacgttcatacatttgtaatgggatgcctagcaaagactgaatgttacatttttgaaagctgaaaaatgattttggggattgcaattagtttctgaattatctttgtgtagagccttctatgacagtctgggtcaagaaatagaamccaaggctgagtaccttaggctgaaaaatgaattttttggaaggataatggaaggatataatcttacaaagctatagggaag

SEQ ID NO: 340742 - DNA, 577 bp, Homo sapiens
acatcaaatctcaccttgaggggtcaacaaacttgtaaatagatccacgtggtgcataggcacttgggtaagaggtcgccaggaaatacagctcccctaaggcaacaaaaatagacaggyaataatgggacatcaggcagcactgagacacagagttggatgcacagaaaatggtcaaaaagaggttatggccctaaaatgcagtgagcgccaagaacggaatcccagaaacctaactggcatcagctctgctgggctgtgagctccttgaggagaaagtccatctttgaaccccccaaagactagctcagtgtatggcctagcagaggcaatttcacgtgtatgtttgtttatcaaaccaaacaggtttcccccttatcacctccttgccctcagaaacttcacctccgtgaatctccatttccttccccacctctttcctctgtgaacacttggatatatacagtctgcaggctgaggaccatctgtcaatcgctttattttgccccttctttagtccttttgtttcccttcagcctcactcccattttcctctttcattctgtccttgagttcc

SEQ ID NO: 340743 - DNA, 577 bp, Homo sapiens
acatcaaatctcaccttgaggggtcaacaaacttgtaaatagatccacgtggtgcataggcacttgggtaagaggtcgccaggaaatacagctcccctaaggcaacaaaaatagacaggcaataatgggacatcaggcagcactgagacacagagttggatgcacagaaaatggtcaaaaagaggttatggccctaaaatgcagtgagcgccaagaacggaatcccagaaacctaactggcatcagctctgctgggctgtgagctccttgaggagaaagtccatctttgaaccycccaaagactagctcagtgtatggcctagcagaggcaatttcacgtgtatgtttgtttatcaaaccaaacaggtttcccccttatcacctccttgccctcagaaacttcacctccgtgaatctccatttccttccccacctctttcctctgtgaacacttggatatatacagtctgcaggctgaggaccatctgtcaatcgctttattttgccccttctttagtccttttgtttcccttcagcctcactcccattttcctctttcattctgtccttgagttcc

SEQ ID NO: 340744 - DNA, 579 bp, Homo sapiens
attgtatttttaggagaaaacaatgctagaagtgaatttcatctgtagcatccaactgatatttttaatatacatcttaggggagaaaaacaaaaaaactataatatgccatttaaaacaaaaatgcatgctatacaaatttactgcaaacagaattcatttgaccagccctcttgggaatgcccttcagtgactaactttcagaaatcccatcaattaaacctcagcaatgggcagctccacaccagccagtcactcagcagcaattcataccagctatcaactctcaggacccaggatgtgaagtgcagccataggtgaggcagagctcaagttccaagtaaaaagtgacttacctaaagccagtggactgataataaaataatgaaataaggctcagatctaaaaatgcctctcagaggaaaagaatatggcaagggcagaaaatatgaatcagtttatgcaaaaacacaagagcaagcaactctggaaaaaaaaataatttgcctcargaacagcctcatcagcctcagggccgcccttgggtaaaggcttgggaacacgttggcaagtctaccc

SEQ ID NO: 340745 - DNA, 524 bp, Homo sapiens
tgaacattctaccttgtcagtgtaaaaataaaaatatacctaagataaattgggggttgggagagaaaaygtagacagaattttggaagtgctaatgtccttatctttcacagcaaggaatcaactgacactttttatattcgaaatagatagtttaaaaaaacacacaaggactacagtctcttaatgtttttctcaaaatcttttctgaacttaaaataaatatcgtctcttatggctaacaaacatttgagattccacaatttcttcaacttaattttttttcttttgtcccagtcaagtaaaattaaagtaagtccttcccacatgaagattatatcctagattttttcttcaatatctttttccttcctttcctttcctccttcttcctttctcattaacttcccacccttctatccatttattttattacacagggatagaaagagctctagaatagtagtctaacattaaaaattattatttcaggaagtagaatttggaatgactttaaaaaattc

SEQ ID NO: 340746 - DNA, 524 bp, Homo sapiens
tgaacattctaccttgtcagtgtaaaaataaaaatatacctaagataaattgggggttgggagagaaaatgtagacagaattttggaagtgctaatgtccttatctttcacagcaaggaatcaactgacactttttatattcgaaatagatagtttaaaaaaacacacaaggactacagtctcttaatgtttttctcaaaatcttttctgaacttaaaataaatatcgtctcttatggctaacaaacatttgagattccacaatttcttcaacttaattttttttcttttgtcccagtcaagtaaaattaaagtaagtccttcccacatgaagattatatcctagattttttcttcaatatctttttccttcctttcctttcctccttcttcctttctcattaayttcccacccttctatccatttattttattacacagggatagaaagagctctagaatagtagtctaacattaaaaattattatttcaggaagtagaatttggaatgactttaaaaaattc

SEQ ID NO: 340747 - DNA, 524 bp, Homo sapiens
tgaacattctaccttgtcagtgtaaaaataaaaatatacctaagataaattgggggttgggagagaaaatgtagacagaattttggaagtgctaatgtccttatctttcacagcaaggaatcaactgacactttttatattcgaaatagatagtttaaaaaaacacacaaggactacagtctcttaatgtttttctcaaaatcttttctgaacttaaaataaatatcgtctcttatggctaacaaacatttgagattccacaatttcttcaacttaattttttttcttttgtcccagtcaagtaaaattaaagtaagtccttcccacatgaagattatatcctagattttttcttcaatatctttttccttcctttcctttcctccttcttcctttctcattaacttcccacccttctatccayttattttattacacagggatagaaagagctctagaatagtagtctaacattaaaaattattatttcaggaagtagaatttggaatgactttaaaaaattc

SEQ ID NO: 340748 - DNA, 559 bp, Homo sapiens
attggcctgtagttttcttttttgttgtattcttgtctggttttggtatcgtggtaatggcctcatagaatgagtttggaaatattctcttctctttaatttattgttgwgttgagtaggattggtattagttctttaaatgatgggttaaattcagcagtgaagccatcaggtcctgagatttacttttatggaaagcttttttttttttttttttttactacagtttagatcttgttactcgttattaatttgttgaggttttcagtttcttcagggttcaatctatgtaggttgtatgtttccaggaacttatttcttctaggttatccaatttgttggtatatagttattcagaacagtctctgaaaactcttcatatttttgaggtctcaggtatgcatcctttttcatttctaattttatttatttggttcttttctctttgttcaaagttttgtcaattttgtttaccttttcaaaaaaccaactttttgtttcattaagcttctgtattgatttcagtcgcaatttcacttatttctgctcagatatttat

SEQ ID NO: 340749 - DNA, 586 bp, Homo sapiens
cttctttgagcttttgaacatgttccactccccgctggcctataagatttccattgtgaaatctgctgccagatggattggaattcctttatatgttatttgcttttcttctcttgctgcctttagtattctctctttgtccttgacctttgacagtctrattattcagtgtcttatggtattcttatttgagttgaatctgcttggtgctctcagatcttcctgtacctagatatgtatatctatctcaagagttggtaagttttctgttattctttccttgaaaaaactttctaccacttgctcttgtttgattcccttttgagcactgataactcagatttagtcttttgaggtaattttctgtatctcgtaggcagtcttaattcattttcattctttttttcgtttttttcctctgactttgtattttcaaataggtggcctgagaggtcactgactcctcagcaagacccattctcctgttgagagtctctaatgggttcttcaattcagcaaatgcatttctaatttctcagatttctgttaacagaggcaaaaaaggcagagtcacaggcgaaacaca

SEQ ID NO: 340750 - DNA, 583 bp, Homo sapiens
ggcactgtgttaataggttaatatattatctcataataatgccaagagcaaacctatgaagattatattaatattcaccgtgttagtccagactcttagcaaagcagacaccaagaaagggccatatctgcaaagatttttcactcctaccacaagcaaaatgcttgtgtaagagaaaatagggagggctccagaggaggatgagaaagaccatgatgtaagattaatccagagggaagtaaaggggagggaaggatgggtggcagtgacttagatggcagtggagtctaatgaagctttgtcaaggacagcagggagtttggcccaaagtcagcagttgtaagtgtcccttctatcccaagaacaagactcactcaatatttctgccctgctttgatacctgctgggagcagcccccaggaagcatgrcctcagagataatgtggcaatgggttttagagcatggtgtctagagcccttcttcagctatacattccctacttggaggcctgtgagaatcattctcttagcaagaaccagctatataatatgtggagcctagtgcagaatgacaatgtgaaac

SEQ ID NO: 340751 - DNA, 583 bp, Homo sapiens
ggcactgtgttaataggttaatatattatctcataataatgccaagagcaaacctatgaagattatattaatattcaccgtgttagtccagactcttagcaaagcagacaccaagaaagggccatatctgcaaagatttttcactcctaccacaagcaaaatgcttgtgtaagagaaaatagggagggctccagaggaggatgagaaagaccatgatgtaagattaatccagagggaagtaaaggggagggaaggatgggtggcagtgacttagatggcagtggagtctaatgaagctttgtcaaggacagcagggagtttggcccaaagtcagcagttgtaagtgtcccttctatcccaagaacaagactcactcaatatttctgccctgctttgatacctgctgggagcagcccccaggaagcatggcctcagagakaatgtggcaatgggttttagagcatggtgtctagagcccttcttcagctatacattccctacttggaggcctgtgagaatcattctcttagcaagaaccagctatataatatgtggagcctagtgcagaatgacaatgtgaaac

SEQ ID NO: 340752 - DNA, 611 bp, Homo sapiens
ttcatttgactagatcaggtccactcaggttaatcttcattttgccatatatttaaccacggacatgatgtcttatgtctacaggttccatccaaacccaatgggattacacagattatttatatcaagagaaaataatcttaaggccagttcagaatccataatgagctttttcattcttaaaggagtaccttggccctaaagcattgatgctttctttatgatatgaaatagttgaatctagattcatatcttacttagcagattcataacgggaaatgtcccttcamggttttttaaaggcactaaagtgcttaaaaatcagtaagagagattacctcacatttgaagagtaaagagaaagaaacattaatccacaacatcagcagatatttaagggatggtgaaggtagtgaagtaaatagaggatagtcagagaatttgaagacgggtagaggatggttctctgtcatgttcaaggaaatcaaaggaacaaaaggttttaaggtagaaaatctttacaacacagtcaaatgaaggaaaaagtttggatttttagaagaaccattatctttgtccgtgagttaacagagtgataagtacgatcgtgt

SEQ ID NO: 340753 - DNA, 598 bp, Homo sapiens
tttgtatggttttgtattaaactttgctgcttattcctttttagtatgagaaagacttgagattatagccattgggaaaggagccagtaaataattaataggtttgaaaatccacaagaggaagggtataattaatacagtaggaatctacaagaaaaaaggaaagatagaatgaaggatgacagtgtaaataaaactcatcctgggattcttgcagaaagggcaaaaggatgkctggaaaaatacaaagaaatacatctttaaagtgagtggacaggatattgaaggagaaagtactctagtacttttagtttgctaaatgaaacaaattcaaagatgcaacaccattaattgggagcaagagttccaggcaatgagtaagaaaccttattaacctaatcagggggttaataaaatgcattgaaatcatgagatgataaaagctaaattaaagaagtggtagatgggaccaacatacagctgggattagggatcaaagattttattggcatcagtttacacacttatgtaatgttccaaaggaacagttgatcaaattatatatattaaagaatgcagtctaactgtagttttgaga

SEQ ID NO: 340754 - DNA, 661 bp, Homo sapiens
aatcaagttcaaattatctctatttttggatctctaagaatgggctacttgtattattaccaattttctcctatttattgataattcttattatttttgaactgatctgagactggaaatttgtgaacttctgaacatttttaattgcacaatcagccactgtttaccatggctatcctcctaaacctgccttaattccagggtatatgtctaatggcacacccttttatttgtgtaacttgacaaaaatagcatatctgagtcaagaatcccaagattttacaactctttctcttagctactttatttatttatttttactaatactgtatgcttcaygaatattttccatataaattaatcatggacaccagatttaacacaggcccttctgttttcattttctattacttccctattttacttttattcctctcattattcattccttctgtttaagtttgagatggtcatttttgaaatagattttacttatgtgtaatagataaagattagttctttgctaagtgattgatagagagaatggcaatgattaaccttggaaaccactcagtctaggaaggagatattcctgattgtggccatgaggtatgaatggaatccagaagtgtctgttatcattacagagcttgtgagaggt

SEQ ID NO: 340755 - DNA, 604 bp, Homo sapiens
aaccactcagtctaggaaggagatattcctgattgtggccatgaggtatgaatggaatccagaagtgtctgttrtcattacagagcttgtgagaggtataaacatgctacacatccacaactcttcctcttacttcccctcttacaactgcttccttccatctactgtcataggtcctcatcgccccattggaaatctcctttagcccttgaatcttaagtatggcagtgttaaaagtgaaaaactactcattcagatagttttacaagataactcagaagaaggtggatacattccagaatgtcttataataatgtagttattaagtctagttatgaaacagagatatgaaaaatcagtacagcaactaatagcaactgctattcagtcagaacctccttcatactaaagtgcaagatagcttctactcaaggaaactagttctaaatagtctggcacaaaattggatcaattttgtacgaaagctttttcatattttctctgttttgcatcagcactctgaccattaaagttcatgatataatattctataaagcaaatttctattttggagtttgcctcaaaatttctaattttattttta

SEQ ID NO: 340756 - DNA, 584 bp, Homo sapiens
gacaatagtgtacttttaagaaaataagggtacgttagcaaaaaaatgagttctcaaaaataatacaaagactgaaaaatacaattaattaaaattatcttagaacacagatataaaagctaaacataacaaaataagagagaaaagtcataatagtacagaggaggaatccaggaaatccaagttatggattcaaagaagaaattagtgcatggggacgggcaaatattcagcaatgtaataaagaaaaatgtttcagagcagaagaaagaatgatttgaagttagagagayttgataaaatgtcttgaactataaaatgtgtaagaaaaataatttgaattatctctgtgacaaagtgtaaatatttgcttattcatttaagaaaagataatacactgaaggcaattataatccctaggagaaaaataaatagctgtagaaagaatccttagaagaaataggaggcaaactaaaatatgctgtaattttgaacaaaggatgaaattttaaaaaggaaagcaatttgaacttgaattttataacattttctgttgagtagtgatatctagcgaaatagaatca

SEQ ID NO: 340757 - DNA, 573 bp, Homo sapiens
attttgattaaatgacagtgttttgaacaaaagtcagtctactttttttcagttaagaaataatcacacataaaccaacagcaggaatatgtattaacagtcactttaaaaaaagataaactgtacaaaggatgaaattaaaaggcagaagatagaaacctctcaaaagacctcgttgaaacaaagaaagagttcatcaaaacctgagagagattgtaacataagctctactctaaaagccgtattagarttagaacagtttaaagaagaatataaagcatcaggtatcctaggaaagaaatgtaagagaaattaatgttaaacaacattgaaagtccaatgataagtatcaaaacaagaataaaaataactgagacagtaacacaatcattaggttggaggaaattacacaggataaaatggagaatataattatataagaatagttatcttttagttaattatataaatcacacaaatgagatttaaaatagtatttctataaaattaaaaaataaatgagattaaagttttaactttctaggggaagaaaggtttacttacataaacaaa

SEQ ID NO: 340758 - DNA, 447 bp, Homo sapiens
aggctacaattcaatttaaaaaaatgatataattgaaaagcatatagacttacaggcataaaataatgcttaaaattatgaataattagtttttttgatttgatttttagttgttctttacaacagtgccatgaccatgrccaacatctacacataaccacaactttaaatctgttgaaatttaacagttggtttttttcagtcgctttcaggaataaattatatgtaaaagcagtgggctgctcagcaaacatgaatacataatcataaatgtaattatgcatgtccacatatatgcatgtgtacatagtcttaataatgtaggaaaaattcaaatttgaacttaattgtatcttgtttgaaataactcatgatattttatgatgtgtttaatagtggtacaaaatgcgtatgtttctttgtatgaattctttgtttttccaaaac

SEQ ID NO: 340759 - DNA, 502 bp, Homo sapiens
ttatcaaatgctttttgtctgtctatagatataattatatggtttttgtttgcaattctattactaatgtgatgtattacatttattgatttgcacatgttaaaccatttctgcatccctggaatgatacttacttaatcatgatattttagatgtgctgttgagttcggttagtgtattagtccattctcacactgctataagtagatacctgagattgggtaatttataaagaaaaaagtataattggcccaaagttcyacaggctgtacaggaagcatgatgctgccatctgcttaaattctggggaggcctcaggaaacttaaaatcttggcagaacaggtgaatcagggcatcttacatagtagataaggggcaagagagagtgaagggggaggggccccacacttttagacaaccagatctcatgagtactctatcacaagaacagcgccgaaggggaaaatcagcccccatgatccaaacaccttcaccagagcc

SEQ ID NO: 340760 - DNA, 573 bp, Homo sapiens
ttttgtatttctaatctcataagatttaaaaatggccatggcttaaatagactaatttatacactgaatgcatttgagcccctgccatagggtaaatcctaaccatcctggaagtggtgaaaatgaacaaagagctaagcatataaaatccattcagccaatggaagctgctattgttattacgatttacttctttctttctattaactcctacatacaggttttaatcaaaattaagaaagtactttctraaacttagaaattttcatttggggagtgagcttcttgtcaacccgcacaaagtgtgagcttcttgtcatcaagacatagaagtcaaaggagacccttacattgggttgaggttataaattaaaagaccaataatgtacttttgacttaataagccgttaacattttgaaaatcaagtttagctacatcatcgctctttccctttccagtaatcaaaatgaatactttctagctcttgtatagaactgattggggaacacggaaggaaaccaccttagatctgcatatgctgcaggacgtgaatactcagttgtgttcctcat

SEQ ID NO: 340761 - DNA, 582 bp, Homo sapiens
ccagtatgtgagcaaagcacccattctaggaagaacagctctgggaccatctgtcctactagtcctgttggrgaatgtttagtagggaaaacaaacaattggactaaatatcataggtctatgtgatctagttgcctctgaaaaatggcttcctctatttcctcaatttccctttttgcagcagggtttaaatacctagaggagtctagggctgcattgccctttaggatagaaaacaggttctgtaatttgacagtagttgtgcccaaggtggggtgaagccagttaatatcatccagtaatttttgataaacatttaaggtaagttgtcagtgttcaatttaaccttttgaggtctcattgaccgagaagtttgtatgcatccaagatatttccaaagagaggacatctgtactttttcaggtgctgtgattaaacctcttaactgtgtattctttttgacagaggcatataaatttaaaagtatcagctctgttggggctgccagtaagatatcatccataaaatggatgatcttgcaattaggaaatgctttcctactggggagcaaagcttgagtta

SEQ ID NO: 340762 - DNA, 621 bp, Homo sapiens
atctataggcatacttcattgtattatgcttttctttattgcactttgcagactttgcattttttacatattgaagatatgtggcaaccctgtgttgagtaagtctattgcaccatttttttaaacaccgtgcactcactttgtgtctctgtgtcacagtttggtcatgtttgcaatataccaaacttttccattcttattatatatgytatggtgatttgtgatcagtgatctttaatgttgcttttgtaattattttgaggtgccacaaactgcatccatatataacagcaagcttaatcagtaaatgcgtatgttctgactgctgcacaaactggccatttcctcaatctttcttcctcttcttgggccttcctattgcctgaaacacaacaatattgaaattaggccaattaacaatcctacaatggcctctaagtgttcaagtaaaaaggaaagtcacacatttctcactttaaatcaaaggctatgaatgattaagcttagtgattaatgcatgttgaaaatttaggtaggctgaaagctaggcctcttgcactaaacagttagccaggctgtaaatgcaaaggaaaagttcttaaagaaaattaattgtgctac

SEQ ID NO: 340763 - DNA, 567 bp, Homo sapiens
taggggtctgggtagataatcaaaccaaccacaacattcccttaagccaaagcctagtccagagcaaggccctaactctcttcaattctgtgaaaggtgagagaggtgaagaagcttcagaaaaacaaaattggaagctagcaaacgttggttcataaaatttaagaaaaaaaagctatctttataacataaaaattacaaggtgaggcagaaagtgctgttggagaagctgcagcaagttatccaaaatatctagctaagataattggtaagggtggctacactaagcaacgaatttccaatgtagacaaaacagccttctattggaaaaggctaccacctatgacttttatagctagagaagacaactcaatgtctggtttcaaagcttcaaaagacatactgattcacttrttaggggctaacacagctggtgactaagttgaagccaatgtttgtttatcacttccaaaatcttatgtacttttaaaaattttgctaattctactctacctatgctttctaaatggaaaaacaaagcctagatgatagcacatttgtttacag

SEQ ID NO: 340764 - DNA, 580 bp, Homo sapiens
gcttcatttactcaacctctcaatgtcatttgacatggctgatcactccgtcctccttagaattctttcctgactcaggttccaagataccatattctcctgctttttctcctccctgtcatgrctgctccttctcagtctcctttgctggttctttcttattaccttgacttccaaatattggaggcccccagggctcattcttgcacctcttttcttctctatccatgttctcttgatgatcgtatccagtattatggttttaaatgctatttacttctgtctctcaaatttctctccccagccaaaaactctctcccaaatgccaaacatatatatgcaactgcccttccatcacatctactgaatgtcctagagtaacttaattttaacacatgcaaattcaacttctgattgtatccctcaaactactttcttccagtctccaacatcttagaagtggcagcctaatccttccaagtccaggttaaaaaccctgtactcacacttcattcctctgtttctctcataccccataccaaatctatcagcaaatcctatttactgtttgtaaaagtca

SEQ ID NO: 340765 - DNA, 562 bp, Homo sapiens
ctgtaggtgtgcttcatttttttttttattttgtctcctctgattgtgtattttcaaatagcctatcttcaagctcattaattctgtcttctgcttgatccatttttccattaaagaactctaatgtattcttcagtatgcattttttagctccagaatttctgctcgatttttaatacttatttgaatctctttgttaaatttatctaagaaacttttgaatttcttctttgtgttaycttgaattttttttagtttcttcaacacagctattttgaattctctgtgtgaaaagtcacatatctctgttttgccaggattggtccctggtggcttatttacttcattgtttgaggtcatgttttcctggatgatgttgatgctagcagttgcactttggtgtctgggcattgaagagttgggtatttattgtagccttcactgtctggatttatttgtagccatacatcttgagaaggctttccagctatttgaaagaacttgattgctgtcttcttaggtgtttctgctatagtggacaccccaggcacagtaattctgt

SEQ ID NO: 340766 - DNA, 564 bp, Homo sapiens
caagtttacctagataacaaacctgcacctgtacccctgaacttaaaataaaagttaaataaaaaataataaaagtaagcccttatttgtaaaaatttaaaaagaaatataatctccaggtatatttcctgctcttaaaaatatttaattaataaagtaattaattcatttttttttaaagttgatgggtaaacaagraagtgtctccagaaaccacagagcctactgaggcacctcctaaccccaaaacaacaacaacaacaaaaagggcaataaaacaatcacaacaagaatataattacaatcacatcagatagggaaacattattaaatctagaattcagccagcaatcaggatgagcctggtggcccaattaccgtctaaacaagagctgttatgtattgttaaatggactctccagataaatattttttttttactccaggcttttgcagcatcaaagaacattaaacatgagagagatgtgttataaacaaaaaatttgaggaaagcaaaagtagcttgaaccatgctagtgaaatcctagaggctcaaaagatgta

SEQ ID NO: 340767 - DNA, 550 bp, Homo sapiens
aatacaaacctactttaataaataaaagaaacacaggtagctgcactcagggagaacattcagttcctgatggcctcttagtcttctctgagactccactgccacttctacctgggcaagtctaatggtgcagccatgaagtttttaaccatcttgtctcattaatgccgtggtgccagactgcaccacaacaccagctggcacatgacagaggattcatgctcatgggaatcatatttgtcaccaatgggtgtcagcttctcaaggccatgcttggcaaacacacttttcagctttgcttctaaaagtgacaaccgttggaagaccttctccagagtgagcttctggtccccagrctctgattcttcagaaatgcactctgtagtcttctccaaaatgtcagccacctccaccaagtccttacagaaactctggattccaaatatcttggcgtcttccacacatctccgggttcacctccttatgttttcacaatcagctatagctctccggtatctcaccattaaatcctggacttccttctccagtt

SEQ ID NO: 340768 - DNA, 545 bp, Homo sapiens
agctgtttctatactgctttcccctccaatccccaatgggataactacatgttactttaccattccatactcactttgaatagcaaccaaaccattttgggatgatgatactttgaaacaacaaagcaacattgctgacagtctttctacattgatttccttttagaagaatattgtttgcttgtttaacgaatgtatgaacatgttaaactttctttgtcttttatggctgacagctcaggataattcctcagacaattttttaaatgaacaccctcttgaaacatttggtctcttctttttatcaaccactgctcagtgatctttgggaacactctcaatccttttcttgattttgatccctacctttttttctatctgtgagcccctaataaccccaatgaaggccagaaagcaagggamgggtagtactagtgatgcaaaatcctgagatttttaagtgaaataagcaatttaaaaaacactatatcataaaacttgacaggcaggtggcatgcacctgtagttccagtcactcagctgtt

SEQ ID NO: 340769 - DNA, 569 bp, Homo sapiens
tttccacagctgaattactttcaccttcatagctccttgcacactagagataagactcaagcaaaggatcaccagtccctacgatgtgatacccttcccccaaatatgctcttcactgagaaaattgattctcttctgtgctgaaaaagaagtagggtcattcattggtcaagaccagtatagctgaactgggctttctccagttctttgtgttagagaggcaggagggtgcccrgatcccagcaacagcttagtggaactatcagctggtgagtcagcagctactgccactagccttactgttcttttgagaagttgagggaaaagatgaactagatcctgtctctggaggtcgtgggggcatttcaggagagctaagataaatcccatgtgctgtatgtgtcccccagggtattaactgctataatccataattcctaagatcctttttgttgtaatgtcagtataaaatatgcaacattaggaataataccctggggcaaagtataatgccatatagtaataaacttgcatgcctactttcttaaatatatatatatttaaaaatc

SEQ ID NO: 340770 - DNA, 592 bp, Homo sapiens
gtatgatggttacctaaagtggctgcctatgtccagtgatggcttttgtttagcgatcatggtcaagttgagcttgtttaaataccatttcccaggacttgcatgctactccctgaacgacaggaatactcaaagcttttagagagaataaactattgtatggtctctgcctaggaagcgggccacagttcactggaaacagccagttcagataaataaaatgaaagcagacatttttggagatggtcttgaaagctttccattagagaacatcaagggcatagaactaggaatagcatgtatccatgttagactactacaagtcactttatcctctatcctttctgagtaatacaaagtactcmtctccttcattggataaccaaataattcacacagaacacaacacacacctctctccctggccaccaagagacatttgactcctatgatacaattgaccacagaccatcagaatacaaagtagtggcttatttacaaagcttttatattaaatttgggaggaaaagttacattttaagtataaacacttgaggaaacctgattcccacttctggcacataggctgcac

SEQ ID NO: 340771 - DNA, 555 bp, Homo sapiens
aaaatatcttaaaaatccaaatttcttaagtgaagaaatccatgtraacttttcacattatttttcaaaatgttcaaaatctgaggataatacttacacattatgagcttaaatgtcaagttaatttaaaactactacaaagctggaatggcaattacatacttacactttactcaacttttcaagtacgatgcgttttctaatctggttctgggaacttgagtctatcagtggaaaggtggaatcatgctgaatcacatttttaaacaaagcaaaacagaatcataagtttacattctttctttgataagcagaacaataaacattaaaacacaaaagtttgtatctgtggcacagtaggaaaataactagacttgagaattagatttaaatttgagtatcaactcagttgttaggctgttgtgaacttctttgagtcatttgccctctttggagagtcagttttctcatctttataattgggatattaatacctcctttattaaataataaaatgtaaacaaaaagattttgtaaactgctaagtgctgtaca

SEQ ID NO: 340772 - DNA, 539 bp, Homo sapiens
aaggaacattgcaagtagaaagagscagcagtaaggatgcacgtagcagtctagaagtagaggtgagaccagcttggagatgaaatgaggagatgtcttctgttctgtgctggagaagtactggtaagtgtggtgtggttgggattcacaggcctcagccatcctcactttggtacaagttattttggtacagaactactagaatgtcccaaaggctgtagtacaggaacatttctgaaaggacaaaagctgccatgaatattgagaaattgtatggtgccaggtacagcctggatctgagcaagactgctggatggtgtgtggatagatagtgaaggcccagatttgggaacagattggatctcagatatccagagcagcactgtagaatctagttgcatataataatgttttaaaaagggtatcttaggctgggcacggtagctcccgcttgtaggcccaggcctttgggaggccaaggtgggcagatcacttaagcccaggagttcaagaccagcctgggctgcatggcgaaaccc

SEQ ID NO: 340773 - DNA, 539 bp, Homo sapiens
aaggaacattgcaagtagaaagagccagcagtaaggatgcacrtagcagtctagaagtagaggtgagaccagcttggagatgaaatgaggagatgtcttctgttctgtgctggagaagtactggtaagtgtggtgtggttgggattcacaggcctcagccatcctcactttggtacaagttattttggtacagaactactagaatgtcccaaaggctgtagtacaggaacatttctgaaaggacaaaagctgccatgaatattgagaaattgtatggtgccaggtacagcctggatctgagcaagactgctggatggtgtgtggatagatagtgaaggcccagatttgggaacagattggatctcagatatccagagcagcactgtagaatctagttgcatataataatgttttaaaaagggtatcttaggctgggcacggtagctcccgcttgtaggcccaggcctttgggaggccaaggtgggcagatcacttaagcccaggagttcaagaccagcctgggctgcatggcgaaaccc

SEQ ID NO: 340774 - DNA, 488 bp, Homo sapiens
ggtctttggcttgtagatgcattatcctgttctctgccttcatgttcgtatgctgttctccctgtgtgcttgtgtctgtctccaaactttccttttacataaggacaacagtcatattggattagggcccaccctaataatctcattttaaattgattacctccataaccctatctccaaataaggtcaaattctgaggtactagaggttaggactccaacatatcttttttgggggagatacaattcaacccataacaatatgtatgtgtgtacatatctctgtgtgtgtgtataatatrtatatttgttttgtttctattttagcccattgtaccttttgcagtttaatatggggcacattgaagtctttttgcaaaggtaagatcgtttagatggtatctcaaaatgaaatagtagtgttaaaatagtccttgttaagatcagcggagactgccttttctttgctaagctctaattaattaattg

SEQ ID NO: 340775 - DNA, 608 bp, Homo sapiens
ctgggtgacacagcgagactytatctcaaaaaaacaaaaaaaaaaacaatcattggttagggaccctccatcctccttggaagtaattccttggttccacttgcttccatcctccttggaagtaattccttgggtttactgttatgactttatattcactgttccatttatataaaaaatggccagtattggacactatgtagcctttgttactacttcctacttgtagatatttggagtcctaaagcttcttttgttgctgtcctgttcctaaaccatttagtcttaagatggtggtgtaattctcttaaaaactttgtgacttttctacaagcctttttggaattcactcaatcaaacaaaaacaaaaaatctccacccaccaattgtgtcaagacaagctcctttggccacctgggaaactactgtgcaataacatcatcgagtctattctatcatccatactcttggtttatttacccgaagattacattttcctgccttggaattagtcttttgcttgagaccatgccatacttggagaatattttactagaagagatggagaatgagagacagttctaatttcatttctaacatgtcctaac

SEQ ID NO: 340776 - DNA, 520 bp, Homo sapiens
atcagtactgaggcaattctttgattacgttgctgaggttccctggcggtgctcacctggcagaggctggtatagatggtcaaatatggctactcccatagctgaagtcttcacaggaatgtctagaagcctggtttcttccgagactatccactgaagtrcttatatgtgtcctatctagcttggcagtcttaacatgaagaacttcttacatgtgtcttagggctccaaagaatgtgttatattagatctgggtgaaaattgaaggcgtctaataacctagcctttgaaatttcagattgtcacttccactgctttcaattgatccagcaagacattccaatctagattcaaggtgaagaaaagcatagtctccctctcactgggaggagcagcaaataatttgcagccatttttaatgtaccacacatttctactacacagaatcattttcataaaaacacataatgtgatatgggcttttgggcatctttgatatgaatgttgttttgcaactagc

SEQ ID NO: 340777 - DNA, 520 bp, Homo sapiens
atcagtactgaggcaattctttgattacgttgctgaggttccctggcggtgctcacctggcagaggctggtatagatggtcaaatatggctactcccatagctgaagtcttcacaggaatgtctagaagcctggtttcttccgagactatccactgaagtacttatatgtgtcctatctagcttggcagtcttaacatgaagracttcttacatgtgtcttagggctccaaagaatgtgttatattagatctgggtgaaaattgaaggcgtctaataacctagcctttgaaatttcagattgtcacttccactgctttcaattgatccagcaagacattccaatctagattcaaggtgaagaaaagcatagtctccctctcactgggaggagcagcaaataatttgcagccatttttaatgtaccacacatttctactacacagaatcattttcataaaaacacataatgtgatatgggcttttgggcatctttgatatgaatgttgttttgcaactagc

SEQ ID NO: 340778 - DNA, 525 bp, Homo sapiens
atacagcagcatttgacaaattctgtatgtgttgttaagagaataaggattgcggaagcaatcatatctagctgaggtgatgtgaaatgactaggtggagcagaaaatatcttccgttgaagagtgggagaaattttagaggacggagaaagaaggtttggtaccaaggaagtgcactgtagacagaatgccaaagactttggagatgcttaggaacaaagctactttttaaatgcctggatccattgtcatatcatcagatagcctttctaattttgcattgcaaatcacaaataaaatgccctcagggttttatcagttgactctcaagaatcaattggtattaaatataattcctgtaaatataatacatactgaaatattaggtcctattattattattatgcatattagtgaatatatctttaaaattattgttttaattagattagactaactagaatggcaaytgtcacttatgttactatccatggtattatgttaagagttctagtacactagcta

SEQ ID NO: 340779 - DNA, 483 bp, Homo sapiens
ataaggtctgactgcttgcagggtcaggcagaatacagccatatttttcttcttgcagggagcctataaaaggacgtgtgagtaggagaaatatcgctgaattcttttcccagcaaggaatattaataattgataccctggggaaggaatgcattcccggggagagatctatagacggccactctgggagtatctgtcttatgcagttgacataaggattgaaatatgccctggtctcctgcagtaccctcaggcttgctaggatagggaaattccagcctgrtaaattctagtcagaccggttctctgctcttgaaccctgtttcctgtaaagatgtttatcaagacaatgagtgcacactgggacatagaccctcatcagtaattctaattttgccttcaccttgtgatctttattgctctttgaagcatgtgatccttgtgacctactccctgttcatacaccctctcccattttaaaat

SEQ ID NO: 340780 - DNA, 572 bp, Homo sapiens
attgatacattggatgagatctatttaagaactttggttgttctttaaaaaaattcatattattttmtattttaaattattcagtttgcatacatatttgtacataatgcaaatgcttcctgttatcttcaatatatttggaatatactgttgctgaaataattagatagcttagtggccaagagcagaggttctacatcctaactgtttgtgtttgattataaattctactgtttaaaagctgcagacattaagcaaattatttagtctttctttgggcctccttctgattgattgtaaaaataggataactaacctcatagggctgttgtggaaatggcatgaattagtatatatctggcatataatatgtttgcaatatgttagcaaaaatgattggaccataatctaatatgtctagcagtttatatagtacttatttaaataagacattataaagcttaccttatatactatacaaagccatataaatagataatttcactgtaaaatagccttttatgacaaagatgagttaatttcctacatcttctgtcatagttgttagacaa

SEQ ID NO: 340781 - DNA, 480 bp, Homo sapiens
actatgagaacggtataaatctgtacatttgtatatttagaaatttttccaccaatatatactcattatcttaaaaatyccttgagagtaatctagagttattttaattgtcatagttcaatatgcaagtcattaaatacctttctaaaatattaatattataattaatattgtcactccattattttatatgtagctaagtaataagaataaaaaataaatcttgatatacaaaacttccagaaaataaactacatctcccacattttataaaataatacttaagaactaccctagttgacctagagattacaaataaatatgtatatttgtacataaaatatgtatatttttacataaatataaaattattttataaaataatacttaagaactaccctagttgacctagagattacaaataaatatgtatatttgtacataaaataacagaaaaaaacacagaaaattagggctttt

SEQ ID NO: 340782 - DNA, 598 bp, Homo sapiens
tagttgacctagagattacaaataaatatgtatatttgtacataaaataacagaaaaaaacacagaaaattagggctttttccctgcacaatttggatctcaaattaaagaatttaatatttgttggctagatttaatacattgtgagtaaattgccatcctgtcctcagaacttcttcctcaaatattttctgagttctaagaaatttgtttataaattcaatgcttggccccacaattcaaataactctaatgataatttttatatccatacatttagacratacaaacaatgtattaatccagctgttattttattggctaaactatgtgcttggaacactgagagagaaaaattacctaaatatatattttttcagggttctcaaaaaaaaaaaaaatagaagtagaattgagaattacattagtccattctcatgctactgtgaagaaatacctaagactggataatttatgaaggaaaaaggtttaatggactaacagttccacatggcttgggaggcctcgggaaacttacaatcatggtgtatggcacctcttcacagggcagcaggagagagaatgagtgccagcaggg

SEQ ID NO: 340783 - DNA, 553 bp, Homo sapiens
aaatataaatgcaaacatgcaaagggaaaaaattagcctaagctttcctgaagaggaatgaagtcgaagtatttatagcattgacagctgagacaccaccattttaacactaaattgctataccaygaactgacagaaccctgtgtcgaggacgaaaaactcataatacacccaaagtgaagaatcatatagcagcatgaaggggggaaaatgaactaaatgggagaagtgtgtatgacaccaactgcacttaatttgtgagttgtggaaaataaaaggcatagggtgtgaagaatggggttccaggttctaactaactgtacatcctttaagcaaattaaggttcttttagctcatctataaagtgaattaattaagccagataatttctaaagtccatcttgactctaaatcagatcctagcaaaaacaagaaatctaccacttcagatccttatgaaacctaggaaaaatatgaaatgctaaaacacagcaatgatattaaaactgttcggaatgaacacagaactatagggcattattataatggatta

SEQ ID NO: 340784 - DNA, 553 bp, Homo sapiens
aaatataaatgcaaacatgcaaagggaaaaaattagcctaagctttcctgaagaggaatgaagtcgaagtatttatagcattgacagctgagacaccaccattttaacactaaattgctataccatgaactgacagaaccctgtgtsgaggacgaaaaactcataatacacccaaagtgaagaatcatatagcagcatgaaggggggaaaatgaactaaatgggagaagtgtgtatgacaccaactgcacttaatttgtgagttgtggaaaataaaaggcatagggtgtgaagaatggggttccaggttctaactaactgtacatcctttaagcaaattaaggttcttttagctcatctataaagtgaattaattaagccagataatttctaaagtccatcttgactctaaatcagatcctagcaaaaacaagaaatctaccacttcagatccttatgaaacctaggaaaaatatgaaatgctaaaacacagcaatgatattaaaactgttcggaatgaacacagaactatagggcattattataatggatta

SEQ ID NO: 340785 - DNA, 530 bp, Homo sapiens
ttctttataaaacagaaagctatctttactttatrgactatgctgtactcagttactttatccataaaaggagaaatatgtgaaacatgttggtcagtgcctgggtctatcaaagcagggtgattgtgctccatccactttgttaaaatataacatgttcacctatcattaacttgctcaagtttatcagtgattacttcccaaattgttccatctgcactatttatcaataaatggtaccacagtgccaaaattcaaaacccacaaatatgggaggttttgaaaccatcctctcacacctccattttctattaatcatcaaatttcatacattttacctcttaaatatctctccatttctcatctctgtttattttcttcagctttactgccaccatcttgtttcaaggttctattgtagcttcttcgaattacagaaatagttccacagtcttccttattcattattctcattttccaatccagaataatcttcacattgcctccagacaatcttgctaaaatgaaaa

SEQ ID NO: 340786 - DNA, 530 bp, Homo sapiens
ttctttataaaacagaaagctatctttactttatagactatgctgtactcagttactttatccataaaaggagaaatatgtgaaacatgttggtcagtgcctgggtctatcaaagcagggtgattgtgctccatccactttgttaaaatataacatgttcacctatcattaacttgctcaagtttatcagtgattacttcccaaattgttccatctgcactatttatcaataaatggtaccacagtgccaaaattcaaaacccacaaatatgggaggttttgaaaccatcctctcacacctscattttctattaatcatcaaatttcatacattttacctcttaaatatctctccatttctcatctctgtttattttcttcagctttactgccaccatcttgtttcaaggttctattgtagcttcttcgaattacagaaatagttccacagtcttccttattcattattctcattttccaatccagaataatcttcacattgcctccagacaatcttgctaaaatgaaaa

SEQ ID NO: 340787 - DNA, 540 bp, Homo sapiens
aatctttttgctccaggaattcccctcagttcaattatcatatccaggagaagacataagtcttacctatttgttcatcatctaacaatttccaattaggtcattgatatccaccagccagagccactgaccattcaaccttaccaaaacccaaaggactataaaataatttgagtgacaaattacgcctttttgtgatcataatttaamtttcctaggctgcttgaataatagttactatggaattgggttgaaaagtagattgatacttctactaaaggtagtaatgtttcaaataatattcatatcacattttcaccatgtctatacctaactagaagcaggtttgacagtaagatagacccattagtcaatgaatagattgaggacatgtctagatttgacatctttttagtataaagagaaattgtttttattattagtccctaataatgaactcagtcaaccatcagagttgtaccatttttcatattggaattgaatttcaaataatttttaatgttaaaagtagatttttaa

SEQ ID NO: 340788 - DNA, 549 bp, Homo sapiens
ataagaaggggtgtgtgtgtgtgtgtgtgtgtgtgtaaaatttaatgatatttagtttcccttttagtgttttccaagacaaaattttgaatggcttattactttataagtaattctcttcatttcagtatttcactaaaaatcctaaggttatatgtttttagatttttttttttttcatattgggctctgaggatgtattctcaggactttcaatgtcatggttatgagcttcacccccatgttgaagtttactcgaatcctctttaatgcctggggattcctggcagcttgtatttgtatgtataaaagataggctaaatctccatgggaaaacattcaaattaggaacaaatgtaccgctgcttactttatacattaaacatttttctccaaatatttcaaraatgagagttttaaaaaattaatatcctgagtatttaaaaataatgatctttagttactattaattttttcattttatggcaattaacattcttggatatctggatcctttataaatccccttctgtccttcttctatgaaac

SEQ ID NO: 340789 - DNA, 571 bp, Homo sapiens
aagttgcattgtgaatgtaatctttccttataaaatgtaattgataaakgaagactgaatctccaaagaaacatgattctgtcttcactaaaagcaaattcatgtttattatctaggaaacaaaataaagtagcacaagaagaacttagctattaagccagaggaagttgtactgtgctaaagaatggaatggtgactgatattcttgaaggcacctctaaaaatcatgatcatagagctcattggtaatatagagtacattattatagaaaaaacatcagactcagagtcctatctcaataaataagtgctcaataaaagttgccaattaattttaataaattataattgcattattaattatactatgtaggcatatgtttgtatgcatgtatttatatatgtactaggaataatggttaagaggatcagccagatttggtttcaagtcctagctctgccacataccaactagtgaccacaagaagattgttaatgtatctgggcctattgtcctcatctatttccttggactgttgttagtaccagagacataatgcataaagcttgc

SEQ ID NO: 340790 - DNA, 571 bp, Homo sapiens
aagttgcattgtgaatgtaatctttccttataaaatgtaattgataaaggaagactgaatctccaaagaaacatgattctgtcttcactaaaagcaaattcatgtttattatctaggaaacaaaataaagtagcacaagaagaacttagctattaagccagaggaagttgtactgtgctaaagaatggaatggtgactgatattcttgaaggcacctctaaaaatcatgatcatagagctcattggtaatatagagtacattattatagaaaaaacatcagactcagagtcctatctcaataaataagtgctcaataaawgttgccaattaattttaataaattataattgcattattaattatactatgtaggcatatgtttgtatgcatgtatttatatatgtactaggaataatggttaagaggatcagccagatttggtttcaagtcctagctctgccacataccaactagtgaccacaagaagattgttaatgtatctgggcctattgtcctcatctatttccttggactgttgttagtaccagagacataatgcataaagcttgc

SEQ ID NO: 340791 - DNA, 538 bp, Homo sapiens
gactgatgagtttactaatggtccttgttttctccttgttctctgagcactgattttttttctctgactagtgaagttttgttgtgcaactttataccttataaacacacatgcacaggcacattgattaaatttgcattcaggcactatattattttaaatagtggctggcatatatcacaatttcatcagataccttttctagtaataataatgaaatacatctaataaggcatatgttagtagccctgtatatgaagtagtctaacttaaaaggagatgcatgcagctgtcagaacttaaaatctaaagaacaaaacagaaacttarcctcccaaaatggcaagacttttctatgcctgtctggatatatgattataaggtgaagaacaaagttttgaaataagtaaattctccctttgctgttcttcacgtttctatatccctttttattccttgtctccagtgcccaaagactgaactaagcctcctattgaccaatgacctctcccaatataaatcttcagcagcactgggt

SEQ ID NO: 340792 - DNA, 538 bp, Homo sapiens
gactgatgagtttactaatggtccttgttttctccttgttctctgagcactgattttttttctctgactagtgaagttttgttgtgcaactttataccttataaacacacatgcacaggcacattgattaaatttgcattcaggcactatattattttaaatagtggctggcatatatcacaatttcatcagataccttttctagtaataataatgaaatacatctaataaggcatatgttagtagccctgtatatgaagtagtctaacttaaaaggagatgcatgcagctgtcagaacttaaaatctaaagaacaaaacagaaacttaacctcccaaaatggcaagacttttctatgcctgtctggatatatgattataaggtgaagaacaaagttttgaaataagtaaattytccctttgctgttcttcacgtttctatatccctttttattccttgtctccagtgcccaaagactgaactaagcctcctattgaccaatgacctctcccaatataaatcttcagcagcactgggt

SEQ ID NO: 340793 - DNA, 590 bp, Homo sapiens
agccactcagacaacatcctgtaattgtattgtagtttcagtttctgccttccaatctgcctcatgatctggtcctaattatcacagctttggaactcttaccccatcttctatgacttcttctttgtcctttggacatatcctctgagatagcccctctaaaaaccacatcgattcctgtctaacccattttggctcctttctttgactgcgatgtacacccctcagactacaaatacttccaaccacatggatgtcagccaagccttaccyagtctggctttggcttctcagtattaacctatgtggctggtagtccttttggattcacctattacttcagataaggcctctggccaatataatagatgttaatgaattcactttttaacttaatatataaacgtgtagagaaatattcccctgactaatctttcccctctctccctccccaccgctcttctctctctctctctctctctctctctatatatatatatatatatatatatacacacacatacatatttttttttctttgaaatagaggctagtctttaagcagttgagttactttcccaaagcagaaa

SEQ ID NO: 340794 - DNA, 543 bp, Homo sapiens
taatgaattttatagcagaaagaaaatgaaataatgcataaatctaatatggcaaatacamtggaattcagaaaattaaattttaatacgtttcactttgtagcttcttggttgggaatgatgtgatgtctgcctttattgttttatatctataaaccttgtggtaaaaatcattacagtatatggtctatcttcaactaacctagtaatggtaaagctacccagaaatgaaatatgaatttaaccaaacaatgaatcaaactgcctcaaataatcatatatgccctttatttctgtaatatctgtgttctgcacattcccacctgacaacttcatgttcaagttattagaattggtgatatttttacagcattagaccaatataataagaagaaaaatctaagcatataaagtctttcttaaatcaatagagcaaatattgttaaatataaatagtaaacatatgcgggcaaaaacccaaatagatatttcacctagaataattatttccatagtgcattttgggacacgtttctattgcct

SEQ ID NO: 340795 - DNA, 543 bp, Homo sapiens
taatgaattttatagcagaaagaaaatgaaataatgcataaatctaatatggcaaatacactggaattcagaaaattaaattttaatacgtttcactttgtagcttcttggttgggaatgatgtgatgtctgcctttattgttttatwtctataaaccttgtggtaaaaatcattacagtatatggtctatcttcaactaacctagtaatggtaaagctacccagaaatgaaatatgaatttaaccaaacaatgaatcaaactgcctcaaataatcatatatgccctttatttctgtaatatctgtgttctgcacattcccacctgacaacttcatgttcaagttattagaattggtgatatttttacagcattagaccaatataataagaagaaaaatctaagcatataaagtctttcttaaatcaatagagcaaatattgttaaatataaatagtaaacatatgcgggcaaaaacccaaatagatatttcacctagaataattatttccatagtgcattttgggacacgtttctattgcct

SEQ ID NO: 340796 - DNA, 543 bp, Homo sapiens
taatgaattttatagcagaaagaaaatgaaataatgcataaatctaatatggcaaatacactggaattcagaaaattaaattttaatacgtttcactttgtagcttcttggttgggaatgatgtgatgtctgcctttattgttttatatctataaaccttgtggtaaaaatcattacagtatatggtctatcttcaactaacctagtaatggtaaagctacccagaaatgaaatatgaatttaaccaaacaatgaatcaaactgcctcaaataatcatatatgccctttatttctgtaatatctgtgttctgcacattcccacctgacaacttcatgttcaagttattagaattggtgatwtttttacagcattagaccaatataataagaagaaaaatctaagcatataaagtctttcttaaatcaatagagcaaatattgttaaatataaatagtaaacatatgcgggcaaaaacccaaatagatatttcacctagaataattatttccatagtgcattttgggacacgtttctattgcct

SEQ ID NO: 340797 - DNA, 562 bp, Homo sapiens
ggttgtgggaactgtaaatgtctccagacattgtgaaatgttaggttagcagcaaaaattgctttcttttaggatctactgagttaggctcaagtattgttgacctatgcaccttcgggatagctttctctattatcatatattacctgctgatttcagcattcaaatctctgagaatgtaattttccktattatcttatccttctcttccatttctcaatgagtaagaatttttcttcatggagagtagtagtaaactgtatataaaggcgattttaatcagagagatcaaggtgagtaaaggaatatggaaacaatatatttggagaaaaacaaagccaagacagattagagagtgcatctgacagtcttaaactcaccttaattaaaatattaacctcatctatattctattgataaataataataatcaatgttgaaaatttagaacattttaagaaaaatgctgagttacctgtttattgtgtcttggggcttaccaaccctcatgagataagtactatatttactcccatttcatacatgagaaaactgaagcaac

SEQ ID NO: 340798 - DNA, 562 bp, Homo sapiens
ggttgtgggaactgtaaatgtctccagacattgtgaaatgttaggttagcagcaaaaattgctttcttttaggatctactgagttaggctcaagtattgttgacctatgcaccttcgggatagctttctctattatcatatattacctgctgatttcagcattcaaatctctgagaatgtaattttccttattatcttatccttctcttccatttctcaatgagtaagaatttttcttcatggagagtastagtaaactgtatataaaggcgattttaatcagagagatcaaggtgagtaaaggaatatggaaacaatatatttggagaaaaacaaagccaagacagattagagagtgcatctgacagtcttaaactcaccttaattaaaatattaacctcatctatattctattgataaataataataatcaatgttgaaaatttagaacattttaagaaaaatgctgagttacctgtttattgtgtcttggggcttaccaaccctcatgagataagtactatatttactcccatttcatacatgagaaaactgaagcaac

SEQ ID NO: 340799 - DNA, 562 bp, Homo sapiens
ggttgtgggaactgtaaatgtctccagacattgtgaaatgttaggttagcagcaaaaattgctttcttttaggatctactgagttaggctcaagtattgttgacctatgcaccttcgggatagctttctctattatcatatattacctgctgatttcagcattcaaatctctgagaatgtaattttccttattatcttatccttctcttccatttctcaatgagtaagaatttttcttcatggagagtagtagtaaactgtatataaaggcgattttaatcagagagatcaaggtgagtaaaggaatatggaaacaatatatttggagaaaaacaaagccaagacagattagagagtgcatctgacagtcttaaactcaccttaattaaaatattaacctcatctatattctattgataaataataataatcaatgttgaaaatttagaacattttaagaaaaatgctgagttacctgtttattgtgtcttggggcttaccaaccctcatgagataagtactrtatttactcccatttcatacatgagaaaactgaagcaac

SEQ ID NO: 340800 - DNA, 573 bp, Homo sapiens
tcaaaactatgtttctgaattttgtttccattatatctgtgaaaataaaaagtaaacaatgaggggaactgtagtatctctacagttcaagactggctacaatcagctgcctctgaactaggcaagatgactcataatattaattgagaaagccttaggggaatgttctagttagactggcatgcaatagyggtaaaataacaatgtgtgggaagcactattataaagggcatttcaatcagagagatcaatgtgagcaaaacaatatggtttgctattattttgttattatagttaaagatggttttctattattttgttattattattaaagttagatgattttccatcattttattattgctgttaaaggtgaaatatctttgtatattcttttgcattatttcttgagacaggtagatgagaatggaaactcctccccacgttttaaaattcacattgatgtgaatgtgtttttatcaccttaagcaactgctgtttataatttaaccatgtaagagaaacaaggaatgacttccagctaaaacaagtatagctcaggtcctctgtcca

SEQ ID NO: 340801 - DNA, 573 bp, Homo sapiens
tcaaaactatgtttctgaattttgtttccattatatctgtgaaaataaaaagtaaacaatgaggggaactgtagtatctctacagttcaagactggctacaatcagctgcctctgaactaggcaagatgactcataatattaattgagaaagccttaggggaatgttctagttagactggcatgcaatagtggtaaaataacaatgtgtgggaagcactattataaagggcatttcaatcagagagatcaatgtgagcaaaacaatatggtttgctattattttgttattatagttaaagatggttttctattattttgttattattattaaagttagatgattttccatcattttattattgctgttaaaggtraaatatctttgtatattcttttgcattatttcttgagacaggtagatgagaatggaaactcctccccacgttttaaaattcacattgatgtgaatgtgtttttatcaccttaagcaactgctgtttataatttaaccatgtaagagaaacaaggaatgacttccagctaaaacaagtatagctcaggtcctctgtcca

SEQ ID NO: 340802 - DNA, 633 bp, Homo sapiens
agtcaaatgctgttatatttatattgtccctttaaaattatgattaaacatttttatttgtaccgtctttagctgttactcaacatctgggtaaaatgtcagagtcactttttatctttcttaaatgcttttgttcctactcagcagctgggctgagagtcacactaaggaaacaacgtagactcctgccttactctgcgggctgctacaaaggaaggggaagccaggtgtgctaagggcagaaagtctttgttctgaagccctccttgatgcaatttgacctaaacaagttcaatctcacagcstgttctgaaacctgattgaatagtagttactcttacaaattaaggtaaagcaagaatacgtttaagactttaaaaaagactggtgattttaatggcttaggctttcattatgactcagcagcatgctggtagaattttgttttcaatgtcaggaagcaagaccaggatacaggcagtttaggtagagcaatcaacagagacacagagcaaaactgcagttgagcacagtgtttatgttcttgtgtctgggacaacttggttctctttgcgcggtgtttcttacatgaaaacaatagccctggcataaaaaacgatgtctctcaagtga

SEQ ID NO: 340803 - DNA, 558 bp, Homo sapiens
gttactcaacatctgggtaaaatgtcagagtcactttttatctttcttaaatgcttttgttcctactcagcagctgggctgagagtcacactaaggaaacaacgtagactcctgccttactctgcgggctgctacaaaggaaggggaagccaggtgtgctaagggcagaaagtctttgttctgaagccctccttgatgcaatttgacctaaacaagttcaatctcacagcgtgttctgaaacctgattgaatagtagttactcttacmaattaaggtaaagcaagaatacgtttaagactttaaaaaagactggtgattttaatggcttaggctttcattatgactcagcagcatgctggtagaattttgttttcaatgtcaggaagcaagaccaggatacaggcagtttaggtagagcaatcaacagagacacagagcaaaactgcagttgagcacagtgtttatgttcttgtgtctgggacaacttggttctctttgcgcggtgtttcttacatgaaaacaatagccctggcataaaaaacgatgtctctcaagtg

SEQ ID NO: 340804 - DNA, 634 bp, Homo sapiens
actcccttcatgtacaatgttcaaccatgtgaggtaattttctacttccagtcctcctgagtccttttcacagtactgaaagaaataatttctccaaattgttcctcagtggcccagaacagtgaaatcttcataaagacagagcttctataaacttacaatcagttgtggcagatctaaatgttcaaagttaaaacttggtgttgaagrcgtcaaataaaaagtcagtgaagaaacatttacattactgaaaagtccttaatgtttcactgctgttttccacatggaacaagacttggtaatagttgaagtcctttgaacaaaaagaggataactactatttaccttctaagtctcagaggaaagcctgagtaaagtcacttctcaactctccttgagaggaaccaggcaatcatggcagggactgaaagttaaagtgagaaagtgtcccttgaaaacacaactaaacgatttatcctatgatggttcaatatgcacttcttagaatataaggaaatgcttattttcctttaagaaactatgaaaataacaagtaagaaccttttcttgccatttttcttttctgcctgaatcttgatatattttatcctacagaagttacattttagccaaa

SEQ ID NO: 340805 - DNA, 634 bp, Homo sapiens
actcccttcatgtacaatgttcaaccatgtgaggtaattttctacttccagtcctcctgagtccttttcacagtactgaaagaaataatttctccaaattgttcctcagtggcccagaacagtgaaatcttcataaagacagagcttctataaacttacaatcagttgtggcagatctaaatgttcaaagttaaaacttggtgttgaagacgtcaaataaaaagtcagtgaagaaacatttacattactgaaaagtccttaatgtttcactgctgttttccacatggaacaagacttggtaatagttraagtcctttgaacaaaaagaggataactactatttaccttctaagtctcagaggaaagcctgagtaaagtcacttctcaactctccttgagaggaaccaggcaatcatggcagggactgaaagttaaagtgagaaagtgtcccttgaaaacacaactaaacgatttatcctatgatggttcaatatgcacttcttagaatataaggaaatgcttattttcctttaagaaactatgaaaataacaagtaagaaccttttcttgccatttttcttttctgcctgaatcttgatatattttatcctacagaagttacattttagccaaa

SEQ ID NO: 340806 - DNA, 644 bp, Homo sapiens
tactgtacttaaaatctacaaatatcataggagctaaagttttaaccaactctattagttacttattacaaataaaatccttccaatttctttacacaacagtctctattgagtcaggatacccagaatatcaggcaattagaaacacgaaattactatatctgttctgtcataaaccaggagatttaaaaatactttttaatgaacacaaattgctctatactacctccacattatagcaggctttccagaaactgacactggatctttgggataaaaatagttgaagacatcgagttggagaaaccatgtcattttttatgtgagtggcaagttacaacactaagtcgcaacatctagaggtgtgtgtaatccaagctgaaccggaaaatgttcttgaaagctgcaacaaattgatatatataaggctaggaaaagcaggttggtgaagaatcagcttatcatggccgccttttgttaaatcaaatttagcttaaagctgcctccttattagtttggcctgaagwtttctctgaacatagtgagcagtaacctaactcaatatgtaaatggcctactcttgtaacaagcagccctgtctcaggcaatcacagaagctacacttcaactactcacaggtgact

SEQ ID NO: 340807 - DNA, 644 bp, Homo sapiens
tactgtacttaaaatctacaaatatcataggagctaaagttttaaccaactctattagttacttattacaaataaaatccttccaatttctttacacaacagtctctattgagtcaggatacccagaatatcaggcaattagaaacacgaaattactatatctgttctgtcataaaccaggagatttaaaaatactttttaatgaacacaaattgctctatactacctccacattatagcaggctttccagaaactgacactggatctttgggataaaaatagttgaagacatcgagttggagaaaccatgtcattttttatgtgagtggcaagttacaacactaagtcgcaacatctagaggtgtgtgtaatccaagctgaaccggaaaatgttcttgaaagctgcaacaaattgatatatataaggctaggaaaagcaggttggtgaagaatcagcttatcatggccgccttttgttaaatcaaatttagcttaaagctgcctccttattagtttggcctgaagatttctctgaacatagtgagcagtaacctaactcaatatgtaaatggyctactcttgtaacaagcagccctgtctcaggcaatcacagaagctacacttcaactactcacaggtgact

SEQ ID NO: 340808 - DNA, 668 bp, Homo sapiens
caattttagtcatccttatgccatatccttattgcaatcatatagcatagatataattatttgcatgtacagaagcagggaaataatcttagttaagcaagttgcccaaggtcaacatttggcaaatgtcacagttgaggtttaaagctatgtgtaactaatagagcttaacctcttaaacattacaaaatgaaatttccccactacaaagaggggaaaataatctggtttcaaaatcagattatacagctaaatgatcacctgtttttactggctttgcatggacaaataatcctgcaaggatgtgataaatatgatgaaatgatraagtcatgaaattttggaatagttaggtcttttataaggatatatcatatgattctgttatgctttatataatttatttttgtcataattacagaaccttcctccctgtagtaaaatgagtcctaaattgacactttcttctcctgtatgcctggctcgttctggaccggatatgactcattttgttgatcttagcttcaccataagtcttcctacagaaaaattgttttgattagtatttaaagtatgatgaggattgtttcctgtttttcttaagctttccacccagttgccattatcccacaaatgatttgttaggcatgcaggtttgtattgtttct

SEQ ID NO: 340809 - DNA, 668 bp, Homo sapiens
caattttagtcatccttatgccatatccttattgcaatcatatagcatagatataattatttgcatgtacagaagcagggaaataatcttagttaagcaagttgcccaaggtcaacatttggcaaatgtcacagttgaggtttaaagctatgtgtaactaatagagcttaacctcttaaacattacaaaatgaaatttccccactacaaagaggggaaaataatctggtttcaaaatcagattatacagctaaatgatcacctgtttttactggctttgcatggacaaataatcctgcaaggatgtgataaatatgatgaaatgataaagtcatgaaattttggaatagttaggtcttttataaggatatatcatatgattctgttatgctttatataatttatttttrtcataattacagaaccttcctccctgtagtaaaatgagtcctaaattgacactttcttctcctgtatgcctggctcgttctggaccggatatgactcattttgttgatcttagcttcaccataagtcttcctacagaaaaattgttttgattagtatttaaagtatgatgaggattgtttcctgtttttcttaagctttccacccagttgccattatcccacaaatgatttgttaggcatgcaggtttgtattgtttct

SEQ ID NO: 340810 - DNA, 602 bp, Homo sapiens
gtttcctgtttttcttaagctttccacccagttgccattatcccacaaatgatttgttaggcatgcaggtttgtattgtttctgatactataaggacaacaaatacagctmttttttttcaaactgctacacccaggaagctggaagaagagtagatattacatattgagtttctgagtgagtacaattttatttttttaagaagctgtgcttttttaaaaaacacgtgaaattcttaacagtgtcctttagaattatttctccattatgcatgctatgatgtggagtctctctgtccttcagataatagcatagttaaaagaccagaaaactaagcagtacaattgaatctataactttctatatataaccttgagcaaacagcttaacttaaattgaagatagtaacagaacaagtcaagtataaatttatcagaaaagagacttggggaaaagagtgaaacttctccatgttgagtatacaaagaaccaatacatgtaaaaattttgtgaaagatagattgtaggacatacacatacctaagcccgttgtgcattagtacatggcaagtaattcagtgcagaaaaggcagaaagtgggt

SEQ ID NO: 340811 - DNA, 543 bp, Homo sapiens
attgctgtattttcaatgccacgaacagtgtctttcatatcataggcccatattgttaaataaattgataaataatataacacacatataaacaggtgtctcataccaagtaggtgcttaataaatgatagcttttatccttctagcaatctgaaggcaaggtagcaatcatttgtttagttaaatgattccctgagtggtacagtagattcccaaatatactcccaacataaccatggaccaacagtctttctaccctgaactgccattctttcatgggttctctttttccctcagtcagaaggaaaatgccatcctgtttgggtcactagttctttcacatccatttccaaccattctgtagtacgggtggtcctcacgttatgagagtttgacttaggatcttttcaagttaacaatggactyatagggacataaccccatggtaaggcgaggagcatctgcagttagatttgtctaactagagaacgcttaggggtgatgctgcttagcgtcttcacactctgacctataagacttcag

SEQ ID NO: 340812 - DNA, 520 bp, Homo sapiens
taaagacaaagtgatttggcttttataattgtgtcaaattttaccatgtttttgtcccttccgatatgaaaatactraatttggaagccagaagtttcattctcaaaagaaatgtggatagtaaaacaaacaaacaaaggaaaaacaccaaaaaaacagggcagaaacaaggaaacaaatagtctactaaaataaattgagagggtccacatcatcccactggtcattggaaccagcaagttctttgagcttaaaagtccaaaaatattgaagctgtcctcaacttttatgttgtctcatcttgcatgtaataaaaaggctaatgtggagaaatatgtgtgatttattatttgctgttgtaataatttatatatcataaaattttatatgtgaaaaactcctagaaattattttttagtatcctgattttaccaaatatgtaatggaggcctagagaagttaaaagattgttacaataatctgtatgttttctggtcagctgtaagtcacaacgtattct

SEQ ID NO: 340813 - DNA, 520 bp, Homo sapiens
taaagacaaagtgatttggcttttataattgtgtcaaattttaccatgtttttgtcccttccgatatgaaaatactgaatttggaagccagaagtttcattctcaaaagaartgtggatagtaaaacaaacaaacaaaggaaaaacaccaaaaaaacagggcagaaacaaggaaacaaatagtctactaaaataaattgagagggtccacatcatcccactggtcattggaaccagcaagttctttgagcttaaaagtccaaaaatattgaagctgtcctcaacttttatgttgtctcatcttgcatgtaataaaaaggctaatgtggagaaatatgtgtgatttattatttgctgttgtaataatttatatatcataaaattttatatgtgaaaaactcctagaaattattttttagtatcctgattttaccaaatatgtaatggaggcctagagaagttaaaagattgttacaataatctgtatgttttctggtcagctgtaagtcacaacgtattct

SEQ ID NO: 340814 - DNA, 520 bp, Homo sapiens
taaagacaaagtgatttggcttttataattgtgtcaaattttaccatgtttttgtcccttccgatatgaaaatactgaatttggaagccagaagtttcattctcaaaagaaatgtggatagtaaaacaaacaaacaaaggaaaaacaccaaaaaaacagggcagaaacaaggaaacaaatagtctactaaaataaattgagagggtccacatcatcmcactggtcattggaaccagcaagttctttgagcttaaaagtccaaaaatattgaagctgtcctcaacttttatgttgtctcatcttgcatgtaataaaaaggctaatgtggagaaatatgtgtgatttattatttgctgttgtaataatttatatatcataaaattttatatgtgaaaaactcctagaaattattttttagtatcctgattttaccaaatatgtaatggaggcctagagaagttaaaagattgttacaataatctgtatgttttctggtcagctgtaagtcacaacgtattct

SEQ ID NO: 340815 - DNA, 426 bp, Homo sapiens
gtagactacagctttaacctaacagcctactttcaagtgatattttcccacttcatccagagtataagaaccttataataggtgacttccatttctctgctactgaccttcatgctgttgctttcatttatttgacttttatgttcttataaactccatactacattgttattgtttttgtttagtcaattgtcttttacagagatataaacaataaggaaaagtactctgtatatttacctacgtcattatcatttctagttctcttctttgtatgggtttgtgtttycatgcggtatcattttcctattttccttttgtctgaagactttctttaacatttcttgtagtgcaggtatgctggtgatactttttttttttttttcagtttttgtatgtctaaaaagtttgtattttgtccttatc

SEQ ID NO: 340816 - DNA, 576 bp, Homo sapiens
atgctgacttgtgttagggagttagggaatctgccactcatttcatctcttactctgtgaacctacaaagacatgaggcacccatggaatgtttcttggtgcactgtacttctgctttgggtgacagaggtttctacattctgcttaacaactcattccctttactccaatatttataatccaattgtctggaaaaaataggtaatgtggttagggcaaaagcaaattctccagagactactaaagcctacaaaatactatttttttgctcacaaaatgactaaagagtggtaattcgtggagaagaaaacctgatttttgaaagtttaaatagtaggctatatctatcagaattaattatcaggtctaaccaactaagtccatctttcacctgttaagttgtagctactgcccattcctcttcttacggtgattcaagtcataaagmttcaggacatacaattctctgcaggctctgcttttgctaatatttgtagagccctaaaatactgaatgagtgcctggaggactttaggtatgttattattcttattttgggcagcttaatcatttaat

SEQ ID NO: 340817 - DNA, 576 bp, Homo sapiens
atgctgacttgtgttagggagttagggaatctgccactcatttcatctcttactctgtgaacctacaaagacatgaggcacccatggaatgtttcttggtgcactgtacttctgctttgggtgacagaggtttctacattctgcttaacaactcattccctttactccaatatttataatccaattgtctggaaaaaataggtaatgtggttagggcaaaagcaaattctccagagactactaaagcctacaaaatactatttttttgctcacaaaatgactaaagagtggtaattcgtggagaagaaaacctgatttttgaaagtttaaatagtaggctatatctatcagaattaattatcaggtctaaccaactaagtccatctttcacctgttaagttgtagctactgcccattcctcttcttacggtgattcaagtcataaagcttcaggacatacaattctctgcaggctctgcttttgctaatatttgtaragccctaaaatactgaatgagtgcctggaggactttaggtatgttattattcttattttgggcagcttaatcatttaat

SEQ ID NO: 340818 - DNA, 541 bp, Homo sapiens
tggacattttaatgtcctgtctctctccacaaaaatgactctaaactccattggacagggatttagtatggtttgttcactcctgtatctggagtatctgaaacaatagttcacccagtaaatacttgttaaataaattaatgaagacatatttgtattatttgaaataatgcagttgataataaggggacaagatatttgataaagtaagttaaaaaagaatacttgtgattcgtcttagaagaaatgcttcttgtactcacagaagactgtctccaattgtttttggatactatagaaactgttgtataataacaatcactatttgtaatctagccttccttttatttgttcacaatcaagtaccacttgttctgccactatgacagcttatcttttttatatatcttaactgtttaataacctcagttgattgayttggtgatacataactatttttttctggttactatatcaatctaaggaaataaattatttaatattatatgttacttgtctaacacttcatgcattatttaat

SEQ ID NO: 340819 - DNA, 665 bp, Homo sapiens
gttttatcattaaaaataccttacatcctgaaaaagagaaaaatacataaagtaaaaattaaatatcaggcaaacacaaacatcaagaaaacacatgggtatgtagaccaccactcaggttgacaattcttttatttacattttattaataattatgtattcatgaagaaaatatttaatattgtatgttttgggattttatataaatgtaaaaatgttatacatrcccctctgtgacttgcttctttacctcagtattctatttcagggattcattaatgttaattccaatacttgttaaatcattaatgttcactgatatataatattccactttataatatctcacaatatatttcatccattctactgttgacaggtatttgagttatttcttcttgggagccatttaaaacaatgccactataaacattctgcatctttttcagaaaatataaaagttcctgagggtatacacctgaaagtaaaacaggtaggtcttagatatgcatatgtttatccctctaggcaatgccaaattgttttttcatacttgttctaattaacatttcccctagtggtagatgactgtgaaggcagaataatggccctccaaagatgtacacatcctaatacctggaatctgtgaatatgttaccttacat

SEQ ID NO: 340820 - DNA, 665 bp, Homo sapiens
gttttatcattaaaaataccttacatcctgaaaaagagaaaaatacataaagtaaaaattaaatatcaggcaaacacaaacatcaagaaaacacatgggtatgtagaccaccactcaggttgacaattcttttatttacattttattaataattatgtattcatgaagaaaatatttaatattgtatgttttgggattttatataaatgtaaaaatgttatacatgcccctctgtgacttgcttctttacctcartattctatttcagggattcattaatgttaattccaatacttgttaaatcattaatgttcactgatatataatattccactttataatatctcacaatatatttcatccattctactgttgacaggtatttgagttatttcttcttgggagccatttaaaacaatgccactataaacattctgcatctttttcagaaaatataaaagttcctgagggtatacacctgaaagtaaaacaggtaggtcttagatatgcatatgtttatccctctaggcaatgccaaattgttttttcatacttgttctaattaacatttcccctagtggtagatgactgtgaaggcagaataatggccctccaaagatgtacacatcctaatacctggaatctgtgaatatgttaccttacat

SEQ ID NO: 340821 - DNA, 608 bp, Homo sapiens
agtaaaagtctcttgaaggctatgtgaggcagtggtgctttcttagcatgaggaagtcactggaggcatttaagcagagtagggatatactctgacttaagtgttgaaaggattttagggtcctgaattaagactagaagttaggagtcttcacccaacttgggagcagaacacctggcaggtcattattataataaagttgagcagcaatggatggtgatacaggataaggtggtagcaaaagacatggcgagaaccaaagagattcaagatctattccagagcagaataaatataacttagtactaaagcagaccacgaagtaagtggcaacttctctttatctttatataatgaataattratattggcatatatttgctaaaatccctttattggctgattacacttaggataaaatccaaaatccttatcagagcttaccaggcctctgagcttgtcacattctacctctggctgtatgttttcaatcttcctaatctagctgtattagccttttcacaattatctaaatctgccattctctttattgcctcaacacatttgtacatgatgtacctctgcccagatcattttcccttctcttc

SEQ ID NO: 340822 - DNA, 522 bp, Homo sapiens
atttttgcattcttaatttctagcccaatacctagaatgcagtagaaattcaataaatatttttattaaattactgcctatatcttcctcttgatggattgcaatgcacattagcttatcaaagttttaaaagtcttcacacacatgcacatacagtgtatggctatataaaggtagatgtgtatatatgtatargcatatgtatatatgtatatacatacatatgtaggtataggcatatttatatacatatatacaaaatacacacacacacacacacacacacatccctatctttgtttaaaccaacatctctggatgttctgtgttcatggaattatttttcttatctattatcttctaaggtgaaagaagaacatacttggaaaaatgccatgttagattatgacttctgtgggaaatcttattttttacatagttttaaacagtaaatattaaataaccgcatttcaatttcctataaccatgtagaagttcttttgacctccctatgccatggtt

SEQ ID NO: 340823 - DNA, 565 bp, Homo sapiens
aggcatatttatatacatatatacaaaatacacacacacacacacacacacacatccctatctttgtttaaaccaacatctctggatgttctgtgttcatggaattatttttcttatctattatcttctaaggtgaaagaagaacatacttggaaaaatgccatgttagattatgacttctgtgggaaatcttattttttacatagttttaaacagtwaatattaaataaccgcatttcaatttcctataaccatgtagaagttcttttgacctccctatgccatggtttcctctggtaaaagaggataatgtcagtaattctttcattcaactgtgagcataaatgagctcacacatatatgaatggggcttagcatggtgctctaaacatagaaaatactcattagatatgaaatattttataataagtaatttgctgtagtataattgtatatttggaggcataaaatcttgaattataaacctctaatctagttttatttgagatgtgttttctaaaaaatacagtttaataaaaaagcagaaaaccttaagcattgttta

SEQ ID NO: 340824 - DNA, 576 bp, Homo sapiens
ccaggtgcataggatttatatcgccccataattctgataacaaaactccatttatcaagggcactaatggtttatacagtttcaaatcaaattagcatatctccaaccttattatttttctgaatactcagcaatatttgatataaatactttccagtcttgaaaccaccagtccttcctacatctaatgtattttctataatgaggagaatgtaaagctaaaaattatgtctccagatttcctggaagctggaattaaaaatgggatttaggtttaaccaatcagtgtcctctcacgtgaactgggaggcaaaaccaaggtaagggcagaatcccaaytgcttttgctgcttttgccaggcaggcatggtattcagcgaatttgttttttctggacaaccattggcagagttttcaatggcaagtcatcagatttatcagtttcaagagtaggatattcatttctgtgtagatttgtagatttttgaacagttcattttttccttgactagcagaataacctctcatcctatatatttcctcattgcatatataaaacctaaggtagtatttatt

SEQ ID NO: 340825 - DNA, 584 bp, Homo sapiens
aaatgagtaacttgatagtagccacaggcagaaaacaccacatgattccaacataggataaaagactgagaagagagctgagtagaatacaaaataaatagctcttttcccaatttctcttctactgtctccgatgatctacaaacctaaatgaaagcttgggtgttgatgaaagttgttagtacttatgccctatgttcaaatcccagaaaagttttctctgtgtcaaattgtggtttttctcttctgtcttttcctcgttggtcattttcccattcttcttaatgtcataccgaatgcaaagtacatgttgcaatattcctaaattctctgacctaacaatcttgtactaacttaaaaaaaaaaaaaaaaggaacgttctaaaggtcacaccaaagcaaagaacatcagccatcttaggatctctcccttaaatatgcacttaaatttcttaattaataaattcaagtcaccagttgtcatcaagtagtcttattctggagggaaaaaggctgtaaattgatcagctaggtaattcatcaactcctccacatgaaygccctagaaccctacctcaataattc

SEQ ID NO: 340826 - DNA, 576 bp, Homo sapiens
ccaggtgcataggatttatatcgccccataattctgataacaaaactccatttatcaagggcactaatggtttatacagtttcaaatcaaattagcatatctccaaccttattatttttctgaatactcagcaatatttgatataaatactttccagtcttgaaaccaccagtccttcctacatctaatgtattttctataatgaggagaatgtaaagctaaaaattatgtctccagatttcctggaagctggaattaaaaatgggatttaggtttaaccaatcagtgtcctctcacgtgaactgggaggcaaaaccaaggtaagggcagaatcccaattgcttttgctgcttttgccaggcaggcatggtattcagcgaatttgttttttctggacaaccattggcagagttttcaatggcaagtcatcagatttatcagtttcaagagtaggatattcatttctrtgtagatttgtagatttttgaacagttcattttttccttgactagcagaataacctctcatcctatatatttcctcattgcatatataaaacctaaggtagtatttatt

SEQ ID NO: 340827 - DNA, 605 bp, Homo sapiens
gggcggtcagagggtcctggggttgaggctgtygtggcgaggacagttgtgttaccgagctggactgggatctgcttgcccagtgcagcaaaaccaaacactgagattgggatataatctacgagaacacaaggcatttattgcggggaccaaaaaaggagaattgggcagctcactcttaagaccggaactccctgatggcttgcaggtaagggtttttaaaggcagagtgaatttcaggaattgcagaagttaacaggcaaaatcattaatcaatacatggagggtacacattggttttggcctaaaagggcgggatatcttgaagtgggggtgggcttccaggtcataggtagattcaaaaatttgttgttttgaaattggttaaggaagagaagtttcatttaaaaatttgggttaccagaaaggaatgttagctgtggcttgtgggcgggacttcccccaggccccccaggaagaaatttagaacaaagagcctgctcagagttcagtcctcagttccgtcttatctgaggtctctgtgccagtggatcggtttggtgggggtctgggtttctgaaaaacaactcagagacacatgttca

SEQ ID NO: 340828 - DNA, 498 bp, Homo sapiens
agaggctgcacaggtgtcgtggcagatgcctgtagtcccggctattcaggaggctgaggcagaagaatcgcttgaacccaggaggcagaggctgccatgagccgmgactgtgccactgcattccagcctaggtggcagagtaaaactccagtgagctgtgattgcaccactaagctccagcctgggcgagagagcgaaacccagtctcaaaaaaataaagcatagttcttggcatggactaagtactcagtaagcattaatactgttattagttcttaaaataaaaaactttcctatgtggccagaaagcaactacaattttatctcaattctagaaatatttaccaagtgcctcctctttatgaagaaatgcagcaggatcctgacatgggaacattgataatggaatgagcttgagccaggaaattgataaaggccctggatatacccagcactgaacagggcaggtttcagagtcttgtcttctcagggttggaa

SEQ ID NO: 340829 - DNA, 320 bp, Homo sapiens
agttctaacacctgcttcttctccagtttctctggctcaataaatggcatctgtattgctcgaaaaacatgggaatttttctctactttctcctcttttactgcccttggctagtcsatcatttcctgtagatccttcatccaaaaatcattctttgatttgtccccttatctccacctttagcaccacaataagccaccatgtttcatctgttctgtaatagtttcctaactggattccttctgcccattgtcctgccaatatttttcttgtaacagcaagagtgacctcttaaaatgttaggcaaatcagattacctc

SEQ ID NO: 340830 - DNA, 578 bp, Homo sapiens
ctttgtttatgcttccattattgcaatgtttatctgcccagacactgtgggtatgaagctattacctaggacctggaaaccatccctcccaacttcaacttccatcatctttccactagaccagggatccccaaatgaggaaatgtgttctgtgggatgggatatgttagaatttacagcaggctcccaagttcaattaagttgggataaggcttcatacaactcatattagctattaataaattttttgtttgttttgttttgttttgttttgttttggtacagacagggtctcgttttgttgtccaggctagtctttaattcctggcctcaactgatcctctcaccttggccttccaaagtgctggaattacaggcgtgagccactgtgcctggccgctattaaaaacttttgagaagtcttcagtaaggtcactgatttaactctataattcagcttttcctgaagctgattgacaataaagccccattttatcaagggttatgtttttccacaytacactggagaccactgtgtggaacatgttggtgttcagactttaaaaaaaaaaaaaaaa

SEQ ID NO: 340831 - DNA, 515 bp, Homo sapiens
gaaaacaacacatccatgccctcaggaacagagtagagattatccctgcactaacacagggacagccgaggaagcttgacttgcagggcctgagcactgagtccaagctaaatgtccctgacatcagyagctatggcctggcttgtatatggtttggtttacaactacagtaggtccagaaaacttagtgaaaacacacatgtgcatgcacatgtacacacaggagtgtgtctctgagagtaatacccttagggtacctggaagaataaaaaataaaacagcgcacgagggacacatcctcaacacagcctgtgcagcatccctacagacaaaaagataactctgaagataagcatctcacagactcaaattacaaacacaagggacttcatgtaaccaaattactgaataaaaactacaaaaaaaaaaagattaagttgattataggtatagaagaaggaatcagaaaaggaaagatcaggacacagatactggaaacagatactggaaatatt

SEQ ID NO: 340832 - DNA, 515 bp, Homo sapiens
gaaaacaacacatccatgccctcaggaacagagtagagattatccctgcactaacacagggacagccgaggaagcttgacttgcagggcctgagcactgagtccaagctaaatgtccctgacatcagcagctatggcctggcttgtatatggtttggtttacaactacagtaggtccagaaaacttagtgaaaacacacatgtgcatgcacatgtacacacaggagtgtgtctctgagagtaatacccttagggtacctggaagaataaaaaatawaacagcgcacgagggacacatcctcaacacagcctgtgcagcatccctacagacaaaaagataactctgaagataagcatctcacagactcaaattacaaacacaagggacttcatgtaaccaaattactgaataaaaactacaaaaaaaaaaagattaagttgattataggtatagaagaaggaatcagaaaaggaaagatcaggacacagatactggaaacagatactggaaatatt

SEQ ID NO: 340833 - DNA, 515 bp, Homo sapiens
gaaaacaacacatccatgccctcaggaacagagtagagattatccctgcactaacacagggacagccgaggaagcttgacttgcagggcctgagcactgagtccaagctaaatgtccctgacatcagcagctatggcctggcttgtatatggtttggtttacaactacagtaggtccagaaaacttagtgaaaacacacatgtgcatgcacatgtacacacaggagtgtgtctctgagagtaatacccttagggtacctggaagaataaaaaataaaacagcgcacgagggacacatcctcaacacagcctgtgcagcatccctacagacaaaaagataactctgaagataagcatctcacagactcaaattacaaacacaagggacttcatgtaaccaaattactgaataaaaactacaaaaaaaaaaagattaagttgattataggtatagaagaaggaatcagaaaagraaagatcaggacacagatactggaaacagatactggaaatatt

SEQ ID NO: 340834 - DNA, 553 bp, Homo sapiens
gacatccattagccagcctagcaatcagagggacccccgactcagcagccagattcccttttcatcccattaagaacaggacctttaaggacactgtggcaatgtttcaygtaagggctcttgactaaatgcaatctcttggtcaactggtttaggaataactatataaaacaggtcagtacctggtaacattgcatttacatgctaggctttctgccctactgtttccaagcttttcataaggtagatcagcatagaatttttgctttggggctatttattttatttcttttggtgaaatgactttttaaaaaaagagggttggaaataaatccccggcttctaggagggggaaaaaaggatgatctagaaccttctccatttaccctcacatcctgagcaatctattggaagaacgtgtcttgttacagaaagtccatagggtactttcaggagcaaattacaccaaatccctggccttttaatttaccttattacatcaaatgcacttttaaataatgccaagaaattgcctccatggtcatttatgatt

SEQ ID NO: 340835 - DNA, 606 bp, Homo sapiens
gcgtaaggcgagaacttgctggtacaggcaggcatgggctgattcaaaggcgcaraagaagaaacaacatctgaagctcttattttactctaaagctcatgaccacctcctttacaaatgcccgtggtgtgtgtctttggccataccactaactctcttggataggtctccagcatttccacaaagcctgggattggatggtacctggaaggactgggtctcctgggcagtctggaagactggcggttcaaatcaacgctcgctgtgtatctggagcatatgggatgcactaatcaggaagctgtgtgattacagctcattgtcagtaacatggaggagcctaaccaatctggaactcagcttcttcatctataaaaccagggggctatactgcagctgtgaaccattctaagaatactaatgacactaacttggtatgagaaatgctgtgcaggtcacattttctcaaatgtcatcttattggattgtcacaaaaatacctctacttgggccttagctccattttctagatggggaaactgaggctcagagagactacatgccgcatcatgaatcaacagcaaattcaggtcttagatccaggtc

SEQ ID NO: 340836 - DNA, 596 bp, Homo sapiens
gaatattataaatagctttatgccaatcaatgaaagaacttagatgaaatggaaaactttcttgaaaggtacaaactattaaactcactcaagaaaaaaacaacctgaataaccctgtgtctattaaaaaatagaatttttagtttaaaatgtgtccataaggaagcctccagtgccagatagcttcagtggtaaattcagcgaaatatttcagaaataataaccaaatttacaaaatctttcccagaaaattgaagaagctctgtttcccaactcattctakaggctagcattaccctgataccagaaaccaaagatggtacaagaaaagaaaactaccaatatcctgtgtgaccatagatgcaaaaatttaaacaaaattttagcaaattgaatctaaccatatattgaaagaataaatataccatggccaagagggatttatcccagtaatgcaggattggtttaatatttaaaaatcaatcaagtaatatatacattagcaagctaagaaaggaaaactatttcattgtttcaatagagacagaaatgtacttggtaaaaatctaacatttatttctgatgaaacctggtaa

SEQ ID NO: 340837 - DNA, 560 bp, Homo sapiens
tcttcattaggaagctgaaaattaacaaataagactatttaaatttccytgaagacagtattagtactcaaaaaaaacacagtaaaatttggcttgatgggggtgtcagcctgagtagtctgctgaatactcttttactctttttttttttgagacagggtcccactctgttgcccaggctggagtgcagtggtatgatcacaactcactgcagcctcaacctcctgggctcaagtgatcctcctgcctcagcctcctgagtagctgggaataaagacacacaccatcatcatgcccagctaattttttttttttttttttggtagagacgtggtccccctatgttgcccaggctagttttgaactcctgggttcaaggaatcctccttcctcagcctcccaaagtgctgggattacaggcatgagccactgcgcctggcctaaatacttttttaaatgcatctttttcaaagtgtatgtagttgctcaaacaaagctaacagcacaaaatcagaaggtcctatattcttctttttaaaaagttttttttattattttat

SEQ ID NO: 340838 - DNA, 540 bp, Homo sapiens
acacagtaaaatttggcttgatgggggtgtcagcctgagtagtctgctgaatactcttttactctttttttttttgagacagggtcccactctgttgcccaggctggagtgcagtggtatgatcacaactcactgcagcctcaacctcctgggctcaagtgatcctcctgcctcagcctcctgagtagctgggaataaagacacacaccatcatcakgcccagctaattttttttttttttttttggtagagacgtggtccccctatgttgcccaggctagttttgaactcctgggttcaaggaatcctccttcctcagcctcccaaagtgctgggattacaggcatgagccactgcgcctggcctaaatacttttttaaatgcatctttttcaaagtgtatgtagttgctcaaacaaagctaacagcacaaaatcagaaggtcctatattcttctttttaaaaagttttttttattattttatttttattgccacataattatacatttttatggagtacagtgtgaggtttcaataca

SEQ ID NO: 340839 - DNA, 558 bp, Homo sapiens
gattctaggggccccagtcaactcagttgtggtcttgaacttgcccatcctgaagctcagttctaattaaatggaatacagatggcctccaatttgccagggttcaaattcggatttctcaactttgcactggtgcaaaactgatgctcatttagcagaaagtatatttcaagtacccatacgaccattctatttttcacttccaatatgatcttcaataaattacgtgagatattaaatattacaaagtaggctttgtattagatgattttgctcaattgtaggctaatgtaagtgttctgagcacatttaaggtatgctgggccatgatgtttggcaggttaggtgtactaaatgcattttcgacttacattatgatgggtttatygggaagtaaccccatctgtactgaggttagtacacttggagagaaatagcagcaggttacccaaagaggagtgtgatactacctgtctcatgcttctggactgatttagtccgtcttcctctttgtccttctgctgtctgtttttaattctctggcagccattgttttgt

SEQ ID NO: 340840 - DNA, 455 bp, Homo sapiens
tgacacctgtgatcccagcactttgggaggcagaggcaggaggactgcttgaacctagaagtttgagaccaacctgggcaacatggtgagacttcatttctactaaaaatacaaaaaaaagtaatcaggcattatggcatgcacctgtagtcccagctacttcagaggctgaggtgggagtatagcttgagcacaggaggttgaggctgcagtggtcatgccactgcactccagcttgagcatggaagtgacagcttgcctcaaaaaaaaaaaaaaaaaaaaggtgccccacgatctcatcttttgycctggaaagagagatgctttctgggaaaaatcaaagatatctgtttaaactcatggttacatttccaaatggaccccaggatgtaatgatcacatgcattttctcgactcttcaccttttccctctaacttggggaaaagtaagtgca

SEQ ID NO: 340841 - DNA, 641 bp, Homo sapiens
tataaattctgattctattgagtatttcctgatgaaaacaggaaacattaaagtattcatttaaatatttcaataaagcatttataaaaatttcaaactttcagaatatttttaatacaatggtgtttctttacccagactcaccaattgttgttaacagtttgctacatttgctagtgtgtattttctaaagaaaagaacattttgtgacataaccacagcacaactaaaaagtcagaaaatttaatattgatataatacattgtttaatttatartctaaattccaattttaccaaatgtttccataatgtcctctgtaggagtttttactcagttcagtatttaactctggacaattacctaaaatttagttgtgttatctctttcattttctttaattttggacattaacttattacttaattgtctttcatgacattgacacttttgaagagtaaaaggacaattattttgtgaaatatccctctctttggtgaatgcttcccagtgattggatctaggtgactttttggactgaaaaactacagaagttacttgagcttctttgcagtgcattgcttaaggaagcatttggtgtcagttcgctgcattattggctaactttgttcaccagccttc

SEQ ID NO: 340842 - DNA, 573 bp, Homo sapiens
gatttttaaaaatattttggtttccagttgttcatggctggtatatagaaatatattttatttttgcrtattgatcttgtaaacatggccgacattttagctctaggtgtatgatttttgtttctttttagatggaggactgttttgagattttctatatagaaaatcatgttatttgtaaatagagacaattttatttcttcttttccagtcagtaagtttttttcttttctatttcactagctagaacttccactacaatgttgaataggtgtcatgtgagtggatactcttgcctcgatattaactgtagggtgtgtgtgttctttattatgtcaaggaagtttttcagccaggtgcagtggctcactcctgtaatcccagcactttggaaagcctaggtgggaggattgcttgaggcaaggagttggagaccagcttgggggacatactgagacccgtctctacaaaaaatacaaaaaattagccagttgcagtggtgtatgcctttagtctcagctattcaagtgggaggatcacttgaatacaggaagttgaggctgcagtgagcca

SEQ ID NO: 340843 - DNA, 573 bp, Homo sapiens
gatttttaaaaatattttggtttccagttgttcatggctggtatatagaaatatattttatttttgcatattgatcttgtaaacatggccgacattttagctctaggtgtatgatttttgtttctttttagatggaggactgttttgagattttctatatagaaaatcatgttatttgtaaatagagacaattttatttcttcttttccagtcagtaagtttttttcttktctatttcactagctagaacttccactacaatgttgaataggtgtcatgtgagtggatactcttgcctcgatattaactgtagggtgtgtgtgttctttattatgtcaaggaagtttttcagccaggtgcagtggctcactcctgtaatcccagcactttggaaagcctaggtgggaggattgcttgaggcaaggagttggagaccagcttgggggacatactgagacccgtctctacaaaaaatacaaaaaattagccagttgcagtggtgtatgcctttagtctcagctattcaagtgggaggatcacttgaatacaggaagttgaggctgcagtgagcca

SEQ ID NO: 340844 - DNA, 606 bp, Homo sapiens
tgtagtcccagctacttgggaagctgaggcaggagaatggcacgaacctgggaggtggagcttgcattaagccaagatcatgccactgcactccagcctgggcaaaagagtgagactccatctcaaaaaaaatgaaataaaaataaaaataaaaaaataaaatcttatatttcccagactccagaactgtgagaaataaatttctgtggtttataagatacacattaatgagatggttttataacagtgcaaacagactatgacatcctctcacacttgtgacacctgtaacttgtttgcacacatctaattccctgtgaacacccttaggccaggggtcttgtcttattcattttggtatatccagcatataacattggacttggctgtcagtaagcactaagtaagcattcaaataaatgtcctgacctcacgggcagctatctgcatatacagtagyttaaagtactgtattttgtaaggctgggtagcagggaggtgtgagggatggagatgaagcactggaggaggtagtagctacaggggtgtggtagttcagtggttggggcctggccatgaggtgggtgaatgtcaagggacctgagt

SEQ ID NO: 340845 - DNA, 566 bp, Homo sapiens
tggagcccatgggttcatataaaaggctgtttttggtccggggctcatatcctggggagctctatagycacaggcagacccaagtgtgatccccaaggacctctgttctgtaagtagttcaagccagactctgagaaattggaggcccacacacttggcctagctggtgccccttcaagcactctctcttactcttattattattttttgtttgttattgtgttttgttttgtttttgtgtacgtatatgaaaatttgttgctagaatgtaaagaagaaaatgagagtatgggatgaggtagtagggatgacaagttcagaaggctcaattttcttttcagggtagggaaggtacatgtggttcagttatctaattagtttgatttttttttctttttttttttcttttttacaaatgtagggaactcaggagaagtggggttaaaagcaagaactcacagaatatagtattcacatgttactggactcaagagaaagcatctgtaaacaagggcttagaaatgacaactggactcctgaaatagatggaatcattttaacacaag

SEQ ID NO: 340846 - DNA, 575 bp, Homo sapiens
ttgtgctctgggacttctgggagctctgaagctgcctacctctatcatggaatgaaccttatcttaacacgggtaaagatggaaagaagcctctctgtggagtgtgccatgtctttctgtaactccaagtggtttttctcagggaaagggacagagggggccaaagcatggctggacacctgaggacaggtaggacccagtagggacttgttgagggctgtttccaaggaaagaggtcaggtccccctcttgggaaggcagcaccagttaggaaaagctgcctacttcttacccagactctccctcctctttctcctgtttctcttcctccctgcctttctcaacaaggtcaaggccacaccagtagcaaatcctgcccagatttaatgtgtgggygagtgcaagcctggtgggaaggtacagagagaaggctaccttcccttcaaatccactgaacatcttaaaccacttcagggctttgaggaaacccaggttgtattttgcaaagcacgtttcctgttaattttcatacccaagtgtattctaaaggaaatgaaatccacatgtttctgatc

SEQ ID NO: 340847 - DNA, 578 bp, Homo sapiens
ttaggcactgtgggcacccgacccagatccctggcctgtgcacccatctcccaaattcatagagcatgactcccagaagctcatagctgtcctcttctcctgaccactgcccttagctcaggatttctcagccttggaaccattgacattttgggtccagattttttttttgatgtggggtctagtctgtgaattgtagtatggtcagtggcatccctagcctctacccactagawgccagtagcccccacacccagttttgacaagcaaaaatatctccaagcattggttgagaacccttgccttagctgacgggaagccttttctgaaacacattggaagttatacccttcttctagggtgctcaaaggccaataactgactgacgaggagtacagaagactagaccctgtcctcagaataggacaattctgatgctattcactctctggagtttcagatcaggctggggctagacttcagctgaagctgcacttttgcctggcttcatcccttgaactattttgccttctaggatgagtacatatcccaggcttctttgcagaaaggttgagtcc

SEQ ID NO: 340848 - DNA, 424 bp, Homo sapiens
tgcttgaggccaggagtttgagtccagcctgggcaacatactgagacctttacaaaaaatatggtatgtgcttgttgtcccagctacttgggaggctaaggtggaaggatcrcttgagcccagatgcttgaagctgcagtgagctatgaccataccactgtactccacagcctgggcaacagagcaagatcccacctcaaaaagacaaaatccaacccaagcattaccactgcaagataccactgttttcttgtgtgttttgttgttgttgttgttgttgtttgtttgtttgtttgagacggagtctcactctgtcacccaggctggaatttagtggtatgatctcagctcactgcaacctccgcctctcaggttcactgggttctcctgcctcagcctcccagcctcccaagtagctggaatt

SEQ ID NO: 340849 - DNA, 580 bp, Homo sapiens
ggtgggtttctgtaggttatcatcaattaatcctgtggctattttttttaggcctcagatttctgttttgtccrtgacctcacagagtcttttcagctctgatgtccagtagctcatgttgcagaagtttcagaagctactcagcttttccaaaataacaagttcatacttgtaaatgggaggtttctcagctattgatgccccccaaatagcatgagctgggtagagctcggggacaggagaatgagtggggaaggacattggacttggggggaagctgatatgtccatggccttgaagtggactactgttgaggaatttctgggcttggtctttgtaccaaaggcaactgtgtgaccaacattgtttaatgggttcagggtgaccctaagttattccacctgaaggccagaagaatacaactccagctatgtacttttcattgaatgatccaatttaacccaatctaattagctcacattggtgccagttgaaggccctgaacatcactggattcttcaaggtggcgtgagttagtatctgccccagggagctcataggctgcacactggtttgacag

SEQ ID NO: 340850 - DNA, 580 bp, Homo sapiens
ggtgggtttctgtaggttatcatcaattaatcctgtggctattttttttaggcctcagatttctgttttgtccgtgacctcacagagtcttttcagctctgatgtccagtagctcatgttgcagaagtttcagaagctactcagcttttccaaaataacaagttcatacttgtaaatgggaggtttctcagctattgatgccccccaaatagcatgagctgggtagagctcggggacaggagaatgagtggggaaggacattggacttggggggaagctgatawgtccatggccttgaagtggactactgttgaggaatttctgggcttggtctttgtaccaaaggcaactgtgtgaccaacattgtttaatgggttcagggtgaccctaagttattccacctgaaggccagaagaatacaactccagctatgtacttttcattgaatgatccaatttaacccaatctaattagctcacattggtgccagttgaaggccctgaacatcactggattcttcaaggtggcgtgagttagtatctgccccagggagctcataggctgcacactggtttgacag

SEQ ID NO: 340851 - DNA, 596 bp, Homo sapiens
tagagccagctgattgatggttctgttcagtttgactatattctaactgatgtttttgccttaggaaactaaattactgatagaggggtgttgaagtctccagctataatagtaaatttatctatcaacttttgcctcatgtattttggccctctgttattacacacatacacatgaagtttggagaattaacatttttattataaagtgyctctctttattcttgataattttccttgtgaagtctgttttatctgaaattaatttagtgttttatttttattacttctagtttggtatatttttctccatctcttcacttttgtgtctttatactgaaagtgaagttcttgtagacaatgtttagttgggttttgtttttatatccactctgacattctctgtcttttaattggtgtatttaaaccatgcaaatttaaagtgattatagatacagttggagtaatagctaccatattgtaactattttctatttgttgcccttgttctttgtttcttttctttccttatactctttctggtttgaattgagtatgttatatgagcccattttctcttctctcttagaatatcaa

SEQ ID NO: 340852 - DNA, 648 bp, Homo sapiens
gctgtgttgcccaagctgatctcaaacccctgagctcaaaggatcttgtcacctcagcctcccaagtaactggggtcacaggcacatgttactatgtgcagctaatttttaattatttttgtggagaggagggtctcactatgttgcctgggctagtctcaaagtactgggattacaggcgtgagcaaagtactgggattacaggcgtgagccactgcaccaagtgttgggcagtctggagcttttcactcaccactgactcttttcactcaccactgacccctcctcagctcctggctcttggctctccattgatccaggacttgacttctttcagactcccattcccatcctgcattttatttctaggatagttacacaatttctcccccaccataggaccaccaacacaaaagggaatgaattaacaatgtaattaactggtagttaagagtgtggactctgacgtgggccctgaatgtgagctctgtgtcttactcyaaatagttgtgctatttcagatgactttgggcaagttaaataacctctctatgcattagtttcttcatctgcaaaatccaaatattaatacaatgtacttcatagcattgttacagtgatgtttatgcatcaataaatacaaagttc

SEQ ID NO: 340853 - DNA, 594 bp, Homo sapiens
tatttaaaatcactgacaaagtatttgctagtaagtacaatgtccatacttgctcaggttcagtttctatttgttgctttttttctatgtattagggacattttcttgcttctctacatgtcttaaaatttttgttgaaaatattttaaatattataatatgtcaactctggaaataagcttcttccttttttctcagggtttactttatttgctgtttgctgtaattgctgtttgtttagtgatttttctaatctactgttgtaaagtctgtattatttattgtgtgtagccacttaagtctttcattagttagtttagtggtcagctaataattggacagctatttccttaaacacttgaaagcaataattctcttggtttttgtttaaggtctctgtatgaacattgaggcatgccttcaacactcatccagacagttgacaattatgcctttctgcttgtacagagcctcargtccagccagaggtgagtgcttagggccttctcaagtcttcctttattatacacatagccctatgtatctgcatgactttctggatttccaagaatatgtcacaacttttcaaagctc

SEQ ID NO: 340854 - DNA, 519 bp, Homo sapiens
atgtgaactctctgcatcttcccttcaattttgcagtgaacttgaaactgctttaaaaaataaagccaatacataaataaataagtaaacaaatttaagcaaaagagatggtgataagcaaaggaattgggtgggtcttacatcgcaaacctttctaagcacaccctaaaataaggctttaagtttaagttgctcatttgggagttgaccccaggaagcaccagtaggggaaagaggaaatgagaccaggaatgggaacaagccratgtggagagttttgatgtacaagatatgatggggggtctaccggggacccctgggagactgtgtaaaacacacctcagtgttttcgtcccatctgaggggcaaggaagctggggtgtttgtcttcaatggccactggcttttcactgacacaggcagggcatgccttgcctggcacagtaggcctatctcatgtgggagctcgtcgtgctcttgcggccatggaaagcccacctgcagagtcacagagacctg

SEQ ID NO: 340855 - DNA, 519 bp, Homo sapiens
atgtgaactctctgcatcttcccttcaattttgcagtgaacttgaaactgctttaaaaaataaagccaatacataaataaataagtaaacaaatttaagcaaaagagatggtgataagcaaaggaattgggtgggtcttacatcgcaaacctttctaagcacaccctaaaataaggctttaagtttaagttgctcatttgggagttgaccccaggaagcaccagtaggggaaagaggaaatgagaccaggaatgggaacaagccgatgtggagagttttgatgtacaagatatgatggggggtctaccggggacccctgggagactgtgtaaaacacacctcagtgttktcgtcccatctgaggggcaaggaagctggggtgtttgtcttcaatggccactggcttttcactgacacaggcagggcatgccttgcctggcacagtaggcctatctcatgtgggagctcgtcgtgctcttgcggccatggaaagcccacctgcagagtcacagagacctg

SEQ ID NO: 340856 - DNA, 553 bp, Homo sapiens
ttaaatgccactcagctatcaattagcagagagggctccaccccacatgcagatttcagtgccccaggtgctgtggataacttgtgagagcgccccttctgtccctgcttcaaagggcagtgggtctgcataggctaactggtcctaggaatggcacagactcttgttcctggctttcctaccactggggctttgggaagcaactagcttgttttaggtcaagattttacggtttagcttaccagtagggaggataactcaaaaggcagtgatttccaattctaacatattttgtartgccacaaaaatgccccctctagaccaacagagatagagagaagttgacttttggacctcagcctgcctagtaggtctttatcccgatgccatcctatctctccatgcatggcacccctgttctcaacttcaccatgtgttgggtgagccactctcctccagtgcttgagaacaccgctcacatctttgctagttctgtctcaacagtcttaaatggctttcctccccgcctctactttttcctttccaactatca

SEQ ID NO: 340857 - DNA, 553 bp, Homo sapiens
ttaaatgccactcagctatcaattagcagagagggctccaccccacatgcagatttcagtgccccaggtgctgtggataacttgtgagagcgccccttctgtccctgcttcaaagggcagtgggtctgcataggctaactggtcctaggaatggcacagactcttgttcctggctttcctaccactggggctttgggaagcaactagcttgttttaggtcaagattttacggtttagcttaccagtagggaggataactcaaaaggcagtgatttccaattctaacatattttgtagtgccacaaaaatgccccctctagaccaacagagatagagagaagttgacttttggacctcagcctgcctagtagstctttatcccgatgccatcctatctctccatgcatggcacccctgttctcaacttcaccatgtgttgggtgagccactctcctccagtgcttgagaacaccgctcacatctttgctagttctgtctcaacagtcttaaatggctttcctccccgcctctactttttcctttccaactatca

SEQ ID NO: 340858 - DNA, 396 bp, Homo sapiens
aagagccaagtaaaacaaagttcccttcaaaggagcagcaacaaaattgagaaatactttctgaattaaaaaaaaagtaagccagaaaacaaatttttgttttgtgtgtatgtgtgctatgagaaaataactgccaaacaagatgtctatacccattaaaatatccttagggaatgaaagtgaaaattaaaagtaatgcattagtatcattttttttcaggcgagttctgctttcagtaatggtaaartagctcctttgcactaattttctcataaatagacccatagtctggataaaatttttaaaaaattacaggctttgattagcaataggttagtgatgacatataaatcagtccctgaacttgaagacagaacaatagtaattgtttaaag

SEQ ID NO: 340859 - DNA, 573 bp, Homo sapiens
tatttttgttgaagagagcaatgagacatttcattttctttagagggagagagaaaaaaaatagaaagctgtgtctccaatgacaaccagtatgcacagacaacctgataaacacagggcatttatgattcttttatgactacattttctgacaagataaagtaaatactcttttgtgggactttacaactgcacaaggctaaagctactgtccaagaaaactgaaaaatttgagtataaatatactagtgtgtttaaggctggctcatgggcaatgaggatatcctagcagcttgacaattttcatataataccatgaakaatttcatggtttttcttcatcttactgctagtaccagcacaatacatcttttctagaaaaaaaaattatacaaatctatggcactttctgttttttcccatataccataaatcctaaagatagttcatgtgcctattaccgttagcatttttttttaagtccgagcaacaaaacctgaaacatgccacatatacaaaaaaaatcaggttgccaggaaatctgagttaggtgagattttagtggtttttgat

SEQ ID NO: 340860 - DNA, 573 bp, Homo sapiens
tatttttgttgaagagagcaatgagacatttcattttctttagagggagagagaaaaaaaatagaaagctgtgtctccaatgacaaccagtatgcacagacaacctgataaacacagggcatttatgattcttttatgactacattttctgacaagataaagtaaatactcttttgtgggactttacaactgcacaaggctaaagctactgtccaagaaaactgaaaaatttgagtataaatatactagtgtgtttaaggctggctcatgggcaatgaggatatcctagcagcttgacaattttcatataataccatgaagaatttcatggtttttcttcatcttactgctagtaccagcacaatacatcttttctagaaaaaaaaattatacaaatctatggcactttctgttttttcccatataccataaatcctaaagatagttcatgtgcctattaccgttagcatttttttttaagtccgagcaacaaaacctgaaayatgccacatatacaaaaaaaatcaggttgccaggaaatctgagttaggtgagattttagtggtttttgat

SEQ ID NO: 340861 - DNA, 575 bp, Homo sapiens
ctgaaaggtgcccagaaggtgcacgttttctgtctgggtccccagtgagcgaggagctccatgcctctgggaatagggctgttccctccgaaatgggaactcagtctggccagacccctaacattgtgaattactctgctgagctaccatgatagtgcactatggackggctggtttaaacaaccaacatttattttctcacagttctggaggcctgaagtccaagatccaagtgtcagatgtgggcagagttggtttattctgaggcctctcagctgggcttgcagacggccaccttcttgccctgccttcaccctctgtacctgttggtgtcctaatcttctcttcttataaggacattgacaaatcagaataggacccaccctaacgacctcatcttaactgaattacctctttaaagatgcaaatacagtgacattctgagatactgggggttaagacatcaacatatgaattttggggggagggcacacatcagcccatcacaaatagtaacatgaaaaacgtaagcagaggtatggaaaactgctctgtcaattataaactattagata

SEQ ID NO: 340862 - DNA, 612 bp, Homo sapiens
ggttaacatttttctgttttcttggtattagttatatgtacagagtgagtatcctttgaaatgtttggaatcagaagtgttttggatttttttattttggaacattttgcatatacataataagatatctaggggattggatccaagtccaaacatgatattgatttaagtcttaaatacaccttgaaaacacagactgaaagtgatcttacacaatattttaaataawgtgcatgaaacaaagttggtgtacattgagccatcagaaaacaaaaatgccacgacctgagccacccatgtggataatctgtggttgtttggcatcaccgtctttcatgactgaatttatgtgctacctataagcaattttgtgtatgctgattcacacatcagtacttcacagtcacaaatatgacatactgttaatatagtgtaaaaacaatgtgtgcaggctagctaagcagcacagaagcatcaccagatacctgtatcagctgctaaccaacagcaacaacaaacaatggcaggtgtctgttcttcagctacaatgctgtgcttgattaagcacaccgtacagtaactcccttgggaactgtgaataaacggtgtgtt

SEQ ID NO: 340863 - DNA, 612 bp, Homo sapiens
ggttaacatttttctgttttcttggtattagttatatgtacagagtgagtatcctttgaaatgtttggaatcagaagtgttttggatttttttattttggaacattttgcatatacataataagatatctaggggattggatccaagtccaaacatgatattgatttaagtcttaaatacaccttgaaaacacagactgaaagtgatcttacacaatattttaaataatgtgcatgaaacaaagttggtgtacattgagccatcagaaaacaaaaatgccacgacctgagccacccatgtggataatctgtggttgtttggcatcaccgtctttcatgactgaatttatgtgctacctataagcaattttgtgtatgctgattcacacatcagtacttcacagtcacaaatatgacatactgttaatatagtgtaaaaacaatgtgtgcaggctagctaarcagcacagaagcatcaccagatacctgtatcagctgctaaccaacagcaacaacaaacaatggcaggtgtctgttcttcagctacaatgctgtgcttgattaagcacaccgtacagtaactcccttgggaactgtgaataaacggtgtgtt

SEQ ID NO: 340864 - DNA, 375 bp, Homo sapiens
cccagtggcagaaataggttctcttgggaatacaaggaaaaggccagtcctcaggacaaaaagggtatgaccgggcyttgctttacgcataagcggacactggattgtagatactgggttcaggacaggaaataaatccccttgtcctccgcggtagtcctgggatgcactgtcagctgggactggatcagggctttggttagactagattttcaggttgaggacgctgggtaccaggcacagcagcagcaggcaggagctgatacacggtaagatttcaagggtcagtgaattacctatttctgtctcagcccccagagcctcacacagcattagcacaaagtggatgctccaaatgggtactgagttgacatc

SEQ ID NO: 340865 - DNA, 556 bp, Homo sapiens
agcagtaacatcatcacattttattaaaattgtttatgtatgtatctttctctctcttacaaaactgtaagttccttaagatcaaggactgggttgttcatcaccattttattcccctgcgtccggtatcaaataggtgctaaatgagtaatcttggaatcactgaaagggaacaaacytaatagcagctcatatgggaaactggctactttattcacattgaataaatattttgagttcttctgatgtgagagcaaatgtgttctgacctagaaatgcaaagtgaaatgagtgcaagaccctgtttctgtgaatccacattctagttaagtcgatagatacacagcacaggtgattatcacagaacaggggtgaaccccacttctggggtgaaagctgactggtcaaagcaatctgggtaatgccatcctcttgttcttaacgttaatccagttatccaggccttactcaagcagttttgactatgccctggtcagactttgttctagaaatgagcacatatttcagggccaatgagacacaagagaagttttgc

SEQ ID NO: 340866 - DNA, 560 bp, Homo sapiens
acagtgcacctgactgcttgcactcaggaaagatggctcacacaccattggtggcctggtgttgtaaggcctatgagaacagactttttctgttgtgttcatagcttgccccatattagataaataaaaaacccataatcagcattttgaaaaatatatatgaacatgtaaagaataggggaaaatatacccactcgtaattccttcactgaaaggtttaaaatttttctaaaatattttaatatgtcctcttcctcttttaaatatatttttaacaaaaatraggtcataaaatgtatttgcctatctgcaattccagtttttccttaatattttccaagtagctaaggagacacaatctgcgagtggactgtcatggttccaatccctgatcagtccctttactattttgtgagctttcaaaccagacacttaacattttcgagcctccacatcttcatttttaaaatcagataatcctattaactgactccttggcttgttattaagattaaatgagattagctatgagcctgtcttgtggtggatgttagttttgg

SEQ ID NO: 340867 - DNA, 634 bp, Homo sapiens
taattcatttaatttctgatttaaactcatggcttgactttggaaaactatgcctggggagaagaaaattaccagagcattcaccatctccaaaacagctttcggcaatggaggaccgctacttgtttagcacatgactttggagaaaccacaaagctcraaaatactaatttttttcattagagtaccagaaaagtcaacccaacagttttaaacagtggtttttatatactattaaaagctctataataagcaactttgggaatcaggatgaaagctaattatagaacttctttgccatggctgtttctatttacatcttcaaaaccacagaagcaaataatgtaggctttcctaatacgtcagcatcttcttgatttctgagttctttgaagctgccctaaatctttcccttgaaaacacattgtggttgaatattcccagttcaaggacaatttcagattagagtttttagtccaagtatactattctttccttgaaatactgaatctcaggactcagacaaaacatcaaaattgttactcaacatggtgcatgttatccagtcccttttgtgtgggtttaattttttgtgtgtttgcttacttcatcagtagcagcaaaacacagaaga

SEQ ID NO: 340868 - DNA, 555 bp, Homo sapiens
ctcatgcaagtgcataagtggtcagggttctttctatgtgttcccatcaaagggctcttccagtctcacatgggtttgtgccgctgtggaccagggtcagcgtgattgcagtcagagaaggcagcaacctgtccgagtggcgcaggtcagaggccctcaaagtggcccccgatcagcagggctcctgctctgcctggcgtaaggaaataatggcatctcctctgtgcctctcagtcccccttacaacttcaawgtaattgcaaagggcaccctttagtattgctctcaatctgcacttctaaattcacaaaaaaaggtctagcttttccttaacaattgtttggctcagaaggcagccaaaaatggttccatatagatttatacgtgattatctgctaggaattctttctcccagaaaatacttccatgtagccacctggctgtaatgggaaattgcatgttcttaccgaaccgctccaccccatctaacatgacccaatcgtaattcattttccttctgctcaaagtaggcttatgaatggacatatgacccaa

SEQ ID NO: 340869 - DNA, 513 bp, Homo sapiens
tgattatctgctaggaattctttctcccagaaaatacttccatgtagccacctggctgtaatgggaaattgcatgttcttaccgaaccgctccaccccatctaacatgacccaatcgtaattcattttccttctgctcaaagtaggcttatgaatggacatatgacccaagccaagcccatcagaatcctcctgggtttctctgtgtgttttggttatatgtgcatgggtacctgcaagtgtacgtgcctgagtgtgtgtgctttacaggaactccaagaatcagtccccttttagtttggggaactatcacatgtacaactggggagctggcggtggccgtaagggcacatctytcataaggagaaagctgcactcctggacaagagacagaagcagaggtgagagatggggaggtgctcttgttgtttttaggcctgactttatcctgccccttctaatttttaatcaacctatttcttggattctgtgaggtatttcagtttgtgtttgt

SEQ ID NO: 340870 - DNA, 584 bp, Homo sapiens
acacacggaggaaaggccatgtgaggacacggcgagagggtggccgtctgcgagccaggaagaaagatcgcaccagaagccaaccctaccagcatcttgaccttgggctttcagcctccagaactgtgacaaaataaatgcatgctatttcagtcactcagtctgtggttgttaccgtagcacaagtggactaacacagcactatttaattcctaaaatgtgttataaggaaggtgctgttgttatagtgagagaggagatctaagggcagagatggattaggtaacatccccagctggtctagctagtgagtggcagagttgggactgaaccaggcaacctgctccaggacttcggctcttcacctgtccctcggtgggctctcaacccaggtggggaggttctgtgggtgctctccccttcacaggaaagatrgctcttgctcacgcaatagagagttctcaaagtgcttcagcgcaggacctcctgaggacgtctgtatacctcaggcatgcccatctcactgcttccaaaaggagctgaacaaagtagggactgaatggacgagtgcttggtggggggta

SEQ ID NO: 340871 - DNA, 517 bp, Homo sapiens
agccctaattcaatattatgctttcacttgtttcctggttgaccagcattaaacatcagctacatgctataacagatgggaaatttagttcctattctttcctccttacagtttcttacagaacattttaaaaattcaagtttatatattagttatatttataacatcatataatatatacttaactctatttttgacctatggaatttagaaatatgccttgtcctcttgctcagtaaagaaagaaattttgggctctgctttgtcttccagcttctgctgttttgactttaaattttgacgattaatggcagttatgctctgttctgtaaaattaatctcacactcttgatctccaagttgaattaaattttcatcttattcagtgattgacaaacgcattttatctcaagatgcatatcttttttacagctattacyttgattattgcttcccatcatttttgttctctttctctttaattcctattggatgtgtttccttgcaatgatattct

SEQ ID NO: 340872 - DNA, 594 bp, Homo sapiens
taggatcaagcctgatatatcccttaaatgtagaaatttccatagtttaaagaaaactctacaaagtaaatcaccatattaatgagtttaggagaaaaattccatgattatttgagtagatatttaaccacactattaaaacattttcactgcagcagtcattggtgtaaggctttacaaatattaactcctttaatcttcataatagccatatgtggtaggtaatattacccacattttamagatgagaaaactgaagcactgggagattatgtaattaggtcaattaaggtcattcagctaatatgcagaaaagctaagatttagtacatgcaatctagctccagcgtccaggttttcaaccagtcttttatgctgcctcttttgcaatatatggagaagaatcatttgataaagttaaacttttatttattataggcatggtagaacacttggaccagaaaaaaaacctttaacatcataaaagctatgtttactaaaagtattcatgttttagaggcattccctttaatctcaggaataagaaaagaataccccctttcattttcctgtccaatatttgttcattcagca

SEQ ID NO: 340873 - DNA, 611 bp, Homo sapiens
tctatgtgactggtggtatctaagcaggggttgggtaattgtggaaaaactttaagagcattcagaagggcccagagaagtggctcgtgtctgtaatcccagcactttgggaggccaaagtgggaggatcgcttgaggccaggagtttgagaccagcctggtcaacttaatgagaccctatctctacaaaaaattacaaaattrggtgggcgtgatggtgtgcacctatagtcccagctactcaggagtctgaggtgagagaatctcttgagcccaagagttcaaggctgcaatgagctgtgatcgtgctactgccctccagcatgggaaacagaacaagactctgtctaaaaaaaatgtgtatgtagatatatggcagtccgagcacccaggtccccagttctcctttcagtgctgaagctatgtgtttgaaaatttacttgggggccacagctgcatacaccctcatcacttctgcacaattctcagtcctcaggaggcaatagtttagacttaaacttcaacgtaagcagactacattggagaaggacaaagggaagctttccttggttccataggacattgtcaaggagtcaggggcaggactggaa

SEQ ID NO: 340874 - DNA, 611 bp, Homo sapiens
tctatgtgactggtggtatctaagcaggggttgggtaattgtggaaaaactttaagagcattcagaagggcccagagaagtggctcgtgtctgtaatcccagcactttgggaggccaaagtgggaggatcgcttgaggccaggagtttgagaccagcctggtcaacttaatgagaccctatctctacaaaaaattacaaaattgggtgggcgtgatggtgtgcacctatagtcccagctactcaggagtctgaggtgagagaatctcttgagcccaagagttcaaggctgcaatgagctgtgatcgtgctactgccctccagcatgggmaacagaacaagactctgtctaaaaaaaatgtgtatgtagatatatggcagtccgagcacccaggtccccagttctcctttcagtgctgaagctatgtgtttgaaaatttacttgggggccacagctgcatacaccctcatcacttctgcacaattctcagtcctcaggaggcaatagtttagacttaaacttcaacgtaagcagactacattggagaaggacaaagggaagctttccttggttccataggacattgtcaaggagtcaggggcaggactggaa

SEQ ID NO: 340875 - DNA, 655 bp, Homo sapiens
atggctttattaattactagagtaaaatattaatacagtcatggccatgttttaccttctgtgtgcagaggagacgtctgtctctgctcaaccaatccttgggcctttaatgtgcaggttaaatgtaaaggtaagagatgcagagttggagaatctaggaaagtaaaagggatcatacattgatctaacatttactgactctctatcctgttctagacatagttctaggtgctggaataccacagaggacctaaacagatgaggtctccactcttgtgtacttgtgtaaataaaataatttcagttatgactaaagactagaagtctataatacagaaaaataatattaagataatacagaatagtcttattaataatattaaaataattcagaataataatattaaaacttgactaggattgaattactttaaattgagtggtctgtggatgccttggcagggaggtgatacggaaatgatccaagtcaactagtacctactagttagattgcagtgaccaagactgacaatagtagagacaaagatggagagaaaacaaggtcctgtrtgctctgatgaaagatttcagtttgattcatttgaatcaaaaggcactataagccgctgaaagattttgagcacagaaataacat

SEQ ID NO: 340876 - DNA, 638 bp, Homo sapiens
gcaaatacaaattagtctcatcctaaaaggcaaagtaaacagcaaaacatgtacccagtgaatgtaatgagcagtcacactgaagctcaggcttaagctacgggaaaactctttttatcctttagcaataaatcctgttttgactgaattatagtatttggataattgatccaattctcytcacatgcgcatttattattagtgttctatgtggtctagctaaaccccagtgattcatgaagagcaatcataaccacagaaataaggctccaagatgtacttccaaagcacaggccaagcatttgaataagctgcagcctgcctgtaccattaatcttgcatgctgctttgcaagtgtgttctattggattatattcaaggccatttcgccatgtgttcaactagactgcaaattctttaaaggatggacctcaaaggggtatcatgaaggaaaacatgcaatattacaaagtgcttagctctttataactcttctcttgcttttattcattcaacaactatccactgaccacctccttggtgccaggcctgaggttctggagatataagcagtgagcaagaagtggacgtgggccccatcccaacagagcttacattctcagggagggaagcagccc

SEQ ID NO: 340877 - DNA, 598 bp, Homo sapiens
ctccttggtgccaggcctgaggttctggagatataagcagtgagcaagaagtggacgtgggccccatcccaacagagcttacattctcagggagggaagcagcccataagcacactagcaagcaagcaagcaagtaagtatgcaacagtaattagtgctcggagggaaagtgtggcatgcagtgcctgagatccatccttggagaggagatgtggaggctgaagcttaaatgctgagacaagctggccttatgaggatctgggcaggaatgttctgggtcccaggagcagttggggcaaaagcattgtggttgaaaagcacttgcttcatttaagaagcagaaaggatgtccatgtggctgtggaaccgtgagtgagcttgaagaagagtgggaaaaatgggaatggaaaggtagaagagttttagaaaggggccacatggtttatgtcctaaatcaraggtagacacactttctctctaaagagccagaaagcagatgttttggacttggtggactgtgtggtcgccatggtgactactcagttctgcagctgtgatgcaaaagcagccacaggcgacgtggaaatgaatgggcatg

SEQ ID NO: 340878 - DNA, 597 bp, Homo sapiens
aaatatcagtgtaaagaacatcaatagaatgaagcttctggaattgaaactgagtgacagcaacaatgttatgagtacaaaacagacatgatccttttcaagtttttaataagcaaatacgtagcagcagaattktaagttttctatattttataaatgtatcattttaactgtcaatcaatcatattttaatgtttaaataaaaaatgctttcactttccttctactaaatgatcacattttcctactttaaaatttggattccattagttttacatttgttctgccacacataaatgaagataaagtaattttctggcaaatttttcagacagacggctatacactagagttcagagctttcatgtggtcgtagagcattccacatgaacattttcccacaagtcagagctcttccttccatttctgtgctaataggacctgcaaggcaggctgtgtatgagtatttgcggggagcaggagaggtgggggaaggaaagtgatcaaaggaaatcacccacccagaacctgcttgtattgcatgtaacacaaattgcgctaattcatccctgctgaggaacccataaaaaactgcca

SEQ ID NO: 340879 - DNA, 279 bp, Homo sapiens
gtgtaaagaacatcaatagaatgaagcttctggaattgaaactgagtgacagcaacaatgttatgagtacaaaacagacatgatccttttcaagtttttaataagcaaatacgtagcagcagaattgtaagttttctatattttataaatgtatcattttaactgtcaatcaaycatattttaatgtttaaataaaaaatgctttcactttccttctactaaatgatcacattttcctactttaaaatttggattccattagttttacatttgttctgc

SEQ ID NO: 340880 - DNA, 597 bp, Homo sapiens
aaatatcagtgtaaagaacatcaatagaatgaagcttctggaattgaaactgagtgacagcaacaatgttatgagtacaaaacagacatgatccttttcaagtttttaataagcaaatacgtagcagcagaattgtaagttttctatattttataaatgtatcattttaactgtcaatcaatcatattttaatgtttaaataaaaaatgctttcactttccttctactaaatgatcacattttcctactttaaaatttggattcyattagttttacatttgttctgccacacataaatgaagataaagtaattttctggcaaatttttcagacagacggctatacactagagttcagagctttcatgtggtcgtagagcattccacatgaacattttcccacaagtcagagctcttccttccatttctgtgctaataggacctgcaaggcaggctgtgtatgagtatttgcggggagcaggagaggtgggggaaggaaagtgatcaaaggaaatcacccacccagaacctgcttgtattgcatgtaacacaaattgcgctaattcatccctgctgaggaacccataaaaaactgcca

SEQ ID NO: 340881 - DNA, 597 bp, Homo sapiens
aaatatcagtgtaaagaacatcaatagaatgaagcttctggaattgaaactgagtgacagcaacaatgttatgagtacaaaacagacatgatccttttcaagtttttaataagcaaatacgtagcagcagaattgtaagttttctatattttataaatgtatcattttaactgtcaatcaatcatattttaatgtttaaataaaaaatgctttcactttccttctactaaatgatcacattttcctactttaaaatttggattccattagttttacatttgttctgccacacataaatgaagataaagtaattttctggcaaatttttcagacagacggctatacactagagttcagagctttcatgtggtcgtagagcattccacatgaacattttcccacaagtcagagctcttccttccatttctgtgctaataggacctgcaaggcaggctgtgtatgagtatttgcgggsagcaggagaggtgggggaaggaaagtgatcaaaggaaatcacccacccagaacctgcttgtattgcatgtaacacaaattgcgctaattcatccctgctgaggaacccataaaaaactgcca

SEQ ID NO: 340882 - DNA, 610 bp, Homo sapiens
gaaatcacccacccagaacctgcttgtattgcatgtaacacaaattgcgctaattcatccctgctgaggaacccataaaaaactgccaccagggtccaaatatcttctcaatggtcttgcctatgaaagagcaagaaaatggcacatgtttatgtartaaaccctgcagaaacaattttaagcagaaacttgtagcaaaacatattcaaaagtaaattaggaaaactacagtttggttatacacataattgaagaaaagcagtattttattttattttgtaaattacatttttatttaagaagtatgtatatatagaaaattgacaaaataactttcagagtttgacctagtgtttggatagggagtgccaattactatgccaattagtgcatagtaaagagaaaggattttgaaacatttttaggatgttttcctgcttttagaatttttatttcaatagcatttggaggagaggtggtgttggttacatggaaaagttctttagtggtgatttctgagattttggtgtacccatcacccaagcagtgtacaccttgcacaatgtttagtctcttatttctagcccactcccacccttccctccaagtc

SEQ ID NO: 340883 - DNA, 568 bp, Homo sapiens
acttcttccatgccattgcgtgcttcgtgcctctgaactctgtccactgagaagatgatgcttgggattgcctcgccagtcttgggatggggaaggcaatgcctggagaaataccagcaactgcttatttccagaattactgttttgtggtgggaaaatccctctggttttaagactgttgactgctggtargactttctagtatttgaaccttgaccttgttaggaatgcagggattgttaatgactgtttttaatgttgttttactatattatagtgtatcacaagtggcactgataggccggtttgataagttcccagatgagagagagaattccaattgcaaaagtcatggtaaacttcatagaggagggatccatcccactggacttgatgggtttcagtctttgagcatggagaggctggaaagggtgtgtgggggagttccgttctgagctagtagacccttccacaggtatgaataatatttcaagactcagtgtaatgaggacaaaggagaagtgtggaaatggagagcttttcactcaaatctgcaggcccaccttct

SEQ ID NO: 340884 - DNA, 631 bp, Homo sapiens
gttcgtttggtcactagtgttcttgcaaagtaaagaacacagtgagtttaactaatttaagcaatcaatcttagacacagaaacagccctcacccctacctttgctttgtaataggtttttcaccctgatttattgtgtataattacctaatccatcttgcatatgtagacaagcctttgtcaacctgaggtacttaaatacctttgaaatgaaactccaactagctaaccattatgtcgtaatttattacctttggtcatcatgtaacactttctagggaaaagttatacgaagaaaatacttaagagaatttttttcattattaaaaattcttttttaaacttctattgaaagcactrtaatatttatccagacctgacccaaatagttgtagagatacaattcctggctctacccttacgaaaagcaaatctttacaactatatgactaactcctgagcatgtacatcttcaataatttttatcttctcacttgccctcttctttcctccatgtggaggaaaaaatatctttctgaggaggaaacacttgaagactcatttaaatgttagctactttaaaaatttaaattttagatgttcttccatttagttctttatttacttcttt

SEQ ID NO: 340885 - DNA, 552 bp, Homo sapiens
tctaaatattggagatgaccctttatcagatatatgtgtttcaaatattttttcccattccattggttgtcttttcactctgccaattgtttcctttgctatgcataagctttttagtttgatatagtaccatttgtttattttgtttttgttaccagaattaaaatcaggatccaaagagatattgacattctcatgtctgttgcagcgctattaataaccaagatgtagaaacaactaaaggtccatccrcaaatgaatagatagagaaaatgtggtgcacacatacaatggaatgctagtcagcctttacaaaggagtaaattctgcaatatgtcacaacatgaatgaactttgaggacgttatgttaaatggaataagccagtcacagaaagatgaatactgcagggttccaattacatgaggtatctcgaacagtcaaatttataggatcaaacagtggaatggtggttgtcagggcaggggaaagggaaaatagagttaccaatcagttaagcaagatgaataagcttcagagatcagctacacaa

SEQ ID NO: 340886 - DNA, 487 bp, Homo sapiens
tttactttcttactagaaatttgagagccttgctttagtttatttgaaaccagccttatatttgcagtgttctgcttctgtttcaatgataggagaccataatctctttgtacaagcatcatcttctctttcaagttgattccacacattttcattgatctggatttcccaggtactgatgcaaacccttcatcaatacacttcacagcgctcttgtccatactctggtttgcatggtctcttcctctccctgaatcataagttacgaggaggcagggccatttccaaaatcaattcctggcagaagagaaagtgcctccatgcatcaggaaaccatttcaaacgttaacagttgatccaagggcattaattaaayttctttcataaataaaggctcactgctgccaaacggtggagtgcatgaagagacaattccaaggctataacttccctcacaaaaaagaaatgaagctctttgcagacaaag

SEQ ID NO: 340887 - DNA, 487 bp, Homo sapiens
tttactttcttactagaaatttgagagccttgctttagtttatttgaaaccagccttatatttgcagtgttctgcttctgtttcaatgataggagaccataatctctttgtacaagcatcatcttctctttcaagttgattccacacattttcattgatctggatttcccaggtactgatgcaaacccttcatcaatacacttcacagcgctcttgtccatactctggtttgcatggtctcttcctctccctgaatcataagttacgaggaggcagggccatttccaaaatcaattcctggcagaagagaaagtgcctccatgcatcaggaaaccatttcaaacgttaacagttgatccaagggcattaattaaacttctttcataaataaaggctcactgctgycaaacggtggagtgcatgaagagacaattccaaggctataacttccctcacaaaaaagaaatgaagctctttgcagacaaag

SEQ ID NO: 340888 - DNA, 601 bp, Homo sapiens
caaagatgatttgatattaaaaaataaatgtagttcatactaataaatatttagacagtgaataaaattcacattgaaaatagcatagtagaagctcagagaaaacttgcaatacaaaacctattgaaatctgctcatcttggatttttccaagacttacttgcatactgaactcattaaaacttatcctaagaataacttaaaaacatatttgctcttaagtatttgaaaggggcaacaaacaatgtatgagtctctcaagattgattctacatatttaatttctcttttagaatagtgtgctgcggtatactggaagtcaccctgagacagggtccatgagctacgatttgtagccttcatgctgccactaataagctaagtgacctttctacttatctgtattctagctttctaaaattcaaaatgaagaagtgtggtcatacaatctgtataattgcttttccctcctcagagttttgagtttttctaggttagagaaatataatwttttatacttatatgcatggttttgtgtttttgtactataataaatctgccaaacgagagatcttctaccattttgataaatttgtgtggc

SEQ ID NO: 340889 - DNA, 597 bp, Homo sapiens
gacgggaatgtgggcggaggcaccacgcagcccatggcagaggagacaagagggaagatgctgggagagccaggagtgaaaggaggatgctggtgggagcgctgtcctggaatccagcccttctggggaatggaggaagctctctcatgtccatcttagagcatgggttccagcaaggcgcgcctgcaggcttggggctggggacacggtggagggtggggagaagggacatggccagctgctctgccagcagaataaagagaggtttctgtgtgggcccgggagggccaggagcgagagagcgagcctcggtttgtctaatgttctatggaagatggttcttaaaggggttgggggacccggcaagaatcacaagggagccatctgagaggcaccttccctcccacagggaagggagggaagaggaggasgaagtaggatctccagggacccctggcaggcaggggctagaattctgcccgtcccagtggggctgggccagctcctgacagcgtcatacagagagaagctttccctttcatgtcccctctcctgggactaagccagtgcatttgtgtcctgaggcaaacaaaatgc

SEQ ID NO: 340890 - DNA, 596 bp, Homo sapiens
ctggatatatcgtaggatcttcatctcactccatgggccctggtccaaggagcgagccccacagcggatcctactggccccctcctcctggtaaagacaaaaagatcaggttcccttcagtcttaggtttctcgccctccctgaaacatcccggtgttcagcaggtggggaaggatgaggtttgccacatccaggggctagtgtatttgcccttttgcctagtgctgtgggctcccaggagttctgcggctcttcctgctcacagccacacctgaacaagcatcctgaaggcaggtgggaggctcctcaggaagtgattcaggcaaaatgccttccatggaaagtgcctagacggaaacatctttatagctctgtaatgtaaataatcttaaagtcaaaatttcaacaacataaagcaatgtaaatgggagactgtgcaygaacgggatggagaagagattttagctgcacccagttgtacaaggatctggctaatagtgcaagcctcagcccacctagaaagagaggaccgaagaagggatggagggaggaagagaggacgaatgttcggacctctgtccagactttcatcacaa

SEQ ID NO: 340891 - DNA, 519 bp, Homo sapiens
ctcctgctccagccatgtaagacatgcctgcgtccccttcgccttccgccacgataaaaagtttcttaaggcctccccagccatgcgtcctgtacggctggtggaaccatgagccaattacgcctcttttctttaggaattacccagtctcaggtagttctttaccgcagtgtgagaatggactcacacagaaccagaggggatgaggacgtagttgtgcagagcagggctgcttcctgggggacagagcaggatggcagtgtggtgacacctgtgtgcacctgggcacctgggcagttctgcatagctgggcaagccagggacatagcggcatacaccaacacccctgtaccatccctaacgtgatcctttacccctcacrtgggttattttaaaattagggtgaaatgcacacagcctgaaattgaccatttttatacaatacagtggcatggagtggcttcacaatgttatgtgaccatcaccattgcctagttccaaaaccttcttatcacccca

SEQ ID NO: 340892 - DNA, 519 bp, Homo sapiens
ctcctgctccagccatgtaagacatgcctgcgtccccttcgccttccgccacgataaaaagtttcttaaggcctccccagccatgcgtcctgtacggctggtggaaccatgagccaattacgcctcttttctttaggaattacccagtctcaggtagttctttaccgcagtgtgagaatggactcacacagaaccagaggggatgaggacgtagttgtgcagagcagggctgcttcctgggggacagagcaggatggcagtgtggtgacacctgtgtgcacctgggcacctgggcagttctgcatagctgggcaagccagggacatagcggcatacaccaacacccctgtaccatccctaacgtgatcctttacccctcacgtgggttattttaaaattagggtgaaatgcacacagcytgaaattgaccatttttatacaatacagtggcatggagtggcttcacaatgttatgtgaccatcaccattgcctagttccaaaaccttcttatcacccca

SEQ ID NO: 340893 - DNA, 519 bp, Homo sapiens
ctcctgctccagccatgtaagacatgcctgcgtccccttcgccttccgccacgataaaaagtttcttaaggcctccccagccatgcgtcctgtacggctggtggaaccatgagccaattacgcctcttttctttaggaattacccagtctcaggtagttctttaccgcagtgtgagaatggactcacacagaaccagaggggatgaggacgtagttgtgcagagcagggctgcttcctgggggacagagcaggatggcagtgtggtgacacctgtgtgcacctgggcacctgggcagttctgcatagctgggcaagccagggacatagcggcatacaccaacacccctgtaccatccctaacgtgatcctttacccctcacgtgggttattttaaaattagggtgaaatgcacacagcctgaaattgaccatttttatacaatacagtggcatggagtggcttcacaatgttatgtgaccatcaccattgcytagttccaaaaccttcttatcacccca

SEQ ID NO: 340894 - DNA, 623 bp, Homo sapiens
cacgccccaccaccccccactgcagaaggggtgcccgccggccttcccctcacaccgtgcccccagggaacctccggagccggtcagaccctgcccatcccactgggagcttgggatcacgtctcacaggacaagccaagaccccacagcccagcgggggatgagtctgaagctgattcccggacagcccagcaaggctgggagggagccggggaggggccatgtgcgtgggggaggtggtgrttttttagagccttcccccactgttccccttagaaaccgggtgagtgagcctgcacgccagctcccctcccctgcccactcctgctcagagcccagcagcctggcctgccgcaggcccagagccgggacacctcctcttcccaccgatcttccattttcagagggagccgctctccctcctctcaggcctgctccatctgtgacatttcccttccctggacgaagtggggttttcacccttgtgagcagagtctccttcagggctcctccgtgagagaaatatggggctggacagggtcccttccctccctcctcactcaccctaagaacctccagggacccagaggccacgcaggcacggagccagcacccccgcctcc

SEQ ID NO: 340895 - DNA, 553 bp, Homo sapiens
tctttccatttatttatttatttatgagatacagtccctctctgttgcccaggctggagtgcagtggcgcaatctcagctcactgcaacctctgcctcccaggttcaagcaattctcctacctcagcctcctgagtggctgggattacaggtgcccaccagtacgtctcttttagtagacacggggtttcaccatgttggccaggctggtctcaaactcctgacttcargtgatctgcctgccttggcctcccaaagtgctgggatgacagacgtgagccaccacacaggccgggaaggcttctgcttttctgataggacagaaaagtagaaggggctagatggggctggtgccacgtttcctaccatgagcacagatgtggtgcctggagctacagcaaccattttgtgaccttgagggggcaaaaaaaataagagaccccggccctgatccaatgtcacagcttcccactttcagacttctgatcaagtgagaaatgaagtcccccttgtttacgccacctcactgtcagatgccgtcattcctcactgct

SEQ ID NO: 340896 - DNA, 553 bp, Homo sapiens
tctttccatttatttatttatttatgagatacagtccctctctgttgcccaggctggagtgcagtggcgcaatctcagctcactgcaacctctgcctcccaggttcaagcaattctcctacctcagcctcctgagtggctgggattacaggtgcccaccagtacgtctcttttagtagacacggggtttcaccatgttggccaggctggtctcaaactcctgacttcaggtgatctgcctgccttggcctcccaaagtgctgggatgacagacgtgagccaccacacaggccgggaaggcttctgcttttctgataggacagaaaagtagaaggggctagatggggctggtgccacgtttcctaccatgagcacagatgtggtgcctggagctacagcaaccattttgtgaccttgagggggcaaaaaaaataagagaccccggccctgatccaatgtcacagcttcccacttycagacttctgatcaagtgagaaatgaagtcccccttgtttacgccacctcactgtcagatgccgtcattcctcactgct

SEQ ID NO: 340897 - DNA, 537 bp, Homo sapiens
attgcaacagtataggagaggaaaagttttttttcccagcaagcattgaagacaaaaagatatcaaaacaaagctagactctgggaagacaacyagatgatgatacaattctgcctcctacccaggtaatcttctcatctgtgaggatatggaaccccaacctcttcctggacacctgatgatctgcttgtgatgggctcagagtcttgaaacacagaactatgagctcatctcatatcccaatccagcagcatggaaacctcagactgcaaggcccaagactggcacttgttctctcccaactcttttctttctctctctcctttcttttatcccttaattccttcttgcttccttccaagatttatactattaccttttaggcaaaacatcctgaacatgtaaaataaactaattaaaatcaagtcaatttcccaactgttatttgttaagcctatgcaagatgtcaaattttagtcatttgcatacctagtatgcaattttttctattctgtgggccacgagtattcttttctc

SEQ ID NO: 340898 - DNA, 514 bp, Homo sapiens
ataggagccaggtgctacaacagtctgggttctgattcccagtggcaatcagaggaaagctgcctgggtcccaaagtgctaacccccactcaataatcacatgcccacagtcaattacaccagaggaaatgcccactcctgatggctgtgttgggttttggggtcagcttattcagagacttctgatccctcagattttggtggggactctgacattcgggtggaagctttctgagcagaaactacatagcggcttccaataagctggtttcagtcagcactgagactagtcccttgttttgttgtttcctgataatgagaacagggacttggggtmtaaattccttttctcccaggaagttcaaccattttaggaaatctgtacaggcacatgcctatatgttaataaaaaaatgctgcctatcttcactcaccattcagcatccaagtccccggtgaacatggtcaagttgtgaaagataacttccaaatccaccactggggccaccattgg

SEQ ID NO: 340899 - DNA, 514 bp, Homo sapiens
ataggagccaggtgctacaacagtctgggttctgattcccagtggcaatcagaggaaagctgcctgggtcccaaagtgctaacccccactcaataatcacatgcccacagtcaattacaccagaggaaatgcccactcctgatggctgtgttgggttttggggtcagcttattcagagacttctgatccctcagattttggtggggactctgacattcgggtggaagctttctgagcagaaactacatagcggcttccaataagctggtttcagtcagcactgagactagtcccttgttttgttgtttcctgataatgagaacagggacttggggtctaaattccttttctcccaggaagttcaaccattttaggaaatctgtacaggcacatgcctatatgttaataaaaaaatgctgcctatcttcactcaccattcagcatccaagtccccggtgaayatggtcaagttgtgaaagataacttccaaatccaccactggggccaccattgg

SEQ ID NO: 340900 - DNA, 589 bp, Homo sapiens
actgctccaactgatttttgtaatttcctaaaaccatacattcattttactagagggacagcccccaccaccgccacccctctgccaactgtcagctaaaccagtgcaatcctatgcaggttattatctcaaaccctcwaagttcttccccttttctaagccagttcccttctttaagctagttttatggtatgggggctgaggtttcagggacagaacctaatggattctttgaaatgcatttctttgatcccctgccacctgcaccttcctctaagccttcttccaaaacctctcacaatgaaacaattgctcctcctccatctaacgacaagaccaaaatagctattgtagaagttaaagacttaaaacaaactttggcaattaagacaggataccaagatgcaaatgcctggttgaaatggatcaaatattccatctacacgttaaaagcaattgttatgcttgtgcacacggcagtccagaggcccagattgtcctctttccactagggtggtcctccagtagaccgggtgtgggctgcatggtagctcttttccaggattctacagcctggagtaacaagttg

SEQ ID NO: 340901 - DNA, 596 bp, Homo sapiens
cataaaaatgtattacatccgtaagcatgggagtcacacagaatatgagaactcaaagaagagccaggtgactgaagtttttacaccgtacacaaggaaatagagcctgtagctcctgrggggaggtggtgacaggttataggagggtgaagggaagaaactcacagtgagcaaaggctggcttgttatgcagatgaagcctttcaggtagcagccctcagagagaatagatggtagcccatggtaaagatttccctttcaaaccttaggtcttcttttcctgcaagttgatctttcctagatccggataagaggacctcagagaaagcctcttcctgcatcccccatttgcttcactaatttgggtaaatgtaaatttttcttttacaaaaggatagtttttctgagctatttctttctacagtttctctgaataaccaactcaaaatatgccaaagaagtatattttggggtggcatattttggtttcccacatcatcaagaacgggaagttgagaccaagagaattctgaacaaacagaccttgttaaaataatccttatattccgttagcctcctcacatagtttagttact

SEQ ID NO: 340902 - DNA, 455 bp, Homo sapiens
actgcatctcctgggctcccttgccctttggtgtcagttgggtttggccagtaggaggtaccgacaagactagaagacaggaggaggaagggttggtgtttttatcccttcaccccaacttcggtgctacacaggccacagcctcttccacatgctctctttgaccatggcaaccactgggtgatcacagcccatagcctcttccattggcyctcactgggtcttgggaacacagtatcctcccactgccccagccctaggagtaggaagggcatcactcttcttgtcacccaggtgccccactgctccttgcttttccattctcctccgctacgcttctcaaatagtgtcctcattaaagtctcttcacttcacccatctggggtgcatgtagttttctaccaggcctaatagatacggttgttataggagttattaagaaattattttaggca

SEQ ID NO: 340903 - DNA, 644 bp, Homo sapiens
atattaatgtgacacgctgactctgttgagagagcagcactttgaaatgtatgagcagttagaaaatgatgtcccatcaccttcccaggtttagatggtgcagatgaactgcattccctccctccaccagcttgcccagctcctctgcggtaagtccctctctacatggtatcgctgatgctggcagctgcacttggatgtcttctctaatcttccctcctctccctcaccccctgctgctgccctagtcttaagcatccctgtcaatggtgccgttgcatatgcaactgctcaagtaccaaacctccctgtcatccttgattcctcttgtttccattcttcacatctcactccctggcaagtcctgtgagttcttcctccaacatatactacacccaacactgttgttcactgtcagtctccagccaactccaggtccccatcttctccrctctggatgctcccagaggctccaatggatcttcccgcttcctctcttgtccccaagaatccattctcacagatcggcccgagggagtgctttcagagatgtaaagctgatcatgccaccttcctaccgaaatccctttcacatcttcacattgccccacaacaaaatctaaactccttctgagatggtttgg

SEQ ID NO: 340904 - DNA, 623 bp, Homo sapiens
cagcagcggcaaccagctggggtcctcttccacactgtggaagctttgttcttttgctctttgcagtaaatcttgctgctgttgactstttgggtccgcactgcctttgtgagctgtaacactcactgcaaaggtctgcagcttcactgctgaggccagcgagaccacgaacccaccgggaggaatgaacaactccggacgggaggaacgaacaaactccggatacgccgcctttaaaaactgtaacactcaccgtgagggtccacggcttcattcttgaagtcagtgagaccaagaacacaccaattctggacacagtaagagcctttgaatcctgtacctcaaaatctttgccttgctgtttccattaatgttgggcttttatttcacaatccttacctgatactaactccctattatgaagaactgatctgtaaaccaaaaataagatcccaaggtctcccggccacctgcagggactttctcttaggtcagggcactctaaaatttaacctgaaagactggttcaggccattatgggaagtgggagttgaaatgcatcattatacctcttccgcattaacatcaacagactttaagtctgatgagaaacatttacaatc

SEQ ID NO: 340905 - DNA, 619 bp, Homo sapiens
acggcttcattcttgaagtcagtgagaccaagaacacaccaattctggacacagtaagagcctttgaatcctgtacctcaaaatctttgccttgctgtttccattaatgttgggcttttatttcacaatccttacctgatactaactccctattatgaagaactgatctgtaaaccaaaaataagatcccaaggtcycccggccacctgcagggactttctcttaggtcagggcactctaaaatttaacctgaaagactggttcaggccattatgggaagtgggagttgaaatgcatcattatacctcttccgcattaacatcaacagactttaagtctgatgagaaacatttacaatctatttgctctaaaacctgctacctgaaggcttcatccgcatgggaaacctttggtttccacagcccagacattccttcccattagtaactctgtcaaccaattgccaattagaaaaaatttaaatctacctataacctgggttcagctgacccccccaaccctgatagctgtcccacctttctggaatgagccaatgtatttcttgaatgtacttgattgaaatctcatgtctccctaaaatgtgtaaaaccaagcttca

SEQ ID NO: 340906 - DNA, 619 bp, Homo sapiens
acggcttcattcttgaagtcagtgagaccaagaacacaccaattctggacacagtaagagcctttgaatcctgtacctcaaaatctttgccttgctgtttccattaatgttgggcttttatttcacaatccttacctgatactaactccctattatgaagaactgatctgtaaaccaaaaataagatcccaaggtctcccggccacctgcagggactttctcttaggtcagggcactctaaaatttaacctgaaagactggttcaggccattatgggaagtgggagttgamatgcatcattatacctcttccgcattaacatcaacagactttaagtctgatgagaaacatttacaatctatttgctctaaaacctgctacctgaaggcttcatccgcatgggaaacctttggtttccacagcccagacattccttcccattagtaactctgtcaaccaattgccaattagaaaaaatttaaatctacctataacctgggttcagctgacccccccaaccctgatagctgtcccacctttctggaatgagccaatgtatttcttgaatgtacttgattgaaatctcatgtctccctaaaatgtgtaaaaccaagcttca

SEQ ID NO: 340907 - DNA, 619 bp, Homo sapiens
acggcttcattcttgaagtcagtgagaccaagaacacaccaattctggacacagtaagagcctttgaatcctgtacctcaaaatctttgccttgctgtttccattaatgttgggcttttatttcacaatccttacctgatactaactccctattatgaagaactgatctgtaaaccaaaaataagatcccaaggtctcccggccacctgcagggactttctcttaggtcagggcactctaaaatttaacctgaaagactggttcaggccattatgggaagtgggagttgaaatgcatcattatacctcttccgcattaacatcaacagactttaagtctgatragaaacatttacaatctatttgctctaaaacctgctacctgaaggcttcatccgcatgggaaacctttggtttccacagcccagacattccttcccattagtaactctgtcaaccaattgccaattagaaaaaatttaaatctacctataacctgggttcagctgacccccccaaccctgatagctgtcccacctttctggaatgagccaatgtatttcttgaatgtacttgattgaaatctcatgtctccctaaaatgtgtaaaaccaagcttca

SEQ ID NO: 340908 - DNA, 575 bp, Homo sapiens
agtaaaataatcagttacaaaactatttctggagcgttactccaaatttttgtaaaacaataaaaaagaggaaaaattgaaggaatatatgttgaaatattgattttagttatttctggatggtaggattacagatgctattttcccccattgttattatttttcctgtattttctaactttttaaaataatgaactttgtaaagataagattgtccttggctgtaagtaacaaaaattcaaacaatagtggttcagcagctcaacaatgccaagaccaatgtctgaaatgtttatggctttyccttcatggccttcatgtggtcattgtacccaccagttatcacacattcattcaaagagagaggaaaggaacaggaaggactgtctcaggaaaacacaaacgagaacgccatcacagatttaacattaactggccagatttgtgtcacatggccatccccagctggaaagtggaaggagggatggggatgtgtgtgttaggaattggggctgagtcagccactttgcaatgtctgctataaagaggtattgctgggaggctgaggcaggaga

SEQ ID NO: 340909 - DNA, 487 bp, Homo sapiens
acccagttcatctcattaagactggttaggaagtgagtctgaccaatggagggcaagcagaagcagggtggggcatcacttcactcagaaagtgcaaggagcccaaggccctccctccctcagccaagtgaagccatgagggactgtgctactcagcaggttactacactttttccacggtgtttgcaatctgcagatcgggagattccctcatgtkcctacaccaccagggacctgggtttcaagcataaaactgggcagctgtttgggcagtcattgagctagctgcaggagttttttttcataccacagtggcgcctgaaccccagcaagacagaaccattcactccccctggaaaggggctgaagccagggagccaagttgtctcgcccagtgcatcccactcccatggagcccagcaagctaagaaccactggcttgaaattcctgctactagcacaacagtctgaagtcaacctgggatga

SEQ ID NO: 340910 - DNA, 576 bp, Homo sapiens
gggggctcttggatgaaatttatacttaaatctttcgattttgaataaagcagatcattctccataatgtgggtgtcctcatccaatcagttgaaagcctgaaaagaacaaaaagcagatctttcttgagcaagaaggattctccaacagactgccttcagacttcatctgcagcatcggctcttcctggttctgcagtaaactgttcctggacttgactacagctctttctcgagtctccagcctgctggcttcgtctatgagattttgtactcaccaggcatccacaagcacatgagccaattccttaaaataaatctctttctatacagatatgcagcctattggttctgtacctctgaagaacactgactaaatacacagtgcgaagagtattttaaatgtattgatgcatctaattttctcaacaatcctatgaagtccgaacatggtactttaagaggtgttacaatttcacaggtaaaggaatggaggcttaataagatatggcacccaaggtcttccagctggtaggtgrcagagccatgattatattccaaagttcagggaccaaac

SEQ ID NO: 340911 - DNA, 629 bp, Homo sapiens
tcagaatatttacatgtagtaaggactagtgttattttgtgaaacctctgtttcaattgygtttatgtgtgcttgtactgggttaccatataaactaagtttctttctatgagttgcaataaaataattttgaaagccaagactaataaaaatttaaataatccaactcttgttaatcatttagtttggcatctttgcttactgtttttgttttgtttttctttaaattacctgagagggtaggtatttgttgtatatgcatatccatggaattcacacatgcgtgatgtggatctccatgaatgcccgtagaaactttttggtgtttctcagacctatgattcatccaattaccaagttgtatagttatccattagcaagttagatcatactaaataataatcagatgtatttacataggttatttagggcaactaatagtctaaaatagaccagcactgtctcacagaactttctgtgatgatggaaacattctatatctgcacattcaatatggtagcctcaagccacatgtagctctttagtacttgaaatgtacctagtgtgactgaggacctgtattgtaaatttaaatttaattagttaaaatttaagtagctgtacatgag

SEQ ID NO: 340912 - DNA, 629 bp, Homo sapiens
tcagaatatttacatgtagtaaggactagtgttattttgtgaaacctctgtttcaattgtgtttatgtgtgcttgtactgggttaccatataaactaagtttctttctatgagttgcaataaaataattttgaaagccaagactaataaaaatttaaataatccaactcttgttaatcatttagtttggcatctttgcttactgtttttgttttgtttttctttaaattacctgagagggtaggtatttgttgtatatgcatatccatggaattcacacatgcgtgatgtgratctccatgaatgcccgtagaaactttttggtgtttctcagacctatgattcatccaattaccaagttgtatagttatccattagcaagttagatcatactaaataataatcagatgtatttacataggttatttagggcaactaatagtctaaaatagaccagcactgtctcacagaactttctgtgatgatggaaacattctatatctgcacattcaatatggtagcctcaagccacatgtagctctttagtacttgaaatgtacctagtgtgactgaggacctgtattgtaaatttaaatttaattagttaaaatttaagtagctgtacatgag

SEQ ID NO: 340913 - DNA, 629 bp, Homo sapiens
tcagaatatttacatgtagtaaggactagtgttattttgtgaaacctctgtttcaattgtgtttatgtgtgcttgtactgggttaccatataaactaagtttctttctatgagttgcaataaaataattttgaaagccaagactaataaaaatttaaataatccaactcttgttaatcatttagtttggcatctttgcttactgtttttgttttgtttttctttaaattacctgagagggtaggtatttgttgtatatgcatatccatggaattcacacatgcgtgatgtggatctccatgaatgyccgtagaaactttttggtgtttctcagacctatgattcatccaattaccaagttgtatagttatccattagcaagttagatcatactaaataataatcagatgtatttacataggttatttagggcaactaatagtctaaaatagaccagcactgtctcacagaactttctgtgatgatggaaacattctatatctgcacattcaatatggtagcctcaagccacatgtagctctttagtacttgaaatgtacctagtgtgactgaggacctgtattgtaaatttaaatttaattagttaaaatttaagtagctgtacatgag

SEQ ID NO: 340914 - DNA, 642 bp, Homo sapiens
aaataataatcagatgtatttacataggttatttagggcaactaatagtctaaaatagaccagcactgtctcacagaactttctgtgatgatggaaacattctatatctgcacattcaatatggtagcctcaagccacatgtagctctttagtacttgaaatgtacctagtgtgactgaggacctgtattgtaaatttaaatttaattagttaaaatttaagtagctgtacatgagcagtggctaccatgttggacagcataactctaaattctagaattagtattttgaaaaacagatggctatatttcttgttttccagactagacagtcaattggtctgatagaattattttattctggcatcgctcactgaagagtgagaagagctaacattccattggctgggcagggcttacttttcttggtccagagtattactagagacaaatgacccaacttctacatgtagaattttaagttcttatccccayttatttctggtttttcatattgaaaattgcttgatgcaagttatttgaactatatggattaaaagctataataattatttgataattataatagtaactataataacaataatacggatctatgtcctcacccaatctcatgctgaaat

SEQ ID NO: 340915 - DNA, 540 bp, Homo sapiens
cctgtcctgggccctttctcccacggatcgtctcccataacacaccaaggcatggagcgtttggtcttgactgcaggaaggactgatagagttgtacacagggactttggttctccrtttgtgagcctattcccagctcttagggacatttttacttcccttgtcagatgggacacagccacactttctaggggactctagcacaagttccaagaggtagccagccaggaaagcactgactatccccaggcctgggctcctgccagctgtctcccgcactagtctgaccctattacgggtgctgaatcctttgaagccaaactgactttttaaacgctgacttcctgaagtgaggaataattattttcatatgtgaacctggagaaatgtagataatgatggcaatgaacaaatgcaggttaaaaaacaaaattttttcactgccaaaagaattctttcaagattctctcatattttccatgcattcacacagcaaaagaacttaaggcaaggcaagttaactaagctagaagaaacaac

SEQ ID NO: 340916 - DNA, 489 bp, Homo sapiens
gccagatgaagaggtatatagagcaaggtatgagggaaggggtgaggagtttccatactgtctctgagggcaccattctccaggcacctccatgtgtttaacaatccagacattctctacattctgtccttttttttttttttgagatggagtctcgctctgtcgcccaggctggagtgcagtggtgcaatctcggttcactgtaagctctgcctcccaggttcacgccattctcctgcctcagcctcccgagtagctaggactacaggtgtccaccaccatgcccrgctaattttttgtatatatatattttttttaatagagaaggggattcaccatgttagccagatggtctcgatctcctgaccttctgatccgcccatctcagcttcccaaagtgctgggattacaggcgtgagtcactgtgcctggcctgtccttctgtttttttatgaaggcttcattatgcaggcatgactgattaccatt

SEQ ID NO: 340917 - DNA, 489 bp, Homo sapiens
gccagatgaagaggtatatagagcaaggtatgagggaaggggtgaggagtttccatactgtctctgagggcaccattctccaggcacctccatgtgtttaacaatccagacattctctacattctgtccttttttttttttttgagatggagtctcgctctgtcgcccaggctggagtgcagtggtgcaatctcggttcactgtaagctctgcctcccaggttcacgccattctcctgcctcagcctcccgagtagctaggactacaggtgtccaccaccatgcccagctaattttttgtatatatatattttttttaatagagaaggrgattcaccatgttagccagatggtctcgatctcctgaccttctgatccgcccatctcagcttcccaaagtgctgggattacaggcgtgagtcactgtgcctggcctgtccttctgtttttttatgaaggcttcattatgcaggcatgactgattaccatt

SEQ ID NO: 340918 - DNA, 618 bp, Homo sapiens
gctactgcagcacagttttaaatggctacatggtatttcattgtgctgatagtttctaagttataatacctactgcctattttatccattttggttgtcttcaagttttaattttttactgtcataaacaatgccataagaaaagcaaatttaaactacaatgagatatcatcttataccagttagaatggctatgactaaaaagaaaaaaaaaacagatgttggcaaggatatggagaaaagggaatgtttatacactgttgggaatataaattagcacaatctctatggaaaatagtatggagatttcttaaagaactacaaatagtactaccattcattccagcaatcccactactgggtatctacccaaaggaaaagaaatcattatatcaaacagaaacatgcactcatatgttcatcacagcactattcacaataacaaagatatggagtcaatctaagtgtcaatcagyggatggctggataaagaaaatgtggcatatatacacagtgagatacaattcagccataaaaaggaatgaaatcatatcttttgcagcagcatggatggaactgaaggccattatcttaagtgaaacaactcagacacagaaa

SEQ ID NO: 340919 - DNA, 616 bp, Homo sapiens
  misc_feature (1)...(616): n = A,T,C or G
ctacctttttcatccaccatcctaatgtcacagagaggggaatgcatgaaatctcaccagtacgcttgctgcaccaccatgttgacaagatgcctcgctaatagagcagaggcacaagagcccatgaccatggcatggaggcaagtgtcagctaaagtcygagacagcgaaagaagtgtaaacaaaggaagaacgctttacagggcatcatgaatcccacgcccaaaaatgcagacaggcagtggacttttggaaatggagtctctggatttgtagccatcaaaaacaaaaaggcttttcaaacaaagatgtcattttacagaggcagaaagagccaatgctgcaaagtgtctttagccctgcaaattcaagcatgaaatggatattcaaggatagcttgcnccacaaatgcagaagctgggacacagaagatgcataaaatatacaagatacatcttgaaggaaataaaatgtaagaaggaatccagagaattgcaagcaccttcatttttaagaagaatcactataatatccagtttctacctcataaggctgtttccgtgttccaggcaacagctggtcccactttattgctgtgggtacaaagagttctagt

SEQ ID NO: 340920 - DNA, 435 bp, Homo sapiens
tcctccctcctcccattcctttcaccctcttggtttctcttttcttctctctcttgctttcttgcagggtgcatgtgtctctgtgtgtgtgtgtgtgtgtgtgtgtgtgtgtgtgtgtgtgtgtgtgtttctatacttgatcttagccaaaaggctgagaacccatgtgtgtatttctgtaagagagcagacacagtgcctgcacccagccagtaatgggattcagtgttttaaatgatacccagcaaaaaagtcttcacctgaactagaaaaagagagtgcattcggaaaagccttctcggaagacgtggcatggggacrccaaaacaaataagcatggagacaagaacttttgaaaacagaatgatttgttctcaggctcttctatcaaaccaccagtctttttgcctgtgtctaggagccaccacccttctg

SEQ ID NO: 340921 - DNA, 607 bp, Homo sapiens
aatcttctacctccattatgacagaaggagcaagagaggagcagtgggaaggttcaaaccttcctctgacatacggcaatatttttattttaaacagatgctgtggggagaagtctcctcaagcctgggtggggctatgacagtctgcttttgccagaggactggaagcacttaacacagaactctggcacagacatcattcttgttccccctctctccttttaaacactgagaaccaatttacctgagtgagtgccgaaaggaacatttcatccctttgscttactcattttaatcggagggaatgaggtgtgtgttcttgctcgctggcggtgctagacgcccgaggagatgcatggaattcctcttgggtgaataggaaatagaaaaggaatagctaacgaaggtggcaactattctgtgccctttagaagtaagtgcttcctcctcccttcctgctacactcagcatgcaaaccccagaaccaagactgtataacacaggtaaatggaaatattcccatcacaagaggaagaaacccactccctacccaaaacaaggggtaggaggcaaaggtggctcaaatgcacaataacagtgagagccc

SEQ ID NO: 340922 - DNA, 554 bp, Homo sapiens
acgctctcctctctacttttatacaggcttcaggatttccaaaataatttgtttttaaagatacaaacatatatcaattgagtttttactcaaaaatttaaaagattgctgtagaatcaaaggctagtataaggcaatggctgaagtcatggactaaggaccaggttgcctgtgtttaaatgtctgctctattacttaccagctgggtaatccagggtaagaaacttcatgttgctgcacctcagtttcctcctttgtaaaatgggataacaataccacttactttctacttcwtagagtaattatgacaatattatttatgacaataaaatgaataatatttctccagggcctggaacagtccacggcacatattaaacattgcatggatttacagttttattgttgttgggtttttatttttgtttcgttattttgtttttgggagcatcttcgctcattttgtatttcatacctaacaattcagtctcacatccttaatgcatcaactacaattttctagtttctttagaatgtagcaagaacttaaagat

SEQ ID NO: 340923 - DNA, 554 bp, Homo sapiens
acgctctcctctctacttttatacaggcttcaggatttccaaaataatttgtttttaaagatacaaacatatatcaattgagtttttactcaaaaatttaaaagattgctgtagaatcaaaggctagtataaggcaatggctgaagtcatggactaaggaccaggttgcctgtgtttaaatgtctgctctattacttaccagctgggtaatccagggtaagaaacttcatgttgctgcacctcagtttcctcctttgtaaaatgggataacaataccacttactttctacttcatagagtaattatgacaatattatttatgacaataaaatgaataatatttctccagggcctggaacagtccacggcacatattaaacattgcatggatttacagttttattgttgttgggtttttatttttgtttcgttattttgtttttgggagcatcttcgctcattttgtatttcatacctaacaatkcagtctcacatccttaatgcatcaactacaattttctagtttctttagaatgtagcaagaacttaaagat

SEQ ID NO: 340924 - DNA, 521 bp, Homo sapiens
accctgtctctaccaaaaaatacaaaaattagctgggtgtggtggcacacacctgtagtcccagctacttgggaaactgaggcaggagactagcttgaacctaggaggcagaggttgcagtgagctgagatcgtgctactctactccagcctgggtgacagakcaagactccctctctcaaaaaaaaaaaaaagacaatcagggaaaataaaatatggaatggatattagataatatcaagaacactggatactgttaatttttgtgtttaaaatggcatggtaagatatttattggtgaaatggcatgatgcctggtatttgctttaaaataagcaaaaaagtagtgaaagggaccagataaagcatgaatgacaaaattgttgataatttttgaagatggaaatgagtatatggggtcttattttatgacactttctacatttatgtagcttttaaagtttccataatacagtataaatattaaacaaatactagaaagctctcattatttggtggagg

SEQ ID NO: 340925 - DNA, 571 bp, Homo sapiens
gaaaggaagaagactggctttaatttgttttcttgcttaagtcctaggaatctataaaataactattagaactcgtaaataaatttagaaaagttggagggtataaaaccagtatttaaaatatctatttcatttttgtatgtattagcaacaaacatttggaaagtaatattttaaaaatatcattaaaattgcattagaaaacataaaatacttagaaataaattaatgaacaatgtacagtacctctacactcaaaactaaagaacattgctggaagaaattaagggagagctacataaagagacacatcatgttcatctatttgtcaaaatagatatcaatttttcccaaatttattacagacttcatgccatcccagtgaaaattccagcaagacttttaaaaaaaacactaacaagctaattctaagatttatatgaaaatgcaaagcagtcaggcatagaggtgtgcacctctagtcccagctacytgggatgctgaagtagtaagattgcttgagcccaggagtttgatgctgcagtgtgctgtgatagtaccactgcactcc

SEQ ID NO: 340926 - DNA, 567 bp, Homo sapiens
tttctacattatacagaaataaagtgcacaaaaaatgtaatgcccttgaatcattgtaatatgcaatgaaataattattcattgcatattacattactcaccataatgaagaatcagtgggagacttgagcttgttttcctgcaactagatggtcccatctgggagtgatgggagacagtgacaggtcatcaggcattagattctcataaggagcatgcaacctagatccctcacatgtgcagttcactatagggttcgtgctcctatgagaatctaatgccatcgctgatctgacaggaggcggagctcargaagtaatgtttgtcttactattgagttgaaaaagctctttatgtattttgggtacatatgcatgtggtgaattgttttgtcatatgcatgtactgtaaattttttcttggaatgtgtcatttttattcagttaaaaaatatctttaatgagcagaagtttaaaaactttctcatgctcagttttgtaaacataatttattgaaaatatttttctttcctcattgtgttgttttagcatctttttaaaaaatcaa

SEQ ID NO: 340927 - DNA, 563 bp, Homo sapiens
gtactttctatgcacatttccatataatgacatagactatatattttccatcattgcctaagtagcattctatcacgttaagataaatgtaatgtgcttttccatttctatagttgagaatttggattgtttcaaattagctacgtacactaataaacattgagcaaatcaggatttcactacctggattatcctctttcattttagtggttattttcctactaaatattatgaacagttctgtgtatcatattaaagctttctttgggaggaaagtcggaaggaaagctttattctgaattaattctttgtaagcaaattttaattcaaatatagaagcagcaattacttttcataaccactttatttttcaatctatggggcatttcagaatcacagagtaaaagcaagaactttggaagtaacgtatcgtacacttattacataccagataccaagttaaagaaaatgagccctgtaacaggaactctgcragcgaaatactaatactttgcacttgtatttgcatatgacattttgcatttcaaatgttttatctttag

SEQ ID NO: 340928 - DNA, 607 bp, Homo sapiens
accaacaatctctctcctcttcacactttattcatttcttcagcctgcattgagagctggctatgtgtgtgacatggytttcaactctttgcacacattaactcagaaaagtgcagtcacttgcctaaggttcactgctatgaggggtgagcctggaggggacccaggcagtctgaccctacagttgtgctctgagcacaggctaatgcaggcaccaaaccttatcaaactgatgacatgcagtgccaggcttctgacttctggtagtttctattcttttaaaggaatttttggtagagatttttggtagaatataataattcatgtaaactgaaattaaatttttatcagagaaagatcagtggccttatgtattagtccattctcacattgctataaagaaatacctaagactgcataatttataaagaaaagaagtttaattggctgatgattccacaggctgtacaggaggcatgtcagcatctgcctctggggaggcctcagggagcttttactcatggcagaagtcaaaggaggagcaggagtcttacacagtgggagcaggacagtgtgggggaggcgccacccacttttaaacaaccag

SEQ ID NO: 340929 - DNA, 607 bp, Homo sapiens
accaacaatctctctcctcttcacactttattcatttcttcagcctgcattgagagctggctatgtgtgtgacatggttttcaactctttgcacacattaactcagaaaagtgcagtcacttgcctaaggttcactgctatgaggggtgagcctggaggggacccaggcagtctgaccctacagttgtgctctgagcacaggctaatgcaggcaccaaaccttatcaaactgatgacatgcagtgccaggcttctgacttctggtagtttctattcttttaaaggaatttttggtagagatttttggtagaatataataattcatgtaaactgaaattaaatttttatcagagaaagatcagtggccttatgtattagtccattctcacattgctataaagaaatacctaagactgcataatttataaagaaaagaagtttaattggctgatgattccacaggctgtacaggaggcrtgtcagcatctgcctctggggaggcctcagggagcttttactcatggcagaagtcaaaggaggagcaggagtcttacacagtgggagcaggacagtgtgggggaggcgccacccacttttaaacaaccag

SEQ ID NO: 340930 - DNA, 593 bp, Homo sapiens
tttgtgtagaatattaattctaaatatgaaataatcataactcatttttattgtgtgtttactatgcaccaaactgtactaggcccttcccctacatggctgcatttaattctatagcagccttgcatgtgggttttgaagtacatcaacagttcattgtgggaggatatggctctgctcttctaargggaatagggagcaaacgggctggagcactgcaggtccattctccaccctactttcctttcttgtgtgtccaggaggttgattttcatggacaatacttccagacttcattgtcctctggcttctggttggatttggctaataggaggcaccaataggagatcagagttgggtataatgtctgtaggctgctctgtggtttgacagtagctgtgactctatggtcacatagctgccactctcccactgctgcagatctcaccagattgccaaagagggccctctttctacccctccaggcctgggattacagcagctttctgctgctgatactgccttggtgtttctctaccctttgactggtcccttcttcctccccacacctccacaaatagtgctttccatga

SEQ ID NO: 340931 - DNA, 593 bp, Homo sapiens
tttgtgtagaatattaattctaaatatgaaataatcataactcatttttattgtgtgtttactatgcaccaaactgtactaggcccttcccctacatggctgcatttaattctatagcagccttgcatgtgggttttgaagtacatcaacagttcattgtgggaggatatggctctgctcttctaaagggaatagggagcaaacgggctggagcactgcaggtccattctccaccctactttcctttcttgtgtgtccaggaggttgattttcatggacaatacttccagacttcattgtcctctggcttctggttggatttggctaataggaggcaccaataggagatcagagttgggtataatgtctgtaggctgctctgtggtttgacagtagctgtgactctatggtcacatagctgccactctcccactgctgcagayctcaccagattgccaaagagggccctctttctacccctccaggcctgggattacagcagctttctgctgctgatactgccttggtgtttctctaccctttgactggtcccttcttcctccccacacctccacaaatagtgctttccatga

SEQ ID NO: 340932 - DNA, 529 bp, Homo sapiens
attgcgtattgagctgacagacatttttaaatcccagtgttgatagtgatgtaacaaaaaggcacacaatataagtgaatgcagaaaatctggtaaaacctttatgaacggcattttatctataggtccgtaaagcctataaaatgtgcattccctttaatccagcaattcacagcaattttaggaatttatcctaaggaaataatcagataaagatgcatctacaaacatgttcacactattactgtttaccatggttaaaaatggaaaataacaaatatttgacaatagggaatggctagrtaaaccttggaacatccatgcaatgataagtagatgaataattgttatagaaaaatggccatagcacattggtaagtaaaataatcagttacaaaactatttctggagcgttactccaaatttttgtaaaacaataaaaaagaggaaaaattgaaggaatatatgttgaaatattgattttagttatttctggatggtaggattacagatgctattttcccccatt

SEQ ID NO: 340933 - DNA, 529 bp, Homo sapiens
attgcgtattgagctgacagacatttttaaatcccagtgttgatagtgatgtaacaaaaaggcacacaatataagtgaatgcagaaaatctggtaaaacctttatgaacggcattttatctataggtccgtaaagcctataaaatgtgcattccctttaatccagcaattcacagcaattttaggaatttatcctaaggaaataatcagataaagatgcatctacaaacatgttcacactattactgtttaccatggttaaaaatggaaaataacaaatatttgacaatagggaatggctagataaaccttggaacatccatgcaatgataagtagatgaataattgwtatagaaaaatggccatagcacattggtaagtaaaataatcagttacaaaactatttctggagcgttactccaaatttttgtaaaacaataaaaaagaggaaaaattgaaggaatatatgttgaaatattgattttagttatttctggatggtaggattacagatgctattttcccccatt

SEQ ID NO: 340934 - DNA, 592 bp, Homo sapiens
ttgtggttatcactttgtattatcatttattacattccttaagtaactcagaaaaaaaaaacagatcaaggctagtatgctaaaggataactatttcagggcttatcattccatccactatacattgtgtaactataaataaaggctcaaaggtgtttaaaacaaagaggttatgaagttgaggcaaacctgggctaaaccactcagcatgctatacacctctctcatgctatgtgcatttgtgttctttgttgtactgttgaagcacaccaagtgtgcatttaactcatactaatttaactacatacactcaaaagggaagaatggaggaataagagagagaagaaaaacaattaaaatagtggcagtgattcrgtagttattccattcaaccaaacatacagttagatagaagaaataagttctgttgttcagtagcaggatagggtgactatagtttgcaacagtatattgtatacttcagaatattctgaaaagacttgaaatgttcctaacacatagtaattatgaatactcaaggtgatgaatgccccaaattccctgacttgatcataatgtattctatgcaagt

SEQ ID NO: 340935 - DNA, 574 bp, Homo sapiens
ttgtgttctttgttgtactgttgaagcacaccaagtgtgcatttaactcatactaatttaactacatacactcaaaagggaagaatggaggaataagagagagaagaaaaacaattaaaatagtggcagtgattcggtagttattccattcaaccaaacatacagttagatagaagaaataagttctgttgttcagtagcaggatagggtgactatagtttgcaacagtatattgtatacttcagaatattctgaaaagacttgaaatgttcctaacacatagtaattatgaatactcaaggtgatgaatgccccaaattccctgacttgatcataatgtattctatgcaagtatcatatactcatatgtactccgttaatatgtaaamtactatgtatcaataaaatataaaaagtaaaaaatacatattttcatatagtataacctttaaatataagcaaaatagttcatctgttgccaaactgaagaaagagagctctcctaaaggaagagctagagaaaaagctatctgtgagatgggatgtccagacaaaatcaacccccacaattcta

SEQ ID NO: 340936 - DNA, 682 bp, Homo sapiens
catattttcatatagtataacctttaaatataagcaaaatagttcatctgttgccaaactgaagaaagagagctctcctaaaggaagagctagagaaaaagctatctgtgagatgggatgtccagacaaaatcaacccccacaattctaaggatgatcaaaggtaattttgacttcaaatgatattgtgtacactgatgttaaaatctaagtctcatgaaaaattaatttcagtcccctgaaatgaaaataaaacctccaactctcaaatgaattatgaagtatccaatctatcacatagaaataagatttattaaattttataatgagttaatatttatcacatactgctactatatgaatcatagttttacagtttaccatctgtaaaacgatttccagtagttatttgcctaagtttcttatctcctgtactagaatctggacgttttgctcyctttgcatcgctcagagcagtagaatatttcactgcataatcttgtgaatgaacaactaaataaattaattaaaaaacatgaaatttaaacagatacctgaacacttgggaatatagatactatggttttatattatgctaactcaaaatagagtcagacaaattatgttaaaaacaaaagaggaaaaagcagtgttctataacagctatgacacataggagatct

SEQ ID NO: 340937 - DNA, 580 bp, Homo sapiens
gtgaaaatcgtaagttcaactgtaggactagaggggaggaaatattttgggcttgggaaatttttagaattcctctatttataccaatgaggagaatgcttatgaataaaattatcaataagtatttgaaaataaaatgaatgagtttgtctactaaggatctacatacagaagactgaatgattatatacatagaattgactgaagttatttttgagacagagtcttgctctgtctcccaggctggagtgcagtggcgcaatctcggctcactgcaacctccacctcctgggttcaagcaattctccctgcctcagcctcccacgtagctgggactgcaggcacccgccaccccgcctggctaatttttgtatttttagtagagaaggggtttcaccatgttggccaggctggtcttgaactcctgatctcaggtgatccacccacctcggcctcccaaagtgctaggattacaggcgtgagccactgcacctggccagaagttctwaaatacaaatgcatgtgtatatggcaattcagacagaatgttcatctgtatcctctgactctaaagcttcca

SEQ ID NO: 340938 - DNA, 376 bp, Homo sapiens
gatagtctagatttcctatattttgttgcatcaaccacataaatatgccataactgggttgattatgtgtttcacttgcttgggttttttttttttttttcaaaaataaatgtccgctgtaraaagttttcttagaaaaataaattttttaatttaaaatttttccttaatgagcaaaatatttgaacagacacctcaccaataaagacatacagatggcaaataaacacatgaaagacgctcataaccattagtcattaggaaaatgcaaatcaaacccacaatcaaataccaccacacacctattataatagatgtaattaagactgactataccaagtgttcgcaaggatgtagaacaattagaacactcaaa

SEQ ID NO: 340939 - DNA, 376 bp, Homo sapiens
gatagtctagatttcctatattttgttgcatcaaccacataaatatgccataactgggttgattatgtgtttcacttgcttgggttttttttttttttttcaaaaataaatgtccgctgtagaaagttttcttagaaaaataaattttttaatttaaaatttttccttaatgagcaaaatatttgaacagacacctcaccaataaagacatacagatggcaaataaacacatgaaagaygctcataaccattagtcattaggaaaatgcaaatcaaacccacaatcaaataccaccacacacctattataatagatgtaattaagactgactataccaagtgttcgcaaggatgtagaacaattagaacactcaaa

SEQ ID NO: 340940 - DNA, 532 bp, Homo sapiens
tagtgtagtgatttgaaaataaaatgcatttggactgctaaataagccttttgaaaatgttagcagagctataaaaatgttagtggagtatataattcctgttatacatgagtggaagtagattctgtcatcattagcagtaaatcagctgaaggatctcttatctgtatacaattatgggtcccacacatagaaagatttcaaaatgctgtagattaatgcagaacttccaatagaactaaagtgttartgggataccagttaatatcatttacaaagaataagagatttgaaatcaattatttaataaaaggatattcacttctttttttctcatccccagagcacccaatacccaccccaaaaatgttggatgaggttctacaactccttttaaatattgcctgtggcattttaatgacatcataattgaatacacgctgatatacactgatattttttaaagttctacttagagtacataaatgttcagctatcttgcctcttttatttttaaataataccttaatac

SEQ ID NO: 340941 - DNA, 574 bp, Homo sapiens
ctgtaaagctaaagtgagtctcttattggcaacatatagtttcatctacttttctttcattcagccactctacatcatttgattagagatttaattatttacagttaaagtaattattagtaggtaagaacttactactgtcattttattgttttctatatgtcttatagttaattttccctctttccctctcatgttgccttcctttgtgttttattgattttttgtagtgactttctttgatttttttacactttattttatgcatcttctatagttatttcctttgtgtctaccatgggtcttgcataaaacatcttatagttacaacagtctattttaagttggtaacaacttcaactgcatacaaaaactttgcactttaacttctacccccatattcmtgttattgatgtcaatttacatcttttatgtatctatccactacaatttactgtaactatagtcattttaacacttctttcccttaacttttgtactagagttaaaaagtggtttacacatcactattccaatattggaatattctgaatttgactaatagtaaggttta

SEQ ID NO: 340942 - DNA, 628 bp, Homo sapiens
atcttctggatactggtctttgcaatgatttcttggatatgatgacaaaagcttagacgacaaaagaaaaaacagagaagtgttatgaattagtcctttttcacactgctgataaagacatacrtgagactgggcaatttataaaagaaagaggtttaattggacttactgttccacgtggctggggaagcctcacaatcatggcagaaggcaaggaggagcaagtcctgtcttacatgtatggcaacaggcaaagagagaatgaggaaggcgcaaaagtggaaacctctaataaaaccatcatatctcatgagacttattcactacatgagaatagtagggggaaactgcccccatgattcaattatctcccaccagtttcctccctcaacacatgggaattatgggagtacaattcaaaataatatttgggtggggacagagggccaaataatatcatggtactacatcaaactaaaatattttacaccccaaatgatataatcaacagaatgaaaaggcagcctacagaatgggagaaaatatgtgcaaactatacatctgataaggggctaatttcaaaaatatataaagaactcctacaaataggaaataaacatataaaccc

SEQ ID NO: 340943 - DNA, 597 bp, Homo sapiens
acttttaccaggaggccactcttgtggtaacagcataaatccattcatgaggacagaaccctcgtggcctaatcacctgttaaaggtcccacttcttaatacagttttggttgggtattcaaaccatagcatggggatatccacaaaggctctttggaagagttgccttttgaacaataaagaatgggaatattttaacttgggaaagagggcaggagcagagcaggggcagtgggcagggcatgtcagactatggaaatagcacttcagagaaagaagcaagagtgtacttgttacatttgaaaaaaataagtggtatacatatggtggagtagaaaatagatctggaactaaaatgtagkaagtgggtatattatgcttttcctggtaatgatagtgttagcaaatgataggttagcttgaatgccaagctaaatattgacctttttaaaatttcaaggtagcattcataatattaaaaaaactctactttaaactcacaaccaaaccaacagggaagaagctaggcctctatcaagacatctttgcaaattctaacatgttaggggtcctttaaagaaagcctcgctaaccctt

SEQ ID NO: 340944 - DNA, 630 bp, Homo sapiens
atttgtctaaatgattatttaaaatatttgaaatttttggaaaacatgtaaactcaagtctattaagaccattttgttttgaaatattaatttttctcaaccaacctatttacttcacaaggacttctgttgtatcttygacacaacccattttttttcacaagtaactcagcttcaacttgcagggaatatttcatctagtcaagtattgacatagaaaatgtattcctgtcctaacccaggcaataaacagccgacacatagaggttcaatatttgtgcaccaagtgttatacagatgatttgtgatgacacaaaagtgtacttttcatctttttgaaagcatttccttggctttctgctgaaagaggggaaaaacctgccatcactcgtttctatttagacacctgaatttcattgagaaggagacttggtgacagagtgacatgattacatgctgcctagtgcttttgctgagcagggggtaccaaggcaggtttgaggatgagggagaatgtgagaaatgaggagttagttcatgcatttgatatttgcttattctcttaaccaaaatgactatatttagttataaaaagacacactgcttttgtatgcatctttcaccggccat

SEQ ID NO: 340945 - DNA, 613 bp, Homo sapiens
atgtacgcttcattttacctaatttacagaaatgcctgaccagaatatatcacataaccctgtaatgtttacttgtattatatcaagtttgattttaagtctctagtatatttttgtgtcatcaatattttctattaaccaataagagaaatattttattgctatatatatgatactgcttttttwaaaattttgatgtttttatgtgaatatctaatgctacataacatctccactaatgagactgtccttaagagaaattgtcccattttctactatttttaaaaaatatataatcactgcttttttgctgttaactatgttactcatttttttaaaaatttgttgtggtaagacatttaacatgagatctaccctcttaacagattttaaagtatacaataccatattgttaacaggaataatgttgtgtagcagatctctagaatgtattcaccttgcatagctgattagcaactccccatttccccaaatctctgataccccaaattctattatttgcttccataaattttataattttagatatttcataaaagtggaatcatgtagtatttgcccttctttgattagcttatttcacttagcatag

SEQ ID NO: 340946 - DNA, 532 bp, Homo sapiens
aaacccataactacagctctgctgcatcatagacactgtcccaagagcttcacatacaaaatcttgtttattccttataagaagtctactacttctttggtattatataaagagaagcaagatgagacctgaaaggctgcataatttactcatggccatgcagacaaatataggagaaccaggatcaaatacagctatttcaaccttaaractctgtaccgtcagtcagtaaactatgttgttatatttgccccagatcacctttaatcactttcatcataatgacctcaatggtgttgcaaagtattttcccactcacatctgaaaaaaaaaggatgtctcctccttaggtctgaattttactgacctaggtcatatcacatgggaggtgttaaaaaggtgttttcttattgactctgatagacgcatatagcctgtttgccctataatctggtgacacagacaaatgtgtcaaattttggaaagttactgtatttctccttcctatagcattaaaaaaagtttatttttt

SEQ ID NO: 340947 - DNA, 499 bp, Homo sapiens
cctttgttggatgtgcagtttgtaaatattttctcccatcctgtgggttgtctgttttctctgttgattatttcttttgctgttcagaagctttttagtttaattaggtctcatttatttttgtttttgttacatttgcttctggggtcttactcatgaattctttgcctaggccaatgtctagaagagtttttccaatgttgtattctagaattatggtttcaggtcttatgtttaaatttgtgatccatcttgagttcatttttgtttaaggtgagagagaaggatccagttccagtttcattctcctacatgtggtttgccagttttcccagaaccatttattaaatagggtgtccatttcccaacttatgttttgtatgctttgtcaaagatgagtgggctgtacatattcggctttaattctgggttttcaattctgttccattggtctaygtacctacttttataccaataccatactgttttgataactata

SEQ ID NO: 340948 - DNA, 499 bp, Homo sapiens
cctttgttggatgtgcagtttgtaaatattttctcccatcctgtgggttgtctgttttctctgttgattatttcttttgctgttcagaagctttttagtttaattaggtctcatttatttttgtttttgttacatttgcttctggggtcttactcatgaattctttgcctaggccaatgtctagaagagtttttccaatgttgtattctagaattatggtttcaggtcttatgtttaaatttgtgatccatcttgagttcatttttgtttaaggtgagagagaaggatccagttccagtttcattctcctacatgtggtttgccagttttcccagaaccatttattaaatagggtgtccatttcccaacttatgttttgtatgctttgtcaaagatgagtgggctgtacatattcggctttaattctgggttttcaattctgttccattggtctacgtacctacttttataycaataccatactgttttgataactata

SEQ ID NO: 340949 - DNA, 550 bp, Homo sapiens
aattcccatcattataccagtattcattgtttagacaacaaaatcaaggacatattctctagaattgtgttggccaattgaaatagctactagccaggtatggctagttaactttaaattaattaaatataattacaaattcagttcttcagctgtagtgatcacatttcaagtgctcaatattcacatgtggttggtggctaccatattggacagtgaagatcatttccatcacaatagcaagttctctcagacagcactactctaaaaggtctagaaagcatctatttaataaattagcccttgaatgcaattcaagttatattttatgagarctgtggatatatctagcattatgtatgctgggtgaaggcatagatgttattatttgttaagtgccacagcaatccttattgataggtgctgttctcattttagagatgagaaaacagagactgtgcacaacacaaaagtaaatgacaagctgattcaagctcttctcaccaaaacctgctgcctcaaaaagtgaaatgtactcaaagacaatcct

SEQ ID NO: 340950 - DNA, 652 bp, Homo sapiens
tagtgttgggtatgtgcaaagcattatgtaaagtgttagaagtactaacttcttatagtagccagataaataccctactgtcaaggagtttacactatagtagggtaaactgctaaactatttccaactagatagtaartattatagggcagtacccatgtcatatttatttctgtaggttccagatcacttagcatcatgctttgtttgtagaataagtttattaatgcaaagacaactaagactactcaaatatcaattgtggtacagattgcaatgccacagaagctcaaatgtctctaagctggcaaaagaagtaggaaatttgtgtagaagttgaatcacaagtttgttttatgggtatagaactggagaggacaaatagtgtttacacaaatatcacagcaaccccaagagtatatgttgtcatttatattttttcagatgaggaaattgatgttcaaaaagcttccaaaataaagcttgatcaatatcccaggttgtaattgttaaagccattgcttcaaacattttcttacttccaggttagcagaaagaaagtaggtatggaagtgacaatgaatacaacagtttccccagaacatagttcttttaagggcaatagaagccatccattttagagcatagttaa

SEQ ID NO: 340951 - DNA, 556 bp, Homo sapiens
gagagtgcaaactttgcagccatggcaagaatgcaatatatctgtggctgcagagtcaaggggtccctgaagtttgaaatagaagtaatgatgcccctgccacttgatakagagcttttggtggagaaaaaagaaaaagatgggagaggggaatttgtttggttgagctgtgagcttagtgtaaaagacaatgtttccttccagagcaaagggcatttatgtagacttcttactatgaaagatccaggtgttctatgtacaggttcttctcctgaaacacaacctactacatatttgggtgccatctagccctctttggctcatcctgtgggaattagggctcagggggctgagggctgtgttgctgctgttggtaataaactgtcctctgtctcttatccaagagtcttgtgtcctctgttcacatttatgaaatggtggcaggctaacttagcttgcaagtagggtaaaatttcagccccttaacagttcttgacaccagacaaatttatgacttctgtaagaatttaagaatttgaatacatgcatactgtgt

SEQ ID NO: 340952 - DNA, 556 bp, Homo sapiens
gagagtgcaaactttgcagccatggcaagaatgcaatatatctgtggctgcagagtcaaggggtccctgaagtttgaaatagaagtaatgatgcccctgccacttgatagagagcttttggtggagaaaaaagaaaaagatgggagaggggaatttgtttggttgagctgtgagcttagtgtaaaagacaatgtttccttccagagcaaagggcatttatgtagacttcttactatgaaagatycaggtgttctatgtacaggttcttctcctgaaacacaacctactacatatttgggtgccatctagccctctttggctcatcctgtgggaattagggctcagggggctgagggctgtgttgctgctgttggtaataaactgtcctctgtctcttatccaagagtcttgtgtcctctgttcacatttatgaaatggtggcaggctaacttagcttgcaagtagggtaaaatttcagccccttaacagttcttgacaccagacaaatttatgacttctgtaagaatttaagaatttgaatacatgcatactgtgt

SEQ ID NO: 340953 - DNA, 556 bp, Homo sapiens
gagagtgcaaactttgcagccatggcaagaatgcaatatatctgtggctgcagagtcaaggggtccctgaagtttgaaatagaagtaatgatgcccctgccacttgatagagagcttttggtggagaaaaaagaaaaagatgggagaggggaatttgtttggttgagctgtgagcttagtgtaaaagacaatgtttccttccagagcaaagggcatttatgtagacttcttactatgaaagatccaggtgttctatgtacaggttcttctcctgaaacacaacctactacatatttgggtgccatctagccctctttggctcatcctgtgggaattagggctcagggrgctgagggctgtgttgctgctgttggtaataaactgtcctctgtctcttatccaagagtcttgtgtcctctgttcacatttatgaaatggtggcaggctaacttagcttgcaagtagggtaaaatttcagccccttaacagttcttgacaccagacaaatttatgacttctgtaagaatttaagaatttgaatacatgcatactgtgt

SEQ ID NO: 340954 - DNA, 497 bp, Homo sapiens
atcagctaggcctgacacattaggtcattaggttaattcatatgaagatataaatgcctgataaaactaattctccaaaggtgtacttgcattttaaaagaggtgtttgttcattgaaattaatttttaattattaaaatgcttgagaactgcactgtgttgaagaataacctttgtcaaactatactccctcaccctagtaaaccacaaagtcagaagaataatatctagaaacccaatttttgaaaagttatcattaagcatgtaagagagatagccagccagggtcttccctatgccagtcagcaaaagaaaagctggtattaaaaccatgcaattggagtcacttccaagatggccaaataggaacagctctggtctgcagctcccagtgagrtcaatgcagaagacaggtgatttctgcatttccaactgtggcacctggttaatctcactgggactggttggacagtgggtgcagccatgaaggcaagcca

SEQ ID NO: 340955 - DNA, 578 bp, Homo sapiens
gctcatgctgcttgctctgccatgggcgatagtcctttgtctgactcaggaatctcatatgttctgtggcaacatccatgaaaccatggtaggcagayatatcagcttgtaacaggagggtaagatcaagtcccagtcccttaagaaatgtcatgccagaacacagtcctgcatcatcaattactaagggttcccaccctccaccccaagtacttcctttgtgttggtcccaggtactttgtaagccccagaagttgtagttattttttgctgttgttgtcatcttatacaaaagccatctgtgaatgatatttttaaggagtcctggaagtaatttttttttttttaccctttcagctggattgtctggcttacaagagaggtactactaattgcctacctaatatctattttcctcttttcattaagagagtcatgattttgtttgggtcaatagtgtgtccagctaacatcctatgcttccaggtctctcccacagctggaggtggccaagggtcacaattcttgccaatgaaaaagtctctaagttgggcttctattaaagctcttcaaaaggc

SEQ ID NO: 340956 - DNA, 565 bp, Homo sapiens
cttaagtttattcatacccatatctggaactgatgttgcaaggagaaaaattttggagcacctactgtttgctggttatcattctaggggctacggattcagtgatacaaaaaaagaaaaaaaaaagagatcaagtacatgctccaagaaatcaggaattctagaggagaaagacagatgcaaaggaagtcagtaataacatccagaaagatcagaccagcctgggcaacacagcaagatctcatctctggaaaaaaaaaaattataaaaaggtagccagatgtggtggctactcccaagttacttgggaagctggggcaagaagatcacttgagcccaggagattaaggctgcagtgagctatgatcaygccactgcactccagcctgggcaacagagcgagactctgtcaaaaaaaaaataaataagatcagagagtggtaagtgctataaagaaaataaaagaaactacaatgatcatgatcaactaactagggaggtgggggaattactttgaaccaggaattaattttatttagaaaagaccttccttaatggtgactaa

SEQ ID NO: 340957 - DNA, 630 bp, Homo sapiens
tcaggatctagcaacagctgcttgcccttccctgctcactcattgttataaagatcaaatgaggtgatggctacaaaagtacttcataaccttaaaaggtaattacatcaagtgctattggattataaaaacaattggtccaaattaaagatgctatacactcatagaaataaccaagaggttatagaattccattgttggatgtattaaataaaagcctagaaaaccatcattcttggatagactattagattggaatatactaggtagacaaacctttgctgtcccactaacagcataaaagcattgaacaacaaaacatttacatgtttatgaaaatttaccataatttcaagagaaaggaaatgatattataaaaagtaaaatagactcatggaattgaatgtaataaaaaaatgaaagaaattatgacacagaaactggatctcttctgtcttctacatrtaaatgcaaaaaacctgcctattggaagttcatgtaaagactttttaagattcagtcatcctttaaagttgaatttctttaaatgtgcccggtttgcactggtgttcatcatcattcaactccacagttttcaggagagaatgctcccctaaggccactgtcaga

SEQ ID NO: 340958 - DNA, 589 bp, Homo sapiens
ccagacagaaatttttcacattttttaaaaggaatgtagctcaagagggaagggcaattctaaaagtgaggagagaagagaaagtctaacaaagcagttataacttccaatataaaaaagaattctttaaaatttttgagctttaaagaaacaataggtatttatttattagtgaactccccagtcactggaaacaaactaattccacacagttgcctctaaataatggaatcaaggggatttttatatagcatgggaatttgaactatatcaaatgtrtgtgtaccttgattcttctggcagactggagaagcctgtggatctcttctcttaataatgattttaaatgtagagaattacaaaaaagttacattgaaatacagctatctaaattttaaaaataaattcgtgatataataatgtatgcatatcctcattaatgcattaaataataagatctagtatcaggtctaataactattgtaattttgagtagcacagagtgtaaatatcatttcaagataccaaaaacaaatttgatgagatgtgaaaatatttcagtcacaggtgccatgaatactactgacat

SEQ ID NO: 340959 - DNA, 582 bp, Homo sapiens
cttgggaaggaaagtgagaaatgggagtagagagagaaagaggtgatttgggacagaagtgatggaagtgatggagttctttcatttttagtccaagtatttctgtgaattttttttgcaatatgcatatattttcattacttacttaaatttaaaacaatacatttgttgccaaaaattcaaaatctcatgaacagtcttatcagtcatgttttaccaactgcttatgttccaacctgtagtagaaaagttaatgctcacactgaagctgaactaaataccaaaaagactgtccaagttgtggtttattcatgcaactcctagagcattaaaagtcttattttgttgccatcaccaartcttgaaatcacaatgcctgatgttattttctagtttcagacacgatgctatatcatgtcattaatatccaattgttattatccatacatttaagaattactccattgctttattcaaaaagtgcttttcacttcttatacaaattatacttgttaggattttaaggagcttttttttaaatctgtcttcacctaataaatttaaaattatttctattgtttg

SEQ ID NO: 340960 - DNA, 574 bp, Homo sapiens
ttcttggtgaagtttttaggtttttctaaatataagatattatctgcaaacaggataatttgactcttccttttcagtttggatgccctttatttgtttctgttgtctcattgttctagctaggatttccaatagtatgttgaataacagtggtgaaagtgggcatccttgtcttcttaaagatcttagaggaaaggctttcagtttttccccayccagtattatactcactgtggatctgtcacatatggcttttattatgttgaagtatgctctttaatatctagttttttgagagtctttatcatgaagggatgttgaatttcatcaaatgctttttcagcatcaattaaaatgattatgtggtttttgtccttcattctgttgatatgagctatcatattgattgatttgcatatgttgaaccatcattgtatccctgggataaatcccacttggtcatgaggaatgatctttttaatgagtggttgaatttgatttgctagtattttgttgaggatttttgcatcaatgttcatcagtgatactgagctgtagttttctttttttgaga

SEQ ID NO: 340961 - DNA, 633 bp, Homo sapiens
tgttttttgattggcaagtttagcccatttacatttgatgttatactgataagtaatgacttrctcctgccattttgttatttgtttcttggttgttttgtggtcttttcttaaatattttctttcttcctgtcttccaattaatgaaggtgattttctctggcagtatattttaatttcttgctttttatatgttgtgtatgcattgtatgttttttgattaaggttgccacagcgttgcagatactatctcataatccattattttaaaccaaggacaacttaaagacactgatggcacaaacaaagtaacaaacaaacaaagaaaaaacaaacactgtacattttaactttgtcaccccaccttttaacattttcttacttctatttatatcttactgtactatgtcttgaaaagttgtagttattatttttgattggttcatcttttagtttttatttttacttgagattcaagttcacgcaccacagttacagtgttacaacattctgtgtttttctgtgtacttactgtcactggtgacaaaagtaccttcagatgatttcttattgctcattaacatccttttctttcagattgcagaactctcattagcatttcttgtaggacat

SEQ ID NO: 340962 - DNA, 633 bp, Homo sapiens
tgttttttgattggcaagtttagcccatttacatttgatgttatactgataagtaatgacttactcctgccattttgttatttgtttcttggttgttttgtggtcttttcttaaatattttctttcttcctgtcttccaattaatgaaggtgattttctctggcagtatattttaatttcttgctttttatatgttgtgtatgcattgtatgttttttgattaaggttgccacagsgttgcagatactatctcataatccattattttaaaccaaggacaacttaaagacactgatggcacaaacaaagtaacaaacaaacaaagaaaaaacaaacactgtacattttaactttgtcaccccaccttttaacattttcttacttctatttatatcttactgtactatgtcttgaaaagttgtagttattatttttgattggttcatcttttagtttttatttttacttgagattcaagttcacgcaccacagttacagtgttacaacattctgtgtttttctgtgtacttactgtcactggtgacaaaagtaccttcagatgatttcttattgctcattaacatccttttctttcagattgcagaactctcattagcatttcttgtaggacat

SEQ ID NO: 340963 - DNA, 633 bp, Homo sapiens
tgttttttgattggcaagtttagcccatttacatttgatgttatactgataagtaatgacttactcctgccattttgttatttgtttcttggttgttttgtggtcttttcttaaatattttctttcttcctgtcttccaattaatgaaggtgattttctctggcagtatattttaatttcttgctttttatatgttgtgtatgcattgtatgttttttgattaaggttgccacagcsttgcagatactatctcataatccattattttaaaccaaggacaacttaaagacactgatggcacaaacaaagtaacaaacaaacaaagaaaaaacaaacactgtacattttaactttgtcaccccaccttttaacattttcttacttctatttatatcttactgtactatgtcttgaaaagttgtagttattatttttgattggttcatcttttagtttttatttttacttgagattcaagttcacgcaccacagttacagtgttacaacattctgtgtttttctgtgtacttactgtcactggtgacaaaagtaccttcagatgatttcttattgctcattaacatccttttctttcagattgcagaactctcattagcatttcttgtaggacat

SEQ ID NO: 340964 - DNA, 545 bp, Homo sapiens
ccaattttgtattgtctgagaactaaacaaatgtgagcgtggtagaactcaagcagctgtatgtatttaactacaaggttggatgctcaattcgtgcactgagtatgcaaccatcaggaaagctctgaaaggaaaatctrcaaagcttccagcatattttattaatgaccagccagacaccatagcccacaccagggagatgaggacctaattaattaggcataatactacttagcacttaccattttcaataaatattactacatgaatgaaagaatcttcaaaagactcctgtgaagcaggaactattaatcctattttacagctggggaaacagaagcagaaaggttcttggattttcctaaagctacgaaaagtggtggcatcaattcccaatttggctttctcagagctggctccctaggctatttttagaggctggttttcacaaaggtcaaagggctatgtatcataacaatacactagatgcatggaagtgcaaggctagtgtcaaaagctttgtatgagcaaattgctcatttgcc

SEQ ID NO: 340965 - DNA, 545 bp, Homo sapiens
ccaattttgtattgtctgagaactaaacaaatgtgagcgtggtagaactcaagcagctgtatgtatttaactacaaggttggatgctcaattcgtgcactgagtatgcaaccatcaggaaagctctgaaaggaaaatctgcaaagcttccagcatattttattaatgacyagccagacaccatagcccacaccagggagatgaggacctaattaattaggcataatactacttagcacttaccattttcaataaatattactacatgaatgaaagaatcttcaaaagactcctgtgaagcaggaactattaatcctattttacagctggggaaacagaagcagaaaggttcttggattttcctaaagctacgaaaagtggtggcatcaattcccaatttggctttctcagagctggctccctaggctatttttagaggctggttttcacaaaggtcaaagggctatgtatcataacaatacactagatgcatggaagtgcaaggctagtgtcaaaagctttgtatgagcaaattgctcatttgcc

SEQ ID NO: 340966 - DNA, 545 bp, Homo sapiens
ccaattttgtattgtctgagaactaaacaaatgtgagcgtggtagaactcaagcagctgtatgtatttaactacaaggttggatgctcaattcgtgcactgagtatgcaaccatcaggaaagctctgaaaggaaaatctgcaaagcttccagcatattttattaatgaccagccagacaccatagcccacaccagggagatgaggacctaattaattaggcataatactacttagcacttaccattttcaataaatattactacatgaatgaaagaatcttcaaaagactcctgtgaagcaggaactattaatcctattttacagctggggaaacagaagcagaaaggttcttggattttcctaaagctacgaaaagwggtggcatcaattcccaatttggctttctcagagctggctccctaggctatttttagaggctggttttcacaaaggtcaaagggctatgtatcataacaatacactagatgcatggaagtgcaaggctagtgtcaaaagctttgtatgagcaaattgctcatttgcc

SEQ ID NO: 340967 - DNA, 540 bp, Homo sapiens
aacctctatttttaaacactggacagcctgcaatacaggacaggatcctggagaggaaagaaacaaagttagtgtcccaggctctcaattcaaaagacagagattggagttagacagatggaaaaatctggaatttgacaggcagagtactgsaaaggagttaagccaacagagagcttcagaaatatggctaggggtgtctgagtctatgactgaatattaagtccagatgcctaggtcaattctgagatgtaaggaaatgaacaagtcctggagagttggcagtgtgaacacatctaggagacattggagttttgatcaaccagagtggagaatatactagccattcagtacagatcccaaaatgtccatactttagaaataggacaaatctcatcctagaataaatgctacttctgacatacgttagtagaaaactggtaaataaaagaatatctagcatgtttctggtatttcctatccgaactgtaccaaaatgtatatgttgagaaatttacactttctaaagctcaccagctg

SEQ ID NO: 340968 - DNA, 599 bp, Homo sapiens
ctgcagtgtatattttttaacatctggcttttttccacccatattatatatattggtagtttgttcctttttcttattgagtaatatcctattgtataaatacactataatttgtttatctattttccagctgatgaaactggttttcagtttctgaccattataaataaaggagctacaaacatttatataagtagttatgtggttatatgctttcaattctcttcagtaaaaacttaggtgtgtaattcctgggtcatatattaagcatatgcttatctttgtaaaaaaaactgtctcattgtttttcaaattggttgtagcatttttctttccccccagctgtgtataagagttccggttgctccatattcttgccaacacttggtatggtcattctttattaataatttagccatttcaactggtgtgtagtagtatgccattgtgttttaaatttctgcaatgaataatgacattgggcataatttcatgtacatttttccattggcatgttttccttggggaaatatttattctaatcttttgcacatttaaygaaattgagctgtttgccttcttattattaggatttaaga

SEQ ID NO: 340969 - DNA, 623 bp, Homo sapiens
aacagagaaaaaaacttcagagtaaatttttatgtataaaaattacataggtacatctaggattaccaaatttgcatcaactaataatttgttcagctgaattaatttgtcaagttaagtagaggtcttattcataagcacagtcatcccctctccattacactcctgtactttcctccctccagagatagtgtaaaagcagaaagagcaccttagctcttcattatttgtttttacctttcttcrgggtactttagatagagatggctagatgctacctggtgtctatcctccctttcttagtgacagagctcaagtgtttcaaggaggacaaggtatccagctagtggactacattttccaacttctttgtggctaaatgcaggtacacggtgaaattctggctaatgagatgcaagcagaattgttttgtgtgatttctaagtgaagagtttactcattatctgcttttctacttctcttatatgagagggcaataaaccaatttaattaactactattgggggggtttctgtaatgtgcagctgaacccaattctaactgaacaatatggcattattataagcaaattgtaagaaaaggtgataaaagggcaaagccag

SEQ ID NO: 340970 - DNA, 610 bp, Homo sapiens
acataaaacaaagagggtgtttaaaaatatcacttaaacaaatgtccttcttatttgaatctcagaaaattatttgaagagcaaatacatttttagtctctaagtatctgggacttctaacccctactttcttatgatgctcatcaaattcagaacttcattcatgggttgattttttaaaaaagaataaattaagtgtttccattcagactaaactgttttgcacgcacaaaatggctactatccaggtagttttgctccaggacagagtaatcaattggatcactactccactgaccagatttggtcatgaaccacttctatttcagccatctctttgaccatgkgacaggtccagtaaattttcagctatatttaatattttttacctaagcaagtaaatgatcaaactcttatataataaaaaatatttgaatcctgctggcagcttctgaatgctgagtgtttacctggacataggggctaacaatgcacttttctgccttcctacggcaggaaattataacatagaaagccttgtaaattttccaatccaaaaaaaaaaaaaactgaaggaaatagtgacaagatttatccaaaacaagatgag

SEQ ID NO: 340971 - DNA, 564 bp, Homo sapiens
tattaaccagctgttctccaacttcaaagagaatagaactagacataatgcagagcctggaatagaaggtagaagacccggagatgaattccagcttattggaaataagagttatggatctttgttacagttttaaattaaaataactgtgaaaatgagacaaaaggataagagatcaggggaataaaatggagccacaaaakgtacatcccactttaaaattctgtatccttattaacatgatttatagaagacctagttgtgccagggactgtgctagatttgagccacacatttcacttcaacctctctagcagccaaaaggaagaaaaagtgtccatttcaatatttacaattgttagggagaagcccaattattcctgaaactaagaccaaaccagaacattttactgggggccttctcaaggacactgagtaacattaagacaaactttctatcagtgaaaacagtaaagagtttctgaggaccatttcttagattcctataaggagagacactcctctatgggtctcgcctgctgctgcaggtcatgccaggtaggc

SEQ ID NO: 340972 - DNA, 559 bp, Homo sapiens
aaatgcaattgaccggtctctttccttgtgttgggacaaaagcaaaaagaatcatgaatggcacaatgatgatcattcactacctcattaactttggatgcaagttgccatatcgatagaaattatttttaggaagataaaagttggcatgtagccaaaggctgccccttaatttggatgtgctcacttgtatgatacttaacctttcatgagtgcattgggggcatatttcccacagcatggtatcccagaagctcggtgccctccagaatgactgtctatagatctggctgcattaactcagaaatgaactctactctcaggtatccaaaatgaagctctatcatgtagataaatagtgagctaaatgtgtaaaagcccattattcaagtaatatcaatatttcccaactaagtgcccttttctgcactgcaggcaaccttgataaaagcatttctttttttttaatcaaaaaaatcatttgaaagtamgaaaatttagatatgattctctgacattagatgctgtacattatgttccctccttaagaaataggtat

SEQ ID NO: 340973 - DNA, 589 bp, Homo sapiens
tcatgtataaaccctgactttcagcttctcttgaaaaataggaagatcaggcaccagtragctcatgttccttcttgccagaaactagctgggattgtgcagtagttgcccatcttatgcacctgctcaccatggtgcatctctgtgttctctgacagaactgtgtgggtcaccatttatcacctctctttcattgttctttctattattatttagagaaacatttatcaagacactcagcaaaaagaaaagtaggacaaggtggctgagtgatttttctttactggaggtcatttgcctgaagtgtgactgttacttcccttgcccagtttacattcacctttgctaactctgctctgtgttcttatctagccatatcagagggctttctccttcgtcctatgcataaatgttgatgatccagagggctgttttccccttcttggtattgaaatgaactgaagaaattgcctaaagttgctgaaaaaggaagaattttaatgtctaaaaatcttaggtggcccaagaaggtgagattgtctcggaccattgtattcctgcacctccaaatgagagaatttggaaatca

SEQ ID NO: 340974 - DNA, 553 bp, Homo sapiens
ggtcactttcctgtttatgatgactttctatatttttctatttatttacattatataagtttcccaattaatttctagccatttatttgattctgatatactctttgaagctgttttccatctccctcttattttgagggaactcattaacttttcctgtttcttctgtttcctatttattcttccaaacttcaaatttttttattattcaagcccatgarcttctgataaactcatattatctgtaagcaaatagcctacaaatatcttaagctggtataacaaggacaaaatgccttgctttattccactattaataactgaacagaaaaataaaaattaggaaacataaattctgattgaaccttatatacattaatttaaatataatgaagaataagaaatttgccctgccttaatatgaataaacattgataatttatgcaaatgaatatttaaaatcagccaaccgtacaatatttttcaaagttatttagtagtcccttagaaaagggactcttggttatctataaaacataaatgcattagatta

SEQ ID NO: 340975 - DNA, 553 bp, Homo sapiens
ggtcactttcctgtttatgatgactttctatatttttctatttatttacattatataagtttcccaattaatttctagccatttatttgattctgatatactctttgaagctgttttccatctccctcttattttgagggaactcattaacttttcctgtttcttctgtttcctatttattcttccaaacttcaaatttttttattattcaagcccatgaacttctgataaactcatattatctgtaagcaaatagcctacaaatatcttaagctggtataacaaggacaaaatgccttgctttattccactattaataactgaacagaaaaataaaaattaggaaacataaattctgattgaaccttatatacattaatttaaatataatgaagaataagaaatttgccctgccttaatatgaataaacattgataatttatgcaaatgaatatttaaaatcagccaaccktacaatatttttcaaagttatttagtagtcccttagaaaagggactcttggttatctataaaacataaatgcattagatta

SEQ ID NO: 340976 - DNA, 598 bp, Homo sapiens
gtgggagctggcacagatgagggtggggtagggggaagtgtagtggctgggagaaccgtgagacaccattgatcctaatgtgagacagaggcggaaggagtgttgactggaagcttactagaccaccatgccatctaaggaaagtggcaaggcttttyggggcatccccaaaccaaagcagcccatcaaaggagtttcaaatctcccaggaaagggtctgtcttagtattcctgccacactcagtcattggatgagagcagcccgggggagatggggccttggtgcaaacatagtgattcattctatctcttttgtagatcccattctcattttctttgcttgagttctatcttggtgtcatttctaatatttctagttcttcttgaacatgggccatcctgaaacctttgccagggactctgctgaaaatgtgaatttcctgccagtgcttctgctctgcctgttggaacaccctaaacccaggctgaacctctttgggtttgactgctggactgtaccacctcctactgactattgtcacaccctccaggaccagacttcctcccgcacctgcatttgggtctattattccaggga

SEQ ID NO: 340977 - DNA, 598 bp, Homo sapiens
gtgggagctggcacagatgagggtggggtagggggaagtgtagtggctgggagaaccgtgagacaccattgatcctaatgtgagacagaggcggaaggagtgttgactggaagcttactagaccaccatgccatctaaggaaagtggcaaggcttttcggggcatccccaaaccaaagcagcccatcaaaggagtttcaaatctcccaggaaagggtctgtcttagtattcctgccacactcagtcattggatgagagcagcccgggggagatggggccttggtgcaaacatagtgattcattctatctcttttgtagatcccattctcattttctttgcttgagttctatcttggtgtcatttctaatatttctagttcttcttgaacatgggccatcctgaaacctttgccagggactctgctgaaaatgtgaatttcctgccagtgcttctgctctgcctgttggaacaccctaaacccaggctgaacctctttgggtttgactgctggactgtaccacctcctactgactattgtcacaccctccaggaccagacttcctccygcacctgcatttgggtctattattccaggga

SEQ ID NO: 340978 - DNA, 494 bp, Homo sapiens
tgtgttaaagtgtaggagattaaaatattatgcctaacactgtataatgcatcatggaaaaatccttgtaagtataaattagctttactgttgagtatgaaatcttccttttggttatttatgaagcttcattttgaagattgccttcactgactaacaagcaaatcagaacttgtcatgtgcaaatcttgtgaagattgcaaggccagtatataattagcctcaaaagagtgtgaccaaatgtgggtaaaaaataaaaacactatgaaaagggaataagaaaaccaaaaggaggtcagggtgtggtcaaaccatgggaaccctttaactttaygttttcctgacatggtgatgttcaaagtctgtagaaaaagtgaaattatgaaacagatattcctattctgctattcaaagagctgctattgttcatagatcaaagaatctggtgatgaagagaagtttatacagctctgagtgtgaaaaatattcaaact

SEQ ID NO: 340979 - DNA, 494 bp, Homo sapiens
tgtgttaaagtgtaggagattaaaatattatgcctaacactgtataatgcatcatggaaaaatccttgtaagtataaattagctttactgttgagtatgaaatcttccttttggttatttatgaagcttcattttgaagattgccttcactgactaacaagcaaatcagaacttgtcatgtgcaaatcttgtgaagattgcaaggccagtatataattagcctcaaaagagtgtgaccaaatgtgggtaaaaaataaaaacactatgaaaagggaataagaaaaccaaaaggaggtcagggtgtggtcaaaccatgggaaccctttaactttacgttttcctgacatggtgatgttcaaagtctgtagaaaaagtgaaattatgaaacagatattcctattctgctattcaaagagctgctattgttcatagatcaaagaatctggtgatgaagagaagtttatacagcwctgagtgtgaaaaatattcaaact

SEQ ID NO: 340980 - DNA, 585 bp, Homo sapiens
aattccaacccctaaagtgatggtattcagagatggggcccttgggaggtgattaggccgtgaggcagagccttcgtaagtgaaattagtgccttataaaagagaccccagagagactctcatcccttccaccatgtgaggacacagtgagaaggtacagtctgtgacccagaaagggggccctcaccagagagagactctaccttgatcttggacttcccagcctctacaactatgagaaatccatttctgttgtttataagccacccatttgatggcattttgttttagcaaccccaacagagtacgcracagtgacccagtcccactgggagcctttgtacttagtgtctctgctgcctagagtgttcttccctccagacaaccacacagttcacttctgtaccttcttcaggtcgttttgcagagagagacagagaccttatctcatgacccaaaataaaaatatagccaacctaatcctctcctggcccaagaggcttctctcctctctctgctttatgttttctccttagcatgtatcgttattgaacatactatagagttcactcattttatgtgttt

SEQ ID NO: 340981 - DNA, 526 bp, Homo sapiens
aaaaaattagccgggcgtgatgtgcatccctgtagtcccagctacttgggaggctgaggcaggggaatcacttgaacctgggaggcagatgttgcagtgagccaagatcgcaccactgccctccagcytgagtgacagaccaagaccccatctcaaaaaaaaaaaaaaaaaaaagttattttatggtgtatttctagagagaaaagtaaagtaaattcgtgctattaaaatacgtttctgaaaactaagaaaatatcaggcaaataactaagtatcaaaaacaatataaaagttcatatggttcacaaaaattgtcttaatttttaactactgcttatgcaactgatatgaatgatatggtttggctgtgtccccacccaaatctcatcttgaattgtagctctcataatccccacatgttatggggtgattgaatcatgggggcgggtttttcctgttctgttcctgtgataatgagtaagcctcatgagatctgatggttttataaagggcagttcccctacac

SEQ ID NO: 340982 - DNA, 484 bp, Homo sapiens
gcatatattttcttgaatttgaatgccaattttttaattcatactttgctcacagaaatgtctagaggtaaatatatgtgttcattttcctccagttcaaatataaaatgrctttagaatttgaataaatttgttttgtcttctgagtttcttcagggtagaaagacacagcagggtaaagggggttaaatttagaggtttatccctacattaattgtaaaaatggaccatggtatcgacaaaaataataataagatggaaatgctgctaacattaatctcagaatacgactgaagtggtgagaacattttgagcttcctctgtggtttatattttataccaattaatcaagtacctacttgacatctctacttaaatgtctcagaggcatgtcctaaactgaactcttgtaatctcctctacttcccagcttatctctccctcaggcttcctgcttgcagttgacgggactatgaagctttca

SEQ ID NO: 340983 - DNA, 484 bp, Homo sapiens
gcatatattttcttgaatttgaatgccaattttttaattcatactttgctcacagaaatgtctagaggtaaatatatgtgttcattttcctccagttcaaatataaaatgactttagaatttgaataaatttgttttgtcttctgagtttcttcagggtagaaagacacagcagggtaaagggggttaaatttagaggtttatccctacattaattgtaaaaatggaccatggtatcgacaaaaataatawtaagatggaaatgctgctaacattaatctcagaatacgactgaagtggtgagaacattttgagcttcctctgtggtttatattttataccaattaatcaagtacctacttgacatctctacttaaatgtctcagaggcatgtcctaaactgaactcttgtaatctcctctacttcccagcttatctctccctcaggcttcctgcttgcagttgacgggactatgaagctttca

SEQ ID NO: 340984 - DNA, 587 bp, Homo sapiens
tcattgacgttgacgacttcacttatccttcaacttcagcagaaatgtttttccagggaagccatgggtagacattaaataagcccttgatcttattattcccacataacacccctttttatttatttcctggcacttcacattttgtgtaatgcatacacatacacacttcctccaccaacacatatatttgtttgtttatctaatgcttgtgtcccaataataatgtgcactcttaagggcaggaacaactacttctcttttgtttaccaatatatatgcaatacctaacattgtgtttgacacatagtatgtgctctctaaatatttgtccagtgaatgaatgcatgaatcttagaaataaatatagtaatatcttaggtatctggaatatctgtagacatgttaagtgtaaaaactatgyaagtataactttagcagagcattttaaattaaaattttaaaaatgtttagaagtcacactttcatgttaacaaaaatataaggtaattctagaaaacagaatttgttttataatttcacatatgttaagtaacaattagaaataaagcttaagtagaaacatg

SEQ ID NO: 340985 - DNA, 601 bp, Homo sapiens
ctgtcgtttgggccaaataccttaaagtcctctttctctcataacccattttcaagccattaacatatcctgtcactgtctttaaaattaagtgattctcattgttaacagtacttatgttctataaagtcactataaatactgaattagctaatatggaatcattgcccctaggggaaatacagggttatgttctgacacgtatttgttcacaaaattttcatcaactgatccacgtataccttgtttaatgtgtgtttctgtttaaagacacagtgatctattttrtagattcattagcaaagaactcacggccagcagcagcactataactcacacctgaacaaggctgatctggctttagtattttctctgtaaggaacatcacagccttcttgttcttaggaacactatataatacttcaggactacatttggggctattttaaatagcaattattaccaacaaaagggacaaaaatgaagaaaaatgggcactaaatataccacgaaaaggaaacttgtttacaacatgagacctgaaatgagaaggcagagcatcatcttattagaactcagcagggaacatgcacagcaggca

SEQ ID NO: 340986 - DNA, 517 bp, Homo sapiens
cactgtgtgaccccttggaattcatgcctgttgcctttaaacccaccaattagaaggtccctataggaagcctgcttgggtaacaccctgaactccagtaaagactttggtcccacagatcctctcttgctcccaactcactggttgagcaggcttgtaggggacaacttcctcactccctcaccttccctctggccctgtgaagcctgctgctttcttctctttgggggctgtaagtgatcaaaatgcttctgccatttcatgggttttgttgtgctgcttcctctgtgtctcacctgactgatacacccaaatctaacttcttttctgttcagggmtagaatttatagccactctcaaatgagaccttgagaccaaattggaaggaaatgatatctacaaaacagcccctcagtttcttcagatctccgttcaagtttctgcttacagacttaggccttctatgacaactttcatatgtaacagcaccccttaccctctacccccttaccctgct

SEQ ID NO: 340987 - DNA, 631 bp, Homo sapiens
cttgttgctgttttctttgtgtttatcttacttggggtttgttgagcttctcagatttgtgcatttatagcttatatcaaatttggaattttttcaatacttaatttcccaaatattttttctgcacctctgtctcactctttctggcactccaattacatgtatggtagtcctcttgttattgtcccagatgtcactggaattttgttttacttctcaatgttttctttttttcttttctatacttctgtatagatagactctattactctgtcttttctttcatagtgtccattctgctattgagaaaaatctagtctttttctttaatttcagaaatttttagatatagaatttcaattttgttctttataaatttttatttttctgcttaggtttcctatttgttcacttatttattatgtctatatatttaagtatttgaatacatttcttataccttacttgttaattacaacacttttgtcatcattggttgtgtttttacatactttatttttcttcactatgtattayatttttctgcttctttgcatgtccactaattttgattacatgctgaatattgtgatgttacattgttgagagccatatttcatggtctttatta

SEQ ID NO: 340988 - DNA, 432 bp, Homo sapiens
tgctggaacccgctgcagtgagccgagatcaccccactgycctccagtctgggtgacagagcgagatttcatctcaaaaaaaaaaaaaaagttggctcatgtgaatatggaggctgagaaatcccatgatacactgtttgcaagcattccttgagaacaaggaaagccagtggtgtgattcatttcaagtctgtagtaagcctgagaactaaaggagccaatgtgtaactctcagtcagaaaccaaatgcttatgggcagaagaagatgactgtcccagctcaagaagagagacagagaatttgcccttacttggacttctcgctctcacctggccctcaatggattggaagacggtcatttacattggtgggcatgggtcttctttactcagtctacctattcaaatgataatctcttcgggaaacatcct

SEQ ID NO: 340989 - DNA, 575 bp, Homo sapiens
gaagccctcctgaccagtgtttttctctttgtatcacatggtctccagaatcaataaaagactccttgtttcctttgctttcattaacgtgacaaaaacagtttgtagctttatgtaagaacatgtaactgcctacttggtgtaattgaaacagaccagtctttcccagatgacagaaatctgccattaacaactcattgcttttatacatggtcttaatatccttttaatgacccaatggtaccctttggggcataaaaaaattcccaatatctttgtgtgaatgaatttgagggkttttttttttttttttactttttagtaaaggaaataggaggggtctcatgacttcaattttccagtcataatttttggcacttgcaaattatttaattttttgatacctgcaaattatttttgatacctgcaaattatttaaattaatgtactacactatactttatttgcatttttccctttagtattgaatattttatgattggaagaaggcattttaatagtcctatggaagattttcagaatcacaacatttgatccatgtagcaaatcaacaa

SEQ ID NO: 340990 - DNA, 588 bp, Homo sapiens
tagctaatagctaatgtagtaaatgtcagaataataaattttgacctaaaaatctgaaaatatgggctaaaacttaaaagataaagtccaataagaattcatataacaccatgtttaaatacttgtatgtgtactcatgtgtacatatctacatgtaaaacctgagcagtgattaattcatatgaaaatgacctacakaagtgagttgacagtatgagctttaaaaatttagtataatgaacagatttataactgcaaagtttttaaagagagtttataattttattgtaacctgtgcttgttagactgtctagaatgttgtgcctggtttgggtcttaaagtttaagaagaaccagactgtctaaggaatagggctcaaaatagctcagaaaactgagaatatttagtcaccctttaaccgaatgttaactgaggttcaaacttctgatgttattctcaatccagattttagcatttatatcagttgtccattcttcagccattatttctagaaaacttcctaaaatgattttatgtaagcactatcctcaagagagtttaaaaagaattttatacagggggttgtg

SEQ ID NO: 340991 - DNA, 572 bp, Homo sapiens
tgctttattttaaactaacaactgtgatatcagttaatttaatgtaataattaccagtgtgtctcacttgttttcattcacattagaggctcaytggaaaagtgatgagctgatcactaattggaactggttagactcaaggattattttttaataatatttattgactgtatataatgggtatgaattggtgctaagcaatgagaataacaaaaagcaaagaagacatcatccctcctttcaagggaatcaacatctactggcagagttttacttgtaagtgtattattatcatactacatggaaacgtaagtagcaatcaaattcttagattaaaaaaaaaaagtccctaggttattctacccataagcattttaaacagctcgcttcacatctttaaaacaaaacaaaatgaaacaaaaacactccttggatcctacataaccttccaactaccttttatatatattcccccctttccttatccaaacttcctgaatgttgtctacacttgctgccaccattatctcacctccctctcagtcctatacccaaattctatccatccagct

SEQ ID NO: 340992 - DNA, 571 bp, Homo sapiens
tggtagttaagtttggtgggtgtcaatttatacatggatttgcaactgctygaggtgtcagtgcccctattctccatgctattcaaaagtcaattataatttggtgaccaatttttataaagtgaactttgtgtttttatatcttaagtaaatagagttaagtaaatcttgcttcttattttattatacattactattgatccatgtaaggccttttcttatttccttcttagctatacccaccattttaataggtgatcattctgttgtgtttagtgaatccttttttatgtgttcttgtaaaatgtgctctgattagtggaaagctattattaattaaataagtaatactgtgtgatatatttcattatgttcctttctttttcacaggcatctttttaatatccattcattgttgtgtttctaattcattgtttctaattgctacatggtaagttaccatgatgtacaatcatcacactttatccattgttttagttagtccaggtcactataataaagtaccatagactggatgacttgaacaaaaaacactgatttctcctaggtc

SEQ ID NO: 340993 - DNA, 571 bp, Homo sapiens
tggtagttaagtttggtgggtgtcaatttatacatggatttgcaactgctcgaggtgtcagtgcccctattctccatgytattcaaaagtcaattataatttggtgaccaatttttataaagtgaactttgtgtttttatatcttaagtaaatagagttaagtaaatcttgcttcttattttattatacattactattgatccatgtaaggccttttcttatttccttcttagctatacccaccattttaataggtgatcattctgttgtgtttagtgaatccttttttatgtgttcttgtaaaatgtgctctgattagtggaaagctattattaattaaataagtaatactgtgtgatatatttcattatgttcctttctttttcacaggcatctttttaatatccattcattgttgtgtttctaattcattgtttctaattgctacatggtaagttaccatgatgtacaatcatcacactttatccattgttttagttagtccaggtcactataataaagtaccatagactggatgacttgaacaaaaaacactgatttctcctaggtc

SEQ ID NO: 340994 - DNA, 571 bp, Homo sapiens
tggtagttaagtttggtgggtgtcaatttatacatggatttgcaactgctcgaggtgtcagtgcccctattctccatgctattcaaaagtcaattataawttggtgaccaatttttataaagtgaactttgtgtttttatatcttaagtaaatagagttaagtaaatcttgcttcttattttattatacattactattgatccatgtaaggccttttcttatttccttcttagctatacccaccattttaataggtgatcattctgttgtgtttagtgaatccttttttatgtgttcttgtaaaatgtgctctgattagtggaaagctattattaattaaataagtaatactgtgtgatatatttcattatgttcctttctttttcacaggcatctttttaatatccattcattgttgtgtttctaattcattgtttctaattgctacatggtaagttaccatgatgtacaatcatcacactttatccattgttttagttagtccaggtcactataataaagtaccatagactggatgacttgaacaaaaaacactgatttctcctaggtc

SEQ ID NO: 340995 - DNA, 531 bp, Homo sapiens
ggacaaaaaccgacagggagcataccttaagagtttcagcaaacgtcaagacatggttctgttttttggttcagcaacattttggtttttttgtttgtttgtttgtttgtttgttttcagtgcaactgaagactaattcacgataaccaaaagtcacaaaagactgataaacttgagtagaaagttatttctcaatacttgtgatgataacagccaagtgggccaaatgatccttttcatctgatcagaacctttcatctcctatcagaaaatgtaagtggaatgacaattactttaagtaggtcatttggtagaccctgaatcagagaaaattgagttatctgggaattttmtattgtatggagctattaagctctgatagcctaatgtacccatctctaccatggggtaaaattgacaaggaagccactggactcaccatgctgtctttttaggacccatacccctgcatatgacagggacaaagagaaatatttgtatacttcaagattcaaattttcctatgctcca

SEQ ID NO: 340996 - DNA, 613 bp, Homo sapiens
gatacctcatcctttagatttttttttgtaattattgtccagtagtttttggttttgctatctagctccctgcggatcttggcagatccaaaaatgacaatgcttccactgctgccagcaatccagaatttcccactggctttatcttttgatataagtacctcagttttattctaggtaactaaaactcttccttactctcagtccacctgcttctgaaggtattggctccattcccagtctctagagctgggtatatatttcaagcctggcaaattaaaacaaaattgtattttctaacagtgactggttcaatcgcaaacaggtaaacccaaaaggcataggacttttattcaaactattgagaaacacatatattctatttgatttttacaaatttgaattagttggcaaccacgtgcagtccaagaacgatgtagagtagtgcaaaactaggggcaaagaaagaccaactcctggcaatatccttaggacctcttgatcaagctgtcactgaagaaattatgcccctatgttttcaattatctaagccaatayataccttccaaaagtaaatttgattgtggttttctttcacttataactaaaatgg

SEQ ID NO: 340997 - DNA, 587 bp, Homo sapiens
ccaaagagctaatgcatcctttgtacctcacaaggaaatgccatctttcagaaccaggctccaaaacattacagaggaaaacagaattttaaatggtcaacaaaaggaaaaaagacatatttcatatttgaatatcatactcacaaggtacaaaaaatcaatataggtggaaattcttaaagaaaagcattttaagctgtttgaccattttgtaatacttgtaaattctgcatgctgaaattgtggtacttagaataattcagtaaaactaactttaatwtcttaaagtcaagattgtaagaaattacctgagtaatgaagagttcatttgcaagaatcagaaagtttttaggaagggaggaaatgtcatttcacatctggttaaattacaaagactatatttcattcttaagagaacacagaaatgattgtttttaaataaggaagatgcccagcatgttacagcattgcactgagcaataatagtgataaaagtttttaagttaattgcatgttaatgactaagttaaactcaaaatggcaatcagcagaagctaggaaacatttgtcttgtttaaatcacatag

SEQ ID NO: 340998 - DNA, 508 bp, Homo sapiens
ctcccagcttacatctttctctcatgctggatgcttcctgcgctcgaacatgagacttgaagttcttcagctttggaactcagactggcttccttgctcctcagcttgcagacagcctactgtgggaccttgtgatcctatgagtgaatactccttaataaactcccatatatatatcctattagttctgtccctccagagaaccctaatacagattttggtaccaggggtggttctagaagaacagaatattaaggatggagttctttccttgattctggggtttctggagttggctacttattattacacacaaaaacactaaggactatactttagtatgaaaaacactgatagtccttggcgtgaactgtttagagagttatgcagaaagaacgcatttgacacccctgattcactgctcttgagaggcaaggagtttagtgrctctatacataatacctttgaccatgtgtggagaaccaaggaacataatgaagctagttgg

SEQ ID NO: 340999 - DNA, 584 bp, Homo sapiens
tgaacggggtggagaagtcattaatacacccaggacactcaccgcctgttgtttttcctcacaggccgatgctgctaccagctttctgagagcagcaagatcaggtaacttggacaaagctttggatcacctgcggaatggggtagatattaacacctgtaaccaggtaagtgggatggaggcaggcctgttgtctctgaagagtagctcttgcctgatgccatttcctgagagctttgaaactgcctctattaaccttttctcagtggcctcaaaactcccccagggctyctgcctgtggaaggccctaaccttgctgtttccactcctgccgtggccagggccccacagagaagggctgatgcctgaacagtgtgggcgaggcccgcacagatcccctgcggtctcctcgcttagaagttgcaattgattcccgctgttgtcttagaatatgtggcctttgaattggggcaggaggaagagcctttgaaagatgctgtgtcagtggggatgttcagtctcctttgtccaccagcagtctgtgtgggttctcggctagcctgagaagaaagtcgaggaacgag

SEQ ID NO: 341000 - DNA, 572 bp, Homo sapiens
tcttaagtgcacggtagatagttcaaccgtttttgacgaacgtaacccataatccatcaagatacagaacatcttcagtgctctcragagtttcctcatgcccctcctgctcagtttccatccttcccaccagaagctgttgggacaatcactgttctgatttctttcacgttgggtagctttgtctgtccgggggcttcacatacctggaatcacacagtgtgtaccttttcgtgtctggtttctttcactctgcatgttttcggattcttccacgttgttgcatgtctctttcctgtttatttttattaccacaatttgtttatccttcctcctgttgggtaactggggtggtttccagcttgaggctattatgaatgaagttgttatcagtttaaccacacacaagtctttgtgtggacatattttcattttccttgagtaaatacataggggtcctgggtcctagaaccctaggtatttgctaagtcatcagaataggtatatatttaatttaccaaaccgttttctaaagtggttgtcctattttacaccctcaccagctatgtatg

SEQ ID NO: 341001 - DNA, 572 bp, Homo sapiens
tcttaagtgcacggtagatagttcaaccgtttttgacgaacgtaacccataatccatcaagatacagaacatcttcagtgctctcaagagtttcctcatgcccctcctgctcagtttccatccttcccaccagaagctgttgggacaatcactgttctgatttctttcacgttgggtagctttgtctgtccgggggcttcacatacctggaatcacacagtgtgtaccttttcgtgtctggtttctttcactctgcatrttttcggattcttccacgttgttgcatgtctctttcctgtttatttttattaccacaatttgtttatccttcctcctgttgggtaactggggtggtttccagcttgaggctattatgaatgaagttgttatcagtttaaccacacacaagtctttgtgtggacatattttcattttccttgagtaaatacataggggtcctgggtcctagaaccctaggtatttgctaagtcatcagaataggtatatatttaatttaccaaaccgttttctaaagtggttgtcctattttacaccctcaccagctatgtatg

SEQ ID NO: 341002 - DNA, 558 bp, Homo sapiens
tgtgtcagctgggccaggccatggtacccagatatatggtaaacagcagcctagctgtggctgtaaagagaatttttagatgagatgaatatttaagtcagtagactttgagtcaagcagattaccaccccactccataatgtgggtggaggctcatcctaccacctgaaggttttaacagaaaaaagaggtcgaacgtggtggctcatgcctgtaatcccagcatattgggaggccgaggcaggcagatcacttgaggccaggagtttgagtccagcctggccaacatggtgaaaccccatctctactaaaaattagccgggcttggtggcacatgcctgtgrtcccagctactggggaggctgaggcacaagaatcgctagaacctgagaggtggaggttgcagtgagccgagatcatgccactgaattccagcctgggtgacagagcgagattctgactaaaaaaaaaaaaaaggagagagagaaacaaaagactgacattccccaaggaaaagggaattctgcctgcagactctcttcaaactgtccaggctat

SEQ ID NO: 341003 - DNA, 558 bp, Homo sapiens
tgtgtcagctgggccaggccatggtacccagatatatggtaaacagcagcctagctgtggctgtaaagagaatttttagatgagatgaatatttaagtcagtagactttgagtcaagcagattaccaccccactccataatgtgggtggaggctcatcctaccacctgaaggttttaacagaaaaaagaggtcgaacgtggtggctcatgcctgtaatcccagcatattgggaggccgaggcaggcagatcacttgaggccaggagtttgagtccagcctggccaacatggtgaaaccccatctctactaaaaattagccgggcttggtggcacatgcctgtggtcccagctactggggaggctgaggcacaagaatcgctagaacctgagaggtggagrttgcagtgagccgagatcatgccactgaattccagcctgggtgacagagcgagattctgactaaaaaaaaaaaaaaggagagagagaaacaaaagactgacattccccaaggaaaagggaattctgcctgcagactctcttcaaactgtccaggctat

SEQ ID NO: 341004 - DNA, 497 bp, Homo sapiens
gtggggttggtttctcctgaggcctccttccttggcttgcagacagccactttctccccacatcctcctatgtgcatccctctgtgtgtgtctgtgtcttaacatttatgcctgaggttgcaattttttgaatttttgcaatcagacccctgcgatgaccttgagcagtaggatataaataattctcacatgcttagcgttccagtaatggaacactaggcataaatgggtattaatctcctcttctcatgaggacaccaggcagattggattaaagcccactccgatgacctcattttaccttaatcccctctttaaagaccctgtctccaaatgcagtcacattgtgtggtactgagagttagggsttcagcagaggaatttgcagggaacagctttcaacctatcacagataatgaagccaaagtaccatccatccagctcccgccaaatcacacccagatgcccacagcagcctcatcggttcctgccctcac

SEQ ID NO: 341005 - DNA, 497 bp, Homo sapiens
gtggggttggtttctcctgaggcctccttccttggcttgcagacagccactttctccccacatcctcctatgtgcatccctctgtgtgtgtctgtgtcttaacatttatgcctgaggttgcaattttttgaatttttgcaatcagacccctgcgatgaccttgagcagtaggatataaataattctcacatgcttagcgttccagtaatggaacactaggcataaatgggtattaatctcctcttctcatgaggacaccaggcagattggattaaagcccactccgatgacctcattttaccttaatcccctctttaaagaccctgtctccaaatgcagtcacattgtgtggtactgagagttagggcttcagcagaggaatttgcagggaacagctttcaacctatcacagataatgaagccaaagtaccatccatccagctcccgccaaatyacacccagatgcccacagcagcctcatcggttcctgccctcac

SEQ ID NO: 341006 - DNA, 612 bp, Homo sapiens
cctgactaattttacttaatgttattttattttttgtagagatgggggtctcactatgttgcccaggctggtctcaaactcctgggctcaagcaatcctcctgcctcagcctcccagaacgctaggattacaggcatgagccactgcacttggccttcagctcggttttttaaaggtccttgcaattcttaacatgggacaacatgccaaaaatagttacaatgctgcatatatttaaagtattttcctgaaataatytactcttttaacacacaatgcaatataattgtgcttttcacaagttgattagaggatatattttttaaatcctttgattcattttgcaggatgggtggcatgggccgatatggaggcatcacctatagttgcatgaagaaagttgtctccttttaaaattgtcagagtagctctgtgaccatgtgtatgacctcatttggagataatgtcataaagccatgcgggaaaccctttgggaatgtagggtctgggtcaaatggccttgcattgagaaaccaggaaattcacttttcagctcttttccatatctgtaaagtgggaattacagtccctatctcactggtttgctgtgag

SEQ ID NO: 341007 - DNA, 536 bp, Homo sapiens
cttttgtctgaaattttcaagaaatctaacttataatttcaaaacgtttacagactttacattagagaaggatgaaacccgagttcctaatggtggaagagctggcgaggagagagacagttttctctgcagagccccagaagagctcagaaaatggaagcaccttgtactgcaagaggtggtgtgcagggcagggctggggccagcagatgagtggaggaaatgtaaaaagagcaggtgagcccccagattccctccccaactgataggagaaggtaggtttactcgctggaaaattatggggacaacaggtktggggataaggtgccatctggaagggtagatgattaaaatgttggaagaatgggattcagaagtggggaggggcaggctacaggactgctattttttattttaagtcatgtgatagtatttgatgttttatttctatttctagttttagacaaggtctcactctgttgcttgggctagagtaaagtggcatgatcatggctcactgcagcctcgacttcctg

SEQ ID NO: 341008 - DNA, 536 bp, Homo sapiens
cttttgtctgaaattttcaagaaatctaacttataatttcaaaacgtttacagactttacattagagaaggatgaaacccgagttcctaatggtggaagagctggcgaggagagagacagttttctctgcagagccccagaagagctcagaaaatggaagcaccttgtactgcaagaggtggtgtgcagggcagggctggggccagcagatgagtggaggaaatgtaaaaagagcaggtgagcccccagattccctccccaactgataggagaaggtaggtttactcgctggaaaattatggggacaacaggtgtggggataaggtgccatctggaagggtagatgattaaaatgttggaagaatgggattcagaagtggggaggggcaggctacaggacwgctattttttattttaagtcatgtgatagtatttgatgttttatttctatttctagttttagacaaggtctcactctgttgcttgggctagagtaaagtggcatgatcatggctcactgcagcctcgacttcctg

SEQ ID NO: 341009 - DNA, 364 bp, Homo sapiens
tagcctcctatatcaagttgctgtacatgcttgctaaagagtatctgccaaaacaataggttttatgtcaccataattaagattgagttgtttctcctgaccctccctgatcagcttattctgttattccataaagctgtccctgaaatgtgacagtaggatgatagaggttttataaaaaggtagcatgagaaggatatttcakgtggtgatggtaggagggtgatagaagtatgtgaggtgtggaaaccgtttgaaagtttaaaaagaaaatggctagagcccatctcaattctataaacataattgggggtaaaaagaaatctggagttaagttctgccttcagtagttgtgtaatcttgg

SEQ ID NO: 341010 - DNA, 325 bp, Homo sapiens
agttggttttattcttggtggtctcatagaagtaatgaagttattttctagaaaatcaagctgatttctaatgttaccatggtatcttctcatttccacccttctcctctacagggctttggctgaacrggaacccgctctacagtttagtgccacagtcggggtcaatgcctctgtcaccactcatctctccttcctgccccagggagaacagcgccgaacccaccctgtggcctgttctttctgccctgagttctcccatcacgttgagttcacatgtaacttggtgactcagcactgtagtggagaggcctgtttcctagca

SEQ ID NO: 341011 - DNA, 493 bp, Homo sapiens
aatgcatgaagtcaactggtataaggttawaggtactaaactttggataagttactaaacaaaattcctctttagccacattacattgtaaaaattaaagcaagcaaataaaaaacagaacagcaaaacaaaaacaacaaacagccaaacaaatataccagagtgcgttcttccccatagttgccaatttgcttgctatctttgctttgcagtctaccatggcctccaagaataggttaaaaaaactacatgaccgaaagttgtggacctgactactggtaacttctgtcttaccagaagcagtataatagagtgggtcaagaacagtcactgggaccagatatcatcagtgttgtctcctgcccccatttatgtaactttggtcaaattacatgacaccttgtgtgtctgtttcctcatagggtcatggtgataatttcataggtaattagtataaaattctagctagaactgtatcaggtttggagtaata

SEQ ID NO: 341012 - DNA, 493 bp, Homo sapiens
aatgcatgaagtcaactggtataaggttaaaggtactaaactttggataagttactaaacaaaattcctctttakccacattacattgtaaaaattaaagcaagcaaataaaaaacagaacagcaaaacaaaaacaacaaacagccaaacaaatataccagagtgcgttcttccccatagttgccaatttgcttgctatctttgctttgcagtctaccatggcctccaagaataggttaaaaaaactacatgaccgaaagttgtggacctgactactggtaacttctgtcttaccagaagcagtataatagagtgggtcaagaacagtcactgggaccagatatcatcagtgttgtctcctgcccccatttatgtaactttggtcaaattacatgacaccttgtgtgtctgtttcctcatagggtcatggtgataatttcataggtaattagtataaaattctagctagaactgtatcaggtttggagtaata

SEQ ID NO: 341013 - DNA, 551 bp, Homo sapiens
gtttacctgatactacttgagcaatatatatacagttgaattcatatctttctatagtggcggctgtggtctgtaaccrtctctcaccttcaagaccaagaccttcatttgctcagttactggaaattttggcaggtgacaggtctcagcagagtcctcctccagaatgaccatctgctgaagagagtcacctcacccaaagccctgctttcttccttgggcagtgcacatccaacatctggccatagtcggggtagaggtccagccctctacccttggtttgaaaggactctgcagggccttctatagctttccatgggttcctctgaggccactgctgtgactacatcttgtttgaactcctactcctgcttcctactcctttttttttttactgccccacaggtgtccattcaataaacttcctgcatacaaatatccacctcagagcatccttcttaaatcatctaacctgtaacactttggaatccttataggtctcttcttgtaagaatgaggatgagaaggcacaaacataagcagagcaaagc

SEQ ID NO: 341014 - DNA, 551 bp, Homo sapiens
gtttacctgatactacttgagcaatatatatacagttgaattcatatctttctatagtggcggctgtggtctgtaaccatctctcaccttcaagaccaagaccttcatttgctcagttactggaaattttggcaggtgacaggtctcagcagagtcctcctccagaatgaccatctgctgaagagagtcacctcacccaaagccctgctttcttccttgggcagtgcacatccaacatctggccatagtcggggtagaggtccagccctctacccttrgtttgaaaggactctgcagggccttctatagctttccatgggttcctctgaggccactgctgtgactacatcttgtttgaactcctactcctgcttcctactcctttttttttttactgccccacaggtgtccattcaataaacttcctgcatacaaatatccacctcagagcatccttcttaaatcatctaacctgtaacactttggaatccttataggtctcttcttgtaagaatgaggatgagaaggcacaaacataagcagagcaaagc

SEQ ID NO: 341015 - DNA, 551 bp, Homo sapiens
gtttacctgatactacttgagcaatatatatacagttgaattcatatctttctatagtggcggctgtggtctgtaaccatctctcaccttcaagaccaagaccttcatttgctcagttactggaaattttggcaggtgacaggtctcagcagagtcctcctccagaatgaccatctgctgaagagagtcacctcacccaaagccctgctttcttccttgggcagtgcacatccaacatctggccatagtcggggtagaggtccagccctctacccttggtttgaaaggactctgcagggccttctatagctttccatgggttcctctgaggccactgctgtgactacatcttgtttgaactcctactcctgcttcctactcctttttttttttactgccccacaggtgtccattcaataaacttcmtgcatacaaatatccacctcagagcatccttcttaaatcatctaacctgtaacactttggaatccttataggtctcttcttgtaagaatgaggatgagaaggcacaaacataagcagagcaaagc

SEQ ID NO: 341016 - DNA, 551 bp, Homo sapiens
gtttacctgatactacttgagcaatatatatacagttgaattcatatctttctatagtggcggctgtggtctgtaaccatctctcaccttcaagaccaagaccttcatttgctcagttactggaaattttggcaggtgacaggtctcagcagagtcctcctccagaatgaccatctgctgaagagagtcacctcacccaaagccctgctttcttccttgggcagtgcacatccaacatctggccatagtcggggtagaggtccagccctctacccttggtttgaaaggactctgcagggccttctatagctttccatgggttcctctgaggccactgctgtgactacatcttgtttgaactcctactcctgcttcctactcctttttttttttactgccccacaggtgtccattcaataaacttcctgcatacaaatatccacctcagagcatccttcttaaakcatctaacctgtaacactttggaatccttataggtctcttcttgtaagaatgaggatgagaaggcacaaacataagcagagcaaagc

SEQ ID NO: 341017 - DNA, 582 bp, Homo sapiens
taaattagtaaatacatttttatttcagtttagaggctgatttttagagtcttctttggatgcaaggtttagcttttttgaatcatttagacattgtttaaaaaagcatgatgtggccgggcacsgtggctcacgcctgtaatcccagcactttgggaaaccgaggtgggtggatcacctgaggtcaggagtttgagaccagcctggccatgtggtgaaagcccatgtctactaaaaatacaaaaatcagcagggcatggtggcaggcgcctgtaatcccagctactcgggaggctgaggcaggagaatcacttgaacctgggaggcggaagttgcggtcagccgagatggcaccattgcactctagcctaggggacaagagtgagactttgtatcaaaaaaagaaaaaaaaaaaaggcattatctgtgccctccaattttgatgctattttcttacctttagtatttagttgaatatgttgtcatgttgacatttatttctatgaaaaatgtatagagcctgaaataaatatctaatacaaagaattattcaaggtgtattagtttcccagggctaccata

SEQ ID NO: 341018 - DNA, 582 bp, Homo sapiens
taaattagtaaatacatttttatttcagtttagaggctgatttttagagtcttctttggatgcaaggtttagcttttttgaatcatttagacattgtttaaaaaagcatgatgtggccgggcacggtggctcacgcctgtaatcccagcactttgggaaaccgaggtgggtggatcacctgaggtcaggagtttgagaccagcctggccatgtggtgaaagcccatgtctactaaaaatacaaaaatcagcagggcatggtggcaggcgcctgtaatcccagctactcgggaggctgaggcaggagaatcacttgaacctgggaggyggaagttgcggtcagccgagatggcaccattgcactctagcctaggggacaagagtgagactttgtatcaaaaaaagaaaaaaaaaaaaggcattatctgtgccctccaattttgatgctattttcttacctttagtatttagttgaatatgttgtcatgttgacatttatttctatgaaaaatgtatagagcctgaaataaatatctaatacaaagaattattcaaggtgtattagtttcccagggctaccata

SEQ ID NO: 341019 - DNA, 548 bp, Homo sapiens
tataactaaaacaatatctacattatatatacataatatatacatatatacaaatatacatatgttatgatatacatatataactaaaatacaatatatacatcacatatacttaaatatataaacatatttagttaaatatatacattcattaaatatatattgtgtatatatattatgttttagttatrtatgtatgtcatatatatgtatatcatgtatatatttccccccagaggcttggattgaaccagtaactaaaacaaatggagcagcaagctgagtttatgagagcatgggactattgtgtccatcacaatgggtcaggttctggcttgtggcctcacaaatgtcagagtcacagtggtcaggagagaagctttgacaattcagtaaacctaccatgatgattagaaaataaccgtagtaacaatagcatccatttggggacacatgatggatcagacagtgtaatagaaacagttgacatatttattaaatgtaatcccaatgttagcacttaaaaataactatttttaatttcattt

SEQ ID NO: 341020 - DNA, 502 bp, Homo sapiens
gctcttaactatcaaacagtcataaatattttggccaagtgtggtggctcatgcctgtaatcctaccacttcgagaggctgaggcaggaggattgcttgagcccaggagctcaagactatcgtgggcaatatagcgaggccctaattttttgtagggacaaaaaataaataaataaagttagtcaggcactgctgtatgttcctgtagtctcagctacttgggaggctgagtcaggaggattgtctcagcctgagagatggaggtggtatcacccatggcacttcagcctrggcaacagagtgtgatcctgtctcaaaataaaatgaatttaaaaggcaatacataaatgaatacatattaattgcctatttataagaacacttttagtattagtaacaaattgaaagaatttggaaaattccggttcatgaaaatagcaggctattttctaagctagcatttcctttgtttcaaacatgaaataaagaatttgagaatatc

SEQ ID NO: 341021 - DNA, 502 bp, Homo sapiens
gctcttaactatcaaacagtcataaatattttggccaagtgtggtggctcatgcctgtaatcctaccacttcgagaggctgaggcaggaggattgcttgagcccaggagctcaagactatcgtgggcaatatagcgaggccctaattttttgtagggacaaaaaataaataaataaagttagtcaggcactgctgtatgttcctgtagtctcagctacttgggaggctgagtcaggaggattgtctcagcctgagagatggaggtggtatcacccatggcacttcagcctgggcaacagagtgtgatcctgtctcaaaataaaatgaatttaaaaggcaatacataaatgaatacatattaattgcctatttataagaacacttttagtattagtaacaaattgaaagaatttkgaaaattccggttcatgaaaatagcaggctattttctaagctagcatttcctttgtttcaaacatgaaataaagaatttgagaatatc

SEQ ID NO: 341022 - DNA, 596 bp, Homo sapiens
atttatattttgtggaccacattgatctttgagacaaactgatgagggttttataaatgtgcaaaacataattatccaattatattttattgtgagcatgattatttctggcaattgtgacagaaggaacaaaggctaggcatgaacatacaattacattccttttttaggactttgsctacaaatgctacttacagtctgttaagatcttacattcattctgcaaacttttccctatatcagagaaaaagagatcttttatttcatgttcaggaaagtcaaagctcaaattcagataaaaatgaagttaagtgctaaattctcccttggaacaatgggtggattgtatggtttgcaattatcatatcaagcctttcattagaatataagtattcaacacataatacattgtcaaaacatttatgcctttgtctttgtctattatattgaaaggtaattctcctgtatggcatggtctagcacaagacagtattattttgaatgtaaaaataatatagagtgttggggtgctatgtatttctaacattataattattatggtgattatattacctaattaaaacttttctttttta

SEQ ID NO: 341023 - DNA, 596 bp, Homo sapiens
atttatattttgtggaccacattgatctttgagacaaactgatgagggttttataaatgtgcaaaacataattatccaattatattttattgtgagcatgattatttctggcaattgtgacagaaggaacaaaggctaggcatgaacatacaattacattccttttttaggactttggctacaaatgctacttacagtctgttaagatcttacattcattctgcaaacttttccctatatcagagaaaaagagatcttttatttcatgttcaggaaagtcaaagctcaaattcagataaaaatgaagttaagtgctaaattctcccttggaacaatgggtggattgtatggtttgcaattatcatakcaagcctttcattagaatataagtattcaacacataatacattgtcaaaacatttatgcctttgtctttgtctattatattgaaaggtaattctcctgtatggcatggtctagcacaagacagtattattttgaatgtaaaaataatatagagtgttggggtgctatgtatttctaacattataattattatggtgattatattacctaattaaaacttttctttttta

SEQ ID NO: 341024 - DNA, 632 bp, Homo sapiens
tggggtgctatgtatttctaacattataattattatggtgattatattacctaattaaaacttttcttttttattgataaagaattaaatattggaaaataattaagttttactaaatgcactcagtgaagattttggtagaacagaaaaatcaactcatgagccagtgttagtaaacatttttgtgcctcttaaaacctcttgcacttcaatagttataattattattgaaagtccttgaggaactctttcaacaattgcacaattataatttgcagattcagctttgagtgtgaactatgagtttattaactttcattgattctgtttttgcagtgtctaccatatctatcttttcctgttccactataaccacaytggttcagatacctatcttcttcctgaattgctataaaaatcttcatctttctaactctgttctatttgaataatatatccttcataaagataccagattgatcttacaaaaatattgtcatcatcaaaaaatataaactcattccacagtgggaaaagtttaatatatagcttcatggcaaaatggaatcatattttcttcaacccagtctattcacttatcttttccatgagtaattgctctcataattact

SEQ ID NO: 341025 - DNA, 562 bp, Homo sapiens
tgaacattctaatgatattaatgcttcctatccatgagcatggagtgtttttccatttgtttaggtcatctttgatttctttggtcactagtttgtagttctctttgtagacatctttcacctccctagttagctgtattcctaggtataaaaatagcttattcaatatatatcattgattcattaatattgaactgatggccaacaacattatattgcatacctgaatgaaacttacccaacacatatattttctctgcaaggcacatcacagtattcctgtgcttaggaacagtggacaacgcttcagcatgatgcttaggggacattttaaacagggcaatcatcaacaagcactcaaaaatgtgggactatacagatagggaaaggaacacttgtttgcatcakgagagctgaaataagaacccgggacttgctgtgtttgacctcagctgagaatgtgcttgtctggtgactgagatttttgctgctctgtgaaaatgactacaaaagcactgtgaagatagatttttgaggttacagataaattttagcaaatggg

SEQ ID NO: 341026 - DNA, 597 bp, Homo sapiens
cttttttggggaaaggtggaatgaaaaacattccattttaatgtatctacgatctttgaactgtatttttttgcataatatattagagtttgctttttaaacatcatagttatttggagttcataatgtatcacttcaagtaaaatatagaaactttacaaccagatatatctatttattagcctagcatcattttatagttgtcatacatatgactatatatatgtgttacatagtacatataacattatatataatatgtagtgtgtgtgtatatacatatatacacacacaaataactatatataatatgtatatacattatatataatatgtrtatgtatatataatatgtatatatgtatatacacacacacacacacacacatatggagagagagagagagattgtcccaaaacacagtcaacatcttttgctgctgctgtttttatccttagtactgttcttcttattatttatttatttttttgagtgaaaatatttcccacataggaaatacctgcacacttaggcaatgggtggggaccactttgtccattctttattgaataaagtctctgagctgctttatgcct

SEQ ID NO: 341027 - DNA, 530 bp, Homo sapiens
agtatgagacacaagtcctgaaagatcaaaagagtatatgaagtgaaacaggatgataaataaaaaaagattgtgctgcttgggaaaaaaagtatacatcatacaaagtaagtggggaaaatgtcatatgaaaaggattagaggatgaagcatcctgggaatggcaatttggctggaatcacttgaataataggtggaggtggtagaaggcaagtcagaaaagcaaaaatgtgaagagcattatacgccaagtcagagagttttgaaccttaccctaggagcaatatgaagctattgcaattttaaatctatgagagactatgtttgtcactgagaagtcaggaagacagaaaccacactagatatttcaacatagagactataataaagggaactggttttacaggcgttggaggctgaatgagcaattgggaacactaaagtaattcaggcatagtaactaatgcaatcccragataataactacaagaagcagctaccatccatatgactttggaaatatatagaag

SEQ ID NO: 341028 - DNA, 564 bp, Homo sapiens
ttcacaaaaatagaaccagatgaatatcctaaaactgaaaagaggaaaactgaaattggagattaaaatttaggctaaacagcaagtaagacataacaaaatacaaaattactgaaatgagagataaatcagtgcagaatgttagattgagataagaaactaaaaatgatggaaaacacataaaagagtagacttttttatacaattaaaaratctaaaaaatataatgagagttttagatgtagagggaagagaaaatgtatcagagtggtatttgaattgctactgactgacaatttttcaaaaccgaggaaatacattaaaccatagatttaaagaaactgtgaacatcaagcaggataaatataaagaacaatactaggcacaccatagtcaatatgctgaaaagcaaagacagaaggaaacaatttaaatcacaagaaatgaaaaggggagacatcactttcaagggagcaatacacttttcatatgtgttactgtagaaacaaaaccacattgaaacaacagcttcaagtttctggaataaaataacttccaacgtga

SEQ ID NO: 341029 - DNA, 338 bp, Homo sapiens
aaattgagattactctttggtagcagaccagcagctaaagaaatactaagggcaatgtgtaaagcagaaaaaaatagatccctgatgcaaatcagaaaagcagaaagaactaaaaatttttgtaaaataaatatatgtgtaaacttaatgcctatcggccatgtcaaataaaagtaatgtttgctcattgctgtagtctgaatgttcgtttcctccccaaattcatatgttgaaatcctaatccccaaggtgatggcattagragaaggggacattgggaggtgattgagtcatgtgggcagggtccccatgattaggattagtgcctttataaatga

SEQ ID NO: 341030 - DNA, 616 bp, Homo sapiens
catatagtaatttctttccagttttcatctcaaaggcattggcctgcatcttatcttgctcagcatccctgcagagttgaaccaagagctaaggtctctttgaagttaatggagactctgtgctcagattagccctacaggatttgtctagcaaagcaagaaacaggctctttatttatactggtgtttatgaaatcacaggggaaacaactrttactcagcaggatggctcttacagagatggagatatttgcagttttaaatctactttagcttttttttctttattagtcacttagcgctacagcatattcttaggatctaaatgcctaccttaattgaaagagccttggaaaaaatagccaggagacttgcattctaatagcaaccctggtacttattaactatgtatccttggagaaatcatcttttctctatggactttaaagaaattggattagataatctttaaactcattctgagaagaaaatttttgtgattcaacatattaacttaaaaggaactcttttacaaggaaaggtatcaagataagattttgtaactacaatccaaaaacaatgttcagagagtcagtccgcagttatatataatatt

SEQ ID NO: 341031 - DNA, 530 bp, Homo sapiens
atttatatatgattaagctttaatatttatcttccatcttttctattgtgctaggctgtctttttatttggctcatggtatctttcttcataaagaagagtttaaaattatcattattttgttaaagttatcttctcttcctgcatggctgtctgttttgttttctactgcaaaaggccccccacgctaaaatattcttgacagtattttcataattattttattgcacttagttctttaatcaatgtggattttaaaatgttatgaactagaaatctaatttctctcattcaaatgaatcattctttttccattggttcttttttttccttttcttctctattctttcactttttctcttcyacatcatctgcatatttagtctgactgagattgcattacatagattaatttagaaaaattggcattaataatatagaatattctcactgattaatatgcatgtgtagtctttagtaaatttttgtaattttttaatattgttcctgaatatttacaggcctatataa

SEQ ID NO: 341032 - DNA, 501 bp, Homo sapiens
tgtgggatttcaatatgtgcgattaatagctctattaaagatttttcttcttcataatgctttatcttcttttattttagaattctatatatttaaaaaaatgcttcagtgttgtcaaaagataaacaaacaaacctgaagagcaaatgtattttgggagctaaccattgaaccatataacattacaataaaatacttgcttctgcaacatgaatgcaactgtactcatggttcagcaagttctcagagcgtaatattaaagcagataactagattctcaatgtgatatggaaacaatctctattgcttgtagagtgcagattgaaaatattacatagcctsagtttgacattcaacttaaatgcctttctacttgattacttgacccttgttctgagtttccagctttttaaaaaaattgtttagttgaaaacaattcaaaagaaagaatgtttaatgcatgtattgatttggctgcccagtcctgctactcatttaata

SEQ ID NO: 341033 - DNA, 503 bp, Homo sapiens
tagtaaagcagaagaaagccagcaatataagcctaacagaagaaatccaggtgccttctgccatcatagtgtatggaatacagatgtttcagcataaatattaagatcaaaagactgagataattatcactcacaaaaggaagacaggaaagctatgaggatgcacctgatgctgaatagtaggaggagtactcattgcagctgtcattgaactgattatctgaaggcaaagcaatgctattttgtgcaaacaatatataatacttagggaatggcaattagaatcaygagtccttgcgtaagtgaatggagcctgatggtgtttactcgattttaaatagctggggtagtgatagaaaaataagcccttcaaagcactttggaaatttcactgtcaggacattaatgacaaactaatcccaagaagctgggtaaatcaggagagaactaaggaagaaaatctcacagctagtatttgtgggggttctcccctgaggtctccc

SEQ ID NO: 341034 - DNA, 405 bp, Homo sapiens
ttaaatagctggggtagtgatagaaaaataagcccttcaaagcactttggaaatttcactgtcaggacattaatgacaaactaatcccaagaagctgggtaaatcaggagagaactaaggaagaaaatctcacagctagtatttgtgggggttctcccctgaggtctcccccatcatctgtttccatagtaactccaggtttccatgatgtttacagatggcattcatttaatgtcaaaacacttaatgaaaaaaatctactacgtatagagaatgcactacttgccagagcacttgatgctaattcagcacatacatgtgcattttaacaacaacttaatggcaacaytaatacatagcaataatttactgggcattttttgccacaagagtaaaacagttaaa

SEQ ID NO: 341035 - DNA, 315 bp, Homo sapiens
acttttggttacactttatataatctttacttatatttgtttatgtgtttaattctttaatatttatcttacccactaccatgtcagttccacaaaggctgaggccgggtttatttgttcctcagtcattcttgtttctacctatgggaagccctcaataaaaaagtgttcaatgatttacatgggagaagtgacttaaccaaggtcataaaactaattaaagtcaaatmcagacaagaactcagcatctttcctcttcctgtacttggcattctttgaacctattgccattctgtattcttatgtccattccag

SEQ ID NO: 341036 - DNA, 588 bp, Homo sapiens
cttctgttaaaaatgtgtagaaagtgtgtgtctgttaaaatgtgtagaaaattctgttaaaatgtgtagcaggctaagtttcaaactgcaactgaatagagagaatcaatctatgcatgttcagtttgtgctcattttaataaggaaagagactgatgacctctctacttaaaagaggatggatggatgcacgtttttaagaatatttattttacctcaggagaactaaaataataacctatccttcyttccaacttggtctctgcctgagcaggttttatcaatggacctgtcacaatactgaaattgggagctcttgctatgttgttttgtaaatccaattatcttcaatccttgccatttcagcaaagaaacaaacaaaaaaagcttttaaagaaggtatcaaatagcatttttaaatttatttttcagtggtatcagggaaattgccatgtcttcaccaagtgatataaatctatattactcattgaatccatgccttgaaaactagaaatgatttttttttctgttatactaaaaaagttaaataacttggaaagtagtactattttgactattggcagtact

SEQ ID NO: 341037 - DNA, 433 bp, Homo sapiens
tgtcttggttattacatccagcagaagcttgcagaacaacaaacaaaaagctaccacatctgattatttttcttcaagaagtcaaatmtatgccctctccccattcctcattcacacatttatcttacatataagtaaaaagatattacagaacttttttactcatttaaaaaaatagtcttatttacggtcttaattgagttgaaaaccatatttacccaactctgccttaaaaatcttaaaaatataaactatacatttcctactgtagtagtcaactagggacaaaataatgctatataataaagaaaacaccacaaaattaagtaaaataataatgagcatgtattatccccttcataagtctaaaggttgctgtgggtctgctgtttagctgggctggctttgcttcacatatctcattctggggctc

SEQ ID NO: 341038 - DNA, 595 bp, Homo sapiens
tatgtggctgcactctctagcctgagcaacagagctgtctcaaagaaaaaaaaaagatgatgctaaaatgttacctcttctgtgaagcctttttagccacctaacaagttgcatgtgttaatcaacatatatgtgtatygctattaaaggagacatgcacacacagatgcacctttcaagtatttaagccaggtttccctctctccctacctccttccctcctaccttcttccctccctccctccctcccttccttccttttctctctttatcccttttctccgtctccctcctttctctgtttttatctttttccctttccatcttccttctcctctcccctcttctcttttttctttctttctgatctttaataacctgtggtagacattgatactagtcactcatgtatatatctggttctcttcattctaggaacatggtagaactataattaattacctgtcccaggaagttaagcatagccatgtgacttgttttacccaatgaaacatgtgcaaagataaatgcatcttccaggcagagtactttaagaggtggagcacaattatttatcttcctgtatagcagtaat

SEQ ID NO: 341039 - DNA, 595 bp, Homo sapiens
tatgtggctgcactctctagcctgagcaacagagctgtctcaaagaaaaaaaaaagatgatgctaaaatgttacctcttctgtgaagcctttttagccacctaacaagttgcatgtgttaatcaacatatatgtgtattgctattaaaggagacatgcacacacagawgcacctttcaagtatttaagccaggtttccctctctccctacctccttccctcctaccttcttccctccctccctccctcccttccttccttttctctctttatcccttttctccgtctccctcctttctctgtttttatctttttccctttccatcttccttctcctctcccctcttctcttttttctttctttctgatctttaataacctgtggtagacattgatactagtcactcatgtatatatctggttctcttcattctaggaacatggtagaactataattaattacctgtcccaggaagttaagcatagccatgtgacttgttttacccaatgaaacatgtgcaaagataaatgcatcttccaggcagagtactttaagaggtggagcacaattatttatcttcctgtatagcagtaat

SEQ ID NO: 341040 - DNA, 595 bp, Homo sapiens
tatgtggctgcactctctagcctgagcaacagagctgtctcaaagaaaaaaaaaagatgatgctaaaatgttacctcttctgtgaagcctttttagccacctaacaagttgcatgtgttaatcaacatatatgtgtattgctattaaaggagacatgcacacacagatgcacctttcaagtatttaagccaggtttccctctctccctacctccttccctcctaccttcttccctccctccctccctcccttccttccttttctctctttatcccttttctccgtctccctcctttctctgtttttatctytttccctttccatcttccttctcctctcccctcttctcttttttctttctttctgatctttaataacctgtggtagacattgatactagtcactcatgtatatatctggttctcttcattctaggaacatggtagaactataattaattacctgtcccaggaagttaagcatagccatgtgacttgttttacccaatgaaacatgtgcaaagataaatgcatcttccaggcagagtactttaagaggtggagcacaattatttatcttcctgtatagcagtaat

SEQ ID NO: 341041 - DNA, 573 bp, Homo sapiens
gtcacataaactgcaaaggcttcaaaagccaaaataccaaaatatatctgcaaggttattggaggttaatttgcataactgggcataccgcctgggcgtgcagtgatttcagtaactttccttcagaaaaacacctgcagatgcttgcctggaggcagaactatggttttaaaggatactgcctcttctctattcttaagtattagtagtaggataatgtatgggtcttttagttgcatggaaaaattacttttgcttsaacacagaaaaacagtaaatcaagaaatacctctcagaacttacaattactctatttttatttcttaaagaacaagaatgtgaataaaatcattatctctagttgaattacctgagataatatgtggaaccatcgagtaccatgcttggcattcacagatatttccaacagattgtaaataattttgttaagtactatttgtttctacatgtttgtttattttttatcattagattgaaaacttttggagtaagcaagtgcatctgaatgacttttttctgagggagctgacatagtaacgcagtaagcgtttg

SEQ ID NO: 341042 - DNA, 602 bp, Homo sapiens
ccattgtcagtgttcacatattggctataatgtagyttggccatagtaggtgtgtggtgttctctcactgttgtctgaatatggatttccctgatgacatacgatacggagcatcttttcttgtgcttatttgccatctatatatcttctttgctgaggggtctatgcaagtatttgacctatttttttaaacatacatagttttaacatgcaaaacagcaatcacacgccaaggagttgaaaacatgtccgtgcaaaaaccttcacacaaatatttatagtagctttattcataattaccaaaacatgaaagtaaccaacttgtccttcaataggtgaatggataaactgtgatacatctagataagagaaaattactcagtgctaaaaagaaatgagccatcaggccatgaaaagacatggaagaaccttgaaggcatattactaagttaaagatgccagtgtgaaaggctacacaatgtatgattccaaccacgtgtatatgaaattctggaataggcaaaactgtggcagcaataaagagatcagtggttgccagggcttgagggaaggagggagggatgaataggcagaacaaggag

SEQ ID NO: 341043 - DNA, 592 bp, Homo sapiens
gggaaaatgtggcatatccactataatggtggacacatgtcattattcattcgtccaaactgatagattataagacaccaagagtgaaccttaatgaaaactatagrttttcagtggtaatgatgtgtctgtgtaggttcatcagttgtaacaaatgtaccacctgtggtggggagtgttggtaactggggagactgtacatgtttttgtggggagaggatagatataggaattctttttacctttctcttgaacttgccatgaacctaaagctgctctaaaaaatgttttctaaaaaggtattcttgacaaattttcctaccagagaaaaaaagacaaatgaaaataaaacccacagatcctattcccagctttaaaacatgtgatgtaaaaattattacctaacctaacaactcagctatagattttcacctctcacagtaaatgcatccaaaggaaataaactgtgaaaacctcaaaatcttcaaggttgtttttgttctatgaaaaataacttacctagtactagttattttatagggctgcttttgaaattcattagaattcaaaaaaaatctgtaagagtttagta

SEQ ID NO: 341044 - DNA, 558 bp, Homo sapiens
tttagaaagactgcaggactattttttcttctatttggcttttggggataaaatttttctctttaacatgaaacaaaatgtcaacaaaatccatcaggtatcaggtatcacccaatttttactagtgagtactaaactaaccctttcttcgggcaatttgagattgtggaaaaaaaatcttatatgaaataatatatatatctcataatcttagacttgacgtttaggaagttgatataaggaaattgttaaattttgacagatttgttgaccttgattgcagcgttgcatctaacagaggcgattgtgaacaagctagattgagctgcttrccaaagcacctcctcccttgtgccgcatttgccaaatgcactgggcttttcacttgagtttgtcaagctcctccctcttccaaaagagtctcatgggctcctgtacatcattcatatgtcaccttaaatgaggctactctgtgtttttctatttcataagtttatcatcactagttatatgtatgtgtggtcaatttatttatatcttatttgtatttatacgttg

SEQ ID NO: 341045 - DNA, 536 bp, Homo sapiens
gtctttttcccactgcttgtttttgtcagcttagttgaagatcagatggtcataggtgtgtggccttatttctgggctctctattatgttccattggtttatatgtctgtttttgtaccagtgtcatgctgtttgggttactgtagctgtgtagtatagtttcaatttgggtaacgtgatgcctccagctttgttttttatttatttattttgcttattaattattaactgtgcccaacccatttcttcatggttgattcagaaaaggagtatctagcttttcagtgtccayggtgagaggcagcccctgcctagcattaagactcacataaaatgtggggaatgttccaatatgagaaggatattcatttgttggtcagataaacagacaaaagacaaatactcactaaactgcatttagataaaattgggaagacagaatagatgacagtggttaatgacataggttttggcactggattgatctaagtgtgaattttggatctcctactttctaaatatataacctccaacat

SEQ ID NO: 341046 - DNA, 592 bp, Homo sapiens
agactttgtgtttttgacaatggcaatctgggttcaattcttggcttctggaataaatcctttctgatttgttatttgttaactttgctattaatcaaatggttttttgttttgtttccccccatggrtagcttttgatttcatgtcttggattttcctttctctaaactaccctcagggagatcctaaacattgtaaaaataataataaaataaaaaataaactgcttactatctatttgaaacatcttatgcatccatggttaatttatgaccttagttaaaacttattaatttcatgtgggaagttacttgtggtagaataaaaaagccagaaatattggctgtatgggctagaatctggtaataagagatttgaacagtttttttttttaaggaaaagtagctctatggttaaaatatcagtaataattataattgttatgtaaaattattgtgtgccacagaggtaacacattttcttgtcaattgtctttaacagtgactgtcctaagatatttcatgatccatagacaattgtcttatttcaatcctcttttattggtgatttataatcagctataaaatgactt

SEQ ID NO: 341047 - DNA, 592 bp, Homo sapiens
agactttgtgtttttgacaatggcaatctgggttcaattcttggcttctggaataaatcctttctgatttgttatttgttaactttgctattaatcaaatggttttttgttttgtttccccccatggatagcttttgatttcatgtcttggattttcctttctctaaactaccctcagggagatcctaaacattgtaaaaataataataaaataaaaaataaactgcttacyatctatttgaaacatcttatgcatccatggttaatttatgaccttagttaaaacttattaatttcatgtgggaagttacttgtggtagaataaaaaagccagaaatattggctgtatgggctagaatctggtaataagagatttgaacagtttttttttttaaggaaaagtagctctatggttaaaatatcagtaataattataattgttatgtaaaattattgtgtgccacagaggtaacacattttcttgtcaattgtctttaacagtgactgtcctaagatatttcatgatccatagacaattgtcttatttcaatcctcttttattggtgatttataatcagctataaaatgactt

SEQ ID NO: 341048 - DNA, 591 bp, Homo sapiens
aacttgacttttatagccaataaaagccccttgggaaaactggcctcataccttgcatacatagtccctgtatagggttcctgatttatggtaagtaaagaatgtcactttctrataggcccagtagtcctaagttatctttgggcctcaaaaggaaagaaatttacccaactcataggcatttgggggtacaaacccatggtttggctcagctttaaaaaagtcttatctcagattccttatgaaacagagttccatcaaagacaatttaaaaagcgcatgtgaaaaataattattcttgctatgctttatcaaataatcaggctgaatagagtaagactaaagtttatttggtaaacaagtcagttctatcatgatttgtttttgataaaaatggggactggagagagaaaaattatgcttcaaaagaaaaattatagtacacctgttgttagctgttcttgagtgttcttgagtttttctgcagtttgaactaaatcctaaattctttgtgtgctgcaagtccccaagctaatgctttcagatctttacttttaaaactgggaattgcactgtttatcctagtagtca

SEQ ID NO: 341049 - DNA, 621 bp, Homo sapiens
tatatctggaaagtctaaatacttgaggtatgtttatgttggttccataatttggtggtcaaaagaaaacctttatgaagtactccttcagtagacggctacatttcattttatgagacaaactccattataaaagaaatttggataatctaatacaagaatgtgtaaagcaatcataagaacatttgtattcatatctttttaccgtttataatatccccttacatcctgaaaagttatttcttccccataatgtacctttccttttctagacacagtttcttcacagctgtacaragcttttcttccttctatttgtgaattaagtagaaacatacctaatctcctttattacatcacaaaatctttgatttaaaacctcatgttttcccaagtgaaccactgttgcaattgagcagcagtcttaaaacataaactcatacttttgggggaaataaatgaacgagacttttttgatgctatttttctctttaacacactctttaaaaaaaagtaaaagaaagcaagctgtggtttcagtcctgtctgtacaatccacatacccaaagacctaactgaaatgacatgagcactattcctgacaacccccagtatctcctg

SEQ ID NO: 341050 - DNA, 502 bp, Homo sapiens
tgctggcctttccagtatcagctcctataatctgcccctttcacttagttaatgtccattgagtatctgctatgtgctaaatgcaaacacagcagatgacaggaagccttgacccttccgtgttggatataccatctcagactcattgacaatatccagttccccaaacacatcatgcccttctaggcgccctctcttcagttgcttagagacaggagattcatccttcatgggacagaaagtgaatgttctttttaagaggtaaagcagctgtgtaaatgctagagattgaagcttggcctccaatgccaaagacttgctgttacctctttctagataaacagaatcaagtcattgcctcttccttctcagcgcccctcaccccaccacacacataaacactctcattgataagatcgtggactytggagtcagaagccccctaaggttgctgtgagtttgaacaactttatttaacattcagagtctcaatttttattat

SEQ ID NO: 341051 - DNA, 648 bp, Homo sapiens
atagtatttatttcatcgtgatttcataaaagtttttaaaagacacctaaagtcacatgactcaagaatgctatagattaaaactgaagatcagaataaatgtacctgctataatttgtatgtttgttcccgccaactcttatgttgaaatttgatcccttattttgcaggtggagcttaacaggagatgggtgggtcatggggatggatmcctcaagaatagattagtgcccttcctggaggaaagaggcctggggtgggggagggagggatggctgcaagtgagttctcactctactgttaccatgagagctggttgttaaaaagagcctggcacttcccctctcactctctctgcttcctttttcaatgtgtgatttctgagcaccctgagtctctttcaccttctgctatgagaggaaacagcctgaggctttcaccagatgcccagccttccaaccagcagaactatgacccaaataaacctctttttattaattacccagcctcaggtattcctatacagcaacactaaatggactaagatggtaccccttaatctgcatcacacttcttggccaatagctcatgacaaggaaaagaaaaatatgatcataatagaagctggggggatattaaaaataaatc

SEQ ID NO: 341052 - DNA, 405 bp, Homo sapiens
tgtgttagaataattttaagcaggagaaggactgctaaaaatcactaaatccctggatttggaatgctaggcgtagaagactgggaaaaaaaaaaaaacaagaccagacaaaggagagaaaacattaacagcctcaatacctgtgtctccatttcaccctcactgtggtcatagtcagcctatcatacatgaactttttcattcttttggaggaatatagcaaagaaggatayagtggagctacagcagcttttatgtcaatggccaaaggtaatgttgaatatgaatttaatctacaaaggcagttacataactggagtaaaatgtgagccacattcctttcttctatagttcaccagcaaacacaagtttggaagctggtggttcttctggacatacaagtct

SEQ ID NO: 341053 - DNA, 616 bp, Homo sapiens
tttatgctaagctttatgtgagaaataattttcagaaagatgcaaatctctctgtggcacaatattaattagtgatgttaatagcaatagacatttatgaaaatggggatagaaatgtgtcatttgcaagcttgttcacagattctcacagagcattttactttgaagatcattgttaatttctgattatttgcccccaagaggcatccagtgccaaaacacaagatgtgaatgaaaaaatactattaccaataaccaatataagaaagaaatatgtcatatatcatttttaaccttttttaccacaaaattaataatatatttcttagttttgtcaagaaaacctttgaaccaaatttaattctaatattccttagatattgtgggatataaaagtattaatgagtatgttacatatttgaaaaaaataactattaactcttgcatcaaatgtttattggtcatcctctgcatgaggcaatrtcctagacactgagctagagatatggataaatatattttgaaacacattttagcaatagtacctataaatagatctttaatgtataaacatagggtacttctaaaatctgtatgcaaaagtaggtaaaaaagt

SEQ ID NO: 341054 - DNA, 536 bp, Homo sapiens
taataatatatttcttagttttgtcaagaaaacctttgaaccaaatttaattctaatattccttagatattgtgggatataaaagtattaatgagtatgttacatatttgaaaaaaataactattaactcttgcatcaaatgtttattggtcatcctctgcatgaggcaatgtcctagacactgagctagagatatggataaatatattttgaaacacattttagcaatagtacctataaatagatctttaatgtataaacatagggtacttctaaaatctgtatgcaaaagtaggtaaaaaagtaattaaacttttacatttagactakttaatatatttttggaatgactttggccaaaagtaaatgaattatagttttagcttgtttataaagccaatgaaatcatttcctatttaaaaaatctttggtaatactaaaatattaatcatctcttaaaccaatcagtcacatcagatagaaagccttcccacagatacacaaacatgtgcccattggctatggaaaagcactcc

SEQ ID NO: 341055 - DNA, 514 bp, Homo sapiens
aagccttcccacagatacacaaacatgtgcccattggctatggaaaagcactccagcaatctaacacatttctctcaaatgcgtatatttttgtaattaggaaaataattaaattcacgtagtgaatttctcccagcttgctcaaacacttcatggctcattgatttagatactttgagcatgttaatgacaagtgacacccctagacatgtgaaatgtgatgtaactcctccaggacatcatttactgcacctttgtggtctaaaagataaaaaaggtatgctgagatgaatcacttttatgaatctgtaatgtattattaattcatgtatttttcacagttatattgaatagaatatataaataaaatacaaccatattccaatcacggcaaactgtatacaacaacrcaagagaattaaatggtcagcaggtagtactaactaagctatattttaaagttctccccaagtaacgtgtcatgtggtatggcagccagggacctatgctggtc

SEQ ID NO: 341056 - DNA, 577 bp, Homo sapiens
tcttagccttcacggaattgaagagagttagggccttgctctggattaggttttggtttaagggaatgtgttggctgttttaatcttctatccaaaccactaaaagtgtttctgtatcaacaataaggctgtttcccccttttaatcatcatgtgttcactggagtaccacttttaatttcattcaagagcttttcctttgcatttacaacttgactaactggcacaaaattctagctttcaggctgtctcaggtttcaacataacttccttgttaagcttaatcatttctagcttttgattaaagtgggagacgtgcaacttttcctttcacttgaacacttagtggccattatagggttgttacttaawctaatttcaatactgttgtgtcttggacaataggaaggcctgagaagagggagtgggatgtgggaatagccagtcagtggagaagtcagaacagatacaacatttatcaattaagcttatcatcttataagggcacaatctgtggtgccaaaacaattataatagtaatgagaggtgacaacgtgctagcagcccttgctcactct

SEQ ID NO: 341057 - DNA, 546 bp, Homo sapiens
tcttaatgcctttgtgttcttatagaaaaccttgcttcccttaaaaagttctttgctaatatatttttataaatattttgcttgtaatttcaatatctatgattgatctgaaattatattctagaactttcttacaatgattctgagaaatcctatttaaacgtggaaatatgyttaaatacagcatttgaaacttctgtttaaatgtgcgttcaatcacattaaaggtcaaattcaagacccttgttgaaatgtctgctgttttctacaaacagcaaacacttcatctactaattgggcaatttttttattattattttccatgagccaaatgaagatgcatggacccactgatcctcatcatcatataacattctattactcaaaatatctgtaagacagctggaaaggagaagaggggaatctagaacagtattttccaacagaaatacaatgtaagtcacataagtaattttaaattaactagtagccatatcaaacaggaaaaaaaagaaagaaaaatgactttaataatatatttgattt

SEQ ID NO: 341058 - DNA, 591 bp, Homo sapiens
aagtgctcagtagtagccgcatgcgactagtgactaccacattgtacagtccagctttataatgatagaacagaataattgtaactgagtcatagtgcaatggaatttgttagattaatatctgaattaatttaaagctatatagctataacaaacaaaaaatttgactatacatcttaagactggatccaacatggttttattgatctgtttgcagcactgaactgggctctcaatatatgtttataacaaaamcttcagtgttacaccccttcctgatcttcacttctgtgttatatcacacttcactgcatcttctgtagactggggccatgtatcccactgataaacatccattattctcttacaggctagaatgtattttctcatatgagaacagtggaatgaggcctagaatttgcatcagttgtaaattaaagagatggatccagttaaagtgcttctgcctagcatataatgagctaatcacagagctcttttaatggatcaagaaatgctcattgtttgtacctaaagacttctaggagctgcaagataaatgttaaaaacaatgtgtataaaatgtttcaa

SEQ ID NO: 341059 - DNA, 623 bp, Homo sapiens
ccattcgtttatgtgcctatgtgttggtcttccttgggatactctgagcttcacataggaagggactgtaggtgtctcactcatcttagtggctctcgtgtctgacgtgtcaatcagtgttttagaaatggagggatgagttcagggaaagagagagaaayaatgttgaaggttatttggaatcattaagcccagtgattcctatatttcttactttcataactggagggaactactgtaggtttgtcaaccttttattttgccaagtagggtccctcagaaaaacaataacaccattttcatcttctacacatgctattattacccttgcataaaagaaaaaggacatttgaacaccaaaaatagtaggaaatatattatctcaaaatgaagatcatcctttaaattgaatagctttagctttatgaaaacaatgctacattgctttatggttttcatcttctcaaggacaagggaaatgttctctgacaagggtggctgtatggattgacatgtggaaactggtccctcactttacaaattgagagaaaaccagtgaggctctgagcagatacaggatctgactgtagtcccccaggagtcaaataacaggggtgggacta

SEQ ID NO: 341060 - DNA, 560 bp, Homo sapiens
agttacggagctcttcttattagcaaggaagatgcttgccagttccttggggaagatgcagtgtgtttcagtcttagttttttccaggtactaaatccttattgaaattttgcccttgtgctttcaggaaaggtcatatgtgcaataaacaatgtccttgttttacaacaaatgtggaagtgaatccccagtgactcttccttctaggatccagggggcatttaccttggagctaacaggaagtattttgcttggtgtcattattactagtaggrggtggagggaaggcctcagatggacttttccttctaaagaggtgaactctattcatttagagtatctcagtagccttcacagggacctggaggtgactgggattgttagtacattttttgcaagaagaggtcataatgtacctggccttgaatcacaaagttctggtcagctcctttttgtgagatacgctcaagggagaaattaaggaaatatttcaccacccattaggctgaaaagctgcattatggaaaaggacaatgaaccagaaatgactaacagcagat

SEQ ID NO: 341061 - DNA, 575 bp, Homo sapiens
gaacataatgaaataccatctttaatgtgctgaaagggaaaaaaaaacttagaattatatatccagaaaaaaatccataaacatggggaaacaaagatatttcaaataaatgaaaattgagaaaactcactgccagtagacctgtttcacaagaaatacaaaaagaagttcttyaggctgaagggagattacactgaaggatactcagatttacaggaaggaatgaagaacattagaaatagtacacatgtaaatcgttataaaggaaaaaactttatttccttaatctaaaaaagatataattatttggagcaaaaattataacacggtattatggagctcataatgtatatagcatgtgtgtgtgtgtgtgtgtgtatgtctatatatatataaaataaaattaacacaaagcaaaggttcttactttgatgtgaagtgacaaaatatctatgataaggtaaggactcatattaaaattgctagaggaaatattacaaatgcaaagaggttttgctaatgcaaagaggttttgataaaaagtaatagagaaaaggttctttaaaaaatgttta

SEQ ID NO: 341062 - DNA, 540 bp, Homo sapiens
tatgagtattaattgaagcgagtccagtgtctgtgacccagttggttgaggtcagttgacaaagcagaggctcagaggagtctgatggtctggggcagtgggcagtgcgatgccatggagcaggctgggagacacatctttggtggggccattccaggcacccccccaccccacaaacacacacacttccccactgaccgtcatcttctccagctctgggtaagtgtacctcgggcctcagctccctcagatcctatgatggcctgcctaggggctcttcccacagccaggacctagaagattagggtagggatgagggtgggtgggaatttcgcttccatagaatatggccttggagctgacatgggattcttttctctcctcgacttgatatcaaagtggttgctctgtcagctgttttgacagcatctcacagccctagctacctacaagtgcrcatcttagtgacagaatcaggtgggcttgaagatacaatgccttctcttcccttggaggtcctgttgaaaatggctcttttga

SEQ ID NO: 341063 - DNA, 534 bp, Homo sapiens
ctgtctgttgggccacagggagcctcagagggttttatgaggaggaagctgacatggtgatcagatccatgttccgaaaaacagcagtgrcttgggcataaggctggaggcagggaggccaaataagaggctttcgtagtaattgaggtaggagaggatgaaggtgagagctgagagtgaccattcccagggaaaagtaggggaatttggccctctacagcgaaggtcagagcagatgggttggggcttggttctggaggccagttgtttccccgagtgtgcctgacttctgcttctgagtagcgaggggacccgcagataaaatccagcaaagtgccttaggctggtcccttggcagggaaagggaactgagaaggagccagggagccagctggtggggtccacactgttccctggagagggcgtgggcccaggttcagtcctgcttctggcaccagatagcggtgagatctgagcaggaggctgtccctcttggagttacccattttctcatctgcagaacgggggcaatgc

SEQ ID NO: 341064 - DNA, 573 bp, Homo sapiens
ggtaggattacaggtgaattccattttttattttacctgtttttccccaattatctattataaatctaaattatttattcattaaaaagttacccttttaaggctgggctyggtggctcacacctgtaatcccagcactttgggaggccgaggtaggtggatcaccttaggttgggagttcaagaccagcctgaccaacatggagaaaccccatctctactaaaaatgcaaaattagctgggtgtggtggcccgtgcctgtaatcccagctactccggaggctgaggcaggagaatcacttggatccgggaggcggaggttgtggtgagccgagatcacgccattgcactccagcctgagcaacaagagtgaaactctgtctcaaaaaaataaaattacccttttaaaagcaaaaaggagagaacaaaatgtgatgagacacagttaaaaatttttccttcaataaaactgaaaaaaattatttttcatcaaagtagaaagtatgaacaaaaggttaagtaatgtccacgactgaagacaaatttgtttccaatcaataatagttcttaaata

SEQ ID NO: 341065 - DNA, 573 bp, Homo sapiens
ggtaggattacaggtgaattccattttttattttacctgtttttccccaattatctattataaatctaaattatttattcattaaaaagttacccttttaaggctgggctcggtggctcacacctgtaatcccagcactttgggaggccgaggtaggtggatcaccttaggttgggagttcaagaccagcctgaccaacatggagaaaccccatctctactaaaaatgcaaaattagctrggtgtggtggcccgtgcctgtaatcccagctactccggaggctgaggcaggagaatcacttggatccgggaggcggaggttgtggtgagccgagatcacgccattgcactccagcctgagcaacaagagtgaaactctgtctcaaaaaaataaaattacccttttaaaagcaaaaaggagagaacaaaatgtgatgagacacagttaaaaatttttccttcaataaaactgaaaaaaattatttttcatcaaagtagaaagtatgaacaaaaggttaagtaatgtccacgactgaagacaaatttgtttccaatcaataatagttcttaaata

SEQ ID NO: 341066 - DNA, 369 bp, Homo sapiens
gtggtcaggctagtctcaaactcctgacctcaggtgatccgcccgcctcagcctcccaaagtgctgggatgacaggcatgagcgactacccccggcctaccactctactttcaagcgtctcctctgactcttctttcatctccatagactcaagtctagccaacttagtgaggttctatcytcagtgtctcctttctttttgccctatactaccttctcaagtaagcccacccattcttatggtttcaaatagcacctctatgctgataatgactaagtatttgtcctctactctgactcatcttctgaattccaaaaccaaattttaaactaccaactttaacatcactacaggaatactcagtcaac

SEQ ID NO: 341067 - DNA, 571 bp, Homo sapiens
agaaggaatcactgaaatattaaaacccggctgggcgctgtttccagaggtgctattgttttgacttatgtattataatttctttacttttctttatagttttgccacctatgaaaatagtcytaaacaatattttattttgaaaaaatagtttaccaagctaattgagttaggaaagggcaatattatcatagatagatgaaggcttccaggagaagatagctgaatagtcaggttcactgagtgtcatgagcttgtcttcaagtagtcagtgagcaatgccatgagtttttagaaatgtaaggcacatcctgctctggtatctggcagtgctacagtatggtatgggctgggtattgcatatttgttcaggaggtatatggtcacatgaagaacgctgttctgtatcttttattttaagcccatggtaatcttcctccaacacatagtagatcaaagcagaacacatctggggggtgaaatgtgttcttagctgatccaggcagcagggcaggtggagtgagtaggtacatgaaggtaagccaaatgtcaataaaaatctagaacagac

SEQ ID NO: 341068 - DNA, 577 bp, Homo sapiens
caggaggctgaggtgggaggatctcttgaggccagagtttggacaccaacctgggtgacagagcaaaatcctgtctcctaggaaaaatgaataaaactgacatagtatttgcatataaactctgcatattctcttgtatgctttaaatcatctccacatcactcatactacctaatacaatgtggatgctatgtaaatagttgttatactgtgtattgtttagggaataatgaccagaaaaaagtctgtacatgttcatttacagacataatttttttttgagtagtttctgtacctcattgattgaatccatgtattcagaactcatggatatggagggccgactgtatattcagagttgtgcagccatcactatactcaattttacagcattttaatcatccccyaaaagagccccatatccattaacagtcgcttttcattttccctcagcactcccagtcctatgcaaccactgatcgactttctatcattatagattagactgttgtggacattttatgtaaatgaaaccataaatgcggtcttttgtgactggcttctttcgtttagcata

SEQ ID NO: 341069 - DNA, 607 bp, Homo sapiens
gggtctgctctgcctctctccatcttctttcaagcaatgggctagccagagtacattcttctcatggaaagggtagaagcttatgacagtgataaaaaatatatgagtcatcttttgccataagcattattgttttatcctgtattttgttagttaaatcaagttgcatgtttatgcccatagtcacagattagagaagcacctgctgccaaagatgggaccatagcaagcawatacatcagggagggatgaagaatctggtcaatgtttccatctatcccaaattccatgcacttttatacctctgtttctttgcatttgctgtttcatttgccccaataatgtttcattgctacctttgcaatcatcattcaatatgcagttaaataacatctgtgaaactactcttttcaagtaggcagactaagtttctccttttactgtgctaccacagatagcactttatacattcttctttgacagatgttttagtaaatcattttaaatgtagaaaagcttttattatccatgtacctgactcattcacagagaaaacaggggatcctttaggttagggactagatagtccctttgttgaacccatggt

SEQ ID NO: 341070 - DNA, 607 bp, Homo sapiens
gggtctgctctgcctctctccatcttctttcaagcaatgggctagccagagtacattcttctcatggaaagggtagaagcttatgacagtgataaaaaatatatgagtcatcttttgccataagcattattgttttatcctgtattttgttagttaaatcaagttgcatgtttatgcccatagtcacagattagagaagcacctgctgccaaagatgggaccatagcaagcatatacatcagggagggatgaagaatctggtcaatgtttccatctatcccaaattccatgcacttttatacctctgtttctttgcatttgctgtttcatttgccccaataatgtttcattgctacctttgcaatcatcattcaatatgcagttaaataacatctgtgaaactacycttttcaagtaggcagactaagtttctccttttactgtgctaccacagatagcactttatacattcttctttgacagatgttttagtaaatcattttaaatgtagaaaagcttttattatccatgtacctgactcattcacagagaaaacaggggatcctttaggttagggactagatagtccctttgttgaacccatggt

SEQ ID NO: 341071 - DNA, 593 bp, Homo sapiens
gatgtggtgcaattacatttctcagtgagataatcaacctggcctataattaaggtgaatagctagttatattaatgaaagaaaaacactattaaattagtatgctacgtacttatgtacagtgggttttattttattattttaagacataatttagcctcatgactcaaaaactccacactcacatgaaagtgtttttttaaaaagtaaccaagcttccagagactctcattagcagtactggcactaaggagtagrtgaaatattttaagattattcgttatgtttacatcattttattctattgaattttctatgaaggtaacaaaaatttctctctattttcaagttttagataataaaacaacattttcattaaataagtagttttacttgaatactgaatctgtgcctacaactaaatagattatagtcaggttgtaaatctatcagtaagttaaatcaataagaaccatgaaattactggatttatggttctagctaatttataatggtacacaggtgacttattgctatagtaaggtattatatttacttcattataggatgaatacattacaattagttattga

SEQ ID NO: 341072 - DNA, 562 bp, Homo sapiens
cagcagatgtggtgtctaggtgagagcctgcttctttgttaatcactgtctatgtctttcctcctgtggtagaaggggcaaggcagtcctctgggcatcatttatatgggaagtaatcccattcacaaagtctcccctcttatcacctaatcaactctcaaaggcaccacctcctaatgtcatcacattggggactgggtttcaaaacatacattttatggggacacraacatttcgaccatagaatatggggtgaataagactatcacagtgatcagtattcttgaagtttcatcaaacctcacagacaattattttcccacaaaataaaagacattgctttaaataaaccatgcagttttatatatattacttcacatgtattgtgattgagtaacttgaaagggaaaatgcccttgtaatagaaaaaaagttggctattacttcttgacacgtatgatttccataatgatctactctggatagatcatttttactcaacctttctacaactatacttgctatgcagacttagttttagttagccaagactttacaaagc

SEQ ID NO: 341073 - DNA, 562 bp, Homo sapiens
cagcagatgtggtgtctaggtgagagcctgcttctttgttaatcactgtctatgtctttcctcctgtggtagaaggggcaaggcagtcctctgggcatcatttatatgggaagtaatcccattcacaaagtctcccctcttatcacctaatcaactctcaaaggcaccacctcctaatgtcatcacattggggactgggtttcaaaacatacattttatggggacacgaacatttcgaccatagaatatggggtgartaagactatcacagtgatcagtattcttgaagtttcatcaaacctcacagacaattattttcccacaaaataaaagacattgctttaaataaaccatgcagttttatatatattacttcacatgtattgtgattgagtaacttgaaagggaaaatgcccttgtaatagaaaaaaagttggctattacttcttgacacgtatgatttccataatgatctactctggatagatcatttttactcaacctttctacaactatacttgctatgcagacttagttttagttagccaagactttacaaagc

SEQ ID NO: 341074 - DNA, 544 bp, Homo sapiens
cctgttcctcttctgctatcctcyttctggttggcctccttactgttccttcatacatgccaagcatgatcacactataggatatttgctctttgccctttcagctgcctgggatgtgcttctctccagtatccacatatctcaattccctcttttccttcaagttttaaagtatcatcagtgatgccttccctggccatctctacctgagtagagtttccattgctcttcctggttcactttttattcttagaaaacatcaatgtctggtacagtatatacttcttatgtatcttgcttcctgtcaactgaagaatgatgaggttcataaatttggaaaggagagctttatttctcagaaagggttgcagcctgcagggtggccatcaggctagaagccagaaacaggtacttctagggtgggaagaataatataggaatttatgctgaacagagaaggtgaatatatatatatatatacacatacatacatacatatatatttaataagctataagaggagttatgaacatttatgagaggt

SEQ ID NO: 341075 - DNA, 544 bp, Homo sapiens
ctaatggtggttagcaggggaggaggtataaagagacatgtccagcttcccatctggtcatggccgggaactcagtttgcaaggtttgtctgggtcctcttggctaacagggggcccattcatttagttggcagcttaggattttatttttatttctcatttcttatgcataatatgtttttttttggtagctgtagactagacatggaaaacaaaaattgtcatatagaaagaactcaataaatatttatttgttgaaagatccaaagaatgarccattggccaggtgtggtgactcacgcctgtaatcctagcactttgggagggcaaggcgggcatatcgcctgaggtcaggagtttgagaccagcctggccaacatggtgaaaccccttctctactaaaaatacaaaaattagccaggtgtggtggcaggctcctgtaatcccagctactcgggaagctgaggcaggagaattgcttgaacccgggaggcagaggttgcagtgagccgagatcacgccattgcactccagcctgagggac

SEQ ID NO: 341076 - DNA, 544 bp, Homo sapiens
ctaatggtggttagcaggggaggaggtataaagagacatgtccagcttcccatctggtcatggccgggaactcagtttgcaaggtttgtctgggtcctcttggctaacagggggcccattcatttagttggcagcttaggattttatttttatttctcatttcttatgcataatatgtttttttttggtagctgtagactagacatggaaaacaaaaattgtcatatagaaagaactcaataaatatttatttgttgaaagatccaaagaatgagccattggccaggygtggtgactcacgcctgtaatcctagcactttgggagggcaaggcgggcatatcgcctgaggtcaggagtttgagaccagcctggccaacatggtgaaaccccttctctactaaaaatacaaaaattagccaggtgtggtggcaggctcctgtaatcccagctactcgggaagctgaggcaggagaattgcttgaacccgggaggcagaggttgcagtgagccgagatcacgccattgcactccagcctgagggac

SEQ ID NO: 341077 - DNA, 553 bp, Homo sapiens
cagtggagttatatagtgttagggctctgagatccattgcacagctagctttctagatacttgttcctgcagttgaaatgatcaaaagtatttttgatcagtgctcgcttcrgcagcacatatactaaaattggaataatacagagattagcatggcccctgtgcaaggatgacatgcaaattcgtgaagtgttccattaaaaaaataaatgaaagtatttggatcgttgtatgatatttattttaaaatgcagcaatgttgcaaatgctgcaaactaatttattatgaatcaatgtgtttatgagttgatatatttacacttctattcatatttgaagaaatatcagtgagtagtaatggtctaaaaccatataatatgcttttagagttgctatggtaacttattttcttggaaaatctaatagatgtttggaaacctgccatggttacttatcagctattggagaaatagcactgcatcttgttttttaaaaagatctgcttatttattaactttactgtaaatttccataaattttagcaatatgaact

SEQ ID NO: 341078 - DNA, 559 bp, Homo sapiens
gcaattggagaggcatccattacactctgggaaatgctgctttaactatcaaagcttacttcattatttggtgtgcccactctaggtaccagtattttgacttcagttgtcagttctaatcaacgagttcagaaatataaacatactatttgaatatattgttttaattggaaatttctacattaaaaaatagttaagaatgattggtgattcaaagtagatggagaacaatgtctaatttttgttttgtcaatattatactgtgccaaggtactaagsctgcagtcaaattaaaaacaagccttagtaagaaattaatgaaatctatagctacaagtaagtgaattatttttgctatatgcagtctatttttgtttttctttctagtctttaggctatttgaccagcaatgtgcaagcaattgtctaacacaggcatttgcttcccttttgatttctttgctctatcaagttagatgaaaaatccctcatttttgtaattgtaataatctgtacttaataaaagcatttatcatatattctttatttacttttgtgaa

SEQ ID NO: 341079 - DNA, 592 bp, Homo sapiens
tgctcaactatccaaaaattgaagtattgctttgattctttttcaaaaagccttcttcaacctaacacagaatactgtgtgttaaataaatatgaaatcatcatttatatattaagaataatgttattatttacagtcttacagaggtatgcctcttgtggaaatgtctttgatgaatttctttaaatgagtctatctcaactttaaagcataccaacataccacatggatccctgcttaaccttttgatctgctgcagtcatgttcttgagaggctttaatttattggactgaccaaaatatctctagactgcatttaaatatctacttggcatagatattacraatgatatatatgccagttcagctgtaatgtgtgtctgtcaagttgtctagatttcttgcaacaaatatgtttatttaaatttagatatttttccaaaatgactagtaatactaatagaacatgagaagaaatttatacatgttcttggcatttcccataattattttttctttccctcttctcttagcacccagacatgtataggatccattgaaggactttgaagagtttcaaatggaaagggcc

SEQ ID NO: 341080 - DNA, 632 bp, Homo sapiens
tgggactggttggacagcaggtgcagcccatggagggtgagctgaagcagggtggggagttgcctcacccaggaagggcaaggggtcaggggatttccctttcctagccaagggaagctgtgacagactgtacctgtaaaaacgggacactcctgcccaaatactgcaatttyccaacatcatagcaaccggcagacaaggaaattctctcccatgcctggcttggtgggtcatacccccacagagacttgctcactgctagtgcagcaattgatcaaactgtaaggcaacagcttggctgggggaggggcgtccaccattgctgaggcttgagtaggtaaacaaagcagctgggaagatcaaactgggtggagcccactgcacctcagaaaggcctactgcctctatagactccacctctgtgggcaagacatagctgaacaaaaggcagcagataacttctgcagaatttaacatccctgtctgacagcactgaagagagcagtggttctcccagcacggcgtttgagctctgagaatgaacagactgcatcctcaagtgggtccctgactcccgtgtagctgaactgggagacacttcccagtaggggccgacaaacacctcatacagg

SEQ ID NO: 341081 - DNA, 632 bp, Homo sapiens
tgggactggttggacagcaggtgcagcccatggagggtgagctgaagcagggtggggagttgcctcacccaggaagggcaaggggtcaggggatttccctttcctagccaagggaagctgtgacagactgtacctgtaaaaacgggacactcctgcccaaatactgcaatttcccaacatcatagcaaccggcagacaaggaaattctctcccrtgcctggcttggtgggtcatacccccacagagacttgctcactgctagtgcagcaattgatcaaactgtaaggcaacagcttggctgggggaggggcgtccaccattgctgaggcttgagtaggtaaacaaagcagctgggaagatcaaactgggtggagcccactgcacctcagaaaggcctactgcctctatagactccacctctgtgggcaagacatagctgaacaaaaggcagcagataacttctgcagaatttaacatccctgtctgacagcactgaagagagcagtggttctcccagcacggcgtttgagctctgagaatgaacagactgcatcctcaagtgggtccctgactcccgtgtagctgaactgggagacacttcccagtaggggccgacaaacacctcatacagg

SEQ ID NO: 341082 - DNA, 632 bp, Homo sapiens
tgggactggttggacagcaggtgcagcccatggagggtgagctgaagcagggtggggagttgcctcacccaggaagggcaaggggtcaggggatttccctttcctagccaagggaagctgtgacagactgtacctgtaaaaacgggacactcctgcccaaatactgcaatttcccaacatcatagcaaccggcagacaaggaaattctctcccatgcctggcttggtgggtcatacccccacagagacttgctyactgctagtgcagcaattgatcaaactgtaaggcaacagcttggctgggggaggggcgtccaccattgctgaggcttgagtaggtaaacaaagcagctgggaagatcaaactgggtggagcccactgcacctcagaaaggcctactgcctctatagactccacctctgtgggcaagacatagctgaacaaaaggcagcagataacttctgcagaatttaacatccctgtctgacagcactgaagagagcagtggttctcccagcacggcgtttgagctctgagaatgaacagactgcatcctcaagtgggtccctgactcccgtgtagctgaactgggagacacttcccagtaggggccgacaaacacctcatacagg

SEQ ID NO: 341083 - DNA, 577 bp, Homo sapiens
ggcactatcagtgaactgtgagacagaaataaatcaatatatatataaggatatatgaacataggaggaaacaaaaaatatataataaaaacatactctaaaaataagacataaacatgtaaatgttcggattacttttaaagaaagatatttcattrtgtaaaagtatttcaaaacatggaaacactgaaaaattaatcaactatttttcttttctaaaagctgatcttgctgcttttattttttatttttacttttaacttttaagttcagggtacaggtgaaggtttgtttcataagtaaacttgtgtcatggggatgtgttgtacagataattttatcatccagatattaaatttagtacccattatttatttttcctgaccttctccctcctcctatcctccacccttcagtaggccccattgggtgctgctcccctctatgtgtccacgagttctcatcatttagctgtcatttataagtgagaacatgacatgctgtatttggttttatgtttctgcattagtttgcttaggttaatggcctccagctctatccatgcccttgcaaagga
